(19) United States
(12) Patent Application Publication
(10) Pub. No.: US 2026/0055430 A1
(43) Pub. Date: Feb. 26, 2026

(54) LENTIVIRUS WITH ALTERED INTEGRASE ACTIVITY

(71) Applicant: Flagship Pioneering Innovations VI, LLC, Cambridge, MA (US)

(72) Inventors: Jacob Rosenblum Rubens, Cambridge, MA (US); Robert James Citorik, Somerville, MA (US); Yanfang Fu, Arlington, MA (US); Cecilia Giovanna Silvia Cotta-Ramusino, Cambridge, MA (US); William Edward Salomon, West Roxbury, MA (US); Zi Jun Wang, Arlington, MA (US)

(21) Appl. No.: 18/280,749

(22) PCT Filed: Mar. 8, 2022
(86) PCT No.: PCT/US2022/071018

§ 371 Date: Sep. 7, 2023

Related U.S. Application Data
(60) Provisional application No. 63/158,187, filed on Mar. 8, 2021.
(60) Provisional application No. 63/193,546, filed on May 26, 2021.

(51) Int. Cl. C12N 15/90; C12N 9/12; C12N 9/22

(52) U.S. Cl. CPC C12N 15/90; C12N 9/1276; C12N 9/22; C12N 2740/16222; C12Y 207/07049; C12Y 301/22

(57) ABSTRACT

Among other things, provided herein are systems that replace the natural random integration activity of a retrovirus with site-specific integration machinery. This approach allows for a more precise targeting of a gene of interest into a human genome, e.g., for therapeutic purposes. The system may include integration-deficient retrovirus (e.g., lentivirus) (IDLV), in which the natural integration activity has been reduced (e.g., by mutation to the viral integrase polypeptide). Instead, the system may comprise a site-specific recombinase (e.g., a serine recombinase, e.g., a serine integrase) capable of directing insertion of a template DNA, or portion thereof, into a desired site in the human genome.

### CROSS-REFERENCE TO RELATED APPLICATIONS

[0001] This application is a U.S. National Phase Application under 35 U.S.C. § 371 of International Application No. PCT Utility Application No. PCT/US2022/071018, filed Mar. 8, 2022, which claims the benefit of U.S. Provisional Application Nos. 63/158,187, filed Mar. 8, 2021; and 63/193,546, filed May 26, 2021. The contents of the aforementioned applications are hereby incorporated by reference in their entirety.

### SEQUENCE LISTING

[0002] The instant application contains a Sequence Listing which has been submitted electronically in ASCII format and is hereby incorporated by reference in its entirety. Said ASCII copy, created on May 25, 2021, is named V2065-7018WO_SL.txt and is 72,577,024 bytes in size.

### SUMMARY OF THE INVENTION

[0003] This disclosure relates to novel compositions, systems and methods for altering a genome at one or more locations in a host cell, tissue or subject, in vivo, in vitro, or ex vivo. In particular, the invention features compositions, systems and methods for the introduction of exogenous genetic elements into a target cell genome using a recombinase polypeptide (e.g., a serine recombinase, e.g., as described herein), wherein the exogenous genetic element is introduced into the target cell by an integration-deficient retroviral vector. In some embodiments, a recombinase as described herein is an integrase. In some embodiments, a serine recombinase as described herein is a serine integrase.

### ENUMERATED EMBODIMENTS

[0004] 1. A system for modifying DNA comprising:
[0005] a) a template RNA comprising a DNA recognition sequence, or a DNA molecule encoding the template RNA;
[0006] b) a retroviral (e.g., lentiviral) structural polypeptide domain (e.g., gag), or a nucleic acid molecule encoding the retroviral (e.g., lentiviral) structural polypeptide domain;
[0007] c) a retroviral (e.g., lentiviral) reverse transcriptase polypeptide domain (e.g., pol or an polypeptide comprising an amino acid sequence as listed in Table 11 or 12, or an amino acid sequence having at least 70%, 75%, 80%, 85%, 90%, 95%, 96%, 97%, 98%, or 99% identity thereto) capable of reverse transcribing the template RNA, thereby producing a template DNA, or a nucleic acid molecule encoding the retroviral (e.g., lentiviral) reverse transcriptase polypeptide domain;
[0008] wherein b) and c) together are integration-deficient;
[0009] d) a serine recombinase (e.g., serine integrase) polypeptide domain comprising an amino acid sequence of any of SEQ ID NOs: 1-12,677 (e.g., SEQ ID NOs: 1-11,432), or an amino acid sequence having at least 70%, 75%, 80%, 85%, 90%, 95%, 96%, 97%, 98%, or 99% identity thereto, wherein the serine recombinase polypeptide domain binds the DNA recognition sequence and is capable of integrating the template DNA into the target DNA; or a nucleic acid molecule encoding the serine recombinase polypeptide domain, and
[0010] e) a retroviral (e.g., lentiviral) envelope polypeptide domain (e.g., env), or a nucleic acid molecule encoding the retroviral (e.g., lentiviral) envelope polypeptide domain;
[0011] wherein b), c), d), and e) are optionally part of the same polypeptide.

[0012] 2. A system for modifying DNA comprising:
[0013] a) a template RNA comprising a DNA recognition sequence that is recognized by a serine recombinase (e.g., serine integrase) polypeptide domain that comprises an amino acid sequence of any of SEQ ID NOs: 1-12,677 (e.g., SEQ ID NOs: 1-11,432), or an amino acid sequence having at least 70%, 75%, 80%, 85%, 90%, 95%, 96%, 97%, 98%, or 99% identity thereto, or a DNA molecule encoding the template RNA;
[0014] b) a retroviral (e.g., lentiviral) structural polypeptide domain (e.g., gag);
[0015] c) a retroviral (e.g., lentiviral) reverse transcriptase polypeptide domain (e.g., pol, e.g., as listed in Table 11 or 12) capable of reverse transcribing the template RNA, thereby producing a template DNA; and
[0016] d) a retroviral (e.g., lentiviral) envelope polypeptide domain (e.g., env), or a nucleic acid molecule encoding the retroviral (e.g., lentiviral) envelope polypeptide domain;
[0017] wherein b) and c) are substantially unable to integrate the template DNA into a target DNA; and
[0018] wherein b), c), and d) are optionally part of the same polypeptide.

[0019] 3. The system of embodiment 2, which further comprises:
[0020] e) the serine recombinase (e.g., serine integrase) polypeptide domain, wherein the serine recombinase polypeptide domain binds the DNA recognition sequence and is capable of integrating the template DNA into the target DNA, or a nucleic acid molecule encoding the serine recombinase polypeptide domain.

[0021] 4. A system for modifying DNA comprising:
[0022] a) a template RNA comprising a DNA recognition sequence and a heterologous object sequence encoding a therapeutic effector (e.g., wherein the therapeutic effector comprising a polypeptide or functional nucleic acid molecule, e.g., an siRNA, lncRNA, asRNA, miRNA, or any other ncRNA), or a DNA molecule encoding the template RNA;
[0023] b) a retroviral (e.g., lentiviral) structural polypeptide domain (e.g., gag);
[0024] c) a retroviral (e.g., lentiviral) reverse transcriptase polypeptide domain (e.g., pol, e.g., as listed in Table 11 or 12) capable of reverse transcribing the template RNA, thereby producing a template DNA;
[0025] wherein b) and c) are substantially unable to integrate the template DNA into a target DNA;
[0026] d) a serine recombinase (e.g., serine integrase) polypeptide domain, wherein the serine recombinase polypeptide domain binds the DNA recognition sequence and is capable of integrating the template DNA into the target DNA; or a nucleic acid molecule encoding the serine recombinase polypeptide domain; and
[0027] e) a retroviral (e.g., lentiviral) envelope polypeptide domain (e.g., env), or a nucleic acid molecule encoding the retroviral (e.g., lentiviral) envelope polypeptide domain;
[0028] wherein b), c), d), and e) are optionally part of the same polypeptide.

[0029] 5. The system of embodiment 2, wherein the serine recombinase (e.g., serine integrase) polypeptide domain has less than 80% (e.g., less than 80%, 75%, 70%, 60%, 50%, 40%, 30%, 20%, 10%, or 5%) amino acid sequence identity to phiC31 phage integrase (e.g., a phiC31 integrase having the amino acid sequence as listed in NCBI Accession No. NC_001978.3).

[0030] 6. The system of embodiment 2, wherein the serine recombinase (e.g., serine integrase) polypeptide domain does not comprise a recombinase (e.g., integrase) from a Streptomyces phage, e.g., the Streptomyces temperate phage phiC31, e.g., having the amino acid sequence as listed in NCBI Accession No. NC_001978.3.

[0031] 7. A system for modifying DNA comprising:
[0032] a) a template RNA comprising a DNA recognition sequence, or a DNA molecule encoding the template RNA;
[0033] b) a retroviral (e.g., lentiviral) structural polypeptide domain (e.g., gag);
[0034] c) a retroviral (e.g., lentiviral) reverse transcriptase polypeptide domain (e.g., pol, e.g., as listed in Table 11 or 12) capable of reverse transcribing the template RNA, thereby producing a template DNA;
[0035] wherein b) and c) are substantially unable to integrate the template DNA into a DNA; and
[0036] d) a serine recombinase (e.g., serine integrase) polypeptide domain, wherein the serine recombinase polypeptide domain binds the DNA recognition sequence and is capable of integrating the template DNA into a target DNA, and
[0037] e) a retroviral (e.g., lentiviral) envelope polypeptide domain (e.g., env), or a nucleic acid molecule encoding the retroviral (e.g., lentiviral) envelope polypeptide domain;
[0038] wherein b), c), d), and e) are optionally part of the same polypeptide;
[0039] wherein the DNA recognition sequence of the template DNA is capable of being recombined by the serine recombinase polypeptide domain with a cognate DNA recognition sequence in a naturally occurring human genome and/or in Genome Reference Consortium Human Build 38 (GRCh38); and
[0040] wherein the target DNA comprises the cognate DNA recognition sequence.

[0041] 8. The system of embodiment 7, wherein the target DNA is comprised in a human genome.

[0042] 9. The system of embodiment 8, wherein the target DNA is present at least once in the human genome, e.g., at least 1, 2, 3, 4, 5, 10, 20, 30, 40, 50, 100, 200, 300, 400, 500, 1000, 2000, 3000, 4000, 5000, 6000, 7000, 8000, 9000, or at least 10000 occurrences.

[0043] 10. The system of embodiment 8, wherein the target DNA is present no more than 2 times (e.g., no more than 1, 2, 3, 4, 5, 6, 8, 9, 10, 50, 100, 200, 300, 400, 500, 600, 700, 800, 900, or 1000 times) in the human genome.

[0044] 11. A system for modifying DNA comprising:
[0045] a) a template RNA comprising a DNA recognition sequence, or a DNA molecule encoding the template RNA;
[0046] b) a retroviral (e.g., lentiviral) structural polypeptide domain (e.g., gag);
[0047] c) a retroviral (e.g., lentiviral) reverse transcriptase polypeptide domain (e.g., pol, e.g., as listed in Table 11 or 12) capable of reverse transcribing the template RNA, thereby producing a template DNA;
[0048] wherein b) and c) are substantially unable to integrate the template DNA into a DNA; and
[0049] d) a serine recombinase (e.g., serine integrase) polypeptide domain, wherein the serine recombinase polypeptide domain binds the DNA recognition sequence and is capable of integrating the template DNA into a target DNA, and
[0050] e) a retroviral (e.g., lentiviral) envelope polypeptide domain (e.g., env), or a nucleic acid molecule encoding the retroviral (e.g., lentiviral) envelope polypeptide domain;
[0051] wherein b), c), d), and e) are optionally part of the same polypeptide;
[0052] wherein the serine recombinase polypeptide domain is capable of recombining the DNA recognition sequence of the template DNA with a cognate DNA recognition sequence in a naturally occurring human genome; and
[0053] wherein the target DNA comprises the cognate DNA recognition sequence.

[0054] 12. The system of embodiment 11, wherein the target DNA is comprised in a human genome.

[0055] 13. A system for modifying DNA comprising:
[0056] a) a template RNA comprising a DNA recognition sequence, or a DNA molecule encoding the template RNA;
[0057] b) a retroviral (e.g., lentiviral) structural polypeptide domain (e.g., gag);
[0058] c) a retroviral (e.g., lentiviral) reverse transcriptase polypeptide domain (e.g., pol, e.g., as listed in Table 11 or 12) capable of reverse transcribing the template RNA, thereby producing a template DNA, wherein the retroviral (e.g., lentiviral) reverse transcriptase polypeptide domain does not comprise a D64V mutation, or wherein the retroviral (e.g., lentiviral) reverse transcriptase polypeptide domain comprises a D116 or E152 mutation;
[0059] wherein b) and c) are substantially unable to integrate the template DNA into a DNA; and
[0060] d) a serine recombinase (e.g., serine integrase) polypeptide domain, wherein the serine recombinase polypeptide domain binds the DNA recognition sequence and is capable of integrating the template DNA into a target DNA,
[0061] e) a retroviral (e.g., lentiviral) envelope polypeptide domain (e.g., env), or a nucleic acid molecule encoding the retroviral (e.g., lentiviral) envelope polypeptide domain;
[0062] wherein b), c), d), and e) are optionally part of the same polypeptide;
[0063] wherein the DNA recognition sequence of the template DNA is capable of being recombined by the serine recombinase polypeptide domain with a cognate DNA recognition sequence in a naturally occurring human genome; and
[0064] wherein the target DNA comprises the cognate DNA recognition sequence.

[0065] 14. A system for modifying DNA comprising:
[0066] a) template RNA comprising a DNA recognition sequence, or a DNA molecule encoding the template RNA,
[0067] b) a lentiviral structural polypeptide domain (e.g., gag);
[0068] c) a lentiviral reverse transcriptase polypeptide domain (e.g., pol, e.g., as listed in Table 11 or 12) capable of reverse transcribing the template RNA, thereby producing a template DNA;
[0069] wherein b) and c) are substantially unable to integrate the template DNA into a target DNA;
[0070] d) serine integrase polypeptide domain, or a nucleic acid molecule encoding the serine integrase polypeptide domain; and
[0071] e) a retroviral (e.g., lentiviral) envelope polypeptide domain (e.g., env), or a nucleic acid molecule encoding the retroviral (e.g., lentiviral) envelope polypeptide domain.

[0072] 15. A system for modifying DNA comprising:
[0073] a) a template RNA comprising a first long terminal repeat (LTR), a second LTR, a heterologous object sequence encoding a therapeutic effector, positioned between the first LTR and the second LTR, a DNA recognition sequence, and optionally a primer binding site (PBS); or a DNA molecule encoding the template RNA;
[0074] b) a structural polypeptide domain (e.g., gag, e.g., a viral capsid (CA) protein), or a nucleic acid molecule encoding the structural polypeptide domain;
[0075] c) a reverse transcriptase polypeptide domain (e.g., pol, e.g., as listed in Table 11 or 12) capable of reverse transcribing the template RNA, thereby producing a template DNA, or a nucleic acid molecule encoding the reverse transcriptase polypeptide domain;
[0076] wherein b) and c) together are integration-deficient; and
[0077] d) a serine recombinase (e.g., serine integrase) polypeptide domain that binds the DNA recognition sequence and comprises an amino acid sequence according to any of SEQ ID NOs: 1-12,677 (e.g., SEQ ID NOs: 1-11,432), or an amino acid sequence having at least 70%, 75%, 80%, 85%, 90%, 95%, 96%, 97%, 98%, or 99% identity thereto, or a nucleic acid molecule encoding the serine recombinase polypeptide domain,
[0078] wherein b), c), and d), are optionally part of the same polypeptide.

[0079] 16. A cell-free system for modifying DNA comprising:
[0080] a) a template RNA comprising a first LTR, a second LTR, and a heterologous object sequence encoding a therapeutic effector, positioned between the first LTR and the second LTR, a DNA recognition sequence, and optionally a primer binding site (PBS); or a DNA molecule encoding the template RNA;
[0081] b) a first RNA encoding a retroviral structural polypeptide domain (e.g., gag);
[0082] c) a second RNA encoding a retroviral reverse transcriptase polypeptide domain (e.g., pol, e.g., as listed in Table 11 or 12) capable of reverse transcribing the template RNA, thereby producing a template DNA, or a nucleic acid molecule encoding the reverse transcriptase polypeptide domain;
[0083] wherein the first RNA sequence and the second RNA sequence are optionally part of the same nucleic acid molecule; and
[0084] wherein the retroviral structural polypeptide domain and the retroviral reverse transcriptase polypeptide domain together are integration-deficient; and
[0085] d) a serine recombinase (e.g., serine integrase) polypeptide domain that is exogenous to b) and c) and binds the DNA recognition sequence and is capable of integrating the template DNA into a target DNA, or a nucleic acid molecule encoding the serine recombinase polypeptide domain,
[0086] wherein b), c), and d), are optionally part of the same polypeptide.

[0087] 17. The system of any of the preceding embodiments, wherein the DNA recognition sequence comprises a sequence having 30-70 or 40-60 contiguous nucleotides of SEQ ID NO: (n+13,000), or a nucleotide sequence having at least 70%, 75%, 80%, 85%, 90%, 95%, 96%, 97%, 98%, or 99% identity thereto, or having no more than 1, 2, 3, 4, 5, 6, 7, 8, 9, 10, 11, 12, 13, 14, 15, 16, 17, 18, 19, or 20 sequence alterations (e.g., substitutions, insertions, or deletions) relative thereto.

[0088] 18. The system of any of the preceding embodiments, wherein the DNA recognition sequence comprises a sequence having a first parapalindromic sequence and a second parapalindromic sequence, wherein each parapalindromic sequence is about 15-35 or 20-30 nucleotides, and the first and second parapalindromic sequences together comprise a parapalindromic region occurring within a nucleotide sequence according to SEQ ID NO: (n+13,000), or a nucleotide sequence having at least 70%, 75%, 80%, 85%, 90%, 95%, 96%, 97%, 98%, or 99% identity to said parapalindromic region, or having no more than 1, 2, 3, 4, 5, 6, 7, 8, 9, 10, 11, 12, 13, 14, 15, 16, 17, 18, 19, or 20 sequence alterations (e.g., substitutions, insertions, or deletions) relative thereto.

[0089] 19. The system of any of the preceding embodiments, wherein:
[0090] the serine recombinase (e.g., serine integrase) polypeptide domain comprises the amino acid sequence in the sequence listing designated as Integrase By, wherein y is chosen from any of 2-11,258, or an amino acid sequence having at least 70%, 75%, 80%, 85%, 90%, 95%, 96%, 97%, 98%, or 99% identity thereto; and
[0091] the DNA recognition sequence comprises a sequence having 30-70 or 40-60 contiguous nucleotides of the sequence in the sequence listing designated as LeftRegion for integrase By), or a nucleotide sequence having at least 70%, 75%, 80%, 85%, 90%, 95%, 96%, 97%, 98%, or 99% identity thereto, or having no more than 1, 2, 3, 4, 5, 6, 7, 8, 9, 10, 11, 12, 13, 14, 15, 16, 17, 18, 19, or 20 sequence alterations (e.g., substitutions, insertions, or deletions) relative thereto.

[0092] 20. The system of any of the preceding embodiments, wherein:
[0093] the serine recombinase (e.g., serine integrase) polypeptide domain comprises the amino acid sequence in the sequence listing designated as Integrase By, wherein y is chosen from any of 2-11,258, or an amino acid sequence having at least 70%, 75%, 80%, 85%, 90%, 95%, 96%, 97%, 98%, or 99% identity thereto; and
[0094] the DNA recognition sequence comprises a sequence having a first parapalindromic sequence and a second parapalindromic sequence, wherein each parapalindromic sequence is about 15-35 or 20-30 nucleotides, and the first and second parapalindromic sequences together comprise a parapalindromic region occurring within a nucleotide sequence of the sequence in the sequence listing designated as LeftRegion for integrase By, or a nucleotide sequence having at least 70%, 75%, 80%, 85%, 90%, 95%, 96%, 97%, 98%, or 99% identity to said parapalindromic region, or having no more than 1, 2, 3, 4, 5, 6, 7, 8, 9, 10, 11, 12, 13, 14, 15, 16, 17, 18, 19, or 20 sequence alterations (e.g., substitutions, insertions, or deletions) relative thereto.

[0095] 21. The system of any of the preceding embodiments, wherein:
[0096] the serine recombinase (e.g., serine integrase) polypeptide domain comprises the amino acid sequence in the sequence listing designated as Integrase Cy, wherein y is chosen from any of 1-175, or an amino acid sequence having at least 70%, 75%, 80%, 85%, 90%, 95%, 96%, 97%, 98%, or 99% identity thereto; and
[0097] the DNA recognition sequence comprises a sequence having 30-70 or 40-60 contiguous nucleotides of the sequence in the sequence listing designated as LeftRegion for integrase Cy), or a nucleotide sequence having at least 70%, 75%, 80%, 85%, 90%, 95%, 96%, 97%, 98%, or 99% identity thereto, or having no more than 1, 2, 3, 4, 5, 6, 7, 8, 9, 10, 11, 12, 13, 14, 15, 16, 17, 18, 19, or 20 sequence alterations (e.g., substitutions, insertions, or deletions) relative thereto.

[0098] 22. The system of any of the preceding embodiments, wherein:
[0099] the serine recombinase (e.g., serine integrase) polypeptide domain comprises the amino acid sequence in the sequence listing designated as Integrase Cy, wherein y is chosen from any of 1-175, or an amino acid sequence having at least 70%, 75%, 80%, 85%, 90%, 95%, 96%, 97%, 98%, or 99% identity thereto; and
[0100] the DNA recognition sequence comprises a sequence having a first parapalindromic sequence and a second parapalindromic sequence, wherein each parapalindromic sequence is about 15-35 or 20-30 nucleotides, and the first and second parapalindromic sequences together comprise a parapalindromic region occurring within a nucleotide sequence of the sequence in the sequence listing designated as LeftRegion for integrase Cy, or a nucleotide sequence having at least 70%, 75%, 80%, 85%, 90%, 95%, 96%, 97%, 98%, or 99% identity to said parapalindromic region, or having no more than 1, 2, 3, 4, 5, 6, 7, 8, 9, 10, 11, 12, 13, 14, 15, 16, 17, 18, 19, or 20 sequence alterations (e.g., substitutions, insertions, or deletions) relative thereto.

[0101] 23. The system of any of the preceding embodiments, wherein:
[0102] the serine recombinase (e.g., serine integrase) polypeptide domain comprises an amino acid sequence of SEQ ID NO: n, wherein n is chosen from any of 1-12,677 (e.g., any of 1-11,432), or an amino acid sequence having at least 70%, 75%, 80%, 85%, 90%, 95%, 96%, 97%, 98%, or 99% identity thereto; and
[0103] the DNA recognition sequence comprises a sequence having 30-70 or 40-60 contiguous nucleotides of SEQ ID NO: (n+26,000), or a nucleotide sequence having at least 70%, 75%, 80%, 85%, 90%, 95%, 96%, 97%, 98%, or 99% identity thereto, or having no more than 1, 2, 3, 4, 5, 6, 7, 8, 9, 10, 11, 12, 13, 14, 15, 16, 17, 18, 19, or 20 sequence alterations (e.g., substitutions, insertions, or deletions) relative thereto.

[0104] 24. The system of any of the preceding embodiments, wherein:
[0105] the serine recombinase (e.g., serine integrase) polypeptide domain comprises an amino acid sequence of SEQ ID NO: n, wherein n is chosen from any of 1-12,677 (e.g., any of 1-11,432), or an amino acid sequence having at least 70%, 75%, 80%, 85%, 90%, 95%, 96%, 97%, 98%, or 99% identity thereto; and
[0106] the DNA recognition sequence comprises a sequence having a first parapalindromic sequence and a second parapalindromic sequence, wherein each parapalindromic sequence is about 15-35 or 20-30 nucleotides, and the first and second parapalindromic sequences together comprise a parapalindromic region occurring within a nucleotide sequence according to SEQ ID NO: (n+26,000), or a nucleotide sequence having at least 70%, 75%, 80%, 85%, 90%, 95%, 96%, 97%, 98%, or 99% identity to said parapalindromic region, or having no more than 1, 2, 3, 4, 5, 6, 7, 8, 9, 10, 11, 12, 13, 14, 15, 16, 17, 18, 19, or 20 sequence alterations (e.g., substitutions, insertions, or deletions) relative thereto.

[0107] 25. The system of any of the preceding embodiments, wherein:
[0108] the serine recombinase (e.g., serine integrase) polypeptide domain comprises the amino acid sequence in the sequence listing designated as Integrase By, wherein y is chosen from any of 2-11,258, or an amino acid sequence having at least 70%, 75%, 80%, 85%, 90%, 95%, 96%, 97%, 98%, or 99% identity thereto; and
[0109] the DNA recognition sequence comprises a sequence having 30-70 or 40-60 contiguous nucleotides of the sequence in the sequence listing designated as RightRegion for integrase By), or a nucleotide sequence having at least 70%, 75%, 80%, 85%, 90%, 95%, 96%, 97%, 98%, or 99% identity thereto, or having no more than 1, 2, 3, 4, 5, 6, 7, 8, 9, 10, 11, 12, 13, 14, 15, 16, 17, 18, 19, or 20 sequence alterations (e.g., substitutions, insertions, or deletions) relative thereto.

[0110] 26. The system of any of the preceding embodiments, wherein:
[0111] the serine recombinase (e.g., serine integrase) polypeptide domain comprises the amino acid sequence in the sequence listing designated as Integrase By, wherein y is chosen from any of 2-11,258, or an amino acid sequence having at least 70%, 75%, 80%, 85%, 90%, 95%, 96%, 97%, 98%, or 99% identity thereto; and
[0112] the DNA recognition sequence comprises a sequence having a first parapalindromic sequence and a second parapalindromic sequence, wherein each parapalindromic sequence is about 15-35 or 20-30 nucleotides, and the first and second parapalindromic sequences together comprise a parapalindromic region occurring within a nucleotide sequence of the sequence in the sequence listing designated as RightRegion for integrase By, or a nucleotide sequence having at least 70%, 75%, 80%, 85%, 90%, 95%, 96%, 97%, 98%, or 99% identity to said parapalindromic region, or having no more than 1, 2, 3, 4, 5, 6, 7, 8, 9, 10, 11, 12, 13, 14, 15, 16, 17, 18, 19, or 20 sequence alterations (e.g., substitutions, insertions, or deletions) relative thereto.

[0113] 27. The system of any of the preceding embodiments, wherein:
[0114] the serine recombinase (e.g., serine integrase) polypeptide domain comprises the amino acid sequence in the sequence listing designated as Integrase Cy, wherein y is chosen from any of 1-175, or an amino acid sequence having at least 70%, 75%, 80%, 85%, 90%, 95%, 96%, 97%, 98%, or 99% identity thereto; and
[0115] the DNA recognition sequence comprises a sequence having 30-70 or 40-60 contiguous nucleotides of the sequence in the sequence listing designated as RightRegion for integrase Cy), or a nucleotide sequence having at least 70%, 75%, 80%, 85%, 90%, 95%, 96%, 97%, 98%, or 99% identity thereto, or having no more than 1, 2, 3, 4, 5, 6, 7, 8, 9, 10, 11, 12, 13, 14, 15, 16, 17, 18, 19, or 20 sequence alterations (e.g., substitutions, insertions, or deletions) relative thereto.

[0116] 28. The system of any of the preceding embodiments, wherein:
[0117] the serine recombinase (e.g., serine integrase) polypeptide domain comprises the amino acid sequence in the sequence listing designated as Integrase Cy, wherein y is chosen from any of 1-175, or an amino acid sequence having at least 70%, 75%, 80%, 85%, 90%, 95%, 96%, 97%, 98%, or 99% identity thereto; and
[0118] the DNA recognition sequence comprises a sequence having a first parapalindromic sequence and a second parapalindromic sequence, wherein each parapalindromic sequence is about 15-35 or 20-30 nucleotides, and the first and second parapalindromic sequences together comprise a parapalindromic region occurring within a nucleotide sequence of the sequence in the sequence listing designated as RightRegion for integrase Cy, or a nucleotide sequence having at least 70%, 75%, 80%, 85%, 90%, 95%, 96%, 97%, 98%, or 99% identity to said parapalindromic region, or having no more than 1, 2, 3, 4, 5, 6, 7, 8, 9, 10, 11, 12, 13, 14, 15, 16, 17, 18, 19, or 20 sequence alterations (e.g., substitutions, insertions, or deletions) relative thereto.

[0119] 29. The system of any of the preceding embodiments, wherein the lentiviral vector fuses to the target cell, the template RNA is reverse transcribed, the serine recombinase polypeptide domain is cleaved from the structural polypeptide domain by a protease (e.g., a retroviral protease, e.g., a lentiviral protease), the template DNA is circularized, and the template DNA is integrated into the genome by the serine recombinase polypeptide domain.

[0120] 31. The system of any of the preceding embodiments, wherein the lentiviral vector fuses to the target cell, the template RNA is reverse transcribed, the serine recombinase polypeptide domain is cleaved from the structural polypeptide domain by a protease (e.g., a retroviral protease, e.g., a lentiviral protease), the template DNA is not circularized, and the template DNA is integrated into the genome by the serine recombinase polypeptide domain.

[0121] 32. The system of any of the preceding embodiments, wherein the LTR sequences undergo homologous recombination resulting in circularization, e.g., by a host function or by a function provided by the retroviral system (e.g., overexpression of RecA).

[0122] 33. The system of any of the preceding embodiments, wherein the template DNA comprises DNA recognition sequences in one or more of the LTRs (e.g., DNA recognition sequences that bind to FLP recombinase (e.g., FRT sites) or Cre recombinase (e.g., loxP sites)).

[0123] 34. The system of any of the preceding embodiments, wherein the template DNA comprises a sequence that can be bound by a recombination directionality factor (RDF).

[0124] 35. The system of any of the preceding embodiments, wherein the template DNA does not comprise a sequence that can be bound by a recombination directionality factor (RDF).

[0125] 36. The system of any of the preceding embodiments, wherein the template RNA comprises one or more meganuclease sites (e.g., within one or more of the LTRs), e.g., an LAGLIDADG family endonuclease, e.g., I-SceI or I-CreI.

[0126] 37. A fusion protein comprising:
[0127] one or both of a) a retroviral (e.g., lentiviral) structural polypeptide domain (e.g., gag), and b) a retroviral (e.g., lentiviral) reverse transcriptase polypeptide domain (e.g., pol, e.g., as listed in Table 11 or 12); and
[0128] c) serine recombinase (e.g., serine integrase) polypeptide domain.

[0129] 38. The fusion protein of embodiment 37, wherein the serine recombinase polypeptide domain comprises an amino acid sequence of any of SEQ ID NOs: 1-12,677 (e.g., SEQ ID NOs: 1-11,432), or an amino acid sequence having at least 70%, 75%, 80%, 85%, 90%, 95%, 96%, 97%, 98%, or 99% identity thereto.

[0130] 39. The fusion protein of embodiment 37 or 38, wherein the retroviral (e.g., lentiviral) reverse transcriptase polypeptide domain is substantially unable to integrate the template DNA into a DNA.

[0131] 40. A template RNA comprising:
[0132] a) a region comprising a DNA recognition sequence that is recognized by a serine recombinase (e.g., serine integrase) polypeptide domain;
[0133] b) a retroviral (e.g., lentiviral) attachment site;
[0134] c) heterologous object sequence encoding a therapeutic effector (e.g., wherein the therapeutic effector comprising a polypeptide or functional nucleic acid molecule, e.g., an siRNA or miRNA).

[0135] 41. The template RNA of embodiment 40, wherein the serine recombinase polypeptide domain that comprises an amino acid sequence of any of SEQ ID NOs: 1-12,677 (e.g., SEQ ID NOs: 1-11,432), or an amino acid sequence having at least 70%, 75%, 80%, 85%, 90%, 95%, 96%, 97%, 98%, or 99% identity thereto.

[0136] 42. A template RNA comprising:
[0137] a) a region comprising a DNA recognition sequence that is recognized by a serine recombinase (e.g., serine integrase) polypeptide domain that comprises an amino acid sequence of any of SEQ ID NOs: 1-12,677 (e.g., any of SEQ ID NOs: 1-11,432), or an amino acid sequence having at least 70%, 75%, 80%, 85%, 90%, 95%, 96%, 97%, 98%, or 99% identity thereto, and
[0138] b) a retroviral (e.g., lentiviral) attachment site.

[0139] 43. The template RNA of embodiment 42, which further comprises:
[0140] c) heterologous object sequence encoding a therapeutic effector (e.g., wherein the therapeutic effector comprising a polypeptide or functional nucleic acid molecule, e.g., an siRNA or miRNA).

[0141] 44. The template RNA of any of embodiments 40-43, which comprises two retroviral (e.g., lentiviral) attachment sites (e.g., wherein each retroviral (e.g., lentiviral) attachment site is a retrovirus (e.g., lentivirus) LTR).

[0142] 45. The template RNA of embodiment 44, wherein one of the retroviral (e.g., lentiviral) attachment sites is present at each end of the template RNA.

[0143] 46. The template RNA of embodiment 44 or 45, wherein the LTR is a self-inactivating (SIN) LTR.

[0144] 47. The template RNA of any of embodiments 40-45, which is linear.

[0145] 48. A template RNA comprising a DNA recognition site specifically bound by a serine integrase (e.g., as described herein);
[0146] wherein the serine integrase is not phiC31 integrase or bxbi integrase.

[0147] 49. A vector (e.g., a DNA vector) encoding the template RNA of any of embodiments 44-48.

[0148] 50. A method of modifying the genome of a cell (e.g., a eukaryotic cell, e.g., a mammalian cell, e.g., human cell) comprising contacting the cell with:
[0149] a system of any of the preceding embodiments,
[0150] thereby modifying the genome of the cell.

[0151] 51. The system, fusion protein, or method of any of the preceding embodiments, wherein the target DNA is a genomic DNA (e.g., a chromosome or a mitochondrial DNA), e.g., human genomic DNA.

[0152] 52. The system, fusion protein, or method of any of the preceding embodiments, wherein the retroviral (e.g., lentiviral) reverse transcriptase polypeptide domain has reduced integrase activity, e.g., to at least 10%, 5%, 2%, or 1% of that of a corresponding wild-type sequence, e.g., as measured in an assay as described in Moldt et al. 2008 (BMC Biotechnol. 8:60; incorporated herein by reference).

[0153] 53. The system, fusion protein, or method of any of the preceding embodiments, wherein the retroviral (e.g., lentiviral) reverse transcriptase polypeptide domain comprises a mutation that reduces integrase activity, e.g., to no more than about 75%, 50%, 40%, 30%, 25%, 20%, 10%, 5%, 2%, or 1% of a corresponding wild-type sequence, e.g., as measured in an assay as described in Moldt et al. 2008 (BMC Biotechnol. 8:60).

[0154] 54. The system, fusion protein, or method of any of the preceding embodiments, wherein the system does not comprise a wild-type retroviral (e.g., lentiviral) integrase.

[0155] 55. The system, fusion protein, or method of any of the preceding embodiments, wherein the system comprises a mutated retroviral (e.g., lentiviral) integrase.

[0156] 56. The system, fusion protein, or method of any of the preceding embodiments, wherein the retroviral (e.g., lentiviral) reverse transcriptase polypeptide domain comprises a mutated retroviral (e.g., lentiviral) integrase.

[0157] 57. The system, fusion protein, or method of any of the preceding embodiments, wherein the template RNA comprises a nucleic acid sequence encoding a mutated retroviral (e.g., lentiviral) integrase.

[0158] 58. The system, fusion protein, or method of any of embodiments 55-57, wherein the mutated retroviral (e.g., lentiviral) integrase comprises at least one amino acid difference relative to a wild-type retroviral (e.g., lentiviral) integrase.

[0159] 59. The system, fusion protein, or method of any of embodiments 55-58, wherein the mutated retroviral (e.g., lentiviral) integrase comprises a substitution, addition, or deletion relative to a wild-type retroviral (e.g., lentiviral) integrase.

[0160] 60. The system, fusion protein, or method of any of embodiments 55-59, wherein the mutated retroviral (e.g., lentiviral) integrase has less than 10%, 9%, 8%, 7%, 6%, 5%, 4%, 3%, 2%, or 1% of the activity of the wild-type integrase.

[0161] 61. The system, fusion protein, or method of any of embodiments 53-60, wherein the mutation is a class I mutation (e.g., as described in Wanisch et al. 2009, Mol. Therap. 17(8): 1316-1332).

[0162] 62. The system, fusion protein, or method of any of embodiments 53-61, wherein the mutation comprises a mutation in a catalytic triad residue (e.g., mutations in 1, 2, or 3 catalytic triad residues).

[0163] 63. The system, fusion protein, or method of any of embodiments 53-62, wherein the mutation comprises a substitution at D64 (e.g., D64V), D116, and/or E152 of the amino acid sequence of an HIV-1 integrase (IN) protein.

[0164] 64. The system, fusion protein, or method of any of embodiments 53-63, wherein the mutation comprises a substitution at one or more of the following residues: H12, D64, D64, D64, D116, N120, Q148, F185, W235, R262, R263, K264, K264, K264, K266, and/or K273.

[0165] 65. The system, fusion protein, or method of any of embodiments 53-64, wherein the mutation comprises one or more of the following substitutions: H12A, D64V, D64A, D64E, D116N, N120L, Q148A, F185A, W235E, R262A, R263A, K264H, K264R, K264E, K266R, and/or K273R.

[0166] 66. The system, fusion protein, or method of any of embodiments 53-65, wherein the mutation comprises the substitution D64V.

[0167] 67. The system, fusion protein, or method of any of embodiments 53-66, wherein the mutation comprises the following substitutions: K264R, K266R, and K273R.

[0168] 68. The system, fusion protein, or method of any of embodiments 53-67, wherein the mutation comprises the following substitutions: D64V and N120L.

[0169] 69. The system, fusion protein, or method of any of embodiments 53-68, wherein the mutation comprises the following substitutions: D64V and W235E.

[0170] 70. The system, fusion protein, or method of any of embodiments 53-69, wherein the mutation comprises the following substitutions: D64V, N120L, and W235E.

[0171] 71. The system, fusion protein, or method of any of embodiments 53-70, wherein the mutation comprises the following substitutions: R262A, R263A, and K264H

[0172] 72. The system, fusion protein, or method of any of embodiments 53-71, wherein the mutation comprises the following substitutions: K264E, F185A, D116A, D64A, and H12A.

[0173] 73. The system, fusion protein, or method of any of embodiments 53-72, wherein the mutation comprises the following substitutions: D64N and D116N.

[0174] 74. The system, fusion protein, or method of any of embodiments 53-73, wherein the mutation is a class II mutation.

[0175] 75. The system or method of any of the preceding embodiments, wherein the system further comprises, or wherein the method further comprises contacting the cell with, an inhibitor of integrase activity of (c).

[0176] 76. The system, fusion protein, or method of embodiment 75, wherein the inhibitor of integrase activity is an inhibitor of a retroviral (e.g., lentiviral) integrase protein (e.g., an HIV integrase protein).

[0177] 77. The system, fusion protein, or method of embodiment 75 or 76, wherein the inhibitor of integrase activity reduces the integrase activity of a retroviral (e.g., lentiviral) integrase protein (e.g., an HIV integrase protein) by at least 20%, 30%, 40%, 50%, 60%, 70%, 75%, 80%, 85%, 90%, 95%, 96%, 97%, 98%, or 99%.

[0178] 78. The system or method of any of embodiments 75-77, wherein the inhibitor is a small molecule.

[0179] 79. The system, fusion protein, or method of any of embodiments 75-78, wherein the inhibitor is a strand-transfer inhibitor.

[0180] 80. The system, fusion protein, or method of any of embodiments 75-79, wherein the inhibitor is raltegravir or elvitegravir, or a salt thereof.

[0181] 81. The system, fusion protein, or method of any of embodiments 75-80, wherein the inhibitor is an inhibitor of binding between a retroviral (e.g., lentiviral) integrase and a cellular cofactor.

[0182] 82. The system, fusion protein, or method of any of embodiments 75-81, wherein the cellular cofactor is LEDGF/p75, integrase interactor 1, gemin2, emerin, or barrier to autointegration factor (BAF).

[0183] 83. The system, fusion protein, or method of any of the preceding embodiments, wherein the template RNA comprises a retroviral (e.g., lentiviral) attachment site, e.g., at one end of the template RNA.

[0184] 84. The system, fusion protein, or method of any of the preceding embodiments wherein the template RNA comprises two retroviral (e.g., lentiviral) attachment sites, e.g., one at each end of the template RNA.

[0185] 85. The system, fusion protein, or method of any of the preceding embodiments, wherein the template RNA is packaged by the retroviral (e.g., lentiviral) structural polypeptide domain (e.g., gag).

[0186] 86. The system, fusion protein, or method of any of the preceding embodiments, wherein the template RNA does not comprise a wild-type retroviral (e.g., lentiviral) attachment site at one or both ends.

[0187] 87. The system, fusion protein, or method of any of the preceding embodiments, wherein the template RNA does not comprise a retroviral (e.g., lentiviral) attachment site that differs from a wild-type retroviral (e.g., lentiviral) attachment site only by one or more self-inactivating mutations, e.g., at one or both ends.

[0188] 88. The system, fusion protein, or method of any of the preceding embodiments, wherein the template RNA does not comprise a wild-type retroviral (e.g., lentiviral) attachment site at its 5′ end.

[0189] 89. The system, fusion protein, or method of any of the preceding embodiments, wherein the template RNA does not comprise a wild-type retroviral (e.g., lentiviral) attachment site at its 3′ end.

[0190] 90. The system, fusion protein, or method of any of the preceding embodiments, wherein the template RNA comprises one or more (e.g., 1 or 2) mutated retroviral (e.g., lentiviral) attachment sites (e.g., comprising a nucleic acid sequence comprising at least one addition, deletion, or substitution relative to the sequence of a wild-type retroviral (e.g., lentiviral) attachment site).

[0191] 91. The system, fusion protein, or method of any of the preceding embodiments, wherein the template comprises a mutated retroviral (e.g., lentiviral) attachment site in a U3 region.

[0192] 92. The system, fusion protein, or method of any of the preceding embodiments, wherein the template comprises a mutated retroviral (e.g., lentiviral) attachment site in a U5 region.

[0193] 93. The system, fusion protein, or method of any of the preceding embodiments, wherein the template comprises a first mutated retroviral (e.g., lentiviral) attachment site in a U3 region and second mutated retroviral (e.g., lentiviral) attachment site in a U5 region (e.g., wherein the first and second mutated retroviral (e.g., lentiviral) attachment sites have the same sequence, or wherein the first and second mutated retroviral (e.g., lentiviral) attachment sites have different sequences).

[0194] 94. The system, fusion protein, or method of any of the preceding embodiments, wherein the wild-type retroviral (e.g., lentiviral) attachment site is a wild-type HIV (e.g., HIV-1 or HIV-2) attachment site.

[0195] 95. The system, fusion protein, or method of any of the preceding embodiments, wherein the wild-type retroviral (e.g., lentiviral) attachment site comprises a long terminal repeat (LTR), e.g., an LTR having the sequence of:

| | |
|---|---|
| (i) | GGGTCTCTCTGGTTAGACCAGATCTGAGCCTGGGAGCTCTCTGG |
| | CTAACTAGGGAACCCACTGCTTAAGCCTCAATAAAGCTTGCCTT |
| | GAGTGCTTCAAGTAGTGTGTGCCCGTCTGTTGTGTGACTCTGGT |
| | AACTAGAGATCCCTCAGACCCTTTTAGTCAGTGTGGAAAATCTC |
| | TAGCA, |
| (ii) | GGGTCTCTCTGGTTAGACCAGATCTGAGCCTGGGAGCTCTCTGG |
| | CTAACTAGGGAACCCACTGCTTAAGCCTCAATAAAGCTTGCCTT |
| | GAGTGCTTCAAGTAGTGTGTGCCCGTCTGTTGTGTGACTCTGGT |
| | AACTAGAGATCCCTCAGACCCTTTTAGTCAGTGTGGAAAATCTC |
| | TAGCA, |
| iii) | GGGTCTCTCTGGTTAGACCAGATCTGAGCCTGGGAGCTCTCTGG |
| | CTAACTAGGGAACCCACTGCTTAAGCCTCAATAAAGCTTGCCTT |
| | GAGTGCTTCAAGTAGTGTGTGCCCGTCTGTTGTGTGACTCTGGT |
| | AACTAGAGATCCCTCAGACCCTTTTAGTCAGTGTGGAAAATCTC |
| | TAGCA, |
| | or |
| (iv) | TGGAAGGGCTAATTCACTCCCAACGAAGACAAGATCTGCTTTTT |
| | GCTTGTACTGGGTCTCTCTGGTTAGACCAGATCTGAGCCTGGGA |
| | GCTCTCTGGCTAACTAGGGAACCCACTGCTTAAGCCTCAATAAA |
| | GCTTGCCTTGAGTGCTTCAAGTAGTGTGTGCCCGTCTGTTGTGT |
| | GACTCTGGTAACTAGAGATCCCTCAGACCCTTTTAGTCAGTGTG |
| | GAAAATCTCTAGCA; |

[0196] a sequence having at least 75%, 80%, 85%, 90%, 95%, 96%, 97%, 98%, or 99% sequence identity thereto.

[0197] 96. The system, fusion protein, or method of embodiment 95, wherein the LTR is a self-inactivating (SIN) LTR.

[0198] 97. The system, fusion protein, or method of any of the preceding embodiments, wherein the template RNA does not comprise a wild-type LTR sequence from a retrovirus (e.g., lentivirus) (e.g., HIV, e.g., HIV-1 or HIV-2).

[0199] 98. The system, fusion protein, or method of any of the preceding embodiments, wherein the template RNA comprises a mutated LTR sequence (e.g., an LTR sequence comprising at least one nucleotide difference (e.g., an addition, substitution, or deletion) from a wild-type retroviral (e.g., lentiviral) LTR sequence)

[0200] 99. The system, fusion protein, or method of embodiment 98, wherein the mutation does not substantially reduce reverse transcriptase activity, e.g., wherein reverse transcriptase activity is 80%-100% of that of a corresponding wild-type sequence.

[0201] 100. The system, fusion protein, or method of any of the preceding embodiments, wherein the nucleic acid molecule encoding the retroviral (e.g., lentiviral) structural polypeptide domain and the retroviral (e.g., lentiviral) reverse transcriptase polypeptide domain does not comprise a nucleic acid sequence encoding a retroviral (e.g., lentiviral) vif, vpr, vpu, and/or nef protein.

[0202] 101. The system, fusion protein, or method of any of the preceding embodiments, wherein the nucleic acid molecule encoding the retroviral (e.g., lentiviral) structural polypeptide domain and the retroviral (e.g., lentiviral) reverse transcriptase polypeptide domain comprises a nucleic acid sequence encoding a retroviral (e.g., lentiviral) vif, vpr, vpu, and/or nef protein.

[0203] 102. The system, fusion protein, or method of any of the preceding embodiments, wherein the nucleic acid molecule encoding the retroviral (e.g., lentiviral) structural polypeptide domain and the retroviral (e.g., lentiviral) reverse transcriptase polypeptide domain does not comprise a nucleic acid sequence encoding a retroviral (e.g., lentiviral) tat protein.

[0204] 103. The system, fusion protein, or method of any of the preceding embodiments, wherein the system does not comprise a retroviral (e.g., lentiviral) vif, vpr, vpu, and/or nef protein, and/or a nucleic acid sequence encoding the retroviral (e.g., lentiviral) vif, vpr, vpu, and/or nef protein.

[0205] 104. The system, fusion protein, or method of any of the preceding embodiments, wherein the system does not comprise a retroviral (e.g., lentiviral) tat protein, and/or a nucleic acid sequence encoding the retroviral (e.g., lentiviral) tat protein.

[0206] 105. The system, fusion protein, or method of any of the preceding embodiments, wherein the template RNA comprises one or more (e.g., 1, 2, 3, or all 4) of:
[0207] (a) a polynucleotide encoding a protein binding sequence (PBS), e.g., of a retrovirus (e.g., a lentivirus), or a nucleic acid sequence having at least 75%, 80%, 85%, 90%, 95%, 96%, 97%, 98%, or 99% sequence identity thereto;
[0208] (b) a polynucleotide encoding a polypurine tract (PPT), e.g., of a retrovirus (e.g., a lentivirus), or a nucleic acid sequence having at least 75%, 80%, 85%, 90%, 95%, 96%, 97%, 98%, or 99% sequence identity thereto;
[0209] (c) a polynucleotide encoding a retroviral (e.g., lentiviral) Psi packaging element, or a nucleic acid sequence having at least 75%, 80%, 85%, 90%, 95%, 96%, 97%, 98%, or 99% sequence identity thereto; and/or
[0210] (d) a polynucleotide encoding a dimer initiation site (DIS), e.g., of a retrovirus (e.g., a lentivirus), or a nucleic acid sequence having at least 75%, 80%, 85%, 90%, 95%, 96%, 97%, 98%, or 99% sequence identity thereto.

[0211] 106. The system, fusion protein, or method of any of the preceding embodiments, wherein the template RNA comprises one or more (e.g., 1, 2, 3, 4, 5, 6, 7, 8, 9, 10, or all 11) of:
[0212] (i) one or more long terminal repeats (LTR) (e.g., one or two LTRs, e.g., positioned at the 5′ and/or 3′ ends of the template RNA); optionally wherein one or more of the LTRs are self-inactivated LTRs,
[0213] (ii) a gag-encoding sequence (e.g., a gene encoding a polypeptide having at least 75%, 80%, 85%, 90%, 95%, 96%, 97%, 98%, 99%, or 100% amino acid sequence identity to the gag protein of a retrovirus (e.g., lentivirus)),
[0214] (iii) a pol-encoding sequence (e.g., a gene encoding a polypeptide having at least 75%, 80%, 85%, 90%, 95%, 96%, 97%, 98%, 99%, or 100% amino acid sequence identity to the pol protein of a retrovirus (e.g., lentivirus)),
[0215] (iv) a vif-encoding sequence (e.g., a gene encoding a polypeptide having at least 75%, 80%, 85%, 90%, 95%, 96%, 97%, 98%, 99%, or 100% amino acid sequence identity to the vif protein of a retrovirus (e.g., lentivirus)),
[0216] (v) a vpr-encoding sequence (e.g., a gene encoding a polypeptide having at least 75%, 80%, 85%, 90%, 95%, 96%, 97%, 98%, 99%, or 100% amino acid sequence identity to the vpr protein of a retrovirus (e.g., lentivirus)),
[0217] (vi) a tat-encoding sequence (e.g., a gene encoding a polypeptide having at least 75%, 80%, 85%, 90%, 95%, 96%, 97%, 98%, 99%, or 100% amino acid sequence identity to the tat protein of a retrovirus (e.g., lentivirus)),
[0218] (vii) a rev-encoding sequence (e.g., a gene encoding a polypeptide having at least 75%, 80%, 85%, 90%, 95%, 96%, 97%, 98%, 99%, or 100% amino acid sequence identity to the rev protein of a retrovirus (e.g., lentivirus)),
[0219] (viii) a vpu-encoding sequence (e.g., a gene encoding a polypeptide having at least 75%, 80%, 85%, 90%, 95%, 96%, 97%, 98%, 99%, or 100% amino acid sequence identity to the vpu protein of a retrovirus (e.g., lentivirus)),
[0220] (ix) a gp120-encoding sequence (e.g., a gene encoding a polypeptide having at least 75%, 80%, 85%, 90%, 95%, 96%, 97%, 98%, 99%, or 100% amino acid sequence identity to the gp120 protein of a retrovirus (e.g., lentivirus)),
[0221] (x) a gp41-encoding sequence (e.g., a gene encoding a polypeptide having at least 75%, 80%, 85%, 90%, 95%, 96%, 97%, 98%, 99%, or 100% amino acid sequence identity to the gp41 protein of a retrovirus (e.g., lentivirus)), and/or
[0222] (xi) a nef-encoding sequence (e.g., a gene encoding a polypeptide having at least 75%, 80%, 85%, 90%, 95%, 96%, 97%, 98%, 99%, or 100% amino acid sequence identity to the nef protein of a retrovirus (e.g., lentivirus)).

[0223] 107. The system, fusion protein, or method of any of the preceding embodiments, wherein the system further comprises one or more nucleic acid molecules (e.g., a vector, e.g., a packaging vector) comprising one or more (e.g., 1, 2, 3, 4, 5, 6, 7, 8, 9, 10, or all 11) of:
[0224] (i) one or more long terminal repeats (LTR) (e.g., one or two LTRs, e.g., positioned at the 5′ and/or 3′ ends of the template RNA); optionally wherein one or more of the LTRs are self-inactivated LTRs,
[0225] (ii) a gag-encoding sequence (e.g., a gene encoding a polypeptide having at least 75%, 80%, 85%, 90%, 95%, 96%, 97%, 98%, 99%, or 100% amino acid sequence identity to the gag protein of a retrovirus (e.g., lentivirus)),
[0226] (iii) a pol-encoding sequence (e.g., a gene encoding a polypeptide having at least 75%, 80%, 85%, 90%, 95%, 96%, 97%, 98%, 99%, or 100% amino acid sequence identity to the pol protein of a retrovirus (e.g., lentivirus)),
[0227] (iv) a vif-encoding sequence (e.g., a gene encoding a polypeptide having at least 75%, 80%, 85%, 90%, 95%, 96%, 97%, 98%, 99%, or 100% amino acid sequence identity to the vif protein of a retrovirus (e.g., lentivirus)),
[0228] (v) a vpr-encoding sequence (e.g., a gene encoding a polypeptide having at least 75%, 80%, 85%, 90%, 95%, 96%, 97%, 98%, 99%, or 100% amino acid sequence identity to the vpr protein of a retrovirus (e.g., lentivirus)),
[0229] (vi) a tat-encoding sequence (e.g., a gene encoding a polypeptide having at least 75%, 80%, 85%, 90%, 95%, 96%, 97%, 98%, 99%, or 100% amino acid sequence identity to the tat protein of a retrovirus (e.g., lentivirus)),
[0230] (vii) a rev-encoding sequence (e.g., a gene encoding a polypeptide having at least 75%, 80%, 85%, 90%, 95%, 96%, 97%, 98%, 99%, or 100% amino acid sequence identity to the rev protein of a retrovirus (e.g., lentivirus)),
[0231] (viii) a vpu-encoding sequence (e.g., a gene encoding a polypeptide having at least 75%, 80%, 85%, 90%, 95%, 96%, 97%, 98%, 99%, or 100% amino acid sequence identity to the vpu protein of a retrovirus (e.g., lentivirus)),
[0232] (ix) a gp120-encoding sequence (e.g., a gene encoding a polypeptide having at least 75%, 80%, 85%, 90%, 95%, 96%, 97%, 98%, 99%, or 100% amino acid sequence identity to the gp120 protein of a retrovirus (e.g., lentivirus)),
[0233] (x) a gp41-encoding sequence (e.g., a gene encoding a polypeptide having at least 75%, 80%, 85%, 90%, 95%, 96%, 97%, 98%, 99%, or 100% amino acid sequence identity to the gp41 protein of a retrovirus (e.g., lentivirus)), and/or
[0234] (xi) a nef-encoding sequence (e.g., a gene encoding a polypeptide having at least 75%, 80%, 85%, 90%, 95%, 96%, 97%, 98%, 99%, or 100% amino acid sequence identity to the nef protein of a retrovirus (e.g., lentivirus)).

[0235] 108. The system, fusion protein, or method of embodiment 106 or 107, wherein the retrovirus (e.g., lentivirus) of any of (ii)-(xi) is an HIV (e.g., HIV-1 or HIV-2).

[0236] 109. The system, fusion protein, or method of any of the preceding embodiments, wherein the template RNA comprises (e.g., in a pol-encoding gene) a retrovirus (e.g., lentivirus) integrase (IN)-encoding gene (e.g., a gene encoding a polypeptide having at least 75%, 80%, 85%, 90%, 95%, 96%, 97%, 98%, 99%, or 100% amino acid sequence identity to the IN protein of a retrovirus (e.g., lentivirus)).

[0237] 110. The system, fusion protein, or method of any of the preceding embodiments, wherein the template RNA does not comprise a retrovirus (e.g., lentivirus) integrase (IN)-encoding gene (e.g., a gene encoding a polypeptide having at least 75%, 80%, 85%, 90%, 95%, 96%, 97%, 98%, 99%, or 100% amino acid sequence identity to the IN protein of a retrovirus (e.g., lentivirus)).

[0238] 111. The system, fusion protein, or method of any of the preceding embodiments, wherein the retrovirus (e.g., lentivirus) is an HIV (e.g., HIV-1 or HIV-2).

[0239] 112. The system, fusion protein, or method of any of the preceding embodiments, wherein the gag-encoding gene further encodes the serine recombinase polypeptide domain.

[0240] 113. The system, fusion protein, or method of any of the preceding embodiments, wherein the pol-encoding gene further encodes the serine recombinase polypeptide domain.

[0241] 114. The system, fusion protein, or method of any of the preceding embodiments, wherein the template RNA encodes one DNA recognition sequence.

[0242] 115. The system, fusion protein, or method of any of the preceding embodiments, wherein the template RNA encodes more than one (e.g., two) DNA recognition sequences.

[0243] 116. The system, fusion protein, or method of any of the preceding embodiments, wherein the template RNA is a single-stranded RNA.

[0244] 117. The system, fusion protein, or method of any of the preceding embodiments, wherein the template DNA is a double-stranded DNA.

[0245] 118. The system, fusion protein, or method of any of the preceding embodiments, wherein the template DNA is a single-stranded DNA.

[0246] 119. The system, fusion protein, or method of any of the preceding embodiments, wherein the template RNA comprises a heterologous objection sequence.

[0247] 120. The system, fusion protein, or method of any of the preceding embodiments, wherein the sequence encoding the DNA recognition sequence is within 1, 2, 3, 4, 5, 6, 7, 8, 9, 10, 15, 20, 25, 30, 40, 50, 60, 70, 80, 90, 100, 200, 300, 400, 500, 600, 700, 800, 900, 1000, 1500, 2000, 2500, 3000, 3500, 4000, 4500, 5000 nucleotides, or more, of the heterologous object sequence.

[0248] 121. The system, fusion protein, or method of embodiment 119 or 120, wherein the serine recombinase polypeptide domain is capable of integrating the heterologous object sequence into the target DNA.

[0249] 122. The system, fusion protein, or method of embodiment 121, wherein the heterologous object sequence is inserted into the genome of the cell at an efficiency of at least about 0.1% (e.g., at least about 0.1%, 0.5%, 1%, 5%, 10%, 20%, 30%, 40%, 50%, 60%, 70%, 80%, 85%, 90%, 95%, 96%, 97%, 98%, 99%, or 100%) of a population of the cell, e.g., as measured in an assay of Example 31 or 33.

[0250] 123. The system, fusion protein, or method of embodiment 121 or 122, wherein the heterologous object sequence is inserted into a site within the genome of the cell (e.g., a cognate DNA recognition sequence bound by a recombinase that binds to a DNA recognition sequence occurring within the template RNA: comprising a sequence of SEQ ID NO: (n+13,000) or a sequence of SEQ ID NO: (n+26,000), wherein n is chosen from any of 1-12,677 (e.g., any of 1-11,432) (e.g., a sequence of any of SEQ ID NOs: 13,001-25,677 (e.g., SEQ ID NOs: 13,001-24,432) or SEQ ID NOs: 26,001-38,677 (e.g., SEQ ID NOs: 26,001-37,432)), or a nucleotide sequence having at least 70%, 75%, 80%, 85%, 90%, 95%, 96%, 97%, 98%, or 99% identity thereto, or having no more than 1, 2, 3, 4, 5, 6, 7, 8, 9, 10, 11, 12, 13, 14, 15, 16, 17, 18, 19, or 20 sequence alterations (e.g., substitutions, insertions, or deletions) relative thereto; and/or a recombinase comprising a corresponding amino acid sequence of SEQ ID NO: n) in at least about 1%, (e.g., at least about 1%, 5%, 10%, 15%, 20%, 25%, 30%, 40%, 50%, 60%, 70%, 80%, 85%, 90%, 95%, 96%, 97%, 98%, 99%, 99.9%, or 100%) of insertion events.

[0251] 124. The system, fusion protein, or method of any of embodiments 121-123, wherein, in a population of the cells (e.g., contacted with the system), the heterologous object sequence is inserted into between 1-10, e.g., 1-9, 1-8, 1-7, 1-6, 1-5, 1-4, 1-3, 2-10, 2-5, 2-4, 3-10, 3-5, or 5-10 sites within the genome of the cell (e.g., a cognate DNA recognition sequence bound by a recombinase that binds to a DNA recognition sequence occurring within the template RNA: comprising a sequence of SEQ ID NO: (n+13,000) or a sequence of SEQ ID NO: (n+26,000), wherein n is chosen from any of 1-12,677 (e.g., any of 1-11,432) (e.g., a sequence of any of SEQ ID NOs: 13,001-25,677 (e.g., SEQ ID NOs: 13,001-24,432) or SEQ ID NOs: 26,001-38,677 (e.g., SEQ ID NOs: 26,001-37,432)), or a nucleotide sequence having at least 70%, 75%, 80%, 85%, 90%, 95%, 96%, 97%, 98%, or 99% identity thereto, or having no more than 1, 2, 3, 4, 5, 6, 7, 8, 9, 10, 11, 12, 13, 14, 15, 16, 17, 18, 19, or 20 sequence alterations (e.g., substitutions, insertions, or deletions) relative thereto; and/or a recombinase comprising a corresponding amino acid sequence of SEQ ID NO: n), in at least 1%, 5%, 10%, 15%, 20%, 25%, 30%, 40%, 50%, 60%, 70%, 80%, 85%, 90%, 95%, 96%, 97%, 98%, 99%, 99.9%, or 100% of the cells in the population.

[0252] 125. The system, fusion protein, or method of any of embodiments 119-124, wherein the heterologous object sequence comprises a eukaryotic gene, e.g., a mammalian gene, e.g., human gene, e.g., a blood factor (e.g., genome factor I, II, V, VII, X, XI, XII or XIII) or enzyme, e.g., lysosomal enzyme, or synthetic human gene (e.g. a chimeric antigen receptor).

[0253] 126. The system, fusion protein, or method of any of embodiments 119-125, wherein the heterologous object sequence comprises an enzyme, a structural protein, a signaling protein, a regulatory protein, a transport protein, a sensory protein, a motor protein, a defense protein, a storage protein, an immune receptor protein (e.g. a synthetic immune receptor protein such as a chimeric antigen receptor protein (CAR), a T cell receptor, or a B cell receptor), or an antibody.

[0254] 127. The system, fusion protein, or method of any of the preceding embodiments, wherein the DNA recognition sequence comprises a first parapalindromic sequence and a second parapalindromic sequence, and a core sequence situated between the first and second parapalindromic sequences.

[0255] 128. The system, fusion protein, or method of embodiment 127, wherein the template RNA comprises a heterologous object sequence disposed between the first parapalindromic sequence and the second parapalindromic sequence.

[0256] 129. The system, fusion protein, or method of embodiment 127 or 128, wherein each parapalindromic sequence is about 15-35 or 20-30 nucleotides.

[0257] 130. The system, fusion protein, or method of any of embodiments 127-129, wherein the first and second parapalindromic sequences together comprise a parapalindromic region occurring within a nucleotide sequence of any of SEQ ID NOs: 13,001-25,677 (e.g., SEQ ID NOs: 13,001-24,432) or SEQ ID NOs: 26,001-38,677 (e.g., SEQ ID NOs: 26,001-37,432), or a nucleotide sequence having at least 70%, 75%, 80%, 85%, 90%, 95%, 96%, 97%, 98%, or 99% identity to said parapalindromic region, or having no more than 1, 2, 3, 4, 5, 6, 7, 8, 9, 10, 11, 12, 13, 14, 15, 16, 17, 18, 19, or 20 sequence alterations (e.g., substitutions, insertions, or deletions) relative thereto.

[0258] 131. The system, fusion protein, or method of any of embodiments 127-130, wherein the core sequence has a length of about 2-20 nucleotides.

[0259] 132. The system, fusion protein, or method of any of the preceding embodiments, wherein the template DNA is capable of replicating in a cell.

[0260] 133. The system, fusion protein, or method of any of the preceding embodiments, wherein the template DNA is circular.

[0261] 134. The system, fusion protein, or method of any of the preceding embodiments, wherein the template DNA is circularized, e.g., to form an episome.

[0262] 135. The system, fusion protein, or method of any of the preceding embodiments, wherein the template DNA is circularized by endogenous machinery, e.g., in a target cell.

[0263] 136. The system, fusion protein, or method of any of the preceding embodiments, wherein the template DNA is circularized by nonhomologous end joining.

[0264] 137. The system, fusion protein, or method of any of the preceding embodiments, wherein the template DNA is circularized by homologous recombination.

[0265] 138. The system, fusion protein, or method of any of the preceding embodiments, wherein the template DNA is circularized by ligation.

[0266] 139. The system, fusion protein, or method of any of the preceding embodiments, wherein the template DNA comprises one long terminal repeat (LTR).

[0267] 140. The system, fusion protein, or method of any of the preceding embodiments, wherein the template DNA comprises two LTRs (e.g., two copies of the same LTR or two different LTRs).

[0268] 141. The system, fusion protein, or method of embodiment 140, wherein the template DNA is linear and wherein one LTR is positioned at the 5′ end of the template DNA and the other LTR is positioned at the 3′ end of the template DNA.

[0269] 142. The system, fusion protein, or method of embodiment 140 or 141, wherein the template DNA is circular and wherein the two LTRs are adjacent to each other.

[0270] 143. The system, fusion protein, or method of any of the preceding embodiments, wherein the retroviral (e.g., lentiviral) structural polypeptide domain and/or the retroviral (e.g., lentiviral) reverse transcriptase domain are from an HIV (e.g., HIV-1 or HIV-2).

[0271] 144. The system, fusion protein, or method of any of the preceding embodiments, wherein the retroviral (e.g., lentiviral) structural polypeptide domain and/or the retroviral (e.g., lentiviral) reverse transcriptase domain are from a retrovirus, e.g., an Orthoretrovirus (e.g., an Alpharetrovirus, Betaretrovirus, Deltaretrovirus, Epsilonretrovirus, Gammaretrovirus, or Lentivirus) or a Spumaretrovirus (e.g., Bovispumavirus, Equispumavirus, Felispumavirus, Prosimiispumavirus, or Simiispumavirus).

[0272] 145. The system, fusion protein, or method of any of the preceding embodiments, wherein the retroviral (e.g., lentiviral) structural polypeptide domain and/or the retroviral (e.g., lentiviral) reverse transcriptase domain are from a retroviral replicating vector (RRV), gammaretrovirus (GRV), Moloney murine sarcoma virus (MMSV), Moloney murine leukemia virus (MoMLV), murine stem cell virus (MSCV), murine leukemia virus (MMLV), human foamy virus, murine mammary tumor virus (MMTV), human T-cell leukemia virus (HTLV), bovine leukemia virus (BLV), Avian leukosis virus (ALV), Rous sarcoma virus (RSV), FIV, SIV, caprine arthritis encephalitis virus (CAEV), equine infectious anemia virus (EIAV), or maedi/visna virus (MVV).

[0273] 146. The system, fusion protein, or method of any of the preceding embodiments, wherein the retroviral (e.g., lentiviral) structural polypeptide domain and the retroviral (e.g., lentiviral) reverse transcriptase polypeptide domain are part of the same polypeptide.

[0274] 147. The system, fusion protein, or method of any of the preceding embodiments, wherein the retroviral (e.g., lentiviral) structural polypeptide domain and the serine recombinase polypeptide domain are part of the same polypeptide.

[0275] 148. The system, fusion protein, or method of any of the preceding embodiments, wherein the retroviral (e.g., lentiviral) reverse transcriptase polypeptide domain and the serine recombinase polypeptide domain are part of the same polypeptide.

[0276] 149. The system, fusion protein, or method of any of the preceding embodiments, wherein the retroviral (e.g., lentiviral) structural polypeptide domain, the retroviral (e.g., lentiviral) reverse transcriptase polypeptide domain, and the serine recombinase polypeptide domain are part of the same polypeptide.

[0277] 150. The system, fusion protein, or method of any of the preceding embodiments, wherein the retroviral (e.g., lentiviral) structural polypeptide domain and the serine recombinase polypeptide domain are separate polypeptides.

[0278] 151. The system, fusion protein, or method of any of the preceding embodiments, wherein the retroviral (e.g., lentiviral) reverse transcriptase polypeptide domain and the serine recombinase polypeptide domain are separate polypeptides.

[0279] 152. The system, fusion protein, or method of any of the preceding embodiments, wherein the retroviral (e.g., lentiviral) structural polypeptide domain comprises an HIV-1 gag amino acid sequence as listed in Table 11 or 12, or an amino acid sequence having at least 75%, 80%, 85%, 90%, 95%, 96%, 97%, 98%, or 99% sequence identity thereto.

[0280] 153. The system, fusion protein, or method of any of the preceding embodiments, wherein the retroviral (e.g., lentiviral) reverse transcriptase polypeptide domain comprises an HIV-1 pol amino acid sequence as listed in Table 11 or 12, or an amino acid sequence having at least 75%, 80%, 85%, 90%, 95%, 96%, 97%, 98%, or 99% sequence identity thereto.

[0281] 154. The system, fusion protein, or method of any of the preceding embodiments, wherein the retroviral (e.g., lentiviral) reverse transcriptase polypeptide domain comprises an HIV-1 integrase amino acid sequence as listed in Table 11 or 12, or an amino acid sequence having at least 75%, 80%, 85%, 90%, 95%, 96%, 97%, 98%, or 99% sequence identity thereto.

[0282] 155. The system, fusion protein, or method of any of the preceding embodiments, wherein the retroviral (e.g., lentiviral) structural polypeptide domain and the serine recombinase polypeptide domain are connected by a linker (e.g., a cleavable linker, e.g., a linker cleavable by a protease).

[0283] 156. The system, fusion protein, or method of embodiment 155, wherein the link comprises a protease recognition site.

[0284] 157. The system, fusion protein, or method of embodiment 155 or 156, wherein the linker is attached to the N-terminal end of the retroviral (e.g., lentiviral) structural polypeptide domain.

[0285] 158. The system, fusion protein, or method of embodiment 155 or 156, wherein the linker is attached to a retroviral (e.g., lentiviral) matrix protein.

[0286] 159. The system, fusion protein, or method of any of the preceding embodiments, wherein the retroviral (e.g., lentiviral) reverse transcriptase polypeptide domain and the serine recombinase polypeptide domain are connected by a linker (e.g., a cleavable linker).

[0287] 160. The system, fusion protein, or method of embodiment 155, wherein the linker is attached to the C-terminal end of the retroviral (e.g., lentiviral) structural polypeptide domain.

[0288] 161. The system, fusion protein, or method of any of the preceding embodiments, wherein the system does not comprise a Flp recombinase, or a nucleic acid molecule encoding a Flp recombinase.

[0289] 162. The system, fusion protein, or method of any of the preceding embodiments, wherein the template RNA, or the DNA molecule encoding the template RNA, does not comprise an FRT site.

[0290] 163. The system, fusion protein, or method of any of the preceding embodiments, wherein the system does not comprise a transposase.

[0291] 164. The system, fusion protein, or method of any of the preceding embodiments, wherein the system does not comprise a Sleeping Beauty transposase, or a nucleic acid molecule encoding a Sleeping Beauty transposase.

[0292] 165. The system, fusion protein, or method of any of the preceding embodiments, wherein the template RNA, or the DNA molecule encoding the template RNA, does not comprise a Sleeping Beauty RIR site and/or a Sleeping Beauty LIR site.

[0293] 166. The system, fusion protein, or method of any of the preceding embodiments, wherein the system does not comprise a phiC31 integrase, or a nucleic acid molecule encoding a phiC31 integrase.

[0294] 167. The system, fusion protein, or method of any of the preceding embodiments, wherein the template RNA, or the DNA molecule encoding the template RNA, does not comprise an attB site recognized by a phiC31 integrase (e.g., an attB site having a nucleic acid sequence as shown in FIG. 4 of Grandchamp et al. 2014; PLOS ONE 9(6): e99649).

[0295] 168. The system, fusion protein, or method of any of the preceding embodiments, wherein the template RNA, or the DNA molecule encoding the template RNA, does not comprise an attP site recognized by a phiC31 integrase (e.g., an attP site having a nucleic acid sequence as shown in FIG. 4 of Grandchamp et al. 2014; PLOS ONE 9(6): e99649).

[0296] 169. The system, fusion protein, or method of any of the preceding embodiments, wherein the system does not comprise a piggyBac transposase, or a nucleic acid molecule encoding a piggyBac transposase.

[0297] 170. The system, fusion protein, or method of any of the preceding embodiments, wherein the template DNA does not comprise a piggyBac transposase recognition site.

[0298] 171. The system, fusion protein, or method of any of the preceding embodiments, wherein the retroviral (e.g., lentiviral) structural polypeptide domain is provided as an RNA molecule encoding the retroviral (e.g., lentiviral) structural polypeptide domain.

[0299] 172. The system, fusion protein, or method of any of the preceding embodiments, wherein the retroviral (e.g., lentiviral) reverse transcriptase polypeptide domain is provided as an RNA molecule encoding the retroviral (e.g., lentiviral) reverse transcriptase polypeptide domain.

[0300] 173. The system, fusion protein, or method of any of the preceding embodiments, wherein the serine recombinase polypeptide domain is provided as an RNA molecule encoding the serine recombinase polypeptide domain.

[0301] 174. The system, fusion protein, or method of any of the preceding embodiments, wherein the retroviral (e.g., lentiviral) structural polypeptide domain is provided as a polypeptide (e.g., as a domain of a polypeptide).

[0302] 175. The system, fusion protein, or method of any of the preceding embodiments, wherein the retroviral (e.g., lentiviral) reverse transcriptase polypeptide domain is provided as a polypeptide (e.g., as a domain of a polypeptide).

[0303] 176. The system, fusion protein, or method of any of the preceding embodiments, wherein the serine recombinase polypeptide domain is provided as a polypeptide (e.g., as a domain of a polypeptide).

[0304] 177. The system, fusion protein, or method of embodiment 176, wherein the serine recombinase polypeptide domain is provided in an exosome, e.g., wherein the serine recombinase polypeptide domain is fused to a domain that binds a membrane protein in the exosome.

[0305] 178. The system, fusion protein, or method of embodiment 176, wherein the template RNA, structural polypeptide domain, reverse transcriptase polypeptide domain, and/or serine recombinase polypeptide domain is introduced into the cell via a nanoparticle, lipid nanoparticle, fusosome, or vesicle.

[0306] 179. The system, fusion protein, or method of any of the preceding embodiments, wherein the template RNA is enclosed in a proteinaceous exterior (e.g., comprised in a retroviral (e.g., lentiviral) particle, e.g., an integration-deficient retrovirus (e.g., lentivirus)).

[0307] 180. The system, fusion protein, or method of any of the preceding embodiments, wherein the serine recombinase polypeptide domain is enclosed in a proteinaceous exterior (e.g., comprised in a retroviral (e.g., lentiviral) particle, e.g., an integration-deficient retrovirus (e.g., lentivirus)).

[0308] 181. The system, fusion protein, or method of any of the preceding embodiments, wherein the serine recombinase polypeptide domain is provided as an RNA encoding the serine recombinase polypeptide domain, that is not enclosed in a proteinaceous exterior.

[0309] 182. The system, fusion protein, or method of any of the preceding embodiments, wherein the serine recombinase polypeptide domain is provided as an mRNA encoding the serine recombinase polypeptide domain.

[0310] 183. The system, fusion protein, or method of any of the preceding embodiments, wherein the template RNA is provided in an exosome.

[0311] 184. The system, fusion protein, or method of any of the preceding embodiments, wherein the template RNA is provided in a proteinaceous exterior (e.g., comprised in a retroviral (e.g., lentiviral) particle, e.g., an integration-deficient retrovirus (e.g., lentivirus)), wherein the proteinaceous exterior is comprised in an exosome.

[0312] 185. The system, fusion protein, or method of embodiment 184, wherein the serine recombinase polypeptide domain is provided in a polypeptide in the exosome.

[0313] 186. The system, fusion protein, or method of embodiment 179 or 180, wherein the template RNA and the serine recombinase polypeptide domain are enclosed in different proteinaceous exteriors (e.g., comprised in different retroviral (e.g., lentiviral) particles, e.g., different integration-deficient retroviruses (e.g., lentiviruses)).

[0314] 187. The system, fusion protein, or method of any of the preceding embodiments, wherein the system comprises:
[0315] (1) a first retroviral (e.g., lentiviral) particle (e.g., a first integration-deficient retrovirus (e.g., lentivirus)) comprising the template RNA; and
[0316] (2) a second retroviral (e.g., lentiviral) particle (e.g., a second integration-deficient retrovirus (e.g., lentivirus)) comprising the serine recombinase polypeptide domain.

[0317] 188. The system, fusion protein, or method of embodiment 187, wherein the second retroviral (e.g., lentiviral) particle further comprises the retroviral (e.g., lentiviral) structural polypeptide domain and/or the retroviral (e.g., lentiviral) reverse transcriptase domain.

[0318] 189. The system, fusion protein, or method of any of the preceding embodiments, wherein the system comprises a retroviral (e.g., lentiviral) particle (e.g., an integration-deficient retrovirus (e.g., lentivirus)) comprising the template RNA and the serine recombinase polypeptide domain; optionally wherein the retroviral (e.g., lentiviral) particle further comprises the retroviral (e.g., lentiviral) structural polypeptide domain and/or the retroviral (e.g., lentiviral) reverse transcriptase domain.

[0319] 190. A lentiviral particle comprising a template RNA and serine recombinase (e.g., serine integrase) polypeptide domain;
[0320] wherein the template RNA comprises a DNA recognition sequence and a heterologous object sequence; wherein the integrase of the lentiviral particle is inactivated;
[0321] wherein the serine recombinase polypeptide domain comprises an amino acid sequence of any of SEQ ID NOs: 1-12,677 (e.g., any of SEQ ID NOs: 1-11,432), or an amino acid sequence having at least 70%, 75%, 80%, 85%, 90%, 95%, 96%, 97%, 98%, or 99% identity thereto,
[0322] and wherein the serine recombinase polypeptide domain binds the DNA recognition sequence and is capable of integrating the template DNA into the target DNA.

[0323] 191. The system, fusion protein, or method of any of the preceding embodiments, wherein the retroviral (e.g., lentiviral) envelope polypeptide domain comprises a retroviral (e.g., lentiviral) env protein, gp120 protein, or gp41 protein.

[0324] 192. The system, fusion protein, or method of embodiment 191, wherein the retroviral envelope polypeptide domain is a fusogen (e.g., a fusogen as described in any of PCT Publication Nos. WO2020014209, WO2020102485, and WO2020102503, which are herein incorporated by reference in their entirety).

[0325] 193. The system, fusion protein, or method of of embodiment 191 or 192, wherein the retroviral envelope polypeptide domain promotes fusion between a viral envelope (e.g., comprising the retroviral polypeptide domain) and a membrane (e.g., a cell membrane).

[0326] 194. The system, fusion protein, or method of any of the preceding embodiments, wherein the cognate DNA recognition sequence is identical in sequence to the DNA recognition sequence of the template nucleic acid, or differs by no more than 1, 2, 3, 4, 5, 6, 7, 8, 9, or 10 sequence alterations, or has at least 70%, 75%, 80%, 85%, 90%, 95%, 96%, 97%, 98%, or 99% identity thereto.

[0327] 195. The system, fusion protein, or method of any of the preceding embodiments, wherein an RNA of the system (e.g., template RNA, the RNA encoding the polypeptide of (a), or an RNA expressed from a heterologous object sequence integrated into a target DNA) comprises a microRNA binding site, e.g., in a 3′ UTR.

[0328] 196. The system, fusion protein, or method of embodiment 195, wherein the microRNA binding site is recognized by a miRNA that is present in a non-target cell type, but that is not present (or is present at a reduced level relative to the non-target cell) in a target cell type.

[0329] 197. The system, fusion protein, or method of embodiment 195 or 196, wherein the miRNA is miR-142, and/or wherein the non-target cell is a Kupffer cell or a blood cell, e.g., an immune cell.

[0330] 198. The system, fusion protein, or method of embodiment 195 or 196, wherein the miRNA is miR-182 or miR-183, and/or wherein the non-target cell is a dorsal root ganglion neuron.

[0331] 199. The system, fusion protein, or method of any of embodiments 195-198, wherein the system comprises a first miRNA binding site that is recognized by a first miRNA (e.g., miR-142) and the system further comprises a second miRNA binding site that is recognized by a second miRNA (e.g., miR-182 or miR-183), wherein the first miRNA binding site and the second miRNA binding site are situated on the same RNA or on different RNAs of the system.

[0332] 200. The system, fusion protein, or method of any of embodiments 195-199, wherein the template RNA comprises at least 2, 3, or 4 miRNA binding sites, e.g., wherein the miRNA binding sites are recognized by the same or different miRNAs.

[0333] 201. The system, fusion protein, or method of any of embodiments 195-200, wherein the RNA encoding the polypeptide of (a) comprises at least 2, 3, or 4 miRNA binding sites, e.g., wherein the miRNA binding sites are recognized by the same or different miRNAs.

[0334] 202. The system, fusion protein, or method of any of embodiments 195-201, wherein the RNA expressed from a heterologous object sequence integrated into a target DNA comprises at least 2, 3, or 4 miRNA binding sites, e.g., wherein the miRNA binding sites are recognized by the same or different miRNAs.

[0335] 203. A method of modifying the genome of a cell (e.g., a eukaryotic cell, e.g., a mammalian cell, e.g., human cell), comprising contacting the cell with a composition comprising:
[0336] (i) the retroviral (e.g., lentiviral) structural polypeptide domain of a system of any of the preceding embodiments,
[0337] (ii) the retroviral (e.g., lentiviral) reverse transcriptase polypeptide domain of the system of any of the preceding embodiments,
[0338] (iii) the serine recombinase (e.g., serine integrase) polypeptide domain of the system of any of the preceding embodiments, and
[0339] (iv) the template RNA of the system of any of the preceding embodiments; thereby modifying the genome of the cell.

[0340] 204. A method of modifying the genome of a cell (e.g., a eukaryotic cell, e.g., a mammalian cell, e.g., human cell) comprising contacting the cell with a composition comprising:
[0341] (i) the retroviral (e.g., lentiviral) structural polypeptide domain of a system of any of the preceding embodiments,
[0342] (ii) the retroviral (e.g., lentiviral) reverse transcriptase polypeptide domain of the system of any of the preceding embodiments, and
[0343] (iii) a nucleic acid molecule (e.g., an RNA molecule or a DNA molecule) encoding the serine recombinase (e.g., serine integrase) polypeptide domain of the system of any of the preceding embodiments, and
[0344] (iv) the template RNA of the system of any of the preceding embodiments; thereby modifying the genome of the cell.

[0345] 205. The method of embodiment 204, wherein the nucleic acid molecule encoding the serine recombinase polypeptide domain is comprised in the template RNA.

[0346] 206. The method of embodiment 204, wherein the nucleic acid molecule encoding the serine recombinase polypeptide domain is not comprised in the template RNA, e.g., is provided as a separate RNA.

[0347] 207. The method of any of the preceding embodiments, wherein the cell comprises, in its genome, a cognate DNA recognition sequence (e.g., an endogenous DNA recognition sequence).

[0348] 208. The method of embodiment 207, wherein the method results in insertion of the template DNA, or a portion thereof (e.g., into the cognate DNA recognition sequence.

[0349] 209. The method of embodiment 207 or 208, wherein the cognate DNA recognition sequence is in a safe harbor site or a Natural Harbor™ site (e.g., as described in WO2020/047124, which is herein incorporated by reference in its entirety, including all description of Natural Harbor™ sites, including Table 4 therein; or as described in Aznauryan et al. (2022, Cell Reports Methods 2:10015), incorporated herein by reference in its entirety, including all description of genomic safe harbor sites, e.g., as shown in FIG. 1).

[0350] 210. The method of embodiment 207 or 208, wherein the cognate DNA recognition sequence is in a gene associated with a disease, or is within 1 kb, 2 kb, 3 kb, 4 kb, 5 kb, or 10 kb of a gene associated with a disease.

[0351] 211. The method of any of embodiments 207-210, wherein the cognate DNA recognition sequence comprises a nucleic acid sequence of any of SEQ ID NOs: 13,001-25,677 (e.g., SEQ ID NOs: 13,001-24,432) or SEQ ID NOs: 26,001-38,677 (e.g., SEQ ID NOs: 26,001-37,432).

[0352] 212. The system, fusion protein, or method of any of the preceding embodiments, wherein the system, polypeptide, and/or nucleic acid (e.g., RNA or DNA) encoding the same, is formulated as a lipid nanoparticle (LNP).

[0353] 213. The system, fusion protein, or method of embodiment 212, wherein the lipid nanoparticle (or a formulation comprising a plurality of the lipid nanoparticles) lacks reactive impurities (e.g., aldehydes), or comprises less than a preselected level of reactive impurities (e.g., aldehydes).

[0354] 214. The system, fusion protein, or method of embodiment 212, wherein the lipid nanoparticle (or a formulation comprising a plurality of the lipid nanoparticles) lacks aldehydes, or comprises less than a preselected level of aldehydes.

[0355] 215. The system, fusion protein, or method of embodiment 212 or 213, wherein the lipid nanoparticle is comprised in a formulation comprising a plurality of the lipid nanoparticles.

[0356] 216. The system, fusion protein, or method of embodiment 215, wherein the lipid nanoparticle formulation is produced using one or more lipid reagents comprising less than 5%, 4%, 3%, 2%, 1%, 0.9%, 0.8%, 0.7%, 0.6%, 0.5%, 0.4%, 0.3%, 0.2%, or 0.1% total reactive impurity (e.g., aldehyde) content.

[0357] 217. The system, fusion protein, or method of embodiment 216, wherein the lipid nanoparticle formulation is produced using one or more lipid reagents comprising less than 3% total reactive impurity (e.g., aldehyde) content.

[0358] 218. The system, fusion protein, or method of any of embodiments 215-217, wherein the lipid nanoparticle formulation is produced using one or more lipid reagents comprising less than 5%, 4%, 3%, 2%, 1%, 0.9%, 0.8%, 0.7%, 0.6%, 0.5%, 0.4%, 0.3%, 0.2%, or 0.1% of any single reactive impurity (e.g., aldehyde) species.

[0359] 219. The system, fusion protein, or method of embodiment 218, wherein the lipid nanoparticle formulation is produced using one or more lipid reagent comprising less than 0.3% of any single reactive impurity (e.g., aldehyde) species.

[0360] 220. The system, fusion protein, or method of embodiment 219, wherein the lipid nanoparticle formulation is produced using one or more lipid reagents comprising less than 0.1% of any single reactive impurity (e.g., aldehyde) species.

[0361] 221. The system, fusion protein, or method of any of embodiments 215-220, wherein the lipid nanoparticle formulation comprises less than 5%, 4%, 3%, 2%, 1%, 0.9%, 0.8%, 0.7%, 0.6%, 0.5%, 0.4%, 0.3%, 0.2%, or 0.1% total reactive impurity (e.g., aldehyde) content.

[0362] 222. The system, fusion protein, or method of embodiment 221, wherein the lipid nanoparticle formulation comprises less than 3% total reactive impurity (e.g., aldehyde) content.

[0363] 223. The system, fusion protein, or method of any of embodiments 215-222, wherein the lipid nanoparticle formulation comprises less than 5%, 4%, 3%, 2%, 1%, 0.9%, 0.8%, 0.7%, 0.6%, 0.5%, 0.4%, 0.3%, 0.2%, or 0.1% of any single reactive impurity (e.g., aldehyde) species.

[0364] 224. The system, fusion protein, or method of embodiment 223, wherein the lipid nanoparticle formulation comprises less than 0.3% of any single reactive impurity (e.g., aldehyde) species.

[0365] 225. The system, fusion protein, or method of embodiment 223, wherein the lipid nanoparticle formulation comprises less than 0.1% of any single reactive impurity (e.g., aldehyde) species.

[0366] 226. The system, fusion protein, or method of any of embodiments 212-225, wherein one or more, or optionally all, of the lipid reagents used for a lipid nanoparticle as described herein or a formulation thereof comprise less than 5%, 4%, 3%, 2%, 1%, 0.9%, 0.8%, 0.7%, 0.6%, 0.5%, 0.4%, 0.3%, 0.2%, or 0.1% total reactive impurity (e.g., aldehyde) content.

[0367] 227. The system, fusion protein, or method of embodiment 226, wherein one or more, or optionally all, of the lipid reagents used for a lipid nanoparticle as described herein or a formulation thereof comprise less than 3% total reactive impurity (e.g., aldehyde) content.

[0368] 228. The system, fusion protein, or method of any of embodiments 212-227, wherein one or more, or optionally all, of the lipid reagents used for a lipid nanoparticle as described herein or a formulation thereof comprise less than 5%, 4%, 3%, 2%, 1%, 0.9%, 0.8%, 0.7%, 0.6%, 0.5%, 0.4%, 0.3%, 0.2%, or 0.1% of any single reactive impurity (e.g., aldehyde) species.

[0369] 229. The system, fusion protein, or method of embodiment 228, wherein one or more, or optionally all, of the lipid reagents used for a lipid nanoparticle as described herein or a formulation thereof comprise less than 0.3% of any single reactive impurity (e.g., aldehyde) species.

[0370] 230. The system, fusion protein, or method of embodiment 228, wherein one or more, or optionally all, of the lipid reagents used for a lipid nanoparticle as described herein or a formulation thereof comprise less than 0.1% of any single reactive impurity (e.g., aldehyde) species.

[0371] 231. The system, fusion protein, or method of any of embodiments 212-230, wherein the total aldehyde content and/or quantity of any single reactive impurity (e.g., aldehyde) species is determined by liquid chromatography (LC), e.g., coupled with tandem mass spectrometry (MS/MS), e.g., according to the method described in Example 26.

[0372] 232. The system, fusion protein, or method of any of embodiments 212-230, wherein the total aldehyde content and/or quantity of reactive impurity (e.g., aldehyde) species is determined by detecting one or more chemical modifications of a nucleic acid molecule (e.g., as described herein) associated with the presence of reactive impurities (e.g., aldehydes), e.g., in the lipid reagents.

[0373] 233. The system, fusion protein, or method of any of embodiments 212-230, wherein the total aldehyde content and/or quantity of aldehyde species is determined by detecting one or more chemical modifications of a nucleotide or nucleoside (e.g., a ribonucleotide or ribonucleoside, e.g., comprised in or isolated from a nucleic acid molecule, e.g., as described herein) associated with the presence of reactive impurities (e.g., aldehydes), e.g., in the lipid reagents, e.g., as described in Example 27.

[0374] 234. The system, fusion protein, or method of embodiment 233, wherein the chemical modifications of a nucleic acid molecule, nucleotide, or nucleoside are detected by determining the presence of one or more modified nucleotides or nucleosides, e.g., using LC-MS/MS analysis, e.g., as described in Example 27.

[0375] 235. A lipid nanoparticle (LNP) comprising the system, polypeptide (or RNA encoding the same), nucleic acid molecule, or DNA encoding the system or polypeptide, of any preceding embodiment.

[0376] 236. A system comprising a first lipid nanoparticle comprising the polypeptide (or DNA or RNA encoding the same) of a Gene Writing system (e.g., as described herein); and a second lipid nanoparticle comprising a nucleic acid molecule of a Gene Writing System (e.g., as described herein).

[0377] 237. The system, fusion protein, or method of any preceding embodiment, wherein the system, nucleic acid molecule, polypeptide, and/or DNA encoding the same, is formulated as a lipid nanoparticle (LNP).

[0378] 238. The LNP of embodiment 237, comprising a cationic lipid.

[0379] 239. The LNP of embodiment 237 or 238, wherein the cationic lipid has a structure according to:

[chemical structure]

[0380] 240. The LNP of any of embodiments 237-239, further comprising one or more neutral lipid, e.g., DSPC, DPPC, DMPC, DOPC, POPC, DOPE, SM, a steroid, e.g., cholesterol, and/or one or more polymer conjugated lipid, e.g., a pegylated lipid, e.g., PEG-DAG, PEG-PE, PEG-S-DAG, PEG-cer or a PEG dialkyoxypropylcarbamate.

[0381] 241. The system, fusion protein, or method of any of the preceding embodiments, wherein the system comprises one or more circular RNA molecules (circRNAs).

[0382] 242. The system, fusion protein, or method of embodiment 241, wherein the circRNA encodes the recombinase polypeptide, structural polypeptide domain, and/or reverse transcriptase polypeptide domain.

[0383] 243. The system, fusion protein, or method of embodiment 241 or 242, wherein circRNA is delivered to a host cell.

[0384] 244. The system, fusion protein, or method of any of the preceding embodiments, wherein the circRNA is capable of being linearized, e.g., in a host cell, e.g., in the nucleus of the host cell.

[0385] 245. The system, fusion protein, or method of any of the preceding embodiments, wherein the circRNA comprises a cleavage site.

[0386] 246. The system, fusion protein, or method of any embodiment 245, wherein the circRNA further comprises a second cleavage site.

[0387] 247. The system, fusion protein, or method of embodiment 245 or 246, wherein the cleavage site can be cleaved by a ribozyme, e.g., a ribozyme comprised in the circRNA (e.g., by autocleavage).

[0388] 248. The system, fusion protein, or method of any of the preceding embodiments, wherein the circRNA comprises a ribozyme sequence.

[0389] 249. The system, fusion protein, or method of embodiment 248, wherein the ribozyme sequence is capable of autocleavage, e.g., in a host cell, e.g., in the nucleus of the host cell.

[0390] 250. The system, fusion protein, or method of embodiment 248 or 249, wherein the ribozyme is an inducible ribozyme.

[0391] 251. The system, fusion protein, or method of any of embodiments 248-250, wherein the ribozyme is a protein-responsive ribozyme, e.g., a ribozyme responsive to a nuclear protein, e.g., a genome-interacting protein, e.g., an epigenetic modifier, e.g., EZH2. 252. The system, fusion protein, or method of any of embodiments 248-251, wherein the ribozyme is a nucleic acid-responsive ribozyme.

[0392] 253. The system, fusion protein, or method of embodiment 252, wherein the catalytic activity (e.g., autocatalytic activity) of the ribozyme is activated in the presence of a target nucleic acid molecule (e.g., an RNA molecule, e.g., an mRNA, miRNA, ncRNA, lncRNA, tRNA, snRNA, or mtRNA).

[0393] 254. The system, fusion protein, or method of any of embodiments 248-251, wherein the ribozyme is responsive to a target protein (e.g., an MS2 coat protein).

[0394] 255. The system, fusion protein, or method of embodiment 253, wherein the target protein localized to the cytoplasm or localized to the nucleus (e.g., an epigenetic modifier or a transcription factor).

[0395] 256. The system, fusion protein, or method of any of embodiments 248-252, wherein the ribozyme comprises the ribozyme sequence of a B2 or ALU retrotransposon, or a nucleic acid sequence having at least 85%, 90%, 95%, 96%, 97%, 98%, or 99% sequence identity thereto.

[0396] 257. The system, fusion protein, or method of any of embodiments 248-252, wherein the ribozyme comprises the sequence of a tobacco ringspot virus hammerhead ribozyme, or a nucleic acid sequence having at least 85%, 90%, 95%, 96%, 97%, 98%, or 99% sequence identity thereto.

[0397] 258. The system, fusion protein, or method of any of embodiments 248-252, wherein the ribozyme comprises the sequence of a hepatitis delta virus (HDV) ribozyme, or a nucleic acid sequence having at least 85%, 90%, 95%, 96%, 97%, 98%, or 99% sequence identity thereto.

[0398] 259. The system, fusion protein, or method of any of embodiments 248-258, wherein the ribozyme is activated by a moiety expressed in a target cell or target tissue.

[0399] 260. The system, fusion protein, or method of any of embodiments 248-259, wherein the ribozyme is activated by a moiety expressed in a target subcellular compartment (e.g., a nucleus, nucleolus, cytoplasm, or mitochondria).

[0400] 261. The system, fusion protein, or method of any of the preceding embodiments, wherein the ribozyme is comprised in a circular RNA or a linear RNA.

[0401] 262. A system comprising a first circular RNA encoding the polypeptide of a Gene Writing system; and a second circular RNA comprising the template RNA of a Gene Writing system.

[0402] 263. The system of any of the preceding embodiments, wherein the template RNA, e.g., the 5′ UTR, comprises a ribozyme which cleaves the template RNA (e.g., in the 5′ UTR).

[0403] 264. The system of any of the preceding embodiments, wherein the template RNA comprises a ribozyme that is heterologous to (a)(i), (a)(ii), (b)(i), or a combination thereof.

[0404] 265. The system of any of the preceding embodiments, wherein the heterologous ribozyme is capable of cleaving RNA comprising the ribozyme, e.g., 5′ of the ribozyme, 3′ of the ribozyme, or within the ribozyme.

[0405] 266. The system, kit, polypeptide, cell, method, or reaction mixture of any of the preceding embodiments, wherein the insert DNA comprises:
[0406] (i) a first insulator;
[0407] (ii) the DNA recognition sequence; and
[0408] (iii) the heterologous object sequence.

[0409] 267. A template nucleic acid molecule comprising:
[0410] (i) a first insulator;
[0411] (ii) a DNA recognition sequence that is specifically bound by a recombinase polypeptide (e.g., a tyrosine recombinase polypeptide or a serine recombinase polypeptide); and
[0412] (iii) a heterologous object sequence.

[0413] 268. The template nucleic acid, system, kit, polypeptide, cell, method, or reaction mixture of embodiment 266 or 267, wherein (ii) is positioned between (i) and (iii).

[0414] 269. The template nucleic acid, system, kit, polypeptide, cell, method, or reaction mixture of embodiment 266 or 267, wherein (i) is positioned between (ii) and (iii).

[0415] 270. The template nucleic acid, system, kit, polypeptide, cell, method, or reaction mixture of embodiment 266-269, which further comprises (iv) a second insulator.

[0416] 271. The template nucleic acid, system, kit, polypeptide, cell, method, or reaction mixture of embodiment 270, wherein (i)-(iv) are positioned in the following order: (i), (ii), (iv), (iii).

[0417] 272. The template nucleic acid, system, kit, polypeptide, cell, method, or reaction mixture of any of the preceding embodiments, wherein the distance between the first insulator and the DNA recognition sequence is less than 2500, 2000, 1500, 1000, 750, 500, 400, 300, 200, 150, 100, 90, 80, 70, 60, 50, 40, 30, 20, 15, 10, 9, 8, 7, 6, 5, 4, 3, 2, or 1 nucleotides (e.g., is 0 nucleotides).

[0418] 273. The template nucleic acid, system, kit, polypeptide, cell, method, or reaction mixture of the preceding embodiments, wherein the distance between the DNA recognition sequence and the second insulator is less than 2500, 2000, 1500, 1000, 750, 500, 400, 300, 200, 150, 100, 90, 80, 70, 60, 50, 40, 30, 20, 15, 10, 9, 8, 7, 6, 5, 4, 3, 2, or 1 nucleotides (e.g., is 0 nucleotides).

[0419] 274. The template nucleic acid, system, kit, polypeptide, cell, method, or reaction mixture of any of the preceding embodiments, wherein the distance between the first insulator and the second insulator is less than 1000, 900, 800, 700, 600, 500, 400, 300, 200, 150, 100, 90, 80, 70, 60, or 50 nucleotides.

[0420] 275. The template nucleic acid, system, kit, polypeptide, cell, method, or reaction mixture of any of the preceding embodiments, wherein when the template nucleic acid molecule or insert DNA is integrated into a target DNA molecule (e.g., genomic DNA, e.g., a chromosome or mitochondrial DNA), the nucleic acid sequence between the first insulator and the second insulator is insulated from one or more of:
[0421] a) heterochromatin formation;
[0422] b) epigenetic regulation (e.g., from both of epigenetic regulation and transcriptional regulation);
[0423] c) transcriptional regulation;
[0424] d) histone deacetylation (e.g., from both of histone deacetylation and histone methylation);
[0425] e) histone methylation;
[0426] f) histone deacetylation; and
[0427] g) DNA methylation, e.g., promoter DNA methylation.

[0428] 276. The template nucleic acid, system, kit, polypeptide, cell, method, or reaction mixture of any of the preceding embodiments, wherein when the template nucleic acid molecule or insert DNA is integrated into a target DNA molecule (e.g., genomic DNA, e.g., a chromosome or mitochondrial DNA), the rate of heterochromatin formation of the nucleic acid sequence between the first insulator and the second insulator is reduced by at least about 5%, 10%, 15%, 20%, 25%, 30%, 40%, 50%, 60%, 70%, 75%, 80%, 85%, 90%, 95%, 96%, 97%, 98%, 99%, or 100% compared to an otherwise similar template nucleic acid or insert DNA that lacks the first and second insulators.

[0429] 277. The template nucleic acid, system, kit, polypeptide, cell, method, or reaction mixture of any of the preceding embodiments, wherein when the template nucleic acid molecule or insert DNA is integrated into a target DNA molecule (e.g., genomic DNA, e.g., a chromosome or mitochondrial DNA), there is a difference (e.g., an increase or reduction) by at least about 5%, 10%, 15%, 20%, 25%, 30%, 40%, 50%, 60%, 70%, 75%, 80%, 85%, 90%, 95%, 96%, 97%, 98%, 99%, or 100% in the nucleic acid sequence on one side of the first insulator compared to the nucleic acid sequence on the other side of the first insulator, of one or more of:
[0430] a) heterochromatin formation;
[0431] b) epigenetic regulation (e.g., from both of epigenetic regulation and transcriptional regulation);
[0432] c) transcriptional regulation;
[0433] d) histone deacetylation (e.g., from both of histone deacetylation and histone methylation);
[0434] e) histone methylation;
[0435] f) histone deacetylation; and
[0436] g) DNA methylation, e.g., promoter DNA methylation.

[0437] 278. The template nucleic acid, system, kit, polypeptide, cell, method, or reaction mixture of any of the preceding embodiments, wherein when the template nucleic acid molecule or insert DNA is integrated into a target DNA molecule (e.g., genomic DNA, e.g., a chromosome or mitochondrial DNA), there is a difference (e.g., an increase or reduction) by at least about 5%, 10%, 15%, 20%, 25%, 30%, 40%, 50%, 60%, 70%, 75%, 80%, 85%, 90%, 95%, 96%, 97%, 98%, 99%, or 100% in the nucleic acid sequence between the first and second insulators, compared to an otherwise similar nucleic acid sequence that is situated in the same site in the target DNA molecule and lacks the first and second insulator, of one or more of:
[0438] a) heterochromatin formation;
[0439] b) epigenetic regulation (e.g., from both of epigenetic regulation and transcriptional regulation);
[0440] c) transcriptional regulation;
[0441] d) histone deacetylation (e.g., from both of histone deacetylation and histone methylation);
[0442] e) histone methylation;
[0443] f) histone deacetylation; and
[0444] g) DNA methylation, e.g., promoter DNA methylation.

[0445] 279. The template nucleic acid, system, kit, polypeptide, cell, method, or reaction mixture of any of the preceding embodiments, wherein when the template nucleic acid molecule or insert DNA is integrated into a target DNA molecule (e.g., genomic DNA, e.g., a chromosome or mitochondrial DNA), the level of heterochromatin formation in a predetermined time frame of the nucleic acid sequence between the first insulator and the second insulator is reduced by at least about 5%, 10%, 15%, 20%, 25%, 30%, 40%, 50%, 60%, 70%, 75%, 80%, 85%, 90%, 95%, 96%, 97%, 98%, 99%, or 100% compared to an otherwise similar template nucleic acid that lacks the first and second insulators, wherein optionally the predetermined time frame is 7, 10, 14, 21, 28, or 60 days.

[0446] 280. The template nucleic acid, system, kit, polypeptide, cell, method, or reaction mixture of any of the preceding embodiments, wherein when the template nucleic acid molecule or insert DNA is integrated into a target DNA molecule (e.g., genomic DNA, e.g., a chromosome or mitochondrial DNA), the level of expression of a gene comprised in the heterologous object sequence is reduced by no more than 0.1%, 1%, 2%, 3%, 4%, 5%, 6%, 7%, 8%, 9%, 10%, 20%, 30%, 40%, 50%, or 75% compared to an otherwise similar template nucleic acid that lacks the first and second insulators.

[0447] 281. The template nucleic acid, system, kit, polypeptide, cell, method, or reaction mixture of any of the preceding embodiments, wherein the first and/or second insulator is specifically bound by CTCF (CCCTC-binding factor), CTF (CAAT-binding transcription factor 1), USF1 (Upstream Stimulatory Factor 1), USF2 (Upstream Stimulatory Factor 2), PARP-1 (Poly(ADP-ribose) Polymerase-1), or VEZF1 (Vascular Endothelial Zinc Finger 1).

[0448] 282. The template nucleic acid, system, kit, polypeptide, cell, method, or reaction mixture of any of the preceding embodiments, wherein the first and/or second insulator comprises the nucleic acid sequence of an insulator selected from any one of chicken P-globin 5′HS4 (cHS4) element, a Scaffold or Matrix Attachment Region (S/MAR) (e.g., MAR X_S29), a Stabilising Anti Repressor (STAR) element (e.g., STAR40), a D4Z4 insulator, A Ubiquitous Chromatin Opening Element (UCOE element) (e.g., aHNRPA2B1-CBX3 locus (A2UCOE), 3′UCOE, or SRF-UCOE), or a nucleic acid sequence having at least 75%, 80%, 85%, 90%, 95%, 96%, 97%, 98%, or 99% identity thereto.

[0449] 283. The template nucleic acid, system, kit, polypeptide, cell, method, or reaction mixture of any of the preceding embodiments, wherein one or both of the first and second insulator is a barrier insulator.

[0450] 284. The template nucleic acid, system, kit, polypeptide, cell, method, or reaction mixture of any of the preceding embodiments, wherein one or both of the first and second insulator is an enhancer-blocking insulator.

[0451] 285. The template nucleic acid, system, kit, polypeptide, cell, method, or reaction mixture of any of the preceding embodiments, wherein one or both of the first and second insulator is a passive boundary element.

[0452] 286. The template nucleic acid, system, kit, polypeptide, cell, method, or reaction mixture of any of the preceding embodiments, wherein one or both of the first and second insulator is an active chromatin remodeling element.

[0453] 287. The template nucleic acid, system, kit, polypeptide, cell, method, or reaction mixture of any of the preceding embodiments, wherein the first and/or second insulator comprises an insulator sequence identified according to the method described in Liu et al. (2015, Nature Biotechnol. 33(2): 198-203; incorporated herein by reference).

[0454] 288. The template nucleic acid, system, kit, polypeptide, cell, method, or reaction mixture of any of the preceding embodiments, wherein the first insulator and the second insulator share the same orientation.

[0455] 289. The template nucleic acid, system, kit, polypeptide, cell, method, or reaction mixture of any of the preceding embodiments, wherein the first insulator and the second insulator have opposite orientations.

[0456] 290. The template nucleic acid, system, kit, polypeptide, cell, method, or reaction mixture of any of the preceding embodiments, wherein the first insulator and the second insulator have the same nucleic acid sequence.

[0457] 291. The template nucleic acid, system, kit, polypeptide, cell, method, or reaction mixture of any of the preceding embodiments, wherein the first insulator and the second insulator have different nucleic acid sequences.

[0458] 292. The template nucleic acid, system, kit, polypeptide, cell, method, or reaction mixture of any of the preceding embodiments, wherein the template nucleic acid molecule is DNA.

[0459] 293. The template nucleic acid, system, kit, polypeptide, cell, method, or reaction mixture of any of the preceding embodiments, wherein the template nucleic acid molecule is RNA.

[0460] 294. The template nucleic acid, system, kit, polypeptide, cell, method, or reaction mixture of any of the preceding embodiments, wherein the template nucleic acid molecule or insert DNA is circular (e.g., circular and double stranded).

[0461] 295. The template nucleic acid, system, kit, polypeptide, cell, method, or reaction mixture of any of the preceding embodiments, wherein the template nucleic acid molecule or insert DNA is linear.

[0462] 296. The template nucleic acid, system, kit, polypeptide, cell, method, or reaction mixture of any of the preceding embodiments, wherein the template nucleic acid molecule or insert DNA comprises doggybone DNA (dbDNA) or closed-ended DNA (ceDNA).

[0463] 296a. The template nucleic acid, system, kit, polypeptide, cell, method, or reaction mixture of any of the preceding embodiments, wherein the template nucleic acid molecule or insert DNA comprises a viral vector (e.g., an AAV vector, adenovirus vector, or retroviral vector).

[0464] 297. The template nucleic acid, system, kit, polypeptide, cell, method, or reaction mixture of any of the preceding embodiments, wherein the template nucleic acid molecule or insert DNA comprises exactly one DNA recognition sequence.

[0465] 298. The template nucleic acid, system, kit, polypeptide, cell, method, or reaction mixture of any of the preceding embodiments, wherein the template nucleic acid molecule or insert DNA comprises exactly two insulators.

[0466] 299. The template nucleic acid, system, kit, polypeptide, cell, method, or reaction mixture of any of the preceding embodiments, wherein the template nucleic acid molecule or insert DNA further comprises a promoter.

[0467] 300. The template nucleic acid, system, kit, polypeptide, cell, method, or reaction mixture of any of the preceding embodiments, wherein the template nucleic acid molecule or insert DNA comprises exactly one promoter.

[0468] 301. The template nucleic acid, system, kit, polypeptide, cell, method, or reaction mixture of any of the preceding embodiments, wherein the template nucleic acid molecule or insert DNA comprises exactly one heterologous object sequence.

[0469] 302. The template nucleic acid, system, kit, polypeptide, cell, method, or reaction mixture of any of the preceding embodiments, wherein the template nucleic acid molecule or insert DNA further comprises an enhancer.

[0470] 303. The template nucleic acid, system, kit, polypeptide, cell, method, or reaction mixture of any of the preceding embodiments, wherein the template nucleic acid molecule or insert DNA further comprises a long terminal repeat (LTR), e.g., from a retrovirus or a lentivirus (e.g., HIV).

[0471] 304. The template nucleic acid, system, kit, polypeptide, cell, method, or reaction mixture of any of the preceding embodiments, wherein the template nucleic acid molecule or insert DNA comprises one or both of a 5′ long terminal repeat (5′ LTR) and a 3′ long terminal repeat (3′ LTR).

[0472] 305. The template nucleic acid, system, kit, polypeptide, cell, method, or reaction mixture of embodiment 304, wherein the 3′ UTR comprises a deletion of its U3 sequence.

[0473] 306. The template nucleic acid, system, kit, polypeptide, cell, method, or reaction mixture of embodiment 304 or 305, wherein the first insulator is positioned in an LTR, e.g., in the 3′ LTR or the 5′ LTR.

[0474] 307. The template nucleic acid, system, kit, polypeptide, cell, method, or reaction mixture of any of embodiments 304-306, wherein the first insulator is positioned in the 3′ UTR, e.g., at the position of the deletion of the U3 sequence.

[0475] 308. The template nucleic acid, system, kit, polypeptide, cell, method, or reaction mixture of any of embodiments 304-306, wherein the first insulator is positioned in the 3′ UTR, and upon reverse transcription the first insulator sequence is present in both the 3′ UTR and 5′ UTR sequences of the resulting DNA.

[0476] 309. The template nucleic acid, system, kit, polypeptide, cell, method, or reaction mixture of any of the preceding embodiments, wherein the template nucleic acid molecule or insert DNA further comprises an inverted terminal repeat (ITR), e.g., from an adeno-associated virus.

[0477] 310. The template nucleic acid, system, kit, polypeptide, cell, method, or reaction mixture of any of embodiments 303-309, wherein the LTR or ITR is positioned between the heterologous object sequence and the first insulator.

[0478] 311. The template nucleic acid, system, kit, polypeptide, cell, method, or reaction mixture of any of embodiments 303-310, wherein the LTR or ITR is positioned between the heterologous object sequence and the second insulator.

[0479] 312. The template nucleic acid, system, kit, polypeptide, cell, method, or reaction mixture of any of embodiments 303-311, wherein the LTR or ITR is not positioned between the first insulator and the DNA recognition sequence.

[0480] 313. The template nucleic acid, system, kit, polypeptide, cell, method, or reaction mixture of any of embodiments 303-312, wherein the LTR or ITR is not positioned between the second insulator and the DNA recognition sequence.

[0481] 314. The template nucleic acid, system, kit, polypeptide, cell, method, or reaction mixture of any of embodiments 303-313, wherein the first insulator is positioned between the heterologous object sequence and the first LTR or ITR

[0482] 315. The template nucleic acid, system, kit, polypeptide, cell, method, or reaction mixture of any of embodiments 303-314, wherein the second insulator is positioned between the heterologous object sequence and the second LTR or ITR

[0483] 316. The template nucleic acid, system, kit, polypeptide, cell, method, or reaction mixture of any of embodiments 303-315, wherein the first and second insulators are positioned between the heterologous object sequence and the LTRs or ITRs.

[0484] 317. The template nucleic acid, system, kit, polypeptide, cell, method, or reaction mixture of any of the preceding embodiments, wherein the DNA recognition sequence is specifically bound by a serine recombinase (e.g., serine integrase) polypeptide that comprises an amino acid sequence of any of SEQ ID NOs: 1-12,677 (e.g., SEQ ID NOs: 1-11,432), or an amino acid sequence having at least 70%, 75%, 80%, 85%, 90%, 95%, 96%, 97%, 98%, or 99% identity thereto.

[0485] 318. The template nucleic acid, system, kit, polypeptide, cell, method, or reaction mixture of any of the preceding embodiments, wherein the DNA recognition sequence comprises a nucleic acid sequence of any of SEQ ID NOs: 13,001-25,677 (e.g., SEQ ID NOs: 13,001-24,432) or SEQ ID NOs: 26,001-38,677 (e.g., SEQ ID NOs: 26,001-37,432), or a nucleotide sequence having at least 70%, 75%, 80%, 85%, 90%, 95%, 96%, 97%, 98%, or 99% identity thereto, or having no more than 1, 2, 3, 4, 5, 6, 7, 8, 9, 10, 11, 12, 13, 14, 15, 16, 17, 18, 19, or 20 sequence alterations (e.g., substitutions, insertions, or deletions) relative thereto.

[0486] 319. The template nucleic acid, system, kit, polypeptide, cell, method, or reaction mixture of any of the preceding embodiments, wherein the serine integrase polypeptide comprises an amino acid sequence of any of SEQ ID NOs: 1-12,677 (e.g., SEQ ID NOs: 1-11,432), or an amino acid sequence having at least 70%, 75%, 80%, 85%, 90%, 95%, 96%, 97%, 98%, or 99% identity thereto.

[0487] 320. The template nucleic acid, system, kit, polypeptide, cell, method, or reaction mixture of any of the preceding embodiments, wherein the serine integrase polypeptide is a viral serine integrase polypeptide or a plasmid serine integrase.

[0488] 321. The template nucleic acid, system, kit, polypeptide, cell, method, or reaction mixture of any of the preceding embodiments, wherein the DNA recognition sequence comprises a first parapalindromic sequence and a second parapalindromic sequence, and a core sequence situated between the first and second parapalindromic sequences.

[0489] 322. The template nucleic acid, system, kit, polypeptide, cell, method, or reaction mixture of any of the preceding embodiments, wherein each parapalindromic sequence is about 15-35 or 20-30 nucleotides in length.

[0490] 323. The template nucleic acid, system, kit, polypeptide, cell, method, or reaction mixture of any of the preceding embodiments, wherein the first and second parapalindromic sequences together comprise a parapalindromic region occurring within a nucleotide sequence of any of SEQ ID NOs: 13,001-25,677 (e.g., SEQ ID NOs: 13,001-24,432) or SEQ ID NOs: 26,001-38,677 (e.g., SEQ ID NOs: 26,001-37,432), or a nucleotide sequence having at least 70%, 75%, 80%, 85%, 90%, 95%, 96%, 97%, 98%, or 99% identity to said parapalindromic region, or having no more than 1, 2, 3, 4, 5, 6, 7, 8, 9, 10, 11, 12, 13, 14, 15, 16, 17, 18, 19, or 20 sequence alterations (e.g., substitutions, insertions, or deletions) relative thereto.

[0491] 324. The template nucleic acid, system, kit, polypeptide, cell, method, or reaction mixture of any of the preceding embodiments, wherein the core sequence has a length of about 2-20 nucleotides.

[0492] 325. The template nucleic acid, system, kit, polypeptide, cell, method, or reaction mixture of any of the preceding embodiments, wherein the heterologous object sequence comprises a sequence encoding an effector (e.g., a therapeutic effector).

[0493] 326. The template nucleic acid, system, kit, polypeptide, cell, method, or reaction mixture of any of the preceding embodiments, wherein the effector is a polypeptide (e.g., a protein).

[0494] 327. The template nucleic acid, system, kit, polypeptide, cell, method, or reaction mixture of any of the preceding embodiments, wherein the effector is a nucleic acid (e.g., a non-coding RNA, e.g., an siRNA or miRNA).

[0495] 328. The template nucleic acid, system, kit, polypeptide, cell, method, or reaction mixture of any of the preceding embodiments, wherein the DNA recognition sequence is within 20, 25, 30, 40, 50, 60, 70, 80, 90, 100, 125, 150, 175, 200, 225, 250, 300, 350, 400, 450, or 500 nucleotides of the heterologous object sequence.

[0496] 329. The template nucleic acid, system, kit, polypeptide, cell, method, or reaction mixture of any of the preceding embodiments, wherein the serine integrase polypeptide is capable of integrating the heterologous object sequence, the first insulator, and the second insulator into a target DNA molecule (e.g., a genomic DNA, e.g., a chromosome or mitochondrial DNA), e.g., at a specific target site.

[0497] 330. The template nucleic acid, system, kit, polypeptide, cell, method, or reaction mixture of embodiment 15, wherein the heterologous object sequence is integrated into the target DNA molecule at an efficiency of at least about 0.1% (e.g., at least about 0.1%, 0.5%, 1%, 5%, 10%, 20%, 30%, 40%, 50%, 60%, 70%, 80%, 85%, 90%, 95%, 96%, 97%, 98%, 99%, or 100%) of a population of the cell, e.g., as measured in an assay of Example 5.

[0498] 331. The template nucleic acid, system, kit, polypeptide, cell, method, or reaction mixture of any of the preceding embodiments, wherein the DNA recognition sequence is capable of being recombined by the serine integrase polypeptide with a cognate DNA recognition sequence in a naturally occurring human genome.

[0499] 332. The template nucleic acid, system, kit, polypeptide, cell, method, or reaction mixture of embodiment 331, wherein the cognate DNA recognition sequence is in a safe harbor site or a Natural Harbor™ site (e.g., as described in WO2020/047124, which is herein incorporated by reference in its entirety, including all description of Natural Harbor™ sites, including Table 4 therein).

[0500] 333. The template nucleic acid, system, kit, polypeptide, cell, method, or reaction mixture of embodiment 331 or 332, wherein the cognate DNA recognition sequence is in a gene associated with a disease, or is within 1 kb, 2 kb, 3 kb, 4 kb, 5 kb, or 10 kb of a gene associated with a disease.

[0501] 334. The template nucleic acid, system, kit, polypeptide, cell, method, or reaction mixture of any of embodiments 331-333, wherein the cognate DNA recognition sequence comprises a nucleic acid sequence as listed of any of SEQ ID NOs: 13,001-25,677 (e.g., SEQ ID NOs: 13,001-24,432) or SEQ ID NOs: 26,001-38,677 (e.g., SEQ ID NOs: 26,001-37,432), or a nucleotide sequence having at least 70%, 75%, 80%, 85%, 90%, 95%, 96%, 97%, 98%, or 99% identity thereto, or having no more than 1, 2, 3, 4, 5, 6, 7, 8, 9, 10, 11, 12, 13, 14, 15, 16, 17, 18, 19, or 20 sequence alterations (e.g., substitutions, insertions, or deletions) relative thereto.

[0502] 335. A cell (e.g., a human cell) comprising (e.g., in a chromosome), in order:
[0503] a) a first recombinase transfer sequence;
[0504] b) a first insulator;
[0505] c) a heterologous object sequence;
[0506] d) a second insulator; and
[0507] e) a second recombinase transfer sequence.

[0508] 336. The cell of embodiment 335, which further comprises a first LTR, e.g., between the heterologous object sequence and the second insulator.

[0509] 337. The cell of embodiment 336, which further comprises a second LTR, e.g., between the first LTR and the second insulator.

[0510] The disclosure contemplates all combinations of any one or more of the foregoing aspects and/or embodiments, as well as combinations with any one or more of the embodiments set forth in the detailed description and examples.

### Definitions

[0511] About, approximately: “About” or “approximately” as the terms are used herein applied to one or more values of interest, refer to a value that is similar to a stated reference value. In certain embodiments, the term “approximately” or “about” refers to a range of values that fall within 15%, 14%, 13%, 12%, 11%, 10%, 9%, 8%, 7%, 6%, 5%, 4%, 3%, 2%, 1%, or less in either direction (greater than or less than) of the stated reference value unless otherwise stated or otherwise evident from the context (except where such number would exceed 100% of a possible value).

[0512] Domain: The term “domain” as used herein refers to a structure of a biomolecule that contributes to a specified function of the biomolecule. A domain may comprise a contiguous region (e.g., a contiguous sequence) or distinct, non-contiguous regions (e.g., non-contiguous sequences) of a biomolecule. Examples of protein domains include, but are not limited to, a nuclear localization sequence, a recombinase domain, a retroviral (e.g., lentiviral) structural polypeptide domain, a retroviral (e.g., lentiviral) lentiviral reverse transcriptase polypeptide domain, a DNA recognition domain (e.g., that binds to or is capable of binding to a recognition site, e.g. as described herein), a recombinase N-terminal domain (also called the catalytic domain), a C-terminal zinc ribbon domain, and domains listed in Table 1. In some embodiments the zinc ribbon domain further comprises a coiled-coiled motif. In some embodiments the recombinase domain and the zinc ribbon domain are collectively referred to as the C-terminal domain. In some embodiments the N-terminal domain is linked to the C-terminal domain by an αE linker or helix. In some embodiments the N-terminal domain is between 50 and 250 amino acids, or 100-200 amino acids, or 130-170 amino acids, e.g., about 150 amino acids. In some embodiments the C-terminal domain is 200-800 amino acids, or 300-500 amino acids. In some embodiments the recombinase domain is between 50 and 150 amino acids. In some embodiments the zinc ribbon domain is between 30 and 100 amino acids; an example of a domain of a nucleic acid is a regulatory domain, such as a transcription factor binding domain, a recognition sequence, an arm of a recognition sequence (e.g. a 5′ or 3′ arm), a core sequence, or an object sequence (e.g., a heterologous object sequence). In some embodiments, a recombinase polypeptide comprises one or more domains (e.g., a recombinase domain, or a DNA recognition domain) of a polypeptide comprising an amino acid sequence of any of SEQ ID NOs: 1-12,677 (e.g., SEQ ID NOs: 1-11,432), or a fragment or variant thereof. In some embodiments, a domain has a single enzymatic activity. In some embodiments, a domain has two or more enzymatic activities.

[0513] Exogenous: As used herein, the term exogenous, when used with reference to a biomolecule (such as a nucleic acid sequence or polypeptide) means that the biomolecule was introduced into a host genome, cell or organism by the hand of man. For example, a nucleic acid that is as added into an existing genome, cell, tissue or subject using recombinant DNA techniques or other methods is exogenous to the existing nucleic acid sequence, cell, tissue or subject.

[0514] Genomic safe harbor site (GSH site): A genomic safe harbor site is a site in a host genome that is able to accommodate the integration of new genetic material, e.g., such that the inserted genetic element does not cause significant alterations of the host genome posing a risk to the host cell or organism. A GSH site generally meets 1, 2, 3, 4, 5, 6, 7, 8 or 9 of the following criteria: (i) is located >300 kb from a cancer-related gene; (ii) is >300 kb from a miRNA/other functional small RNA; (iii) is >50 kb from a 5′ gene end; (iv) is >50 kb from a replication origin; (v) is >50 kb away from any ultraconserved element; (vi) has low transcriptional activity (i.e. no mRNA+/−25 kb); (vii) is not in a copy number variable region; (viii) is in open chromatin; and/or (ix) is unique, with 1 copy in the human genome. Examples of GSH sites in the human genome that meet some or all of these criteria include (i) the adeno-associated virus site 1 (AAVS1), a naturally occurring site of integration of AAV virus on chromosome 19; (ii) the chemokine (C—C motif) receptor 5 (CCR5) gene, a chemokine receptor gene known as an HIV-1 coreceptor; (iii) the human ortholog of the mouse Rosa26 locus; (iv) the rDNA locus. Additional GSH sites are known and described, e.g., in Pellenz et al. epub Aug. 20, 2018 (https://doi.org/10.1101/396390).

[0515] Heterologous: The term heterologous, when used to describe a first element in reference to a second element means that the first element and second element do not exist in nature disposed as described. For example, a heterologous polypeptide, nucleic acid molecule, construct or sequence refers to (a) a polypeptide, nucleic acid molecule or portion of a polypeptide or nucleic acid molecule sequence that is not native to a cell in which it is expressed, (b) a polypeptide or nucleic acid molecule or portion of a polypeptide or nucleic acid molecule that has been altered or mutated relative to its native state, or (c) a polypeptide or nucleic acid molecule with an altered expression as compared to the native expression levels under similar conditions. For example, a heterologous regulatory sequence (e.g., promoter, enhancer) may be used to regulate expression of a gene or a nucleic acid molecule in a way that is different than the gene or a nucleic acid molecule is normally expressed in nature. In certain embodiments, a heterologous nucleic acid molecule may exist in a native host cell genome, but may have an altered expression level or have a different sequence or both. In other embodiments, heterologous nucleic acid molecules may not be endogenous to a host cell or host genome but instead may have been introduced into a host cell by transformation (e.g., transfection, electroporation), wherein the added molecule may integrate into the host genome or can exist as extra-chromosomal genetic material either transiently (e.g., mRNA) or semi-stably for more than one generation (e.g., episomal viral vector, plasmid or other self-replicating vector).

[0516] Insulator: The term “insulator,” as used herein, refers to a cis-acting DNA sequence that functions as one or both of an enhancer-blocker or a heterochromatin barrier, or to a corresponding RNA sequence that, when reverse transcribed, produces the cis-acting DNA sequence. In some embodiments, an insulator is specifically bound by an insulator protein, which can bring the insulator into physical proximity with another insulator bound by an insulator protein (e.g., the same insulator protein). Generally, when a pair of insulators present on the same nucleic acid molecule are brought into proximity by insulator proteins, the insulators alter the activity and/or structure of the nucleic acid sequence between the two insulators. In some instances, the insulators reduce or block the formation of heterochromatin in the nucleic acid sequence between the insulators. In some instances, the insulators (e.g., by reducing or blocking heterochromatin formation) maintain or increase transcriptional activity of a heterologous object sequence positioned between the insulators. In some instances, the insulators reduce or block the pro-transcriptional activity of an enhancer positioned between the insulators. In some instances, the term “insulator” can refer to a DNA sequence that can function as an insulator (e.g., when paired with another insulator) or an RNA sequence that, when reverse transcribed, can form a DNA sequence that can function as an insulator. As used herein, the term “insulator protein” refers to a protein that specifically binds to an insulator sequence, e.g., a protein selected from CTCF (CCCTC-binding factor), CTF (CAAT-binding transcription factor 1), USF1 (Upstream Stimulatory Factor 1), USF2 (Upstream Stimulatory Factor 2), PARP-1 (Poly(ADP-ribose) Polymerase-1), and VEZF1 (Vascular Endothelial Zinc Finger 1), or a polypeptide having at least 75%, 80%, 85%, 90%, 95%, 96%, 97%, 98%, or 99% sequence identity thereto.

[0517] Integration-Deficient: The term “integration-deficient,” as used herein, refers to a viral system (e.g., a composition comprising a virus or viral vector) or a polypeptide thereof is substantially unable to integrate a template DNA into a target DNA (e.g., a genomic DNA, e.g., a chromosome or mitochondrial DNA). In some instances, an integration-deficient viral system comprises a mutation to a viral integrase (e.g., as described herein), a template RNA lacking a wild-type viral LTR sequence, or an inhibitor of the viral integrase. In some instances, an integration-deficient viral system results in a decrease in the level of integrated template DNA relative to an otherwise similar integration-competent viral system by at least 75%, 80%, 85%, 90%, 95%, 96%, 97%, 98%, 99%, 99.9%, or 100%.

[0518] Mutation or Mutated: The term “mutated” when applied to nucleic acid sequences means that nucleotides in a nucleic acid sequence may be inserted, deleted or changed compared to a reference (e.g., native) nucleic acid sequence. A single alteration may be made at a locus (a point mutation) or multiple nucleotides may be inserted, deleted or changed at a single locus. In addition, one or more alterations may be made at any number of loci within a nucleic acid sequence. A nucleic acid sequence may be mutated by any suitable method.

[0519] Nucleic acid molecule: Nucleic acid molecule refers to both RNA and DNA molecules including, without limitation, cDNA, genomic DNA and mRNA, and also includes synthetic nucleic acid molecules, such as those that are chemically synthesized or recombinantly produced, such as DNA templates, as described herein. The nucleic acid molecule can be double-stranded or single-stranded, circular or linear. If single-stranded, the nucleic acid molecule can be the sense strand or the antisense strand. Unless otherwise indicated, and as an example for all sequences described herein under the general format “SEQ ID NO:,” “nucleic acid comprising SEQ ID NO:1” refers to a nucleic acid, at least a portion which has either (i) the sequence of SEQ ID NO:1, or (ii) a sequence complimentary to SEQ ID NO:1. The choice between the two is dictated by the context in which SEQ ID NO:1 is used. For instance, if the nucleic acid is used as a probe, the choice between the two is dictated by the requirement that the probe be complimentary to the desired target. Nucleic acid sequences of the present disclosure may be modified chemically or biochemically or may contain non-natural or derivatized nucleotide bases, as will be readily appreciated by those of skill in the art. Such modifications include, for example, labels, methylation, substitution of one or more naturally occurring nucleotides with an analog, inter-nucleotide modifications such as uncharged linkages (for example, methyl phosphonates, phosphotriesters, phosphoramidates, carbamates, etc.), charged linkages (for example, phosphorothioates, phosphorodithioates, etc.), pendant moieties, (for example, polypeptides), intercalators (for example, acridine, psoralen, etc.), chelators, alkylators, and modified linkages (for example, alpha anomeric nucleic acids, etc.). Also included are synthetic molecules that mimic polynucleotides in their ability to bind to a designated sequence via hydrogen bonding and other chemical interactions. Such molecules are known in the art and include, for example, those in which peptide linkages substitute for phosphate linkages in the backbone of a molecule. Other modifications can include, for example, analogs in which the ribose ring contains a bridging moiety or other structure such as modifications found in “locked” nucleic acids.

[0520] Gene expression unit: a gene expression unit is a nucleic acid sequence comprising at least one regulatory nucleic acid sequence operably linked to at least one effector sequence. A first nucleic acid sequence is operably linked with a second nucleic acid sequence when the first nucleic acid sequence is placed in a functional relationship with the second nucleic acid sequence. For instance, a promoter or enhancer is operably linked to a coding sequence if the promoter or enhancer affects the transcription or expression of the coding sequence. Operably linked DNA sequences may be contiguous or non-contiguous. Where necessary to join two protein-coding regions, operably linked sequences may be in the same reading frame.

[0521] Host: The terms host genome or host cell, as used herein, refer to a cell and/or its genome into which protein and/or genetic material has been introduced. It should be understood that such terms are intended to refer not only to the particular subject cell and/or genome, but to the progeny of such a cell and/or the genome of the progeny of such a cell. Because certain modifications may occur in succeeding generations due to either mutation or environmental influences, such progeny may not, in fact, be identical to the parent cell, but are still included within the scope of the term “host cell” as used herein. A host genome or host cell may be an isolated cell or cell line grown in culture, or genomic material isolated from such a cell or cell line, or may be a host cell or host genome which composing living tissue or an organism. In some instances, a host cell may be an animal cell or a plant cell, e.g., as described herein. In certain instances, a host cell may be a bovine cell, horse cell, pig cell, goat cell, sheep cell, chicken cell, or turkey cell. In certain instances, a host cell may be a corn cell, soy cell, wheat cell, or rice cell.

[0522] Recombinase polypeptide: As used herein, a recombinase polypeptide refers to a polypeptide having the functional capacity to catalyze a recombination reaction of a nucleic acid molecule (e.g., a DNA molecule). A recombination reaction may include, for example, one or more nucleic acid strand breaks (e.g., a double-strand break), followed by joining of two nucleic acid strand ends (e.g., sticky ends). In some instances, the recombination reaction comprises insertion of an insert nucleic acid, e.g., into a target site, e.g., in a genome or a construct. In some instances, the recombination reaction comprises flipping or reversing of a nucleic acid, e.g., in a genome or a construct. In some instances, the recombination reaction comprises removing a nucleic acid, e.g., from a genome or a construct. In some instances, a recombinase polypeptide comprises one or more structural elements of a naturally occurring recombinase (e.g., a serine recombinase, e.g., PhiC31 recombinase or Gin recombinase). In certain instances, a recombinase polypeptide comprises an amino acid sequence having at least 70%, 75%, 80%, 85%, 90%, 95%, 96%, 97%, 98%, 99%, or 100% sequence identity to a recombinase described herein (e.g., an amino acid sequence of any of SEQ ID NOs: 1-12,677 (e.g., SEQ ID NOs: 1-11,432)). Typically, a serine recombinase uses a serine residue in nucleophilic attack of DNA, while a tyrosine recombinase uses a tyrosine residue in nucleophilic attack of DNA. In some embodiments, a recombinase polypeptide comprises a serine recombinase, e.g., a serine integrase. In some embodiments, a serine recombinase, e.g., a serine integrase, comprises one or more (e.g., all) of a recombinase domain, a catalytic domain, or a zinc ribbon domain. In some embodiments, a serine recombinase, e.g., a serine integrase, comprises a domain listed in Table 1 (e.g., either in addition to or in replacement of one or more of a recombinase domain, a catalytic domain, or a zinc ribbon domain). In some instances, a recombinase polypeptide has one or more functional features of a naturally occurring recombinase (e.g., a serine recombinase, e.g., PhiC31 recombinase or Gin recombinase). In some embodiments, a recombinase polypeptide is 350-900 amino acids, or 425-700 amino acids. In some instances, a recombinase polypeptide recognizes (e.g., binds to) a recognition sequence in a nucleic acid molecule (e.g., a recognition sequence occurring in a sequence of any of SEQ ID NOs: 13,001-25,677 (e.g., SEQ ID NOs: 13,001-24,432) or SEQ ID NOs: 26,001-38,677 (e.g., SEQ ID NOs: 26,001-37,432), or a sequence having at least 70%, 75%, 80%, 85%, 90%, 95%, 96%, 97%, 98%, or 99% identity thereto). In some embodiments, the recombinase may facilitate recombination between a first recognition sequence (e.g. attB or pseudo-attB) and a second genomic recognition sequence (e,g., attP or pseudo attP). In some embodiments, one or more recognition sequences comprise an attP half site (e.g., attPL or attPR) sequence or an attB half site (e.g., attBL or attBR) sequence as listed in Table 26. In some embodiments, a recombinase polypeptide is not active as an isolated monomer. In some embodiments, a recombinase polypeptide catalyzes a recombination reaction in concert with one or more other recombinase polypeptides (e.g., two or four recombinase polypeptides per recombination reaction). In some embodiments, a recombinase polypeptide is active as a dimer. In some embodiments, a recombinase assembles as a dimer at the recognition sequence. In some embodiments, a recombinase polypeptide is active as a tetramer. In some embodiments, a recombinase assembles as a tetramer at the recognition sequence. In some embodiments, a recombinase polypeptide is a recombinant (e.g., a non-naturally occurring) recombinase polypeptide. In some embodiments, a recombinant recombinase polypeptide comprises amino acid sequences derived from a plurality of recombinase polypeptides (e.g., a recombinant recombinase polypeptide comprises a first domain from a first recombinase polypeptide and a second domain from a second recombinase polypeptide).

[0523] DNA recognition sequence: A “DNA recognition sequence” refers to a DNA sequence that is recognized (e.g., capable of being bound by) a recombinase polypeptide, e.g., as described herein, as well as to an RNA sequence that can be reverse transcribed to yield the DNA sequence that is recognized by the recombinase polypeptide. The DNA recognition sequences are, in some instances, generically referred to as attB and attP. DNA recognition sequences can be native or altered relative to a native sequence. In some instances, a recombinase polypeptide recognizes a DNA recognition sequence (e.g., in a template DNA, e.g., as described herein) and a cognate recognition sequence (e.g., a cognate DNA recognition sequence, e.g., in a target nucleic acid, e.g., a genomic DNA, e.g., a chromosome of mitochondrial DNA), and optionally induces recombination specifically between the DNA recognition sequence and the cognate recognition sequence. In some instances, the cognate recognition sequence occurs naturally in the genomic DNA (i.e., the cognate recognition sequence is present in the genomic DNA without previous manipulation by, e.g., genetic engineering techniques). The DNA recognition sequence may vary in length, but typically ranges from about 20 to about 200 nt, from about 30 to 90 nt, more usually from 30 to 70 nucleotides. DNA recognition sequences are typically arranged as follows: AttB comprises a first DNA sequence attB5′, a core region, and a second DNA sequence attB3′, in the relative order from 5′ to 3′ attB5′-core region-attB3′. AttP comprises a first DNA sequence attP5′, a core region, and a second DNA sequence attP3′, in the relative order from 5′ to 3′ attP5′-core region-attP3′. In some embodiments, the attB5′ and attB3′ are parapalindromic (e.g., one sequence is a palindrome relative to the other sequence or has at least 20%, 30%, 40%, 50%, 60%, 70%, 75%, 80%, 85%, 90%, 95%, 96%, 97%, 98%, or 99% sequence identity to a palindrome relative to the other sequence). In some embodiments, the attP5′ and attP3′ recognition sequences are parapalindromic (e.g., one sequence is a palindrome relative to the other sequence or has at least 20%, 30%, 40%, 50%, 60%, 70%, 75%, 80%, 85%, 90%, 95%, 96%, 97%, 98%, or 99% sequence identity to a palindrome relative to the other sequence). In some embodiments the attB5′ and attB3′ recognition sequences are parapalindromic to each other and the attP5′ and attP3′ recognition sequences are parapalindromic to each other. In some embodiments, the attB5′ and attB3′, and the attP5′ and attP3′ sequences are similar but not necessarily the same number of nucleotides. Because attB and attP are different sequences, recombination will result in a stretch of nucleic acids (called attL or attR for left and right) that is neither an attB sequence nor an attP sequence. Without wishing to be bound by theory, the dissimilarities between attL/attR and attB/attP probably make attL and attR sites less unrecognizable as a recombination site to the relevant recombinase enzyme, thus reducing the possibility that the enzyme will catalyze a second recombination reaction that would reverse the first. DNA recognition sequences are typically bound by a recombinase dimer. In some embodiments, one or more of the αE helix, the recombinase domain, the linker domain, and/or the zinc ribbon domain of the recombinase polypeptide contact the recognition sequence. In some instances, a recognition sequence comprises a nucleic acid sequence occurring within a sequence of any of SEQ ID NOs: 13,001-25,677 (e.g., SEQ ID NOs: 13,001-24,432) or SEQ ID NOs: 26,001-38,677 (e.g., SEQ ID NOs: 26,001-37,432), e.g., a 20-200 nt sequence within a sequence of any of SEQ ID NOs: 13,001-25,677 (e.g., SEQ ID NOs: 13,001-24,432) or SEQ ID NOs: 26,001-38,677 (e.g., SEQ ID NOs: 26,001-37,432), e.g., a 30-70 nt sequence within a sequence of any of SEQ ID NOs: 13,001-25,677 (e.g., SEQ ID NOs: 13,001-24,432) or SEQ ID NOs: 26,001-38,677 (e.g., SEQ ID NOs: 26,001-37,432), or a sequence having at least 50%, 60%, 70%, 75%, 80%, 85%, 90%, 95%, 96%, 97%, 98%, or 99% identity thereto. In some instances, a recognition sequence comprises a nucleic acid sequence occurring within an attP (e.g., attPL or attPR) sequence listed in Table 26. In some instances, a recognition sequence comprises a nucleic acid sequence occurring within an attB (e.g., attBL or attBR) sequence listed in Table 26. In some embodiments, one or more recognition sequences comprise two attP half site (e.g., an attPL and an attPR) sequences or two attB half site (e.g., an attBL and an attBR) sequences as listed in Table 26.

[0524] Recombinase transfer sequence: “Recombinase transfer sequence” as used herein refers to a sequence constructed from portions of two DNA recognition sequences. In some embodiments, the sequence 5′ of the core sequence, e.g., the attB5′ or attP5′, of the recombinase transfer sequence matches a cognate recognition sequence (e.g., in the human genome) and the sequence 3′ of the core sequence, e.g., the attB3′ or attP3′, of the recombinase transfer sequence matches a DNA recognition sequence (e.g., in the template DNA). In some embodiments, the sequence 5′ of the core sequence, e.g., the attB5′ or attP5′, of the recombinase transfer sequence matches a DNA recognition sequence and the sequence 3′ of the core sequence, e.g., the attB3′ or attP3′, of the recombinase transfer sequence matches the cognate recognition sequence. In some embodiments, the sequence 5′ of the core sequence, e.g., the attB5′ or attP5′, of the recombinase transfer sequence matches a cognate recognition sequence and the sequence 3′ of the core sequence, e.g., the attB3′ or attP3′, of the recombinase transfer sequence matches a DNA recognition sequence. In some embodiments, the recombinase transfer sequence may be comprised of the region 5′ of the core sequence from a wild-type attB site and the region 3′ of the core sequence from a DNA attP recognition sequence, or vice versa. Other combinations of such recombinase transfer sequence will be evident to those having ordinary skill in the art, in view of the teachings of the present specification. In some embodiments, a recombinase described herein catalyzes recombination between a DNA recognition sequence and a cognate recognition sequence to yield a recombinase transfer sequence. In some embodiments, a recombinase described herein acts preferentially on a DNA recognition sequence relative to a recombinase transfer sequence. In some embodiments, a recombination directionality factor (RDF) is capable of modifying the preference of a recombinase described herein such that it preferentially acts on a recombinase transfer sequence relative to a DNA recognition sequence. In some embodiments, a DNA recognition sequence may be referred to as an attP or attB sequence, where a recombinase transfer sequences may be referred to as an attL or attR sequence.

[0525] Core sequence: A core sequence, as used herein, refers to a nucleic acid sequence positioned between two arms of a DNA recognition sequence, e.g., between a pair of parapalindromic sequences. In some embodiments, a core sequence is positioned between a attB5′ and an attB3′, or between an attP5′ and an attP3′. In some instances, a core sequence can be cleaved by a recombinase polypeptide (e.g., a recombinase polypeptide that recognizes a recognition sequence comprising the two parapalindromic sequences), e.g., to form sticky ends, e.g. a 3′ overhang. In some embodiments, the core sequence of the attB and attP are identical. In some embodiments, the core sequence of the attB and attP are not identical, e.g., have less than 99, 95, 90, 80, 70, 60, 50, 40, 30, or 20% identity. In some embodiments, the core sequence is about 2-20 nucleotides, e.g., 2-16 nucleotides, e.g., about 4 nucleotides in length or about 2 nucleotides in length (e.g., exactly 2 nucleotides in length). In some embodiments, a core sequence comprises a core dinucleotide corresponding to two adjacent nucleotides wherein a recombinase recognizing the nearby parapalindromic sequences may cut the DNA on one side of the core dinucleotide, e.g., forming sticky ends. In some embodiments, the core dinucleotide of the core sequence of an attB and/or attP site are identical, e.g., cleavage of the attP and/or attB sites form compatible sticky ends. In some embodiments, sequence identity between two DNA recognition sites, e.g., an attP and an attB site, is limited to the core sequence of the sites, e.g., is limited to a central dinucleotide. In some embodiments, a core sequence comprises a nucleic acid sequence occurring within a nucleotide sequence of any of SEQ ID NOs: 13,001-25,677 (e.g., SEQ ID NOs: 13,001-24,432) or SEQ ID NOs: 26,001-38,677 (e.g., SEQ ID NOs: 26,001-37,432). In some embodiments, a core sequence comprises a nucleic acid sequence not originating within a nucleotide sequence of any of SEQ ID NOs: 13,001-25,677 (e.g., SEQ ID NOs: 13,001-24,432) or SEQ ID NOs: 26,001-38,677 (e.g., SEQ ID NOs: 26,001-37,432). In some embodiments, one or more recognition sequences comprise two attP half site (e.g., an attPL and an attPR) sequences as listed in Table 26, further comprising a core sequence according to any of the embodiments herein. In some embodiments, one or more recognition sequences comprise two attB half site (e.g., an attBL and an attBR) sequences as listed in Table 26, further comprising a core sequence according to any of the embodiments herein.

[0526] Object sequence: As used herein, the term object sequence refers to a nucleic acid segment that can be desirably inserted into a target nucleic acid molecule, e.g., by a recombinase polypeptide, e.g., as described herein. In some embodiments, a template RNA or template DNA comprises a DNA recognition sequence and an object sequence that is heterologous to the DNA recognition sequence and/or the remainder of the template RNA or template DNA, generally referred to herein as a “heterologous object sequence.” An object sequence may, in some instances, be heterologous relative to the nucleic acid molecule into which it is inserted (e.g., a target DNA molecule, e.g., as described herein). In some instances, an object sequence comprises a nucleic acid sequence encoding a gene (e.g., a eukaryotic gene, e.g., a mammalian gene, e.g., a human gene) or other cargo of interest (e.g., a sequence encoding a functional RNA, e.g., an siRNA or miRNA), e.g., as described herein. In certain instances, the gene encodes a polypeptide (e.g., a blood factor or enzyme). In some instances, an object sequence comprises one or more of a nucleic acid sequence encoding a selectable marker (e.g., an auxotrophic marker or an antibiotic marker), and/or a nucleic acid control element (e.g., a promoter, enhancer, or silencer).

[0527] Parapalindromic: As used herein, the term “parapalindromic” refers to a property of a pair of nucleic acid sequences, wherein one of the nucleic acid sequences is either a palindrome relative to the other nucleic acid sequence, or has at least 20% (e.g., at least 20%, 30%, 35%, 40%, 45%, 50%, 55%, 60%, 65%, 70%, 75%, 80%, 85%, 90%, 95%, 96%, 97%, 98%, 99%, or 100%), e.g., at least 50%, sequence identity to a palindrome relative to the other nucleic acid sequence, or has no more than 1, 2, 3, 4, 5, 6, 7, 8, 9, 10, 11, 12, 13, 14, 15, 16, 17, 18, 19, or 20 sequence mismatches relative to the other nucleic acid sequence. “Parapalindromic sequences,” as used herein, refer to at least one of a pair of nucleic acid sequences that are parapalindromic relative to each other. A “parapalindromic region,” as used herein, refers to a nucleic acid sequence, or the portions thereof, that comprise two parapalindromic sequences. In some instances, a parapalindromic region comprises two parapalindromic sequences flanking a nucleic acid segment, e.g., comprising a core sequence.

[0528] Structural polypeptide domain: As used herein, the term “structural polypeptide domain” refers to a polypeptide domain that can form part of a proteinaceous exterior (e.g., a viral capsid) encapsulating a viral nucleic acid (e.g., a template RNA, e.g., as described herein). In some instances, a structural polypeptide domain is encoded by a viral gene (e.g., a retroviral gag gene). In some instances, a structural polypeptide domain comprises a capsid protein (e.g., a CA protein and/or an NC protein, e.g., encoded by a retroviral gag gene), or a functional fragment thereof. In some instances, a structural polypeptide domain comprises a matrix protein (e.g., a MA protein, e.g., encoded by a retroviral gag gene), or a functional fragment thereof. In some instances, a structural polypeptide domain comprises a domain encoded by a retroviral gag (e.g., a lentiviral gag). In some embodiments, a structural polypeptide domain comprises one or more mutations (e.g., point mutations, additions, substitutions, or deletions) relative to the amino acid sequence of a corresponding wild-type protein (e.g., a wild-type retroviral gag, CA, NC, or MA protein). In some embodiments, a structural polypeptide domain is part of a polyprotein or a fusion protein. In some embodiments, a structural polypeptide domain is not part of a polyprotein or a fusion protein.

[0529] Reverse transcriptase domain: As used herein, the term “reverse transcriptase domain” refers to a polypeptide domain capable of producing complementary DNA from a template RNA (e.g., as described herein). In some instances, a reverse transcriptase domain comprises a viral (e.g., retroviral, e.g., lentiviral) reverse transcriptase, or a functional fragment thereof. In some instances, a reverse transcriptase domain produces complementary DNA from a template RNA via a primer (e.g., a tRNA primer, e.g., a lysyl tRNA primer). In some instances, a reverse transcriptase domain produces a double stranded template DNA (e.g., as described herein) from the template RNA. In some instances, a reverse transcriptase domain is encoded by a viral (e.g., retroviral, e.g., lentiviral)pol gene. In some instances, a reverse transcriptase domain is encoded by a pol gene that also encodes a viral (e.g., retroviral, e.g., lentiviral) integrase (IN). In some instances, a reverse transcriptase domain is encoded by a pol gene that also encodes a viral (e.g., retroviral, e.g., lentiviral) protease (PR) and/or dTUPase (DU). In some embodiments, a reverse transcriptase polypeptide domain comprises one or more mutations (e.g., point mutations, additions, substitutions, or deletions) relative to the amino acid sequence of a corresponding wild-type protein (e.g., a wild-type retroviral pol, IN, PR, or DU protein). In some embodiments, the reverse transcriptase domain comprises RNaseH activity. In some embodiments, a functional reverse transcriptase comprises a single protein subunit, e.g., is monomeric. In some embodiments, a functional reverse transcriptase comprises at least two subunits, e.g., is dimeric. In some embodiments, the reverse transcriptase domain is less active (or inactive) in monomeric form compared to in dimeric form. In some embodiments, a dimeric reverse transcriptase comprises two identical subunits. In some embodiments, a dimeric reverse transcriptase comprises different subunits, e.g., a p51 and a p66 subunit. In some embodiments, a reverse transcriptase comprises at least three subunits, e.g., two p51 subunits and at least one p15 subunit. In some embodiments, a reverse transcriptase comprises an RNase H domain. In some embodiments, a reverse transcriptase comprises an inactivated RNase H domain. In some embodiments, a reverse transcriptase does not comprise an RNase H domain. In some embodiments, a reverse transcriptase domain is part of a polyprotein or a fusion protein. In some embodiments, a reverse transcriptase domain is not part of a polyprotein or a fusion protein.

### BRIEF DESCRIPTION OF THE DRAWINGS

[0530] FIG. 1A: Activity of 10 exemplary serine integrases in human cells. HEK293T cells were transfected with an integrase expression plasmid and a template plasmid harboring a 520 bp attP containing region followed by an EGFP reporter driven by CMV promoter. Shown are the percentage of EGFP-positive cells observed by flow cytometry at 21 days post-transfection.

[0531] FIG. 1B: Strategies to assess integration, stability, and expression of different AAV donor formats. A single attB* or attP* donor utilizes formation of double-stranded circularized DNA following AAV transduction into the cell nucleus. This configuration also includes ITR sequences post-integration. A dual attB-attB* or attP-attP* donor does not require formation of double-stranded circularized DNA following AAV transduction. The readout for integration stability and expression uses droplet digital PCR (ddPCR) and flow cytometry (FLOW).

[0532] FIG. 2: AAV constructs illustration. First line shows: ITR, stuffer (500), attP*, PEFla, EGFP, WPRE, hGHpA, ITR; AAV2 serotype. Second line shows: ITR, stuffer (500), attP, PEFla, EGFP, WPRE, hGHpA, attP*, stuffer (500), ITR; AAV2 serotype. Third line shows: ITR, stuffer (500), attB*, PEFla, EGFP, WPRE, hGHpA, ITR; AAV2 serotype. Fourth line shows: ITR, stuffer (500), attB, PEFla, EGFP, WPRE, hGHpA, attB*, stuffer (500), ITR; AAV2 serotype. Fifth line shows: ITR, PEFla, hcoBXB1, WPRE, hGHpA, ITR; AAV2 serotype. Sixth line shows: ITR, PEFla, mcoBXB1, WPRE, hGHpA, ITR; AAV6 serotype.

[0533] FIGS. 3A and 3B: Dual AAV delivery of serine integrase and template DNA to mammalian cells. (A) Schematic representation of experiment. BXB1 serine recombinase and template DNA are co-delivered as separate AAV viral vectors into BXB landing pad cell lines. (B) Droplet digital PCR (ddPCR) assay to assess integration (% CNV/landing pad) of BXB1 serine recombinase and transgene into attP-attP* landing pad cell line 3 days and 7 days post-transduction. Black dots (to the right of each pair of gray dots) indicate template only samples and fall at 0% on the y-axis. Gray dots (to the left of each pair of black dots) indicate template+BXB1 integrase and fall between 1-6% on the y-axis.

[0534] FIGS. 4A and 4B: mRNA delivery of BXB1 integrase and AAV delivery of template DNA to mammalian cells. (A) Schematic representation of experiment. mRNA delivery of BXB1 serine recombinase and AAV delivery of template DNA into BXB1 landing pad cell lines. (B) Droplet digital PCR (ddPCR) assay to assess integration (% CNV/landing pad) of BXB1 serine recombinase and transgene into attP-attP* landing pad cell line 3 days post mRNA transfection/AAV transduction. Black dots (to the right of each pair of gray dots) indicate template only samples and fall at 0% on the y-axis. Gray dots (to the left of each pair of black dots) indicate template+BXB1 integrase and fall at greater than 0% on the y-axis.

[0535] FIGS. 5A and 5B: General structure of recombinase recognition sites and presence of recognition sites in LeftRegion and RightRegion sequences disclosed herein. (A) General features of a recognition sequence. Serine recombinases as defined herein generally comprise a central dinucleotide, a core sequence, and flanking arms that may be parapalindromic in nature. Depicted here are the attP and attB recognition sequences for Bxb1 recombinase (e.g., a recombinase comprising an amino acid sequence of SEQ ID NO: 11,636 (though the general approach can also be applied to, e.g., SEQ ID NOs: 1-12,677, e.g., SEQ ID NOs: 1-11,432)). These sequences share the central dinucleotide, indicated in bold, which is important for successful recombination between the two sites. The arms of the recognition sites, indicated by black box outlines, may share palindromic sequences to a varying degree, thus being referred to as “parapalindromic” herein. Nucleotides that are palindromic with respect to the opposite arm are indicated by underlined text. Additionally, recognition sequences share a core that is common between the attP and attB site, indicated here by gray shading. The core sequence comprises the central dinucleotide at a minimum, but may include additional sequence. (B) The LeftRegion or RightRegion (e.g., comprising a sequence of any of SEQ ID NOs: 13,001-25,677 and SEQ ID NOs: 26,001-38,677, respectively, e.g., e.g., SEQ ID NOs: 24,636 and 37,636, respectively) comprises the attP site for a cognate recombinase. SEQ ID NOs: 13,001-25,677 (e.g., SEQ ID NOs: 13,001-24,432) or SEQ ID NOs: 26,001-38,677 (e.g., SEQ ID NOs: 26,001-37,432)comprise exemplary recognition sites for exemplary recombinases described herein. As an example, the attP site for a recombinase of SEQ ID NO: n, wherein n is chosen from 1-12,677 (e.g., from 1-11,432), is found in SEQ ID NO: (n+13,000) (e.g., a LeftRegion) or SEQ ID NO: (n+26,000) (e.g., a RightRegion). Shown here, the attP site for Bxb1 integrase (e.g., an integrase comprising a sequence of SEQ ID NO: 11,636) can be found in the corresponding SEQ ID NO: 24,636 (e.g., a LeftRegion) and SEQ ID NO: 37,636 (e.g., a RightRegion). The attP site of Bxb1 is shown as underlined and bolded text in the LeftRegion sequence.

[0536] FIG. 6: Schematic representations of the third generation IDLV-attP vectors. Exemplary IDLV vectors comprising a self-inactivating 3′LTR, a psi sequence (Ψ) allows for efficient incorporation of the vector RNA genome into particles, a Rev responsive element (RRE), a central polypurine tract (cPPT), the expression of EGFP transgene driven by human EF1a promoter, as well as, in some instances, the Woodchuck Hepatitis Virus Post-Transcriptional Response Element (WPRE). Vector A is the control IDLV vector. Vector B is the same as vector A except harboring a novel integrase attP target site flanked by universal primer regions U1 and U2 is placed upstream of the transgene. Vector C is the same as vector B except the LTR harboring a deletion in the U3 region.

[0537] FIG. 7: Schematic representations of Recombinase-IDLV packaging plasmids. IDLV-recombinase packaging systems include three plasmids: 1. (top) A packaging plasmid expresses the gag-pol gene region of HIV-1 that encodes the enzymatic proteins protease, reverse transcriptase, and integrase (IN), and structural proteins. The D64V mutation is introduced into the catalytic core of HIV integrase (IN) to inhibit integration activity of the enzyme. In this strategy, a recombinase-encoding sequence, fused with a HiBit tag for expression detection, is fused to the N-terminus of the Gag protein, with the linker comprising the protease cleavage site SQNY/PIVQ. 2. (middle) A plasmid expressing REV to facilitate nuclear export of transcripts comprising the cis-acting element RRE. 3. (bottom) An envelope expression plasmid to provide the envelope protein VSV-G. These plasmids are used to package an IDLV vector comprising a DNA recognition sequence into an IDLV viral particle as described in Example 31 or 32, optionally with a recombinase-gag-pol fusion protein. In some embodiments, a recombinase of the system may instead be provided exogenously from the packaging system, e.g., encoded within the IDLV or as an additional nucleic acid provided separately from the system, e.g., as an LNP comprising an mRNA encoding the recombinase.

[0538] FIG. 8 is a diagram showing an exemplary IDLV vector system using heterologous integration functions to insert a payload into the genome. An IDLV system as described herein may utilize a DNA recognition sequence comprised by the IDLV and a recombinase (e.g., a recombinase encoded by the packaging system and packaged with the IDLV or a recombinase provided as a separate component, e.g., an mRNA encoding the recombinase) that binds the DNA recognition sequence to facilitate recombinase-mediated integration of an IDLV into a target DNA (e.g., a genomic DNA, e.g., as described herein). In brief, an IDLV comprising a template RNA is delivered to a target cell, reverse transcribed using a reverse transcriptase of the IDLV, and converted to dsDNA. An optional circularization event occurs via an endogenous pathway (e.g., homologous recombination) or an engineered approach (e.g., recombinase or nuclease-mediated cohesive end ligation, as described herein). The DNA recognition sequence of the IDLV (e.g., attP) is recognized by a recombinase enzyme of the system, which facilitates recombination with a genomic DNA target (e.g., attB). Thus, an IDLV-recombinase system can catalyze the integration of a target payload into one or more target sites of the genome.

[0539] FIGS. 9A and 9B describe a luciferase activity assay for primary cells. LNPs formulated as according to Example 9 were analyzed for delivery of cargo to primary human (A) and mouse (B) hepatocytes, as according to Example 38. The luciferase assay revealed dose-responsive luciferase activity from cell lysates, indicating successful delivery of RNA to the cells and expression of Firefly luciferase from the mRNA cargo.

[0540] FIG. 10 shows LNP-mediated delivery of RNA cargo to the murine liver. Firefly luciferase mRNA-containing LNPs were formulated and delivered to mice by iv, and liver samples were harvested and assayed for luciferase activity at 6, 24, and 48 hours post administration. Reporter activity by the various formulations followed the ranking LIPIDV005>LIPIDV004>LIPIDV003. RNA expression was transient and enzyme levels returned near vehicle background by 48 hours, post-administration.

[0541] FIG. 11 is a schematic representation of lentivirus-attP vectors with or without insulators. The lentivirus vectors shown contain a self-inactivating 3′LTR, a psi sequence (Ψ) allows for efficient incorporation of the vector RNA genome into particles, a Rev responsive element (RRE), a central polypurine tract (cPPT), the expression of EGFP transgene driven by human EF1a promoter, as well as the Woodchuck Hepatitis Virus Post-Transcriptional Response Element (WPRE). Vector A is the control lentivirus vector. Vector B is the same as vector A except that a DNA recognition site (labeled attP) flanked by universal primer regions U1 and U2 is placed upstream of the transgene. Vector C is the same as vector B except the attP site is flanked by insulators.

[0542] FIG. 12 is a schematic diagram illustrating insulators flanking a recognition sequence, which result in the insulation of the integrated sequence after recombination. The left panel shows a circular template DNA comprising, from left to right, a first insulator, a DNA recognition sequence, a second insulator, and a heterologous object sequence comprising a promoter and a gene. The right panel shows the template DNA after integration into a host genome, resulting in a sequence comprising, from left to right: host DNA, first recombinase transfer sequence, first insulator, heterologous object sequence comprising a promoter and a gene, second insulator, and second recombinase transfer sequence.

### DETAILED DESCRIPTION

[0543] This disclosure relates to compositions, systems and methods for targeting, editing, modifying or manipulating a DNA sequence (e.g., inserting a heterologous object DNA sequence into a target site of a mammalian genome) at one or more locations in a DNA sequence in a cell, tissue or subject, e.g., in vivo or in vitro. The object DNA sequence may include, e.g., a coding sequence, a regulatory sequence, or a gene expression unit.

[0544] Among other things, provided herein are systems that replace the natural random integration activity of a retrovirus with site-specific integration machinery. This approach allows for a more precise targeting of a gene of interest into a human genome, e.g., for therapeutic purposes. The system may include integration-deficient retrovirus (e.g., lentivirus) (IDLV), in which the natural integration activity has been reduced (e.g., by mutation to the viral integrase polypeptide). Instead, the system may comprise a site-specific recombinase (e.g., a serine recombinase, e.g., a serine integrase) capable of directing insertion of a template DNA, or portion thereof, into a desired site in the human genome. In some embodiments, the recombinase is one that directs insertion into a cognate DNA recognition sequence in a naturally occurring human genome and/or in Genome Reference Consortium Human Build 38. Such a recombinase may advantageously be used in a human cell without the need to engineer the genome to contain a “landing pad” for the recombinase to recognize. The template DNA can comprise a DNA recognition sequence recognized by the site-specific recombinase, which can be recombined with a cognate DNA recognition sequence in the genome. The system can also provide a reverse transcriptase capable of generating a template DNA starting from a template RNA. In some embodiments, a system described herein first reverse transcribes a template DNA from a template RNA, and then second, specifically integrates the template DNA, or a portion thereof, into the genome using site-specific recombinase activity, e.g., as shown in FIG. 8.

[0545] Generally, a system as described herein comprises a template RNA, a retroviral (e.g., lentiviral) structural polypeptide domain (or a nucleic acid molecule encoding same), a retroviral (e.g., lentiviral) reverse transcriptase polypeptide domain (or a nucleic acid molecule encoding same), and a recombinase (e.g., a serine recombinase, e.g., a serine integrase, e.g., as described herein) (or a nucleic acid encoding same). The reverse transcriptase polypeptide domain may, in some instances, be capable of reverse transcribing the template RNA to produce a template DNA. The system generally comprises a viral envelope (e.g., a retroviral envelope, e.g., a lentiviral envelope) enclosing the template RNA, structural polypeptide domain, reverse transcriptase polypeptide domain, and/or the recombinase (or the nucleic acid molecule(s) encoding same). Generally, in a system as described herein, the reverse transcriptase polypeptide domain is substantially unable to integrate the template DNA, or a portion thereof, into a target DNA (e.g., a genomic DNA, e.g., a chromosome or a mitochondrial genome), e.g., the reverse transcriptase polypeptide domain is integration-deficient, e.g., as described herein. Generally, the serine recombinase (e.g., serine integrase) is capable of integrating the template DNA, or portion thereof, into the target DNA. In some embodiments, the recombinase is a serine recombinase (e.g., a serine integrase, e.g., as described herein). In some embodiments, the recombinase is a tyrosine recombinase, e.g., as described in PCT Publication No. WO2021/016075 (incorporated herein by reference in its entirety, including the nucleic acid sequences and amino acid sequences of Table 1 and Table 2 therein).

[0546] In some embodiments, a serine recombinase as described herein is a large serine recombinase (e.g., a serine recombinase having an amino acid sequence consisting of at least 400 amino acids). In some embodiments, the serine recombinase is at least 400, 450, 500, 550, or 600 amino acids in length. In some embodiments a serine recombinase as described herein is a unidirectional serine recombinase. In some embodiments, a serine recombinase as described herein is a small serine recombinase (e.g., a serine recombinase having an amino acid sequence consisting of less than 400 amino acids). In some embodiments a serine recombinase as described herein is a bidirectional serine recombinase.

[0547] Systems as described herein may, in some instances, be IDLV recombinase systems or IDLV attP systems. An IDLV recombinase system as described herein may, in some instances, be referred to as a Gene Writing system. In some instances, the genome of an IDLV is a Gene Writing template, e.g., as described herein. In some instances, a Gene Writing polypeptide (e.g., as described herein) comprises a recombinase (e.g., as described herein), a reverse transcriptase (e.g., as described herein), or a fusion of a recombinase and a reverse transcriptase.

[0548] In some embodiments, a Gene Writer system as described herein comprises a template nucleic acid molecule comprising an insulator, a DNA recognition sequence that is specifically bound by a recombinase polypeptide (e.g., a tyrosine recombinase polypeptide or a serine recombinase (e.g., a serine integrase) polypeptide), and a heterologous object sequence. The template nucleic acid molecule may, in some instances, comprise a plurality of insulators (e.g., two insulators). In some instances, the template nucleic acid molecule comprises a first insulator and a second insulator, with the DNA recognition sequence positioned between the first and second insulator. In some instances, recombination of the template nucleic acid molecule with a target DNA (e.g., a genomic DNA, e.g., a chromosome or a mitochondrial genome, e.g., comprising a cognate DNA recognition sequence) by a recombinase polypeptide results in integration of the heterologous object sequence into the target DNA, with the first and second insulators flanking the integrated heterologous object sequence.

### Gene-Writer™ Genome Editors

[0549] The present invention provides recombinase polypeptides (e.g., serine recombinase polypeptides, e.g., any of SEQ ID NOs: 1-12,677 (e.g., SEQ ID NOs: 1-11,432)) that can be used to modify or manipulate a DNA sequence, e.g., by recombining two DNA sequences comprising cognate recognition sequences that can be bound by the recombinase polypeptide. A Gene Writer™ gene editor system may, in some embodiments, comprise: (A) a polypeptide or a nucleic acid encoding a polypeptide, wherein the polypeptide comprises (i) a domain that contains recombinase activity, and (ii) a domain that contains DNA binding functionality (e.g., a DNA recognition domain that, for example, binds to or is capable of binding to a recognition sequence, e.g., as described herein); and (B) an insert DNA comprising (i) a sequence that binds the polypeptide (e.g., a recognition sequence as described herein) and, optionally, (ii) an object sequence (e.g., a heterologous object sequence). In some embodiments, the domain that contains recombinase activity and the domain that contains DNA binding functionality is the same domain. For example, the Gene Writer genome editor protein may comprise a DNA-binding domain and a recombinase domain. In certain embodiments, the elements of the Gene Writer™ gene editor polypeptide can be derived from sequences of a recombinase polypeptide (e.g., a serine recombinase), e.g., as described herein, e.g., any of SEQ ID NOs: 1-12,677 (e.g., SEQ ID NOs: 1-11,432). In some embodiments the Gene Writer genome editor is combined with a second polypeptide. In some embodiments the second polypeptide is derived from a recombinase polypeptide (e.g., a serine recombinase), e.g., as described herein, e.g., any of SEQ ID NOs: 1-12,677 (e.g., SEQ ID NOs: 1-11,432).

[0550] In some embodiments, a Gene Writer comprises a serine recombinase (e.g., a serine integrase) polypeptide domain comprising the amino acid sequence of a serine recombinase (e.g., a serine integrase) as described in Ioannidi et al. (2021, bioRxiv 2021.11.01.466786; doi: https://doi.org/10.1101/2021.11.01.466786; incorporated herein by reference in its entirety), or an amino acid sequence having at least 75%, 80%, 85%, 90%, 95%, 96%, 97%, 98%, or 99% sequence identity thereto. In some embodiments, a Gene Writer comprises a serine recombinase (e.g., a serine integrase) polypeptide domain comprising the amino acid sequence of a serine recombinase (e.g., a serine integrase) as described in Durrant et al. (2021, bioRxiv preprint doi: https://doi.org/10.1101/2021.11.05.467528; incorporated herein by reference in its entirety), or an amino acid sequence having at least 75%, 80%, 85%, 90%, 95%, 96%, 97%, 98%, or 99% sequence identity thereto. It is understood that, where applicable, any embodiment (e.g., enumerated embodiment) described herein with respect to a serine recombinase polypeptide domain comprising an amino acid sequence of any of SEQ ID NOs: 1-12,677 may instead utilize a serine recombinase as described in this paragraph.

[0551] In some embodiments, a Gene Writer comprises one or more components (e.g., nucleic acid molecules or polypeptides) as described in PCT Application No. PCT/US2020/061705 (incorporated by reference herein in its entirety).

### Recombinase Polypeptide Component of Gene Writer Gene Editor System

[0552] An exemplary family of recombinase polypeptides that can be used in the systems, cells, and methods described herein includes the serine recombinases. Generally, serine recombinases are enzymes that catalyze site-specific recombination between two recognition sequences. The two recognition sequences may be, e.g., on the same nucleic acid (e.g., DNA) molecule, or may be present in two separate nucleic acid (e.g., DNA) molecules. In some embodiments, a serine recombinase polypeptide comprises a recombinase N-terminal domain (also called the catalytic domain), a recombinase domain, and a C-terminal zinc ribbon domain. In some embodiments the zinc ribbon domain further comprises a coiled-coiled motif. In some embodiments the recombinase domain and the zinc ribbon domain are collectively referred to as the C-terminal domain. In some embodiments the N-terminal domain is between 50 and 250 amino acids, or 100-200 amino acids, or 130-170 amino acids. In some embodiments the C-terminal domain is 200-800 amino acids, or 300-500 amino acids. In some embodiments the recombinase domain is between 50 and 150 amino acids. In some embodiments the zinc ribbon domain is between 30 and 100 amino acids. In some embodiments the N-terminal domain is linked to the recombinase domain via a long helix (sometimes referred to as an uE helix or linker). In some embodiments the recombinase domain and zinc ribbon domain are connected via a short linker. Non-limiting examples of serine recombinases, as well as the recombinase polypeptides, comprising an amino acid sequence of any of SEQ ID NOs: 1-12,677 (e.g., SEQ ID NOs: 1-11,432).

[0553] In some embodiments, recombinant recombinases are constructed by swapping domains. In some embodiments, a recombinase N-terminal domain can be paired with a heterologous recombinase C-terminal domain. In some embodiments, a catalytic domain can be paired with a heterologous recombinase domain, zinc ribbon domain, αE helix, and/or short linker. In some embodiments, a C-terminal domain can comprise heterologous recombinase domains, zinc ribbon domains, αE helix, and/or short linkers. In some embodiments, DNA binding elements of the recombinase polypeptide are modified or replaced by heterologous DNA binding elements, such as zinc-finger domains, TAL domains, or Watson-crick based targeting domains, such as CRISPR/Cas systems.

[0554] Without wishing to be bound by theory, serine recombinases utilize short, specific DNA sequences (e.g., attP and attB), which are examples of recognition sequences. During the integration reaction, the recombinase binds to attP and attB as a dimer, mediates association of the sites to form a tetrameric synaptic complex, and catalyzes strand exchange to integrate DNA, forming new recognition sequences sites, attL and attR. The new recognition sites, attL and attR, comprises, for example, in order from 5′ to 3′: attB5′-core-attP3′, and attP5′-core-attB3′. Without wishing to be bound by theory, the reverse reaction, where the DNA is excised by site-specific recombination between attL and attR sequences, occurs at reduced frequency or does not occur in the absence of a recombination directionality factor (RDF). This results in stable integration with little or no detectable recombinase-mediated excision, i.e., recombination that is “unidirectional”.

[0555] While not wishing to be bound by descriptions of mechanisms, strand exchange catalyzed by recombinases typically occurs in two steps of (1) cleavage and (2) rejoining involving a covalent protein-DNA intermediate formed between the recombinase enzyme and the DNA strand(s). The recombinases act by binding to their DNA substrates as dimers and bring the sites together by protein-protein interactions to form a tetrameric synaptic complex. Activation of the nucleophilic serine in each of the four subunits results in DNA cleavage to give 2 nt 3′ overhangs and transient phosphoseryl bonds to the recessed 5′ ends. DNA strand exchange occurs by subunit rotation. The 3′ dinucleotide overhangs base pair with the recessed 5′ bases and the 3′ OH attacks the phosphoseryl bond in the reverse of the cleavage reaction to join the recombinant half sites. Further details of the structure, activity, and biology of serine recombinases are described in the following references which are incorporated by reference: Smith MCM. 2014. Phage-encoded serine integrases and other large serine recombinases. Microbiol Spectrum 3(4):MDNA3-0059-2014; Rutherford K and Van Duyne G D. 2014. The ins and outs of serine integrase site-specific recombination. Current Opinion in Structural Biology 24: 125-131; Van Duyne G D and Rutherford K. 2013. Large Serine Recombinase domain structure and attachment site binding. Critical Reviews in Biochemistry and Molecular Biology 48(5): 471-491.

[0556] A skilled artisan can determine the nucleic acid and corresponding polypeptide sequences of a recombinase polypeptide (e.g., serine recombinase) and domains thereof, e.g., by using routine sequence analysis tools as Basic Local Alignment Search Tool (BLAST) or CD-Search for conserved domain analysis. Other sequence analysis tools are known and can be found, e.g., at https://molbiol-tools.ca, for example, at https://molbiol-tools.ca/Motifs.htm. In some embodiments, a serine recombinase described herein includes at least one known active site signature of a serine recombinase, e.g., cd00338, cd03767, cd03768, cd03769, or cd03770. Proteins containing these domains can additionally be found by searching the domains on protein databases, such as InterPro (Mitchell et al. Nucleic Acids Res 47, D351-360 (2019)), UniProt (The UniProt Consortium Nucleic Acids Res 47, D506-515 (2019)), or the conserved domain database (Lu et al. Nucleic Acids Res 48, D265-268 (2020)), or by scanning open reading frames or all-frame translations of nucleic acid sequences for serine recombinase domains using prediction tools, for example InterProScan.

[0557] While the present disclosure provides many particular serine recombinase sequences, it is understood that methods described herein can be performed with other serine recombinases as well. For example, a composition or method described herein may involve a serine recombinase having an active site signature chosen from, e.g., cd00338, cd03767, cd03768, cd03769, or cd03770. In some embodiments, the serine recombinase has a length of above 400 amino acids (e.g., at least 400, 500, 600, 700, 800, 900, or 1000 amino acids). In some embodiments, a recombinase comprises 1, 2, 3, 4, 5, 6, 7, 8, 9, 10, 11, 12, 13, 14, 15, or more domains of any of SEQ ID NOs: 1-12,677 (e.g., SEQ ID NOs: 1-11,432). In some embodiments, a recombinase comprises 1, 2, 3, 4, 5, 6, 7, 8, 9, 10, 11, 12, 13, 14, 15, or more domains listed in Table 1. In some embodiments, a method for identifying a recombinase comprises determining whether a polypeptide comprises 1, 2, 3, 4, 5, 6, 7, 8, 9, 10, 11, 12, 13, 14, 15, or more domains of any of SEQ ID NOs: 1-12,677 (e.g., SEQ ID NOs: 1-11,432). In some embodiments, a method for identifying a recombinase comprises determining whether a polypeptide comprises 1, 2, 3, 4, 5, 6, 7, 8, 9, 10, 11, 12, 13, 14, 15, or more domains listed in Table 1.

### Exemplary Recombinase Polypeptides

[0558] In some embodiments, a Gene Writer™ gene editor system comprises a recombinase polypeptide (e.g., a serine recombinase polypeptide), e.g., as described herein. Generally, a recombinase polypeptide (e.g., a serine recombinase polypeptide) specifically binds to a nucleic acid recognition sequence and catalyzes a recombination reaction at a site within the recognition sequence (e.g., a core sequence within the recognition sequence). In some embodiments, a recombinase polypeptide catalyzes recombination between a recognition sequence, or a portion thereof (e.g., a core sequence thereof) and another nucleic acid sequence (e.g., an insert DNA comprising a cognate recognition sequence and, optionally, an object sequence, e.g., a heterologous object sequence). For example, a recombinase polypeptide (e.g., a serine recombinase polypeptide) may catalyze a recombination reaction that results in insertion of an object sequence, or a portion thereof, into another nucleic acid molecule (e.g., a genomic DNA molecule, e.g., a chromosome or mitochondrial DNA).

[0559] The sequence listing, e.g., in SEQ ID NOs: 1-12,677 (e.g., SEQ ID NOs: 1-11,432), provides amino acid sequences of exemplary recombinase polypeptides, e.g., serine recombinases (e.g., serine integrases), or fragments thereof. The sequence listing, e.g., in SEQ ID NOs: 13,001-25,677 or SEQ ID NOs: 26,001-38,677, further provides exemplary flanking nucleic acid sequences of the nucleic acid sequence encoding the exemplary serine recombinase in the organism of origin (e.g., SEQ ID NOs: 13,001-25,677 (e.g., SEQ ID NOs: 13,001-24,432) or SEQ ID NOs: 26,001-38,677 (e.g., SEQ ID NOs: 26,001-37,432) representing LeftRegion and RightRegion, respectively); one or both of these flanking nucleic acid sequences comprise the native recognition sequence or the portions thereof (e.g., comprise an attP site or portions thereof) of the corresponding recombinase. The terms “LeftRegion” and “RightRegion” do not imply any particular placement or directionality. Without wishing to be bound by theory, a given set of LeftRegion and RightRegion sequences may be positioned on either end of a nucleic acid sequence of interest (e.g., a nucleic acid sequence encoding an exemplary serine recombinase, e.g., in a bacterial genome). For example, in some embodiments, the LeftRegion is located upstream (e.g., 5′) relative to the nucleic acid sequence of interest (e.g., a coding region in the nucleic acid sequence of interest). In some embodiments, the LeftRegion is located downstream (e.g., 3′) relative to the nucleic acid sequence of interest (e.g., a coding region in the nucleic acid sequence of interest). In some embodiments, the RightRegion is located upstream (e.g., 5′) relative to the nucleic acid sequence of interest (e.g., a coding region in the nucleic acid sequence of interest). In some embodiments, the RightRegion is located downstream (e.g., 3′) relative to the nucleic acid sequence of interest (e.g., a coding region in the nucleic acid sequence of interest). SEQ ID NOs: 1-11,432 comprise amino acid sequences that had not previously been identified as serine recombinases, and SEQ ID NOs: 13,001-24,432 or SEQ ID NOs: 26,001-37,432 comprise corresponding flanking nucleic acid sequences (and thereby DNA recognition sequences) of serine recombinases for which the DNA recognition sequences were previously unknown. Domains identified as present in the exemplary recombinase sequences are also identified based on InterPro analysis of the amino acid sequence (see corresponding descriptive field in the sequence listing). See, e.g., https://omictools.com/interpro-tool. A brief key to the domain nomenclature is provided in Table 1.

[0560] In some embodiments, a recombinase polypeptide described herein comprises one or more domains listed in Table 1. In some embodiments, a recombinase polypeptide described herein comprises one or more (e.g., 2, 3, 4, or all) of the domains listed in the corresponding descriptive field for that polypeptide sequence in the sequence listing. In some embodiments, a recombinase polypeptide described herein comprises one or more (e.g., 2, 3, 4, or all) of the domains listed in the corresponding descriptive field for any of SEQ ID NOs: 1-12,677.

[0561] Each of the native recognition sequences or portions thereof occurring in the flanking nucleic acid sequences of any of SEQ ID NOs: 13,001-25,677 (e.g., SEQ ID NOs: 13,001-24,432) or SEQ ID NOs: 26,001-38,677 (e.g., SEQ ID NOs: 26,001-37,432) may comprise one, two, or three of: (i) a first parapalindromic sequence, (ii) a core sequence, and/or (iii) a second parapalindromic sequence, wherein the first and second parapalindromic sequences are parapalindromic relative to each other.

TABLE 1
Exemplary integrase domains

| domainID | Description |
|---|---|
| PF07508 | Recombinase, usually found with PF00239 |
| G3DSA: | Putative LSR |
| 1.10.10.2600 | |
| SSF53041 | Resolvase like |
| PF13408 | Recombinase zinc ribbon |
| PS51737 | DNA-binding recombinase domain profile |
| cd00338 | Serine Recombinase family, catalytic domain; a |
| | DNA binding domain may be pres . . . |
| cd03770 | Serine Recombinase (SR) family, TndX-like |
| | transposase subfamily, catalytic do. |
| PF14287 | Domain of unknown function |
| PTHR30461: SF21 | Subfamily not named |
| cd03768 | Serine Recombinase (SR) family, Resolvase and |
| | Invertase subfamily, catalytic |
| PTHR30461: SF3 | SERINE RECOMBINASE PINE-RELATED |
| PF00239 | Resolvase, N-terminal |
| PS51736 | Resolvase/invertase-type recombinase catalytic |
| | domain profile |
| SM00857 | Resolvase, N terminal domain |
| G3DSA: | Resolvase, N-terminal |
| 3.40.50.1390 | |
| PS00397 | Site-specific recombinases active site |
| PS00398 | Site-specific recombinases signature 2 |
| cd00569 | Helix-turn-helix domain of Hin and related proteins |
| PTHR30461 | DNA-INVERTASE FROM LAMBDOID |
| | PROPHAGE |
| G3DSA: | Homeodomain-like |
| 1.10.10.60 | |
| SSF46689 | Homeodomain-like |
| PF02796 | Helix-turn-helix domain of resolvase |

TABLE 2
Exemplary recombinase recognition sites

| Inte- | | | |
|---|---|---|---|
| grase | Protein | | |
| A No. | Accession | attB | attP |
| 23 | YP_006907 | GATCAGCTCCGCGGGCAAGACCTTTC | TCCAGCCCAACAGTGTTAGTCTTTGC |
| | 228.1 | TCCTTCACGGGGTGGAAGGTC | TCTTACCCAGTTGGGCGGGA |
| 25 | NP_047974 | TGCGGGTGCCAGGGCGTGCCCTTGGG | GTGCCCCAACTGGGGTAACCTTTGAG |
| | .1 | CTCCCCGGGCGCGTACTCC | TTCTCTCAGTTGGGGG |
| 27 | NP_813744 | CAGGTTTTTGACGAAAGTGATCCAGA | GGTGCTGGGTTGTTGTCTCTGGACAG |
| | .2 | TGATCCAG | TGATCCATGGGAAACTACTCAGCACC |
| 56 | AFU62167. | CATCAGGGCGGTCAGGCCGTAGATGT | ATGTGGTCCTTTAGATCCACTGACGT |
| | 1 | GGAAGAAACGGCAGCACGGCGAGGAC | GGGTCAGTGTCTCTAAAGGACTCGCG |
| | | G | |
| 81 | APC43293.1 | ATCTGGATGTGGGTGTCCATCTGCGG | AGTTGTGGCCATGTGTCCATCTGGGG |
| | | GCAGACGCCGCAGTCGAAGCACGG | GCAGATGGAGACGGGGTCACA |
| 111 | NP_817623 | CGGTCTCCATCGGGATCTGCTGATCG | TAACCGCAAGTGTACATCCCTCGGCT |
| | .1 | AGCAGCATGCCGACCA | GGCCGAGACAAGTACAGTTGCGACAG |
| 165 | YP_003358 | CGGTCTCCATCGGGATCTGCTGATCG | TAGTTTCCAATGTTACAGGAACTGCT |
| | 736.1 | AGCAGCATGCCGACCA | GGCAGAATCCAACACATTGGAAGTCG |
| 204 | NP_075302 | GGCTTGTCGACGACGGCGGTCTCCGT | GGTTTGTCTGGTCAACCACCGCGGTC |
| | .1 | CGTCAGGATCAT | TCAGTGGTGTACGGTACAAACC |
| 329 | AAK38018. | ATGCCAACACAATTAACATCTCAATC | GAGTTTTTATTTCGTTTATTTCAATT |
| | 1 | AAGGTAAATGCTTTTTGCTTTTTTTG | AAGGTAACTAAAAAACTCCTTTTAAG |
| | | C | G |
| 414 | YP_006990 | GCATGTTCCCCAAAGCGATACCACTT | TGTTCCCCAAAGCGATACCACTTGAA |
| | 167.1 | GAAGCAGTGGTACTGCTTGTGGGTAC | GCAGTGGTACTGCTTGTGGGTACA |
| | | ACTCTGCGGGTG | |
| 436 | YP_009103 | CAAAGGATCACTGAATCAAAAGTATT | ATTTTAGGTATATGATTTTGTTTATT |
| | 095.1 | GCTCATCCACGCGAAA | AGTGTAAATAACACTATGTACCTAAA |
| | | | AT |
| 450 | CAR95427. | GTAGATTTGTTTCCCCAGACGCACAC | TATTAGTATAGAAGAAAGCTCTCAGC |
| | 1 | GTGGAGTGTGTAAGTTTACTTGAGAA | ACACGTGGAGTGTGTTGCTCTCTGCT |
| | | ACGGAGTTAA | CGTAAAGCCT |
| 477 | NP_463492 | TTTCGGATCAAGCTATGAAGGACGCA | TTCCTCGTTTTCTCTCGTTGGAAGAA |
| | .1 | AAGAGGGAACTAAA | GAAGAAACGAGAAA |
| 524 | AYN56706. | AAGTGTCCAAGCTGGCCCCCGATCCC | TATAATTTCGTATATTAGATATAACC |
| | 1 | AGTTTCAATAGTTTGGGGAATCTTTG | GGTTTCAATTGGAAATACCTAATATA |
| | | TAAGTGGTAA | CGAAAAAAGG |
| 1116 | WP_12913 | CACCCATTGTGTTCACAGGAGATACA | TGTAGTAAGTATCTTAATATACAGCT |
| | 7749.1 | GCTTTATCTGTACTGATATTAATGAC | TTATCTGTTTTTTAAGATACTTACTA |
| | | ATGCTG | CTTT |
| 1200 | YP_459991. | CGGAAGGTAGCGTCAACGATAGGTGT | CTAGTTTTAAAGTTGGTTATTAGTTA |
| | 1 | AACTGTCGTGTTTGTAACGGTACTTC | CTGTGATATTTATCACGGTACCCAAT |
| | | CAACAGCTGGCGCCGCCAC | AACCAATGAAT |
| 1203 | YP_006082 | CTTCCAGCACATCACCCACATGGTCT | GGTATTGTATCAATTTCAGAACTCAC |
| | 695.1 | GTGTCGGTGTGCGTCAGCACTAGACT | ACTTCGGTATGCGTACTCAATTTGAT |
| | | ATCAATCCTA | ACAATTACAA |
| 1204 | YP_005549 | TTTTTTCCGCCTGTCGTAACCGGATC | CTTTTTTGTTGTACTTAAACAATAAT |
| | 228.1 | TGTTGTAACGATTATCGGAATGACCT | GCTTGTAAGAATTATTGATTGAGTAC |
| | | TGATGCCGG | GACATAAACC |
| 1205 | YP_189066. | ACTTCCAATTAACCCTTCACCAGCCC | TTATATTTCGACTTAATTAAGTACAG |
| | 1 | TATACCAAGTTCCTGTCGCGCATCCT | TTTCCACCTAGAGATAGACAAATAAA |
| | | CCAGCTAAT | GTATTATTA |
| 1206 | YP_005679 | ACTACTTAATATATCCATAAGAGAAA | GTTAGGTGTATATCATACCTAACGCA |
| | 179.1 | TTTCATTTCCTTCTTTGTCTACCCCT | ATTCATTACATCACATATGTTATACA |
| | | ATAGGATCTT | CCTACTTTAA |
| 1207 | YP_002804 | ACGAAATAAAAGATTGTATAGATGCT | AAAAGAATCCAAATTATCGTACTTTA |
| | 732.1 | GGTAGGAAACATGCCCTTGTCATTTA | ACATAGTGAATACTGTCCATCATGTA |
| | | GCTGAAACAG | TAAAAGTACG |
| 1208 | YP_001089 | TATTCTAAGTAATGTAGTTTTACCAC | TATATAATTATTTGGACTAACATATA |
| | 468.1 | ATCCACTAGGTCCGAGTAAACATAGA | GTATCCACTTGGCTATTATTAGTTAG |
| | | AATTCCCCT | TCCAAATAAATA |
| 1209 | YP_001886 | ATGGATTTTGCAGATTCCCAGATGCC | GTTTATATGTTTACTAATAAGACGCT |
| | 479.1 | CCTACAGAAAGAGGTACAAAACATTT | CTCAACCCATAAAGTCTTATTAGTAA |
| | | ATTGGAATTAATT | ACATATTTCAACT |
| 1211 | YP_005759 | GTTCGTGGTAACTATGGGTGGTACAG | TTTTTGTATGTTAGTTGTGTCACTGG |
| | 947.1 | GTGCCACATTAGTTGTACCATTTATG | GTAGACCTAAATAGTGACACAACTGC |
| | | TTTATGTGGTTAAC | TATTAAAATTTAA |
| 1212 | YP_004586 | CAAGAAACGTTCCGTCTGTTTGTGTC | TTATAAACCTGTTTTAAAGTTAACTT |
| | 821.1 | AGCTGCGCGAAATTAATGACCGGATC | TACATGCCTAACATTAACTCTTATAC |
| | | GTTTGTTCC | AGGTTAAGGT |
| 1213 | YP_353073. | GGAACTCCGCCGGGCCCATCTGGTCG | ATGGGGTCACAATACCAATCATGTTC |
| | 2 | AAGAAGATGAAGGGGCCCACCATCTG | AAGAATGTGAAGGGTATTTTACCCTT |
| | | CCTCCGGGCC | GTCGTTTCAG |
| 1214 | BAG46462. | GATACGGATGTTCGTCGCCGGCACGC | AGTTGTCTGATAATATATTTTCGGAC |
| | 1 | TGGTCACGCTCGGCAATCCCAAGATC | ACGCTCGGCAACCCGAACGAGAGTCA |
| | | ATGCTGTTCT | AAATACATTT |
| 1217 | SGE40566.1 | GAAGGTGTTGGTGCGGGGTTGGCCGT | GTAGTGTATCTCACAGGTCCACGGTT |
| | | GGTCGAGGTGGGGT | GGCCGTGGACTGCTGAAGAACATTCC |
| 1218 | CBG73463. | GGACGGCGCAGAAGGGGAGTAGCTCT | GCTCATGTATGTGTCTACGCGAGATT |
| | 1 | TCGCCGGACCGTCGACATACTGCTCA | CTCGCCCGAGAACTTCTGCAAGGCAC |
| | | GCTCGTC | TGCTCTTGGCT |
| 1219 | YP_001376 | GCATACATTGTTGTTGTTTTTCCAGA | CAATAACGGTTGTATTTGTAGAACTT |
| | 196.1 | TCCAGTTGGTCCTGTAAATATAAGCA | GACCAGTTGTTTTAGTAACATAAATA |
| | | ATCCATGTGAGT | CAACTCCGAATA |
| 1221 | CAC97653.1 | TAACTTTTTCGGATCGAGTTATGATG | GTTTAGTATCTCGTTATCTCTCGTTG |
| | | GACGTAAAGAGGGAACAAAGCATCTA | GAGGGAGAAGAAACGGGATACCAAAA |
| 1222 | CAD10281. | TTTCGGATCAAGCTATGAAGGACGCA | TTCCTCGTTTTCTCTCGTTGGACGGA |
| | 2 | AAGAGGGAACTAAA | AACGAATCGAGAAA |
| 1223 | YP_004301 | TTTCCACAGACAACTCACGTGGAGGT | CAATGAAAAACTAGGCATGTAGAAGT |
| | 563.1 | AGTCAC | TGTTTGT |
| 1224 | YP_006538 | TTCTGGACCATGATGCGCCACTTCCG | GTATCTTGATGTACAACATTACTCTT |
| | 656.1 | AAATTTCAAAAAGATCAGTGGTCAAA | TATTTTCAAATACAGAATAATGTTGC |
| | | CGGCTCATTA | ATATAATATT |
| 1225 | YP_006685 | CTGTAACTTTTTCGGATCAAGCTATG | TTGTTTAGTCCCTCGTTTTCTCTCGT |
| | 721.1 | AGGGACGCAAAGAGGGAACTAAACAC | TGGACGGAGACGAATCGAGAAACTAA |
| | | TTAATTGGTG | AATTATAAAT |
| 1226 | YP_001384 | TATTCAATTATGTGTCGTAATTTTTA | TATATACTTATAGATACTAAATATTT |
| | 783.1 | TCTATTGCGACGAAAAAACACCATAA | TTGTATTGCGTAACTTCTTCTACACC |
| | | AATTCTAAC | TGTAATATCT |
| 1227 | YP_001392 | AGAAATAGACCTTTCAACTGGACAAG | AAATATAACCTGTGTATTGAAACAAG |
| | 519.1 | GTGCTGATAAAACTATGCAGCAAGTC | GTGCTGATAAAACCCTTTCATAAACA |
| | | TTAAGTAAA | CAAGTAAATA |
| 1228 | BAF67264.1 | TTTATATTGCGAAAAATAATTGGCGA | GTGGTTGTTTTTGTTGGAAGTGTGTA |
| | | ACGAGGTAACTGGATACCTCATCCGC | ATCAGGTATCTGCATAGTTTTCCGAA |
| | | CAATTAAAATTTG | CTTCCAATTA |
| 1229 | NP_470568 | TTATTGCAAGAAAAATGGGTTATAAG | TTATATAAAATAGTGTTTTTGTAAAG |
| | .1 | TACACATCAGGTTATAGTAATATCGA | TACACATCACCATATTTGACAAAAAA |
| | | AAAAGGAAGC | CCTATAAATA |
| 1230 | YP_706485. | ATCGCGCAGAACGGTGCGGTGATCAG | CTATGTGGTGGTAATAGCGAGTAGGG |
| | 1 | TGAGTACGCACCGGGCACGACACCGG | GACTACTCGCTCCAGGTACATTAACA |
| | | CGAAGCATCG | CCATGGA |
| 1231 | YP_002336 | GTAATATGTTTGGATATGGGGAAGTG | ATAATAGTGTATATGGTAGAGAATTA |
| | 631.1 | AATCAGTACAACCGCCACAGTACCCT | CAACCAGTTTAATACTCCACATGTAC |
| | | CATGTCAGCC | ACGCAGTGAG |
| 1232 | YP_001646 | TTTGTAGCCATTAGGCGCATTAGGTT | CGTCACCTTGTTGGCGTAATTAGATT |
| | 422.1 | GACGCCATTAAGCCCTAAAGCATCAT | TACTCCAACAGGGTGATGACAAAGCT |
| | | TCGTCGAAAC | AATGAATTTT |
| 1233 | NP_268897 | GTTTGTAAAGGAGACTGATAATGGCA | ATGGATAAAAAAATACAGCGTTTTTC |
| | .1 | TGTACAACTATACTCGTCGGTAAAAA | ATGTACAACTATACTAGTTGTAGTGC |
| | | GGCATCTTAT | CTAAATAATGCTT |
| 1234 | YP_005869 | AATACTAATAATAGCTAGTACAATTA | CGCTTAATTGCGAGTTTTTATTTCGC |
| | 510.1 | ACATCTCTATCAAAGTAAAAGCTTTT | TTATCTCAATTAAGGTAACTAAAAAA |
| | | AGCTCTTTCT | CTCCTTTT |
| 1235 | YP_002736 | TCTGGTGTAGACGTTAAACGTCCAAT | TATTTCTGTATTTTAGTCAAAGTAAT |
| | 920.1 | CAAGATAACTTTATTATACATATTTT | TAAGATAAGTTAGAGTTAGTAACAGT |
| | | CTTCCTCCTA | ATTTTAACTT |
| 1236 | YP_003445 | TAGGAGGAAAAAATATGTATAATAAA | GTTAATAATATGTATTTAAGTCTAAC |
| | 547.1 | GTTATCATGATTGGGCGTTTGACGTC | TTATCATGACAAATTTGACTAAAATA |
| | | TACACCAGAAT | CAAAAAGGC |
| 1238 | YP_002747 | TTCCAAAGAGCGCCCAACGCGACCTG | AAAAATTACAAAGTTTTCAACCCTTG |
| | 001.1 | AAATTTGAATAAGACTGCTGCTTGTG | ATTTGAATTAGCGGTCAAATAATTTG |
| | | TAAAGGCGATGATT | TAATTCGTTT |
| 1239 | BAE05705.1 | CAATCATCAGATAACTATGGCGGCAC | TTAATAAACTATGGAAGTATGTACAG |
| | | GTGCATTAACCACGGTTGTATCCCGT | TCTTGCAATGTTGAGTGAACAAACTT |
| | | CTAAAGTACTCGT | CCATAATAAAAT |
| 1240 | YP_003472 | AATCTGCAAACATGTATGGCGGTACA | ATTTTTGTACGGAAGTAGATACTATC |
| | 505.1 | TGTATCAACATTGGTTGTATTCCTAC | TTTCAATATCCATGTTACTTAGTGCC |
| | | AAAGACACTCAT | ATACAAAAA |
| 1241 | BAF92844.1 | CGAAAATGTATGGAGGCACTTGTATC | TTTGTGCGGAACTACGAACAGTTCAT |
| | | AATATAGGATGTATACCTTCGAAGAC | TAATACGAAGTGTACAAACTTCCATA |
| | | ACTT | CAA |
| 1242 | YP_003251 | AGACGAGAAACGTTCCGTCCGTCTGG | GTGTTATAAACCTGTGTGAGAGTTAA |
| | 752.1 | GTCAGTTGGGCAAAGTTGATGACCGG | GTTTACATGCCTAACCTTAACTTTTA |
| | | GTCGTCCGTT | CGCAGGTTCAGCTT |
| 1244 | YP_003880 | AGCACGCTGATAATCAGCAAGACCAC | GGAAAATATAAATAATTTTAGTAACC |
| | 342.1 | CAACATTTCCACCAATGTAAAAGCTT | TACATCTCAATCAAGGATAGTAAAAC |
| | | TAACCTTAGC | TCTCACTCTT |
| 1245 | BAF03598.1 | GAGCGCCGGATCAGGGAGTGGACGGC | CCCTAATACGCAAGTCGATAACTCTC |
| | | CTGGGAGCGCTACACGCTGTGGCTGC | CTGGGAGCGTTGACAACTTGCGCACC |
| | | GGTCGGTGC | CTGATCTG |

[0562] In some embodiments, a sequence comprising the LeftRegion nucleic acid sequence of SEQ ID NO: 24,761) comprises the nucleic acid sequence:

TCAAAGGTTGATGTTACTGCTGATAATGTAGATATCATATTTAAATT
CCAACTCGCTTAATTGCGAGTTTTTATTTCGTTTATTTCAATTAAGG
TAACTAAAAAACTCCTTTTAAGGAGTTTCTGTAATCAATTAATTTCT
TCAATATATTTTATTTGGTCCCATAGTTCATCAGTTATCTCATGCAT
AGAAGGTTTTTGTTTTGTTTGTATTAGATATCCTTTCTCCTTAAGCA
TGTTAACTACTTTCTTTAGTTTCTG.

[0563] In some embodiments, a sequence comprising the LeftRegion nucleic acid sequence of SEQ ID NO: 24,956) comprises the nucleic acid sequence:

TTAATTAAAAAAATAGACGTATGGAACGATAATAAAATTAAGATCC
ACTGGAATATTTAATTTTTTAGGCGCTTTACGCCTTTTTTCGTATA
TTAGGTATTTCCAATTGAAACCGGTTATATCTAATATACGAAATTA
TACAACAAAAAGCCCCAGTGACCATTGCATAATCTGCAACAACCAC
TAGGGCTAAATTTTTATTGACGTTGTGAGTAAACAACTGAATTGAG
TTGCTGTTGGTTAACACCATTGGCAATATC.

[0564] In some embodiments, a recombinase recognition site (e.g., as described herein) comprises an attB sequence. In some embodiments, a recombinase recognition site (e.g., as described herein) comprises an attP sequence. In some embodiments, a recombinase recognition site (e.g., as described herein) comprises an attB sequence and an attP sequence. In embodiments, the attB sequence is selected from a sequence listed in Table 2. In embodiments, the attP sequence is selected from a sequence listed in Table 2. In some embodiments, a recombinase recognition site (e.g., as described herein) comprises an attB sequence and an attP sequence, wherein the attB and attP sequences each comprise a sequence as listed in a single row of Table 2.

[0565] In some embodiments, a DNA recognition sequence (e.g., as described herein) comprises an attB sequence. In some embodiments, a DNA recognition sequence (e.g., as described herein) comprises an attP sequence. In some embodiments, a DNA recognition sequence (e.g., as described herein) comprises an attB sequence and an attP sequence. In embodiments, the attB sequence is selected from a sequence listed in Table 2. In embodiments, the attP sequence is selected from a sequence listed in Table 2. In some embodiments, a DNA recognition sequence (e.g., as described herein) comprises an attB sequence and an attP sequence, wherein the attB and attP sequences each comprise a sequence as listed in a single row of Table 2.

[0566] In some embodiments, a recombinase polypeptide (e.g., comprised in a system or cell as described herein) comprises an amino acid sequence of any of SEQ ID NOs: 1-12,677 (e.g., any of SEQ ID NOs: 1-11,432), or an amino acid sequence having at least 70%, 75%, 80%, 85%, 90%, 95%, 96%, 97%, 98%, 99%, or 100% sequence identity thereto. In some embodiments, a recombinase polypeptide (e.g., comprised in a system or cell as described herein), or a portion thereof, has at least 70%, 75%, 80%, 85%, 90%, 95%, 96%, 97%, 98%, 99%, or 100% sequence identity to the amino acid sequence of a recombinase domain, a DNA recognition domain (e.g., that binds to or is capable of binding to a recognition site, e.g. as described herein), a recombinase N-terminal domain (also called the catalytic domain), a zinc ribbon domain, the coiled coil motif of a zinc ribbon domain, or a C-terminal domain (e.g., the recombinase domain and the zinc ribbon domain) of a recombinase polypeptide of any of SEQ ID NOs: 1-12,677 (e.g., any of SEQ ID NOs: 1-11,432). In some embodiments, a recombinase polypeptide (e.g., comprised in a system or cell as described herein) has one or more of the DNA binding activity and/or the recombinase activity of a recombinase polypeptide comprising an amino acid sequence of any of SEQ ID NOs: 1-12,677 (e.g., any of SEQ ID NOs: 1-11,432), or an amino acid sequence having at least 70%, 75%, 80%, 85%, 90%, 95%, 96%, 97%, 98%, 99%, or 100% sequence identity thereto.

[0567] In some embodiments, an insert DNA (e.g., comprised in a system or cell as described herein) comprises a nucleic acid recognition sequence occurring within a nucleotide sequence of any of SEQ ID NOs: 13,001-25,677 (e.g., SEQ ID NOs: 13,001-24,432) or SEQ ID NOs: 26,001-38,677 (e.g., SEQ ID NOs: 26,001-37,432), or a nucleic acid sequence having at least 70%, 75%, 80%, 85%, 90%, 95%, 96%, 97%, 98%, or 99% identity thereto, or having no more than 1, 2, 3, 4, 5, 6, 7, 8, 9, 10, 11, 12, 13, 14, 15, 16, 17, 18, 19, or 20 sequence alterations (e.g., substitutions, insertions, or deletions) relative thereto. In some embodiments, an insert DNA (e.g., comprised in a system or cell as described herein) comprises one or more (e.g., both) parapalindromic sequences occurring within a nucleotide sequence of any of SEQ ID NOs: 13,001-25,677 (e.g., SEQ ID NOs: 13,001-24,432) or SEQ ID NOs: 26,001-38,677 (e.g., SEQ ID NOs: 26,001-37,432), or a nucleic acid sequence having at least 70%, 75%, 80%, 85%, 90%, 95%, 96%, 97%, 98%, or 99% identity to said parapalindromic sequence, or having no more than 1, 2, 3, 4, 5, 6, 7, 8, 9, 10, 11, 12, 13, 14, 15, 16, 17, 18, 19, or 20 sequence alterations (e.g., substitutions, insertions, or deletions) relative thereto. In some embodiments, an insert DNA (e.g., comprised in a system or cell as described herein) comprises a spacer (e.g., a core sequence) of a nucleic acid recognition sequence occurring within a nucleotide sequence in the of any of SEQ ID NOs: 13,001-25,677 (e.g., SEQ ID NOs: 13,001-24,432) or SEQ ID NOs: 26,001-38,677 (e.g., SEQ ID NOs: 26,001-37,432), or a nucleic acid sequence having at least 70%, 75%, 80%, 85%, 90%, 95%, 96%, 97%, 98%, or 99% identity thereto, or having no more than 1, 2, 3, 4, 5, 6, 7, 8, 9, 10, 11, 12, 13, 14, 15, 16, 17, 18, 19, or 20 sequence alterations (e.g., substitutions, insertions, or deletions) relative thereto. In certain embodiments, the insert DNA further comprises a heterologous object sequence.

[0568] In some embodiments, an insert DNA (e.g., comprised in a system or cell as described herein) comprises a nucleic acid recognition sequence occurring within a nucleotide sequence of any of SEQ ID NOs: 13,001-25,677 (e.g., SEQ ID NOs: 13,001-24,432) or SEQ ID NOs: 26,001-38,677 (e.g., SEQ ID NOs: 26,001-37,432), or a nucleic acid sequence having at least 70%, 75%, 80%, 85%, 90%, 95%, 96%, 97%, 98%, or 99% identity thereto, or having no more than 1, 2, 3, 4, 5, 6, 7, 8, 9, 10, 11, 12, 13, 14, 15, 16, 17, 18, 19, or 20 sequence alterations (e.g., substitutions, insertions, or deletions) relative thereto, that is the cognate to a pseudo-recognition sequence (e.g., a human recognition sequence).

[0569] In some embodiments, an insert DNA or recombinase polypeptide used in a composition or method described herein directs insertion of a heterologous object sequence into a position having a safe harbor score of at least 3, 4, 5, 6, 7, or 8.

[0570] In certain embodiments, recombination between the insert DNA and the human DNA recognition sequence results in the formation of an integrated nucleic acid molecule comprising two recognition sequences flanking the integrated sequence (e.g., the heterologous object sequence). Without wishing to be bound by theory, serine recombinases facilitate recombination between recognition sequences comprising attB and attP sites and by recombination form recognition sequences comprising attL and attR sites, e.g., flanking the integrated sequence. While a serine recombinase may recognize, e.g., bind, to an attL or attR site, the serine recombinase will not appreciably (e.g., will not) facilitate recombination using the attL or attR sites (e.g., in the absence of an additional factor). The attL and attR sites comprise recombined portions of the attP and attB sites from which they were created. In certain embodiments, one or both of the two post-recombination recognition sequences of the integrated nucleic acid molecule comprises 1, 2, 3, 4, 5, 6, 7, 8, 9, 10, 11, 12, 13, 14, 15, 16, 17, 18, 19, 20, 21, 22, 23, 24, 25, 26, 27, 28, 29, 30, 31, 32, 33, 34, 35, or more mismatches as compared to one or more of (e.g., one, two, or all three of): (i) the native recognition sequence, (ii) the recognition sequence on the insert DNA, and/or (iii) a pseudo-recognition sequence (e.g., a human DNA recognition sequence). In embodiments, one or both of the two post-recombination recognition sequences of the integrated nucleic acid molecule comprises 1, 2, 3, 4, 5, 6, 7, 8, 9, 10, 11, 12, 13, 14, 15, 16, 17, 18, 19, 20, 21, 22, 23, 24, 25, 26, 27, 28, 29, 30, 31, 32, 33, 34, 35, or more mismatches as compared to the native recognition sequence. In some embodiments the mismatches are present in the core sequence. It is contemplated that, in some embodiments, these differences between the recognition sequence(s) of the integrated nucleic acid molecule and the native recognition sequence, the insert DNA recognition sequence, and/or the human DNA recognition sequence result in reduced binding affinity between the recombinase polypeptide and the recognition sequences of the integrated nucleic acid molecule and/or reduced (e.g., eliminated) recombinase activity of the recombinase polypeptide on the recognition sequences of the integrated nucleic acid molecule, compared to the binding and/or activity of the recombinase to the recognition sequence(s) the native recognition sequence, the insert DNA recognition sequence, and/or the human DNA recognition sequence.

[0571] In some embodiments, a pseudo-recognition sequence (e.g., a human DNA recognition sequence) is located in or near (e.g., within 1, 2, 3, 4, 5, 10, 15, 20, 30, 40, 50, 75, 100, 150, 200, 300, 400, 500, 600, 700, 800, 900, 1000, 2000, 3000, 4000, 5000, or 10,000 nucleotides of) a genomic safe harbor site. In some embodiments, the pseudo-recognition sequence (e.g., human recognition sequence) is located at a position in the genome that meets 1, 2, 3, 4, 5, 6, 7, 8 or 9 of the following criteria: (i) is located >300 kb from a cancer-related gene; (ii) is >300 kb from a miRNA/other functional small RNA; (iii) is >50 kb from a 5′ gene end; (iv) is >50 kb from a replication origin; (v) is >50 kb away from any ultraconserved element; (vi) has low transcriptional activity (i.e. no mRNA+/−25 kb); (vii) is not in a copy number variable region; (viii) is in open chromatin; and/or (ix) is unique, with 1 copy in the human genome.

[0572] In embodiments, a cell or system as described herein comprises one or more of (e.g., 1, 2, or 3 of): (i) a recombinase polypeptide comprising an amino acid sequence of SEQ ID NO: n (where n is chosen from 1-12,677 (e.g., 1-11,342)), or an amino acid sequence having at least 70%, 75%, 80%, 85%, 90%, 95%, 96%, 97%, 98%, 99%, or 100% sequence identity thereto; (ii) an insert DNA comprising a DNA recognition sequence occurring within a nucleotide sequence corresponding to a) a LeftRegion comprising a nucleotide sequence according to SEQ ID NO: (n+13,000), b) a RightRegion comprising a nucleotide sequence according to SEQ ID NO: (n+26,000), or both a) and b), or a nucleic acid sequence having at least 70%, 75%, 80%, 85%, 90%, 95%, 96%, 97%, 98%, or 99% identity thereto, or having no more than 1, 2, 3, 4, 5, 6, 7, 8, 9, 10, 11, 12, 13, 14, 15, 16, 17, 18, 19, or 20 sequence alterations (e.g., substitutions, insertions, or deletions) relative thereto, optionally wherein the insert DNA further comprises an object sequence (e.g., a heterologous object sequence); and/or (iii) a genome comprising a pseudo-recognition sequence (e.g., a human recognition sequence) sequence corresponding to a) a LeftRegion comprising a nucleotide sequence according to SEQ ID NO: (n+13,000), b) a RightRegion comprising a nucleotide sequence according to SEQ ID NO: (n+26,000), or both a) and b), or a nucleic acid sequence having at least 70%, 75%, 80%, 85%, 90%, 95%, 96%, 97%, 98%, or 99% identity thereto, or having no more than 1, 2, 3, 4, 5, 6, 7, 8, 9, 10, 11, 12, 13, 14, 15, 16, 17, 18, 19, or 20 sequence alterations (e.g., substitutions, insertions, or deletions) relative thereto.

[0573] In some embodiments, a recombinase recognition site, e.g., an attB, attP, attL, or attR site, can be predicted by available software tools. In some embodiments, the recognition sites may be predictable by a phage prediction tool, e.g., PhiSpy (Akhter et al. Nucleic Acids Res 40(16):e126 (2012)) or PHASTER (Arndt et al. Nucleic Acids Res 44:W16-W21 (2016)), incorporated herein by reference. In some embodiments, the region proximal to an integrase coding sequence in its native context, e.g., in a bacteriophage genome, plasmid, or bacterial genome, e.g., any of SEQ ID NOs: 13,001-25,677 (e.g., SEQ ID NOs: 13,001-24,432) or SEQ ID NOs: 26,001-38,677 (e.g., SEQ ID NOs: 26,001-37,432), comprises the native attachment site of a recombinase enzyme. In some embodiments, a minimal attachment site can be discovered empirically by testing fragments of the integrase proximal sequence, e.g., any of SEQ ID NOs: 13,001-25,677 (e.g., SEQ ID NOs: 13,001-24,432) or SEQ ID NOs: 26,001-38,677 (e.g., SEQ ID NOs: 26,001-37,432), until the minimal sequence sufficient for a productive recombination reaction is discovered. In some embodiments, an integrase proximal sequence, e.g., any of SEQ ID NOs: 13,001-25,677 (e.g., SEQ ID NOs: 13,001-24,432) or SEQ ID NOs: 26,001-38,677 (e.g., SEQ ID NOs: 26,001-37,432), or a fragment thereof, is assayed to determine the importance of each nucleotide, e.g., is profiled in a library format as per the methods of Bessen et al. Nat Commun 10:1937 (2019), incorporated herein by reference in its entirety. In some embodiments, a recombinase or a recombinase recognition site is selected through an evolutionary process for altered protein-nucleic acid interaction properties, e.g., a recombinase used in a Gene Writer system is evolved as described in WO2017015545, incorporated herein by reference in its entirety. In some embodiments, a recombinase and/or a recombinase recognition site is discovered through prediction of the ends of an integrated element in a native host genome, e.g., an integrated bacteriophage or integrated plasmid, e.g., as described in Yang et al. Nat Methods 11(12):1261-1266 (2014), incorporated herein by reference in its entirety.

[0574] In some embodiments, an attL or attR site is present in the human genome and the template DNA comprises the cognate site, e.g., the template comprises an attR sequence if the genome comprises an attL sequence. In some embodiments, when attL/R recognition sites are used in a Gene Writing system, the system also comprises a recombination directionality factor (RDF) to enable recognition and recombination of these sites. In some embodiments, a Gene Writer polypeptide and a cognate RDF are provided as a fusion polypeptide. An exemplary recombinase-RDF fusion is described in Olorunniji et al. Nucleic Acids Res 45(14):8635-8645 (2017), which is incorporated herein by reference in its entirety.

[0575] In some embodiments, the protein component(s) of a Gene Writing™ system as described herein may be pre-associated with a template (e.g., a DNA template). For example, in some embodiments, the Gene Writer™ polypeptide may be first combined with the DNA template to form a deoxyribonucleoprotein (DNP) complex. In some embodiments, the DNP may be delivered to cells via, e.g., transfection, nucleofection, virus, vesicle, LNP, exosome, fusosome. In some embodiments, the template DNA may be first associated with a DNA-bending factor, e.g., HMGB1, in order to facilitate excision and transposition when subsequently contacted with the transposase component. Additional description of DNP delivery is found, for example, in Guha and Calos J Mol Biol (2020), which is herein incorporated by reference in its entirety.

[0576] In some embodiments, a polypeptide described herein comprises one or more (e.g., 2, 3, 4, 5) nuclear targeting sequences, for example a nuclear localization sequence (NLS). In some embodiments, the NLS is a bipartite NLS. In some embodiments, an NLS facilitates the import of a protein comprising an NLS into the cell nucleus. In some embodiments, the NLS is fused to the N-terminus of a Gene Writer described herein. In some embodiments, the NLS is fused to the C-terminus of the Gene Writer. In some embodiments, the NLS is fused to the N-terminus or the C-terminus of a Cas domain. In some embodiments, a linker sequence is disposed between the NLS and the neighboring domain of the Gene Writer.

[0577] In some embodiments, an NLS comprises the amino acid sequence MDSLLMNRRKFLYQFKNVRWAKGRRETYLC, PKKRKVEGADKRTADGSEFESPKKKRKV, RKSGKIAAIWKRPRKPKKKRKV KRTADGSEFESPKKKRKV, KKTELQTTNAENKTKKL, or KRGINDRNFWRGENGRKTR, KRPAATKKAGQAKKKK, or a functional fragment or variant thereof. Exemplary NLS sequences are also described in PCT/EP2000/011690, the contents of which are incorporated herein by reference for their disclosure of exemplary nuclear localization sequences.

[0578] In some embodiments, an NLS comprises an amino acid sequence as disclosed in Table 3. An NLS of this table may be utilized with one or more copies in a polypeptide in one or more locations in a polypeptide, e.g., 1, 2, 3 or more copies of an NLS in an N-terminal domain, between peptide domains, in a C-terminal domain, or in a combination of locations, in order to improve subcellular localization to the nucleus. Multiple unique sequences may be used within a single polypeptide. Sequences may be naturally monopartite or bipartite, e.g., having one or two stretches of basic amino acids, or may be used as chimeric bipartite sequences. Sequence references correspond to UniProt accession numbers, except where indicated as SeqNLS for sequences mined using a subcellular localization prediction algorithm (Lin et al BMC Bioinformat 13:157 (2012), incorporated herein by reference in its entirety).

TABLE 3
Exemplary nuclear localization signals
for use in Gene Writing systems

| Sequence | Sequence References |
|---|---|
| AHFKISGEKRPSTDPGKKAK | Q76IQ7 |
| NPKKKKKKDP | |
| AHRAKKMSKTHA | P21827 |
| ASPEYVNLPINGNG | SeqNLS |
| CTKRPRW | O88622, Q86W56, Q9QYM2, |
| | O02776 |
| DKAKRVSRNKSEKKRR | O15516, Q5RAK8, Q91YB2, |
| | Q91YB0, Q8QGQ6, O08785, |
| | Q9WVS9, Q6YGZ4 |
| EELRLKEELLKGIYA | Q9QY16, Q9UHL0, Q2TBP1, |
| | Q9QY15 |
| EEQLRRRKNSRLNNTG | G5EFF5 |
| EVLKVIRTGKRKKKAWKR | SeqNLS |
| MVTKVC | |
| HHHHHHHHHHHHQPH | Q63934, G3V7L5, Q12837 |
| HKKKHPDASVNFSEFSK | P10103, Q4R844, P12682, |
| | B0CM99, A9RA84, Q6YKA4, |
| | P09429, P63159, Q08IE6, |
| | P63158, Q9YH06, B1MTB0 |
| HKRTKK | Q2R2D5 |
| IINGRKLKLKKSRRRSSQTS | SeqNLS |
| NNSFTSRRS | |
| KAEQERRK | Q8LH59 |
| KEKRKRREELFIEQKKRK | SegNLS |
| KKGKDEWFSRGKKP | P30999 |
| KKGPSVQKRKKT | Q6ZN17 |
| KKKTVINDLLHYKKEK | SeqNLS, P32354 |
| KKNGGKGKNKPSAKIKK | SeqNLS |
| KKPKWDDFKKKKK | Q15397, Q8BKS9, Q562C7 |
| KKRKKD | SeqNLS, Q91Z62, Q1A730, |
| | Q969P5, Q2KHT6, Q9CPU7 |
| KKRRKRRRK | SeqNLS |
| KKRRRRARK | Q9UMS6, D4A702, Q91YE8 |
| KKSKRGR | Q9UBS0 |
| KKSRKRGS | B4FG96 |
| KKSTALSRELGKIMRRR | SeqNLS, P32354 |
| KKSYQDPEIIAHSRPRK | Q9U7C9 |
| KKTGKNRKLKSKRVKTR | Q9Z301, O54943, Q8K3T2 |
| KKVSIAGQSGKLWRWKR | Q6YUL8 |
| KKYENVVIKRSPRKRGRPR | SeqNLS |
| K | |
| KNKKRK | SeqNLS |
| KPKKKR | SegNLS |
| KRAMKDDSHGNSTSPKRRK | Q0E671 |
| KRANSNLVAAYEKAKKK | P23508 |
| KRASEDTTSGSPPKKSSAGP | Q9BZZ5, Q5R644 |
| KR | |
| KRFKRRWMVRKMKTKK | SeqNLS |
| KRGLNSSFETSPKKVK | Q8IV63 |
| KRGNSSIGPNDLSKRKQRK | SeqNLS |
| K | |
| KRIHSVSLSQSQIDPSKKVK | SegNLS |
| RAK | |
| KRKGKLKNKGSKRKK | O15381 |
| KRRRRRRREKRKR | Q96GM8 |
| KRSNDRTYSPEEEKQRRA | Q91ZF2 |
| KRTVATNGDASGAHRAKK | SeqNLS |
| MSK | |
| KRVYNKGEDEQEHLPKGKK | SeqNLS |
| R | |
| KSGKAPRRRAVSMDNSNK | Q9WVH4, O43524 |
| KVNFLDMSLDDIIIYKELE | Q9P127 |
| KVQHRIAKKTTRRRR | Q9DXE6 |
| LSPSLSPL | Q9Y261, P32182, P35583 |
| MDSLLMNRRKFLYQFKNVR | Q9GZX7 |
| WAKGRRETYLC | |
| MPQNEYIELHRKRYGYRLD | SeqNLS |
| YHEKKRKKESREAHERSKK | |
| AKKMIGLKAKLYHK | |
| MVQLRPRASR | SeqNLS |
| NNKLLAKRRKGGASPKDDP | Q965G5 |
| MDDIK | |
| NYKRPMDGTYGPPAKRHEG | O14497, A2BH40 |
| E | |
| PDTKRAKLDSSETTMVKKK | SeqNLS |
| PEKRTKI | SegNLS |
| PGGRGKKK | Q719N1, Q9UBP0, A2VDN5 |
| PGKMDKGEHRQERRDRPY | Q01844, Q61545 |
| PKKGDKYDKTD | Q45FA5 |
| PKKKSRK | O35914, Q01954 |
| PKKNKPE | Q22663 |
| PKKRAKV | P04295, P89438 |
| PKPKKLKVE | P55263, P55262, P55264, |
| | Q64640 |
| PKRGRGR | Q9FYS5, Q43386 |
| PKRRLVDDA | POC797 |
| PKRRRTY | SeqNLS |
| PLFKRR | A8X6H4, Q9TXJ0 |
| PLRKAKR | Q86WB0, Q5R8V9 |
| PPAKRKCIF | Q6AZ28, O75928, Q8C5D8 |
| PPARRRRL | Q8NAG6 |
| PPKKKRKV | Q3L6L5, P03070, P14999, |
| | P03071 |
| PPNKRMKVKH | Q8BN78 |
| PPRIYPQLPSAPT | P0C799 |
| PQRSPFPKSSVKR | SeqNLS |
| PRPRKVPR | P0C799 |
| PRRRVQRKR | SeqNLS, Q5R448, Q5TAQ9 |
| PRRVRLK | Q58DJ0, P56477, Q13568 |
| PSRKRPR | Q62315, Q5F363, Q92833 |
| PSSKKRKV | SeqNLS |
| PTKKRVK | P07664 |
| QRPGPYDRP | SeqNLS |
| RGKGGKGLGKGGAKRHRK | SeqNLS |
| RKAGKGGGGHKTTKKRSA | B4FG96 |
| KDEKVP | |
| RKIKLKRAK | A1L3G9 |
| RKIKRKRAK | B9X187 |
| RKKEAPGPREELRSRGR | O35126, P54258, Q5IS70, |
| | P54259 |
| RKKRKGK | SeqNLS, Q29243, Q62165, |
| | Q28685, O18738, Q9TSZ6, |
| | Q14118 |
| RKKRRQRRR | P04326, P69697, P69698, |
| | P05907, P20879, P04613, |
| | P19553, P0C1J9, P20893, |
| | P12506, P04612, Q73370, |
| | P0C1K0, P05906, P35965, |
| | P04609, P04610, P04614, |
| | P04608, P05905 |
| RKKSIPLSIKNLKRKHKRKK | Q9C0C9 |
| NKITR | |
| RKLVKPKNTKMKTKLRTNP | Q14190 |
| Y | |
| RKRLILSDKGQLDWKK | SeqNLS, Q91Z62, Q1A730, |
| | Q2KHT6, Q9CPU7 |
| RKRLKSK | Q13309 |
| RKRRVRDNM | Q8QPH4, Q809M7, A8C8X1, |
| | Q2VNC5, Q38SQ0, 089749, |
| | Q6DNQ9, Q809L9, Q0A429, |
| | Q20NV3, P16509, P16505, |
| | Q6DNQ5, P16506, Q6XT06, |
| | P26118, Q2ICQ2, Q2RCG8, |
| | Q0A2D0, QUA2H9, Q9IQ46, |
| | Q809M3, Q6J847, Q6J856, |
| | B4URE4, A4GCM7, Q0A440, |
| | P26120, P16511, |
| RKRSPKDKKEKDLDGAGKR | Q7RTP6 |
| RKT | |
| RKRTPRVDGQTGENDMNK | 094851 |
| RRRK | |
| RLPVRRRRRR | P04499, P12541, P03269, |
| | P48313, P03270 |
| RLRFRKPKSK | P69469 |
| RQQRKR | Q14980 |
| RRDLNSSFETSPKKVK | Q8K3G5 |
| RRDRAKLR | Q9SLB8 |
| RRGDGRRR | Q80WE1, Q5R9B4, Q06787, |
| | P35922 |
| RRGRKRKAEKQ | Q812D1, Q5XXA9, Q99JF8, |
| | Q8MJG1, Q66T72, 075475 |
| RRKKRR | QOVD86, Q58DS6, Q5R6G2, |
| | Q9ERI5, Q6AYK2, Q6NYC1 |
| RRKRSKSEDMDSVESKRRR | Q7TT18 |
| RRKRSR | Q99PU7, D3ZHS6, Q92560, |
| | A2VDM8 |
| RRPKGKTLQKRKPK | Q6ZN17 |
| RRRGFERFGPDNMGRKRK | Q63014, Q9DBR0 |
| RRRGKNKVAAQNCRK | SeqNLS |
| RRRKRR | Q5FVH8, Q6MZT1, Q08DH5, |
| | Q8BQP9 |
| RRRQKQKGGASRRR | SeqNLS |
| RRRREGPRARRRR | P08313, P10231 |
| RRTIRLKLVYDKCDRSCKIQ | SeqNLS |
| KKNRNKCQYCRFHKCLSVG | |
| MSHNAIRFGRMPRSEKAKL | |
| KAE | |
| RRVPQRKEVSRCRKCRK | Q5RJN4, Q32L09, Q8CAK3, |
| | Q9NUL5 |
| RVGGRRQAVECIEDLLNEP | P03255 |
| GQPLDLSCKRPRP | |
| RVVKLRIAP | P52639, Q8JMN0 |
| RVVRRR | P70278 |
| SKRKTKISRKTR | Q5RAY1, O00443 |
| SYVKTVPNRTRTYIKL | P21935 |
| TGKNEAKKRKIA | P52739, Q8K3J5, Q5RAU9 |
| TLSPASSPSSVSCPVIPASTD | SeqNLS |
| ESPGSALNI | |
| VSKKQRTGKKIH | P52739, Q8K3J5, Q5RAU9 |
| SPKKKRKVE | |
| KRTAD GSEFE SPKKKRKVE | |
| PAAKRVKLD | |
| PKKKRKV | |
| MDSLLMNRRKFLYQFKNVR | |
| WAKGRRETYLC | |
| SPKKKRKVEAS | |
| MAPKKKRKVGIHRGVP | |

[0579] In some embodiments, the NLS is a bipartite NLS. A bipartite NLS typically comprises two basic amino acid clusters separated by a spacer sequence (which may be, e.g., about 10 amino acids in length). A monopartite NLS typically lacks a spacer. An example of a bipartite NLS is the nucleoplasmin NLS, having the sequence KR[PAATKKAGQA]KKKK, wherein the spacer is bracketed. Another exemplary bipartite NLS has the sequence PKKKRKVEGADKRTADGSEFESPKKKRKV. Exemplary NLSs are described in International Application WO2020051561, which is herein incorporated by reference in its entirety, including for its disclosures regarding nuclear localization sequences.

### DNA Binding Domains

[0580] In some embodiments, a recombinase polypeptide (e.g., comprised in a system or cell as described herein), e.g., a tyrosine recombinase, comprises a DNA binding domain (e.g., a target binding domain or a template binding domain). In some embodiments, a recombinase polypeptide comprises the amino acid sequence of a DNA binding domain of a recombinase as described in Ioannidi et al. (2021, bioRxiv 2021.11.01.466786; doi: https://doi.org/10.1101/2021.11.01.466786; incorporated herein by reference in its entirety), or an amino acid sequence having at least 75%, 80%, 85%, 90%, 95%, 96%, 97%, 98%, or 99% sequence identity thereto. In some embodiments, a recombinase polypeptide comprises the amino acid sequence of a DNA binding domain of a recombinase as described in Anzalone et al. (2021, Nat. Biotechnol. doi: https://doi.org/10.1038/s41587-021-01133-w; incorporated herein by reference in its entirety), or an amino acid sequence having at least 75%, 80%, 85%, 90%, 95%, 96%, 97%, 98%, or 99% sequence identity thereto.

[0581] In some embodiments, a recombinase polypeptide described herein may be redirected to a defined target site in the human genome. In some embodiments, a recombinase described herein may be fused to a heterologous domain, e.g., a heterologous DNA binding domain. In some embodiments, a recombinase may be fused to a heterologous DNA binding domain, e.g., a DNA binding domain from a zinc finger, TAL, meganuclease, transcription factor, or sequence-guided DNA binding element. In some embodiments, a recombinase may be fused to a DNA binding domain from a sequence-guided DNA binding element, e.g., a CRISPR-associated (Cas) DNA binding element, e.g., a Cas9. In some embodiments, a DNA binding element fused to a recombinase domain may contain mutations inactivating other catalytic functions, e.g., mutations inactivating endonuclease activity, e.g., mutations creating an inactivated meganuclease or partially or completely inactivate Cas protein, e.g., mutations creating a nickase Cas9 or dead Cas9 (dCas9). As an example, Standage-Beier et al. CRISPR J2(4):209-222 (2019), describes the use of a dCas9 fused to the Tn3 resolvase (integrase Cas9, iCas9) that employs appropriate spacing of two monomeric fusion proteins at the target site for cooperative targeting for the sequence-specific integration of reporter systems into the genome of HEK293 cells. Additional examples of recombinase targeting by DNA binding domains include zinc finger fusions (zinc-finger recombinases, ZFRs (Gaj et al. Nucleic Acids Res 41(6):3937-3946 (2013)); RecZFs (Gersbach et al. Nucleic Acids Res 38(12):4198-4206 (2010))), TALE fusions (TALE recombinases, TALERs (Mercer et al. Nucleic Acids Res 40(21):11163-11172 (2012))), and dCas9 fusions (recombinase Cas9, recCas9 (Chaikind et al. Nucleic Acids Res 44(20):9758-9770 (2016)); integrase Cas9, iCas9 (Standage-Beier et al. CRISPR J 2(4):209-222 (2019))), all of which are incorporated herein by reference.

[0582] In some embodiments, a DNA binding domain comprises a Streptococcus pyogenes Cas9 (SpCas9) or a functional fragment or variant thereof. In some embodiments, the DNA binding domain comprises a modified SpCas9. In embodiments, the modified SpCas9 comprises a modification that alters protospacer-adjacent motif (PAM) specificity. In embodiments, the PAM has specificity for the nucleic acid sequence 5′-NGT-3′. In embodiments, the modified SpCas9 comprises one or more amino acid substitutions, e.g., at one or more of positions L1111, D1135, G1218, E1219, A1322, of R1335, e.g., selected from L1111R, D1135V, G1218R, E1219F, A1322R, R1335V. In embodiments, the modified SpCas9 comprises the amino acid substitution T1337R and one or more additional amino acid substitutions, e.g., selected from L1111, D1135L, S1136R, G1218S, E1219V, D1332A, D1332S, D1332T, D1332V, D1332L, D1332K, D1332R, R1335Q, T1337, T1337L, T1337Q, T13371, T1337V, T1337F, T1337S, T1337N, T1337K, T1337H, T1337Q, and T1337M, or corresponding amino acid substitutions thereto. In embodiments, the modified SpCas9 comprises: (i) one or more amino acid substitutions selected from D1135L, S1136R, G1218S, E1219V, A1322R, R1335Q, and T1337; and (ii) one or more amino acid substitutions selected from L1111R, G1218R, E1219F, D1332A, D1332S, D1332T, D1332V, D1332L, D1332K, D1332R, T1337L, T1337I, T1337V, T1337F, T1337S, T1337N, T1337K, T1337R, T1337H, T1337Q, and T1337M, or corresponding amino acid substitutions thereto.

[0583] In some embodiments, a Gene Writer may comprise a Cas protein as listed in Table 4. The predicted or validated nickase mutations for installing Nickase activity in the Cas protein as shown in Table 4, are based on the signature of the SpCas9(N863A) mutation. In some embodiments, system described herein comprises a GeneWriter protein described herein and a Cas protein of Table 4.

TABLE 4
CRISPR/Cas Proteins, Species, and Mutations

| | Parental | | Nickase |
|---|---|---|---|
| Variant | Host | Protein Sequence | Mutation |
| Nme2Cas9 | Neisseria | MAAFKPNPINYILGLDIGIASVGWAMVEIDEEENPIRLIDLGVRVFERAEVP | N611A |
| | meningitidis | KTGDSLAMARRLARSVRRLTRRRAHRLLRARRLLKREGVLQAADFDENG | |
| | | LIKSLPNTPWQLRAAALDRKLTPLEWSAVLLHLIKHRGYLSQRKNEGETAD | |
| | | KELGALLKGVANNAHALQTGDFRTPAELALNKFEKESGHIRNQRGDYSHT | |
| | | FSRKDLQAELILLFEKQKEFGNPHVSGGLKEGIETLLMTQRPALSGDAVQK | |
| | | MLGHCTFEPAEPKAAKNTYTAERFIWLTKLNNLRILEQGSERPLTDTERAT | |
| | | LMDEPYRKSKLTYAQARKLLGLEDTAFFKGLRYGKDNAEASTLMEMKAY | |
| | | HAISRALEKEGLKDKKSPLNLSSELQDEIGTAFSLFKTDEDITGRLKDRVQP | |
| | | EILEALLKHISFDKFVQISLKALRRIVPLMEQGKRYDEACAEIYGDHYGKKN | |
| | | TEEKIYLPPIPADEIRNPVVLRALSQARKVINGVVRRYGSPARIHIETAREVG | |
| | | KSFKDRKEIEKRQEENRKDREKAAAKFREYFPNFVGEPKSKDILKLRLYEQ | |
| | | QHGKCLYSGKEINLVRLNEKGYVEIDHALPFSRTWDDSFNNKVLVLGSEN | |
| | | QNKGNQTPYEYFNGKDNSREWQEFKARVETSRFPRSKKQRILLQKFDEDG | |
| | | FKECNLNDTRYVNRFLCQFVADHILLTGKGKRRVFASNGQITNLLRGFWG | |
| | | LRKVRAENDRHHALDAVVVACSTVAMQQKITRFVRYKEMNAFDGKTIDK | |
| | | ETGKVLHQKTHFPQPWEFFAQEVMIRVFGKPDGKPEFEEADTPEKLRTLLA | |
| | | EKLSSRPEAVHEYVTPLFVSRAPNRKMSGAHKDTLRSAKRFVKHNEKISVK | |
| | | RVWLTEIKLADLENMVNYKNGREIELYEALKARLEAYGGNAKQAFDPKD | |
| | | NPFYKKGGQLVKAVRVEKTQESGVLLNKKNAYTIADNGDMVRVDVFCK | |
| | | VDKKGKNQYFIVPIYAWQVAENILPDIDCKGYRIDDSYTFCFSLHKYDLIAF | |
| | | QKDEKSKVEFAYYINCDSSNGRFYLAWHDKGSKEQQFRISTQNLVLIQKY | |
| | | QVNELGKEIRPCRLKKRPPVR | |
| PpnCas9 | Pasteurella | MQNNPLNYILGLDLGIASIGWAVVEIDEESSPIRLIDVGVRTFERAEVAKTG | N605A |
| | pneumotropica | ESLALSRRLARSSRRLIKRRAERLKKAKRLLKAEKILHSIDEKLPINVWQLR | |
| | | VKGLKEKLERQEWAAVLLHLSKHRGYLSQRKNEGKSDNKELGALLSGIAS | |
| | | NHQMLQSSEYRTPAEIAVKKFQVEEGHIRNQRGSYTHTFSRLDLLAEMELL | |
| | | FQRQAELGNSYTSTTLLENLTALLMWQKPALAGDAILKMLGKCTFEPSEY | |
| | | KAAKNSYSAERFVWLTKLNNLRILENGTERALNDNERFALLEQPYEKSKL | |
| | | TYAQVRAMLALSDNAIFKGVRYLGEDKKTVESKTTLIEMKFYHQIRKTLG | |
| | | SAELKKEWNELKGNSDLLDEIGTAFSLYKTDDDICRYLEGKLPERVLNALL | |
| | | ENLNFDKFIQLSLKALHQILPLMLQGQRYDEAVSAIYGDHYGKKSTETTRL | |
| | | LPTIPADEIRNPVVLRTLTQARKVINAVVRLYGSPARIHIETAREVGKSYQD | |
| | | RKKLEKQQEDNRKQRESAVKKFKEMFPHFVGEPKGKDILKMRLYELQQA | |
| | | KCLYSGKSLELHRLLEKGYVEVDHALPFSRTWDDSFNNKVLVLANENQN | |
| | | KGNLTPYEWLDGKNNSERWQHFVVRVQTSGFSYAKKQRILNHKLDEKGFI | |
| | | ERNLNDTRYVARFLCNFIADNMLLVGKGKRNVFASNGQITALLRHRWGL | |
| | | QKVREQNDRHHALDAVVVACSTVAMQQKITRFVRYNEGNVFSGERIDRE | |
| | | TGEIIPLHFPSPWAFFKENVEIRIFSENPKLELENRLPDYPQYNHEWVQPLFV | |
| | | SRMPTRKMTGQGHMETVKSAKRLNEGLSVLKVPLTQLKLSDLERMVNRD | |
| | | REIALYESLKARLEQFGNDPAKAFAEPFYKKGGALVKAVRLEQTQKSGVL | |
| | | VRDGNGVADNASMVRVDVFTKGGKYFLVPIYTWQVAKGILPNRAATQGK | |
| | | DENDWDIMDEMATFQFSLCQNDLIKLVTKKKTIFGYFNGLNRATSNINIKE | |
| | | HDLDKSKGKLGIYLEVGVKLAISLEKYQVDELGKNIRPCRPTKRQHVR | |
| SauCas9 | Staphylococcus | MKRNYILGLDIGITSVGYGIIDYETRDVIDAGVRLFKEANVENNEGRRSKR | N580A |
| | aureus | GARRLKRRRRHRIQRVKKLLFDYNLLTDHSELSGINPYEARVKGLSQKLSE | |
| | | EEFSAALLHLAKRRGVHNVNEVEEDTGNELSTKEQISRNSKALEEKYVAEL | |
| | | QLERLKKDGEVRGSINRFKTSDYVKEAKQLLKVQKAYHQLDQSFIDTYIDL | |
| | | LETRRTYYEGPGEGSPFGWKDIKEWYEMLMGHCTYFPEELRSVKYAYNA | |
| | | DLYNALNDLNNLVITRDENEKLEYYEKFQIIENVFKQKKKPTLKQIAKEILV | |
| | | NEEDIKGYRVTSTGKPEFTNLKVYHDIKDITARKEIIENAELLDQIAKILTIY | |
| | | QSSEDIQEELTNLNSELTQEEIEQISNLKGYTGTHNLSLKAINLILDELWHTN | |
| | | DNQIAIFNRLKLVPKKVDLSQQKEIPTTLVDDFILSPVVKRSFIQSIKVINAII | |
| | | KKYGLPNDIIIELAREKNSKDAQKMINEMQKRNRQTNERIEEIIRTTGKENA | |
| | | KYLIEKIKLHDMQEGKCLYSLEAIPLEDLLNNPFNYEVDHIIPRSVSFDNSFN | |
| | | NKVLVKQEENSKKGNRTPFQYLSSSDSKISYETFKKHILNLAKGKGRISKTK | |
| | | KEYLLEERDINRFSVQKDFINRNLVDTRYATRGLMNLLRSYFRVNNLDVK | |
| | | VKSINGGFTSFLRRKWKFKKERNKGYKHHAEDALIIANADFIFKEWKKLD | |
| | | KAKKVMENQMFEEKQAESMPEIETEQEYKEIFITPHQIKHIKDFKDYKYSH | |
| | | RVDKKPNRELINDTLYSTRKDDKGNTLIVNNLNGLYDKDNDKLKKLINKS | |
| | | PEKLLMYHHDPQTYQKLKLIMEQYGDEKNPLYKYYEETGNYLTKYSKKD | |
| | | NGPVIKKIKYYGNKLNAHLDITDDYPNSRNKVVKLSLKPYRFDVYLDNGV | |
| | | YKFVTVKNLDVIKKENYYEVNSKCYEEAKKLKKISNQAEFIASFYNNDLIK | |
| | | INGELYRVIGVNNDLLNRIEVNMIDITYREYLENMNDKRPPRIIKTIASKTQS | |
| | | IKKYSTDILGNLYEVKSKKHPQIIKKG | |
| SauCas9- | Staphylococcus | MKRNYILGLDIGITSVGYGIIDYETRDVIDAGVRLFKEANVENNEGRRSKR | N580A |
| KKH | aureus | GARRLKRRRRHRIQRVKKLLFDYNLLTDHSELSGINPYEARVKGLSQKLSE | |
| | | EEFSAALLHLAKRRGVHNVNEVEEDTGNELSTKEQISRNSKALEEKYVAEL | |
| | | QLERLKKDGEVRGSINRFKTSDYVKEAKQLLKVQKAYHQLDQSFIDTYIDL | |
| | | LETRRTYYEGPGEGSPFGWKDIKEWYEMLMGHCTYFPEELRSVKYAYNA | |
| | | DLYNALNDLNNLVITRDENEKLEYYEKFQIIENVFKQKKKPTLKQIAKEILV | |
| | | NEEDIKGYRVTSTGKPEFTNLKVYHDIKDITARKEIIENAELLDQIAKILTIY | |
| | | QSSEDIQEELTNLNSELTQEEIEQISNLKGYTGTHNLSLKAINLILDELWHTN | |
| | | DNQIAIFNRLKLVPKKVDLSQQKEIPTTLVDDFILSPVVKRSFIQSIKVINAII | |
| | | KKYGLPNDIIIELAREKNSKDAQKMINEMQKRNRQTNERIEEIIRTTGKENA | |
| | | KYLIEKIKLHDMQEGKCLYSLEAIPLEDLLNNPFNYEVDHIIPRSVSFDNSFN | |
| | | NKVLVKQEENSKKGNRTPFQYLSSSDSKISYETFKKHILNLAKGKGRISKTK | |
| | | KEYLLEERDINRFSVQKDFINRNLVDTRYATRGLMNLLRSYFRVNNLDVK | |
| | | VKSINGGFTSFLRRKWKFKKERNKGYKHHAEDALIIANADFIFKEWKKLD | |
| | | KAKKVMENQMFEEKQAESMPEIETEQEYKEIFITPHQIKHIKDFKDYKYSH | |
| | | RVDKKPNRKLINDTLYSTRKDDKGNTLIVNNLNGLYDKDNDKLKKLINKS | |
| | | PEKLLMYHHDPQTYQKLKLIMEQYGDEKNPLYKYYEETGNYLTKYSKKD | |
| | | NGPVIKKIKYYGNKLNAHLDITDDYPNSRNKVVKLSLKPYRFDVYLDNGV | |
| | | YKFVTVKNLDVIKKENYYEVNSKCYEEAKKLKKISNQAEFIASFYKNDLIK | |
| | | INGELYRVIGVNNDLLNRIEVNMIDITYREYLENMNDKRPPHIIKTIASKTQS | |
| | | IKKYSTDILGNLYEVKSKKHPQIIKKG | |
| SauriCas9 | Staphylococcus | MQENQQKQNYILGLDIGITSVGYGLIDSKTREVIDAGVRLFPEADSENNSNR | N588A |
| | auricularis | RSKRGARRLKRRRIHRLNRVKDLLADYQMIDLNNVPKSTDPYTIRVKGLR | |
| | | EPLTKEEFAIALLHIAKRRGLHNISVSMGDEEQDNELSTKQQLQKNAQQLQ | |
| | | DKYVCELQLERLTNINKVRGEKNRFKTEDFVKEVKQLCETQRQYHNIDDQ | |
| | | FIQQYIDLVSTRREYFEGPGNGSPYGWDGDLLKWYEKLMGRCTYFPEELR | |
| | | SVKYAYSADLFNALNDLNNLVVTRDDNPKLEYYEKYHIIENVFKQKKNPT | |
| | | LKQIAKEIGVQDYDIRGYRITKSGKPQFTSFKLYHDLKNIFEQAKYLEDVE | |
| | | MLDEIAKILTIYQDEISIKKALDQLPELLTESEKSQIAQLTGYTGTHRLSLKCI | |
| | | HIVIDELWESPENQMEIFTRLNLKPKKVEMSEIDSIPTTLVDEFILSPVVKRA | |
| | | FIQSIKVINAVINRFGLPEDIIIELAREKNSKDRRKFINKLQKQNEATRKKIEQ | |
| | | LLAKYGNTNAKYMIEKIKLHDMQEGKCLYSLEAIPLEDLLSNPTHYEVDHI | |
| | | IPRSVSFDNSLNNKVLVKQSENSKKGNRTPYQYLSSNESKISYNQFKQHILN | |
| | | LSKAKDRISKKKRDMLLEERDINKFEVQKEFINRNLVDTRYATRELSNLLK | |
| | | TYFSTHDYAVKVKTINGGFTNHLRKVWDFKKHRNHGYKHHAEDALVIAN | |
| | | ADFLFKTHKALRRTDKILEQPGLEVNDTTVKVDTEEKYQELFETPKQVKNI | |
| | | KQFRDFKYSHRVDKKPNRQLINDTLYSTREIDGETYVVQTLKDLYAKDNE | |
| | | KVKKLFTERPQKILMYQHDPKTFEKLMTILNQYAEAKNPLAAYYEDKGEY | |
| | | VTKYAKKGNGPAIHKIKYIDKKLGSYLDVSNKYPETQNKLVKLSLKSFRFD | |
| | | IYKCEQGYKMVSIGYLDVLKKDNYYYIPKDKYEAEKQKKKIKESDLFVGS | |
| | | FYYNDLIMYEDELFRVIGVNSDINNLVELNMVDITYKDFCEVNNVTGEKRI | |
| | | KKTIGKRVVLIEKYTTDILGNLYKTPLPKKPQLIFKRGEL | |
| SauriCas9- | Staphylococcus | MQENQQKQNYILGLDIGITSVGYGLIDSKTREVIDAGVRLFPEADSENNSNR | N588A |
| KKH | auricularis | RSKRGARRLKRRRIHRLNRVKDLLADYQMIDLNNVPKSTDPYTIRVKGLR | |
| | | EPLTKEEFAIALLHIAKRRGLHNISVSMGDEEQDNELSTKQQLQKNAQQLQ | |
| | | DKYVCELQLERLTNINKVRGEKNRFKTEDFVKEVKQLCETQRQYHNIDDQ | |
| | | FIQQYIDLVSTRREYFEGPGNGSPYGWDGDLLKWYEKLMGRCTYFPEELR | |
| | | SVKYAYSADLFNALNDLNNLVVTRDDNPKLEYYEKYHIIENVFKQKKNPT | |
| | | LKQIAKEIGVQDYDIRGYRITKSGKPQFTSFKLYHDLKNIFEQAKYLEDVE | |
| | | MLDEIAKILTIYQDEISIKKALDQLPELLTESEKSQIAQLTGYTGTHRLSLKCI | |
| | | HIVIDELWESPENQMEIFTRLNLKPKKVEMSEIDSIPTTLVDEFILSPVVKRA | |
| | | FIQSIKVINAVINRFGLPEDIIIELAREKNSKDRRKFINKLQKQNEATRKKIEQ | |
| | | LLAKYGNTNAKYMIEKIKLHDMQEGKCLYSLEAIPLEDLLSNPTHYEVDHI | |
| | | IPRSVSFDNSLNNKVLVKQSENSKKGNRTPYQYLSSNESKISYNQFKQHILN | |
| | | LSKAKDRISKKKRDMLLEERDINKFEVQKEFINRNLVDTRYATRELSNLLK | |
| | | TYFSTHDYAVKVKTINGGFTNHLRKVWDFKKHRNHGYKHHAEDALVIAN | |
| | | ADFLFKTHKALRRTDKILEQPGLEVNDTTVKVDTEEKYQELFETPKQVKNI | |
| | | KQFRDFKYSHRVDKKPNRKLINDTLYSTREIDGETYVVQTLKDLYAKDNE | |
| | | KVKKLFTERPQKILMYQHDPKTFEKLMTILNQYAEAKNPLAAYYEDKGEY | |
| | | VTKYAKKGNGPAIHKIKYIDKKLGSYLDVSNKYPETQNKLVKLSLKSFRFD | |
| | | IYKCEQGYKMVSIGYLDVLKKDNYYYIPKDKYEAEKQKKKIKESDLFVGS | |
| | | FYKNDLIMYEDELFRVIGVNSDINNLVELNMVDITYKDFCEVNNVTGEKHI | |
| | | KKTIGKRVVLIEKYTTDILGNLYKTPLPKKPQLIFKRGEL | |
| ScaCas9- | Streptococcus | MEKKYSIGLDIGTNSVGWAVITDDYKVPSKKFKVLGNTNRKSIKKNLMGA | N872A |
| Sc++ | canis | LLFDSGETAEATRLKRTARRRYTRRKNRIRYLQEIFANEMAKLDDSFFQRL | |
| | | EESFLVEEDKKNERHPIFGNLADEVAYHRNYPTIYHLRKKLADSPEKADLR | |
| | | LIYLALAHIIKFRGHFLIEGKLNAENSDVAKLFYQLIQTYNQLFEESPLDEIE | |
| | | VDAKGILSARLSKSKRLEKLIAVFPNEKKNGLFGNIIALALGLTPNFKSNFD | |
| | | LTEDAKLQLSKDTYDDDLDELLGQIGDQYADLFSAAKNLSDAILLSDILRS | |
| | | NSEVTKAPLSASMVKRYDEHHQDLALLKTLVRQQFPEKYAEIFKDDTKNG | |
| | | YAGYVGADKKLRKRSGKLATEEEFYKFIKPILEKMDGAEELLAKLNRDDL | |
| | | LRKQRTFDNGSIPHQIHLKELHAILRRQEEFYPFLKENREKIEKILTFRIPYYV | |
| | | GPLARGNSRFAWLTRKSEEAITPWNFEEVVDKGASAQSFIERMTNFDEQLP | |
| | | NKKVLPKHSLLYEYFTVYNELTKVKYVTERMRKPEFLSGEQKKAIVDLLF | |
| | | KTNRKVTVKQLKEDYFKKIECFDSVEIIGVEDRFNASLGTYHDLLKIIKDKD | |
| | | FLDNEENEDILEDIVLTLTLFEDREMIEERLKTYAHLFDDKVMKQLKRRHY | |
| | | TGWGRLSRKMINGIRDKQSGKTILDFLKSDGFSNRNFMQLIHDDSLTFKEEI | |
| | | EKAQVSGQGDSLHEQIADLAGSPAIKKGILQTVKIVDELVKVMGHKPENIV | |
| | | IEMARENQTTTKGLQQSRERKKRIEEGIKELESQILKENPVENTQLQNEKLY | |
| | | LYYLQNGRDMYVDQELDINRLSDYDVDHIVPQSFIKDDSIDNKVLTRSVEN | |
| | | RGKSDNVPSEEVVKKMKNYWRQLLNAKLITQRKFDNLTKAERGGLSEAD | |
| | | KAGFIKRQLVETRQITKHVARILDSRMNTKRDKNDKPIREVKVITLKSKLVS | |
| | | DFRKDFQLYKVRDINNYHHAHDAYLNAVVGTALIKKYPKLESEFVYGDY | |
| | | KVYDVRKMIAKSEQEIGKATAKRFFYSNIMNFFKTEVKLANGEIRKRPLIET | |
| | | NGETGEVVWNKEKDFATVRKVLAMPQVNIVKKTEVQTGGFSKESILSKRE | |
| | | SAKLIPRKKGWDTRKYGGFGSPTVAYSILVVAKVEKGKAKKLKSVKVLVG | |
| | | ITIMEKGSYEKDPIGFLEAKGYKDIKKELIFKLPKYSLFELENGRRRMLASA | |
| | | KELQKANELVLPQHLVRLLYYTQNISATTGSNNLGYIEQHREEFKEIFEKIID | |
| | | FSEKYILKNKVNSNLKSSFDEQFAVSDSILLSNSFVSLLKYTSFGASGGFTFL | |
| | | DLDVKQGRLRYQTVTEVLDATLIYQSITGLYETRTDLSQLGGD | |
| SpyCas9 | Streptococcus | MDKKYSIGLDIGTNSVGWAVITDEYKVPSKKFKVLGNTDRHSIKKNLIGAL | N863A |
| | pyogenes | LFDSGETAEATRLKRTARRRYTRRKNRICYLQEIFSNEMAKVDDSFFHRLE | |
| | | ESFLVEEDKKHERHPIFGNIVDEVAYHEKYPTIYHLRKKLVDSTDKADLRLI | |
| | | YLALAHMIKFRGHFLIEGDLNPDNSDVDKLFIQLVQTYNQLFEENPINASG | |
| | | VDAKAILSARLSKSRRLENLIAQLPGEKKNGLFGNLIALSLGLTPNFKSNFD | |
| | | LAEDAKLQLSKDTYDDDLDNLLAQIGDQYADLFLAAKNLSDAILLSDILRV | |
| | | NTEITKAPLSASMIKRYDEHHQDLTLLKALVRQQLPEKYKEIFFDQSKNGY | |
| | | AGYIDGGASQEEFYKFIKPILEKMDGTEELLVKLNREDLLRKQRTFDNGSIP | |
| | | HQIHLGELHAILRRQEDFYPFLKDNREKIEKILTFRIPYYVGPLARGNSRFA | |
| | | WMTRKSEETITPWNFEEVVDKGASAQSFIERMTNFDKNLPNEKVLPKHSLL | |
| | | YEYFTVYNELTKVKYVTEGMRKPAFLSGEQKKAIVDLLFKTNRKVTVKQL | |
| | | KEDYFKKIECFDSVEISGVEDRFNASLGTYHDLLKIIKDKDFLDNEENEDILE | |
| | | DIVLTLTLFEDREMIEERLKTYAHLFDDKVMKQLKRRRYTGWGRLSRKLI | |
| | | NGIRDKQSGKTILDFLKSDGFANRNFMQLIHDDSLTFKEDIQKAQVSGQGD | |
| | | SLHEHIANLAGSPAIKKGILQTVKVVDELVKVMGRHKPENIVIEMARENQT | |
| | | TQKGQKNSRERMKRIEEGIKELGSQILKEHPVENTQLQNEKLYLYYLQNGR | |
| | | DMYVDQELDINRLSDYDVDHIVPQSFLKDDSIDNKVLTRSDKNRGKSDNV | |
| | | PSEEVVKKMKNYWRQLLNAKLITQRKFDNLTKAERGGLSELDKAGFIKRQ | |
| | | LVETRQITKHVAQILDSRMNTKYDENDKLIREVKVITLKSKLVSDFRKDFQ | |
| | | FYKVREINNYHHAHDAYLNAVVGTALIKKYPKLESEFVYGDYKVYDVRK | |
| | | MIAKSEQEIGKATAKYFFYSNIMNFFKTEITLANGEIRKRPLIETNGETGEIV | |
| | | WDKGRDFATVRKVLSMPQVNIVKKTEVQTGGFSKESILPKRNSDKLIARK | |
| | | KDWDPKKYGGFDSPTVAYSVLVVAKVEKGKSKKLKSVKELLGITIMERSS | |
| | | FEKNPIDFLEAKGYKEVKKDLIIKLPKYSLFELENGRKRMLASAGELQKGN | |
| | | ELALPSKYVNFLYLASHYEKLKGSPEDNEQKQLFVEQHKHYLDEIIEQISEF | |
| | | SKRVILADANLDKVLSAYNKHRDKPIREQAENIIHLFTLTNLGAPAAFKYF | |
| | | DTTIDRKRYTSTKEVLDATLIHQSITGLYETRIDLSQLGGD | |
| SpyCas9- | Streptococcus | MDKKYSIGLDIGTNSVGWAVITDEYKVPSKKFKVLGNTDRHSIKKNLIGAL | N863A |
| NG | pyogenes | LFDSGETAEATRLKRTARRRYTRRKNRICYLQEIFSNEMAKVDDSFFHRLE | |
| | | ESFLVEEDKKHERHPIFGNIVDEVAYHEKYPTIYHLRKKLVDSTDKADLRLI | |
| | | YLALAHMIKFRGHFLIEGDLNPDNSDVDKLFIQLVQTYNQLFEENPINASG | |
| | | VDAKAILSARLSKSRRLENLIAQLPGEKKNGLFGNLIALSLGLTPNFKSNFD | |
| | | LAEDAKLQLSKDTYDDDLDNLLAQIGDQYADLFLAAKNLSDAILLSDILRV | |
| | | NTEITKAPLSASMIKRYDEHHQDLTLLKALVRQQLPEKYKEIFFDQSKNGY | |
| | | AGYIDGGASQEEFYKFIKPILEKMDGTEELLVKLNREDLLRKQRTFDNGSIP | |
| | | HQIHLGELHAILRRQEDFYPFLKDNREKIEKILTFRIPYYVGPLARGNSRFA | |
| | | WMTRKSEETITPWNFEEVVDKGASAQSFIERMTNFDKNLPNEKVLPKHSLL | |
| | | YEYFTVYNELTKVKYVTEGMRKPAFLSGEQKKAIVDLLFKTNRKVTVKQL | |
| | | KEDYFKKIECFDSVEISGVEDRFNASLGTYHDLLKIIKDKDFLDNEENEDILE | |
| | | DIVLTLTLFEDREMIEERLKTYAHLFDDKVMKQLKRRRYTGWGRLSRKLI | |
| | | NGIRDKQSGKTILDFLKSDGFANRNFMQLIHDDSLTFKEDIQKAQVSGQGD | |
| | | SLHEHIANLAGSPAIKKGILQTVKVVDELVKVMGRHKPENIVIEMARENQT | |
| | | TQKGQKNSRERMKRIEEGIKELGSQILKEHPVENTQLQNEKLYLYYLQNGR | |
| | | DMYVDQELDINRLSDYDVDHIVPQSFLKDDSIDNKVLTRSDKNRGKSDNV | |
| | | PSEEVVKKMKNYWRQLLNAKLITQRKFDNLTKAERGGLSELDKAGFIKRQ | |
| | | LVETRQITKHVAQILDSRMNTKYDENDKLIREVKVITLKSKLVSDFRKDFQ | |
| | | FYKVREINNYHHAHDAYLNAVVGTALIKKYPKLESEFVYGDYKVYDVRK | |
| | | MIAKSEQEIGKATAKYFFYSNIMNFFKTEITLANGEIRKRPLIETNGETGEIV | |
| | | WDKGRDFATVRKVLSMPQVNIVKKTEVQTGGFSKESIRPKRNSDKLIARK | |
| | | KDWDPKKYGGFVSPTVAYSVLVVAKVEKGKSKKLKSVKELLGITIMERSS | |
| | | FEKNPIDFLEAKGYKEVKKDLIIKLPKYSLFELENGRKRMLASARFLQKGN | |
| | | ELALPSKYVNFLYLASHYEKLKGSPEDNEQKQLFVEQHKHYLDEIIEQISEF | |
| | | SKRVILADANLDKVLSAYNKHRDKPIREQAENIIHLFTLTNLGAPRAFKYFD | |
| | | TTIDRKVYRSTKEVLDATLIHQSITGLYETRIDLSQLGGD | |
| SpyCas9- | Streptococcus | MDKKYSIGLDIGTNSVGWAVITDEYKVPSKKFKVLGNTDRHSIKKNLIGAL | N863A |
| SpRY | pyogenes | LFDSGETAERTRLKRTARRRYTRRKNRICYLQEIFSNEMAKVDDSFFHRLE | |
| | | ESFLVEEDKKHERHPIFGNIVDEVAYHEKYPTIYHLRKKLVDSTDKADLRLI | |
| | | YLALAHMIKFRGHFLIEGDLNPDNSDVDKLFIQLVQTYNQLFEENPINASG | |
| | | VDAKAILSARLSKSRRLENLIAQLPGEKKNGLFGNLIALSLGLTPNFKSNFD | |
| | | LAEDAKLQLSKDTYDDDLDNLLAQIGDQYADLFLAAKNLSDAILLSDILRV | |
| | | NTEITKAPLSASMIKRYDEHHQDLTLLKALVRQQLPEKYKEIFFDQSKNGY | |
| | | AGYIDGGASQEEFYKFIKPILEKMDGTEELLVKLNREDLLRKQRTFDNGSIP | |
| | | HQIHLGELHAILRRQEDFYPFLKDNREKIEKILTFRIPYYVGPLARGNSRFA | |
| | | WMTRKSEETITPWNFEEVVDKGASAQSFIERMTNFDKNLPNEKVLPKHSLL | |
| | | YEYFTVYNELTKVKYVTEGMRKPAFLSGEQKKAIVDLLFKTNRKVTVKQL | |
| | | KEDYFKKIECFDSVEISGVEDRFNASLGTYHDLLKIIKDKDFLDNEENEDILE | |
| | | DIVLTLTLFEDREMIEERLKTYAHLFDDKVMKQLKRRRYTGWGRLSRKLI | |
| | | NGIRDKQSGKTILDFLKSDGFANRNFMQLIHDDSLTFKEDIQKAQVSGQGD | |
| | | SLHEHIANLAGSPAIKKGILQTVKVVDELVKVMGRHKPENIVIEMARENQT | |
| | | TQKGQKNSRERMKRIEEGIKELGSQILKEHPVENTQLQNEKLYLYYLQNGR | |
| | | DMYVDQELDINRLSDYDVDHIVPQSFLKDDSIDNKVLTRSDKNRGKSDNV | |
| | | PSEEVVKKMKNYWRQLLNAKLITQRKFDNLTKAERGGLSELDKAGFIKRQ | |
| | | LVETRQITKHVAQILDSRMNTKYDENDKLIREVKVITLKSKLVSDFRKDFQ | |
| | | FYKVREINNYHHAHDAYLNAVVGTALIKKYPKLESEFVYGDYKVYDVRK | |
| | | MIAKSEQEIGKATAKYFFYSNIMNFFKTEITLANGEIRKRPLIETNGETGEIV | |
| | | WDKGRDFATVRKVLSMPQVNIVKKTEVQTGGFSKESIRPKRNSDKLIARK | |
| | | KDWDPKKYGGFLWPTVAYSVLVVAKVEKGKSKKLKSVKELLGITIMERSS | |
| | | FEKNPIDFLEAKGYKEVKKDLIIKLPKYSLFELENGRKRMLASAKQLQKGN | |
| | | ELALPSKYVNFLYLASHYEKLKGSPEDNEQKQLFVEQHKHYLDEIIEQISEF | |
| | | SKRVILADANLDKVLSAYNKHRDKPIREQAENIIHLFTLTRLGAPRAFKYFD | |
| | | TTIDPKQYRSTKEVLDATLIHQSITGLYETRIDLSQLGGD | |
| St1Cas9 | Streptococcus | MSDLVLGLDIGIGSVGVGILNKVTGEIIHKNSRIFPAAQAENNLVRRTNRQG | N622A |
| | thermophilus | RRLARRKKHRRVRLNRLFEESGLITDFTKISINLNPYQLRVKGLTDELSNEE | |
| | | LFIALKNMVKHRGISYLDDASDDGNSSVGDYAQIVKENSKQLETKTPGQIQ | |
| | | LERYQTYGQLRGDFTVEKDGKKHRLINVFPTSAYRSEALRILQTQQEFNPQI | |
| | | TDEFINRYLEILTGKRKYYHGPGNEKSRTDYGRYRTSGETLDNIFGILIGKC | |
| | | TFYPDEFRAAKASYTAQEFNLLNDLNNLTVPTETKKLSKEQKNQIINYVKN | |
| | | EKAMGPAKLFKYIAKLLSCDVADIKGYRIDKSGKAEIHTFEAYRKMKTLET | |
| | | LDIEQMDRETLDKLAYVLTLNTEREGIQEALEHEFADGSFSQKQVDELVQF | |
| | | RKANSSIFGKGWHNFSVKLMMELIPELYETSEEQMTILTRLGKQKTTSSSN | |
| | | KTKYIDEKLLTEEIYNPVVAKSVRQAIKIVNAAIKEYGDFDNIVIEMARETN | |
| | | EDDEKKAIQKIQKANKDEKDAAMLKAANQYNGKAELPHSVFHGHKQLAT | |
| | | KIRLWHQQGERCLYTGKTISIHDLINNSNQFEVDHILPLSITFDDSLANKVLV | |
| | | YATANQEKGQRTPYQALDSMDDAWSFRELKAFVRESKTLSNKKKEYLLT | |
| | | EEDISKFDVRKKFIERNLVDTRYASRVVLNALQEHFRAHKIDTKVSVVRGQ | |
| | | FTSQLRRHWGIEKTRDTYHHHAVDALIIAASSQLNLWKKQKNTLVSYSED | |
| | | QLLDIETGELISDDEYKESVFKAPYQHFVDTLKSKEFEDSILFSYQVDSKFN | |
| | | RKISDATIYATRQAKVGKDKADETYVLGKIKDIYTQDGYDAFMKIYKKDK | |
| | | SKFLMYRHDPQTFEKVIEPILENYPNKQINEKGKEVPCNPFLKYKEEHGYIR | |
| | | KYSKKGNGPEIKSLKYYDSKLGNHIDITPKDSNNKVVLQSVSPWRADVYF | |
| | | NKTTGKYEILGLKYADLQFEKGTGTYKISQEKYNDIKKKEGVDSDSEFKFT | |
| | | LYKNDLLLVKDTETKEQQLFRFLSRTMPKQKHYVELKPYDKQKFEGGEAL | |
| | | IKVLGNVANSGQCKKGLGKSNISIYKVRTDVLGNQHIIKNEGDKPKLDF | |
| BlatCas9 | Brevibacillus | MAYTMGIDVGIASCGWAIVDLERQRIIDIGVRTFEKAENPKNGEALAVPRR | N607A |
| | laterosporus | EARSSRRRLRRKKHRIERLKHMFVRNGLAVDIQHLEQTLRSQNEIDVWQL | |
| | | RVDGLDRMLTQKEWLRVLIHLAQRRGFQSNRKTDGSSEDGQVLVNVTEN | |
| | | DRLMEEKDYRTVAEMMVKDEKFSDHKRNKNGNYHGVVSRSSLLVEIHTL | |
| | | FETQRQHHNSLASKDFELEYVNIWSAQRPVATKDQIEKMIGTCTFLPKEKR | |
| | | APKASWHFQYFMLLQTINHIRITNVQGTRSLNKEEIEQVVNMALTKSKVSY | |
| | | HDTRKILDLSEEYQFVGLDYGKEDEKKKVESKETIIKLDDYHKLNKIFNEV | |
| | | ELAKGETWEADDYDTVAYALTFFKDDEDIRDYLQNKYKDSKNRLVKNLA | |
| | | NKEYTNELIGKVSTLSFRKVGHLSLKALRKIIPFLEQGMTYDKACQAAGFD | |
| | | FQGISKKKRSVVLPVIDQISNPVVNRALTQTRKVINALIKKYGSPETIHIETA | |
| | | RELSKTFDERKNITKDYKENRDKNEHAKKHLSELGIINPTGLDIVKYKLWC | |
| | | EQQGRCMYSNQPISFERLKESGYTEVDHIIPYSRSMNDSYNNRVLVMTREN | |
| | | REKGNQTPFEYMGNDTQRWYEFEQRVTTNPQIKKEKRQNLLLKGFTNRRE | |
| | | LEMLERNLNDTRYITKYLSHFISTNLEFSPSDKKKKVVNTSGRITSHLRSRW | |
| | | GLEKNRGQNDLHHAMDAIVIAVTSDSFIQQVTNYYKRKERRELNGDDKFP | |
| | | LPWKFFREEVIARLSPNPKEQIEALPNHFYSEDELADLQPIFVSRMPKRSITG | |
| | | EAHQAQFRRVVGKTKEGKNITAKKTALVDISYDKNGDFNMYGRETDPAT | |
| | | YEAIKERYLEFGGNVKKAFSTDLHKPKKDGTKGPLIKSVRIMENKTLVHPV | |
| | | NKGKGVVYNSSIVRTDVFQRKEKYYLLPVYVTDVTKGKLPNKVIVAKKG | |
| | | YHDWIEVDDSFTFLFSLYPNDLIFIRQNPKKKISLKKRIESHSISDSKEVQEIH | |
| | | AYYKGVDSSTAAIEFIIHDGSYYAKGVGVQNLDCFEKYQVDILGNYFKVK | |
| | | GEKRLELETSDSNHKGKDVNSIKSTSR | |
| cCas9-v16 | Staphylococcus | MKRNYILGLDIGITSVGYGIIDYETRDVIDAGVRLFKEANVENNEGRRSKR | N580A |
| | aureus | GARRLKRRRRHRIQRVKKLLFDYNLLTDHSELSGINPYEARVKGLSQKLSE | |
| | | EEFSAALLHLAKRRGVHNVNEVEEDTGNELSTKEQISRNSKALEEKYVAEL | |
| | | QLERLKKDGEVRGSINRFKTSDYVKEAKQLLKVQKAYHQLDQSFIDTYIDL | |
| | | LETRRTYYEGPGEGSPFGWKDIKEWYEMLMGHCTYFPEELRSVKYAYNA | |
| | | DLYNALNDLNNLVITRDENEKLEYYEKFQIIENVFKQKKKPTLKQIAKEILV | |
| | | NEEDIKGYRVTSTGKPEFTNLKVYHDIKDITARKEIIENAELLDQIAKILTIY | |
| | | QSSEDIQEELTNLNSELTQEEIEQISNLKGYTGTHNLSLKAINLILDELWHTN | |
| | | DNQIAIFNRLKLVPKKVDLSQQKEIPTTLVDDFILSPVVKRSFIQSIKVINAII | |
| | | KKYGLPNDIIIELAREKNSKDAQKMINEMQKRNRQTNERIEEIIRTTGKENA | |
| | | KYLIEKIKLHDMQEGKCLYSLEAIPLEDLLNNPFNYEVDHIIPRSVSFDNSFN | |
| | | NKVLVKQEENSKKGNRTPFQYLSSSDSKISYETFKKHILNLAKGKGRISKTK | |
| | | KEYLLEERDINRFSVQKDFINRNLVDTRYATRGLMNLLRSYFRVNNLDVK | |
| | | VKSINGGFTSFLRRKWKFKKERNKGYKHHAEDALIIANADFIFKEWKKLD | |
| | | KAKKVMENQMFEEKQAESMPEIETEQEYKEIFITPHQIKHIKDFKDYKYSH | |
| | | RVDKKPNRKLINDTLYSTRKDDKGNTLIVNNLNGLYDKDNDKLKKLINKS | |
| | | PEKLLMYHHDPQTYQKLKLIMEQYGDEKNPLYKYYEETGNYLTKYSKKD | |
| | | NGPVIKKIKYYGNKLNAHLDITDDYPNSRNKVVKLSLKPYRFDVYLDNGV | |
| | | YKFVTVKNLDVIKKENYYEVNSKCYEEAKKLKKISNQAEFIASFYKNDLIK | |
| | | INGELYRVIGVNSDKNNLIEVNMIDITYREYLENMNDKRPPHIIKTIASKTQS | |
| | | IKKYSTDILGNLYEVKSKKHPQIIKKG | |
| cCas9-v17 | Staphylococcus | MKRNYILGLDIGITSVGYGIIDYETRDVIDAGVRLFKEANVENNEGRRSKR | N580A |
| | aureus | GARRLKRRRRHRIQRVKKLLFDYNLLTDHSELSGINPYEARVKGLSQKLSE | |
| | | EEFSAALLHLAKRRGVHNVNEVEEDTGNELSTKEQISRNSKALEEKYVAEL | |
| | | QLERLKKDGEVRGSINRFKTSDYVKEAKQLLKVQKAYHQLDQSFIDTYIDL | |
| | | LETRRTYYEGPGEGSPFGWKDIKEWYEMLMGHCTYFPEELRSVKYAYNA | |
| | | DLYNALNDLNNLVITRDENEKLEYYEKFQIIENVFKQKKKPTLKQIAKEILV | |
| | | NEEDIKGYRVTSTGKPEFTNLKVYHDIKDITARKEIIENAELLDQIAKILTIY | |
| | | QSSEDIQEELTNLNSELTQEEIEQISNLKGYTGTHNLSLKAINLILDELWHTN | |
| | | DNQIAIFNRLKLVPKKVDLSQQKEIPTTLVDDFILSPVVKRSFIQSIKVINAII | |
| | | KKYGLPNDIIIELAREKNSKDAQKMINEMQKRNRQTNERIEEIIRTTGKENA | |
| | | KYLIEKIKLHDMQEGKCLYSLEAIPLEDLLNNPFNYEVDHIIPRSVSFDNSFN | |
| | | NKVLVKQEENSKKGNRTPFQYLSSSDSKISYETFKKHILNLAKGKGRISKTK | |
| | | KEYLLEERDINRFSVQKDFINRNLVDTRYATRGLMNLLRSYFRVNNLDVK | |
| | | VKSINGGFTSFLRRKWKFKKERNKGYKHHAEDALIIANADFIFKEWKKLD | |
| | | KAKKVMENQMFEEKQAESMPEIETEQEYKEIFITPHQIKHIKDFKDYKYSH | |
| | | RVDKKPNRKLINDTLYSTRKDDKGNTLIVNNLNGLYDKDNDKLKKLINKS | |
| | | PEKLLMYHHDPQTYQKLKLIMEQYGDEKNPLYKYYEETGNYLTKYSKKD | |
| | | NGPVIKKIKYYGNKLNAHLDITDDYPNSRNKVVKLSLKPYRFDVYLDNGV | |
| | | YKFVTVKNLDVIKKENYYEVNSKCYEEAKKLKKISNQAEFIASFYKNDLIK | |
| | | INGELYRVIGVNNSTRNIVELNMIDITYREYLENMNDKRPPHIIKTIASKTQS | |
| | | IKKYSTDILGNLYEVKSKKHPQIIKKG | |
| cCas9-v21 | Staphylococcus | MKRNYILGLDIGITSVGYGIIDYETRDVIDAGVRLFKEANVENNEGRRSKR | N580A |
| | aureus | GARRLKRRRRHRIQRVKKLLFDYNLLTDHSELSGINPYEARVKGLSQKLSE | |
| | | EEFSAALLHLAKRRGVHNVNEVEEDTGNELSTKEQISRNSKALEEKYVAEL | |
| | | QLERLKKDGEVRGSINRFKTSDYVKEAKQLLKVQKAYHQLDQSFIDTYIDL | |
| | | LETRRTYYEGPGEGSPFGWKDIKEWYEMLMGHCTYFPEELRSVKYAYNA | |
| | | DLYNALNDLNNLVITRDENEKLEYYEKFQIIENVFKQKKKPTLKQIAKEILV | |
| | | NEEDIKGYRVTSTGKPEFTNLKVYHDIKDITARKEIIENAELLDQIAKILTIY | |
| | | QSSEDIQEELTNLNSELTQEEIEQISNLKGYTGTHNLSLKAINLILDELWHTN | |
| | | DNQIAIFNRLKLVPKKVDLSQQKEIPTTLVDDFILSPVVKRSFIQSIKVINAII | |
| | | KKYGLPNDIIIELAREKNSKDAQKMINEMQKRNRQTNERIEEIIRTTGKENA | |
| | | KYLIEKIKLHDMQEGKCLYSLEAIPLEDLLNNPFNYEVDHIIPRSVSFDNSFN | |
| | | NKVLVKQEENSKKGNRTPFQYLSSSDSKISYETFKKHILNLAKGKGRISKTK | |
| | | KEYLLEERDINRFSVQKDFINRNLVDTRYATRGLMNLLRSYFRVNNLDVK | |
| | | VKSINGGFTSFLRRKWKFKKERNKGYKHHAEDALIIANADFIFKEWKKLD | |
| | | KAKKVMENQMFEEKQAESMPEIETEQEYKEIFITPHQIKHIKDFKDYKYSH | |
| | | RVDKKPNRKLINDTLYSTRKDDKGNTLIVNNLNGLYDKDNDKLKKLINKS | |
| | | PEKLLMYHHDPQTYQKLKLIMEQYGDEKNPLYKYYEETGNYLTKYSKKD | |
| | | NGPVIKKIKYYGNKLNAHLDITDDYPNSRNKVVKLSLKPYRFDVYLDNGV | |
| | | YKFVTVKNLDVIKKENYYEVNSKCYEEAKKLKKISNQAEFIASFYKNDLIK | |
| | | INGELYRVIGVNSDDRNIIELNMIDITYREYLENMNDKRPPHIIKTIASKTQSI | |
| | | KKYSTDILGNLYEVKSKKHPQIIKKG | |
| cCas9-v42 | Staphylococcus | MKRNYILGLDIGITSVGYGIIDYETRDVIDAGVRLFKEANVENNEGRRSKR | N580A |
| | aureus | GARRLKRRRRHRIQRVKKLLFDYNLLTDHSELSGINPYEARVKGLSQKLSE | |
| | | EEFSAALLHLAKRRGVHNVNEVEEDTGNELSTKEQISRNSKALEEKYVAEL | |
| | | QLERLKKDGEVRGSINRFKTSDYVKEAKQLLKVQKAYHQLDQSFIDTYIDL | |
| | | LETRRTYYEGPGEGSPFGWKDIKEWYEMLMGHCTYFPEELRSVKYAYNA | |
| | | DLYNALNDLNNLVITRDENEKLEYYEKFQIIENVFKQKKKPTLKQIAKEILV | |
| | | NEEDIKGYRVTSTGKPEFTNLKVYHDIKDITARKEIIENAELLDQIAKILTIY | |
| | | QSSEDIQEELTNLNSELTQEEIEQISNLKGYTGTHNLSLKAINLILDELWHTN | |
| | | DNQIAIFNRLKLVPKKVDLSQQKEIPTTLVDDFILSPVVKRSFIQSIKVINAII | |
| | | KKYGLPNDIIIELAREKNSKDAQKMINEMQKRNRQTNERIEEIIRTTGKENA | |
| | | KYLIEKIKLHDMQEGKCLYSLEAIPLEDLLNNPFNYEVDHIIPRSVSFDNSFN | |
| | | NKVLVKQEENSKKGNRTPFQYLSSSDSKISYETFKKHILNLAKGKGRISKTK | |
| | | KEYLLEERDINRFSVQKDFINRNLVDTRYATRGLMNLLRSYFRVNNLDVK | |
| | | VKSINGGFTSFLRRKWKFKKERNKGYKHHAEDALIIANADFIFKEWKKLD | |
| | | KAKKVMENQMFEEKQAESMPEIETEQEYKEIFITPHQIKHIKDFKDYKYSH | |
| | | RVDKKPNRKLINDTLYSTRKDDKGNTLIVNNLNGLYDKDNDKLKKLINKS | |
| | | PEKLLMYHHDPQTYQKLKLIMEQYGDEKNPLYKYYEETGNYLTKYSKKD | |
| | | NGPVIKKIKYYGNKLNAHLDITDDYPNSRNKVVKLSLKPYRFDVYLDNGV | |
| | | YKFVTVKNLDVIKKENYYEVNSKCYEEAKKLKKISNQAEFIASFYKNDLIK | |
| | | INGELYRVIGVNNNRLNKIELNMIDITYREYLENMNDKRPPHIIKTIASKTQS | |
| | | IKKYSTDILGNLYEVKSKKHPQIIKKG | |
| CdiCas9 | Corynebacterium | MKYHVGIDVGTFSVGLAAIEVDDAGMPIKTLSLVSHIHDSGLDPDEIKSAV | H573A |
| | diphtheriae | TRLASSGIARRTRRLYRRKRRRLQQLDKFIQRQGWPVIELEDYSDPLYPWK | (Alter- |
| | | VRAELAASYIADEKERGEKLSVALRHIARHRGWRNPYAKVSSLYLPDGPS | nate) |
| | | DAFKAIREEIKRASGQPVPETATVGQMVTLCELGTLKLRGEGGVLSARLQQ | |
| | | SDYAREIQEICRMQEIGQELYRKIIDVVFAAESPKGSASSRVGKDPLQPGKN | |
| | | RALKASDAFQRYRIAALIGNLRVRVDGEKRILSVEEKNLVFDHLVNLTPKK | |
| | | EPEWVTIAEILGIDRGQLIGTATMTDDGERAGARPPTHDTNRSIVNSRIAPL | |
| | | VDWWKTASALEQHAMVKALSNAEVDDFDSPEGAKVQAFFADLDDDVHA | |
| | | KLDSLHLPVGRAAYSEDTLVRLTRRMLSDGVDLYTARLQEFGIEPSWTPPT | |
| | | PRIGEPVGNPAVDRVLKTVSRWLESATKTWGAPERVIIEHVREGFVTEKRA | |
| | | REMDGDMRRRAARNAKLFQEMQEKLNVQGKPSRADLWRYQSVQRQNC | |
| | | QCAYCGSPITFSNSEMDHIVPRAGQGSTNTRENLVAVCHRCNQSKGNTPFA | |
| | | IWAKNTSIEGVSVKEAVERTRHWVTDTGMRSTDFKKFTKAVVERFQRAT | |
| | | MDEEIDARSMESVAWMANELRSRVAQHFASHGTTVRVYRGSLTAEARRA | |
| | | SGISGKLKFFDGVGKSRLDRRHHAIDAAVIAFTSDYVAETLAVRSNLKQSQ | |
| | | AHRQEAPQWREFTGKDAEHRAAWRVWCQKMEKLSALLTEDLRDDRVVV | |
| | | MSNVRLRLGNGSAHKETIGKLSKVKLSSQLSVSDIDKASSEALWCALTREP | |
| | | GFDPKEGLPANPERHIRVNGTHVYAGDNIGLFPVSAGSIALRGGYAELGSSF | |
| | | HHARVYKITSGKKPAFAMLRVYTIDLLPYRNQDLFSVELKPQTMSMRQAE | |
| | | KKLRDALATGNAEYLGWLVVDDELVVDTSKIATDQVKAVEAELGTIRRW | |
| | | RVDGFFSPSKLRLRPLQMSKEGIKKESAPELSKIIDRPGWLPAVNKLFSDGN | |
| | | VTVVRRDSLGRVRLESTAHLPVTWKVQ | |
| CjeCas9 | Campylobacter | MARILAFDIGISSIGWAFSENDELKDCGVRIFTKVENPKTGESLALPRRLARS | N582A |
| | jejuni | ARKRLARRKARLNHLKHLIANEFKLNYEDYQSFDESLAKAYKGSLISPYEL | |
| | | RFRALNELLSKQDFARVILHIAKRRGYDDIKNSDDKEKGAILKAIKQNEEK | |
| | | LANYQSVGEYLYKEYFQKFKENSKEFTNVRNKKESYERCIAQSFLKDELKL | |
| | | IFKKQREFGFSFSKKFEEEVLSVAFYKRALKDFSHLVGNCSFFTDEKRAPKN | |
| | | SPLAFMFVALTRIINLLNNLKNTEGILYTKDDLNALLNEVLKNGTLTYKQT | |
| | | KKLLGLSDDYEFKGEKGTYFIEFKKYKEFIKALGEHNLSQDDLNEIAKDITL | |
| | | IKDEIKLKKALAKYDLNQNQIDSLSKLEFKDHLNISFKALKLVTPLMLEGK | |
| | | KYDEACNELNLKVAINEDKKDFLPAFNETYYKDEVTNPVVLRAIKEYRKV | |
| | | LNALLKKYGKVHKINIELAREVGKNHSQRAKIEKEQNENYKAKKDAELEC | |
| | | EKLGLKINSKNILKLRLFKEQKEFCAYSGEKIKISDLQDEKMLEIDHIYPYSR | |
| | | SFDDSYMNKVLVFTKQNQEKLNQTPFEAFGNDSAKWQKIEVLAKNLPTKK | |
| | | QKRILDKNYKDKEQKNFKDRNLNDTRYIARLVLNYTKDYLDFLPLSDDEN | |
| | | TKLNDTQKGSKVHVEAKSGMLTSALRHTWGFSAKDRNNHLHHAIDAVIIA | |
| | | YANNSIVKAFSDFKKEQESNSAELYAKKISELDYKNKRKFFEPFSGFRQKV | |
| | | LDKIDEIFVSKPERKKPSGALHEETFRKEEEFYQSYGGKEGVLKALELGKIR | |
| | | KVNGKIVKNGDMFRVDIFKHKKTNKFYAVPIYTMDFALKVLPNKAVARS | |
| | | KKGEIKDWILMDENYEFCFSLYKDSLILIQTKDMQEPEFVYYNAFTSSTVSL | |
| | | IVSKHDNKFETLSKNQKILFKNANEKEVIAKSIGIQNLKVFEKYIVSALGEV | |
| | | TKAEFRQREDFKK | |
| GeoCas9 | Geobacillus | MRYKIGLDIGITSVGWAVMNLDIPRIEDLGVRIFDRAENPQTGESLALPRRL | N605A |
| | stearothermo- | ARSARRRLRRRKHRLERIRRLVIREGILTKEELDKLFEEKHEIDVWQLRVEA | |
| | philus | LDRKLNNDELARVLLHLAKRRGFKSNRKSERSNKENSTMLKHIEENRAILS | |
| | | SYRTVGEMIVKDPKFALHKRNKGENYTNTIARDDLEREIRLIFSKQREFGN | |
| | | MSCTEEFENEYITIWASQRPVASKDDIEKKVGFCTFEPKEKRAPKATYTFQS | |
| | | FIAWEHINKLRLISPSGARGLTDEERRLLYEQAFQKNKITYHDIRTLLHLPD | |
| | | DTYFKGIVYDRGESRKQNENIRFLELDAYHQIRKAVDKVYGKGKSSSFLPI | |
| | | DFDTFGYALTLFKDDADIHSYLRNEYEQNGKRMPNLANKVYDNELIEELL | |
| | | NLSFTKFGHLSLKALRSILPYMEQGEVYSSACERAGYTFTGPKKKQKTMLL | |
| | | PNIPPIANPVVMRALTQARKVVNAIIKKYGSPVSIHIELARDLSQTFDERRKT | |
| | | KKEQDENRKKNETAIRQLMEYGLTLNPTGHDIVKFKLWSEQNGRCAYSLQ | |
| | | PIEIERLLEPGYVEVDHVIPYSRSLDDSYTNKVLVLTRENREKGNRIPAEYL | |
| | | GVGTERWQQFETFVLTNKQFSKKKRDRLLRLHYDENEETEFKNRNLNDTR | |
| | | YISRFFANFIREHLKFAESDDKQKVYTVNGRVTAHLRSRWEFNKNREESDL | |
| | | HHAVDAVIVACTTPSDIAKVTAFYQRREQNKELAKKTEPHFPQPWPHFAD | |
| | | ELRARLSKHPKESIKALNLGNYDDQKLESLQPVFVSRMPKRSVTGAAHQE | |
| | | TLRRYVGIDERSGKIQTVVKTKLSEIKLDASGHFPMYGKESDPRTYEAIRQR | |
| | | LLEHNNDPKKAFQEPLYKPKKNGEPGPVIRTVKIIDTKNQVIPLNDGKTVA | |
| | | YNSNIVRVDVFEKDGKYYCVPVYTMDIMKGILPNKAIEPNKPYSEWKEMT | |
| | | EDYTFRFSLYPNDLIRIELPREKTVKTAAGEEINVKDVFVYYKTIDSANGGL | |
| | | ELISHDHRFSLRGVGSRTLKRFEKYQVDVLGNIYKVRGEKRVGLASSAHSK | |
| | | PGKTIRPLQSTRD | |
| iSpyMacCas9 | Streptococcus | MDKKYSIGLDIGTNSVGWAVITDEYKVPSKKFKVLGNTDRHSIKKNLIGAL | N863A |
| | spp. | LFDSGETAEATRLKRTARRRYTRRKNRICYLQEIFSNEMAKVDDSFFHRLE | |
| | | ESFLVEEDKKHERHPIFGNIVDEVAYHEKYPTIYHLRKKLVDSTDKADLRLI | |
| | | YLALAHMIKFRGHFLIEGDLNPDNSDVDKLFIQLVQTYNQLFEENPINASG | |
| | | VDAKAILSARLSKSRKLENLIAQLPGEKKNGLFGNLIALSLGLTPNFKSNFD | |
| | | LAEDAKLQLSKDTYDDDLDNLLAQIGDQYADLFLAAKNLSDAILLSDILRV | |
| | | NTEITKAPLSASMIKRYDEHHQDLTLLKALVRQQLPEKYKEIFFDQSKNGY | |
| | | AGYIDGGASQEEFYKFIKPILEKMDGTEELLVKLKREDLLRKQRTFDNGSIP | |
| | | HQIHLGELHAILRRQEDFYPFLKDNREKIEKILTFRIPYYVGPLARGNSRFA | |
| | | WMTRKSEETITPWNFEEVVDKGASAQSFIERMTNFDKNLPNEKVLPKHSLL | |
| | | YEYFTVYNELTKVKYVTEGMRKPAFLSGEQKKAIVDLLFKTNRKVTVKQL | |
| | | KEDYFKKIECFDSVEISGVEDRFNASLGTYHDLLKIIKDKDFLDNEENEDILE | |
| | | DIVLTLTLFEDREMIEERLKTYAHLFDDKVMKQLKRRRYTGWGRLSRKLI | |
| | | NGIRDKQSGKTILDFLKSDGFANRNFMQLIHDDSLTFKEDIQKAQVSGQGD | |
| | | SLHEHIANLAGSPAIKKGILQTVKVVDELVKVMGRHKPENIVIEMARENQT | |
| | | TQKGQKNSRERMKRIEEGIKELGSQILKEHPVENTQLQNEKLYLYYLQNGR | |
| | | DMYVDQELDINRLSDYDVDHIVPQSFLKDDSIDNKVLTRSDKNRGKSDNV | |
| | | PSEEVVKKMKNYWRQLLNAKLITQRKFDNLTKAERGGLSELDKAGFIKRQ | |
| | | LVETRQITKHVAQILDSRMNTKYDENDKLIREVKVITLKSKLVSDFRKDFQ | |
| | | FYKVREINNYHHAHDAYLNAVVGTALIKKYPKLESEFVYGDYKVYDVRK | |
| | | MIAKSEQEIGKATAKYFFYSNIMNFFKTEITLANGEIRKRPLIETNGETGEIV | |
| | | WDKGRDFATVRKVLSMPQVNIVKKTEIQTVGQNGGLFDDNPKSPLEVTPS | |
| | | KLVPLKKELNPKKYGGYQKPTTAYPVLLITDTKQLIPISVMNKKQFEQNPV | |
| | | KFLRDRGYQQVGKNDFIKLPKYTLVDIGDGIKRLWASSKEIHKGNQLVVS | |
| | | KKSQILLYHAHHLDSDLSNDYLQNHNQQFDVLFNEIISFSKKCKLGKEHIQ | |
| | | KIENVYSNKKNSASIEELAESFIKLLGFTQLGATSPFNFLGVKLNQKQYKGK | |
| | | KDYILPCTEGTLIRQSITGLYETRVDLSKIGEDSGGSGGSKRTADGSEFES | |
| NmeCas9 | Neisseria | MAAFKPNSINYILGLDIGIASVGWAMVEIDEEENPIRLIDLGVRVFERAEVP | N611A |
| | meningitidis | KTGDSLAMARRLARSVRRLTRRRAHRLLRTRRLLKREGVLQAANFDENGL | |
| | | IKSLPNTPWQLRAAALDRKLTPLEWSAVLLHLIKHRGYLSQRKNEGETAD | |
| | | KELGALLKGVAGNAHALQTGDFRTPAELALNKFEKESGHIRNQRSDYSHT | |
| | | FSRKDLQAELILLFEKQKEFGNPHVSGGLKEGIETLLMTQRPALSGDAVQK | |
| | | MLGHCTFEPAEPKAAKNTYTAERFIWLTKLNNLRILEQGSERPLTDTERAT | |
| | | LMDEPYRKSKLTYAQARKLLGLEDTAFFKGLRYGKDNAEASTLMEMKAY | |
| | | HAISRALEKEGLKDKKSPLNLSPELQDEIGTAFSLFKTDEDITGRLKDRIQPE | |
| | | ILEALLKHISFDKFVQISLKALRRIVPLMEQGKRYDEACAEIYGDHYGKKNT | |
| | | EEKIYLPPIPADEIRNPVVLRALSQARKVINGVVRRYGSPARIHIETAREVGK | |
| | | SFKDRKEIEKRQEENRKDREKAAAKFREYFPNFVGEPKSKDILKLRLYEQQ | |
| | | HGKCLYSGKEINLGRLNEKGYVEIDHALPFSRTWDDSFNNKVLVLGSENQ | |
| | | NKGNQTPYEYFNGKDNSREWQEFKARVETSRFPRSKKQRILLQKFDEDGF | |
| | | KERNLNDTRYVNRFLCQFVADRMRLTGKGKKRVFASNGQITNLLRGFWG | |
| | | LRKVRAENDRHHALDAVVVACSTVAMQQKITRFVRYKEMNAFDGKTIDK | |
| | | ETGEVLHQKTHFPQPWEFFAQEVMIRVFGKPDGKPEFEEADTLEKLRTLLA | |
| | | EKLSSRPEAVHEYVTPLFVSRAPNRKMSGQGHMETVKSAKRLDEGVSVLR | |
| | | VPLTQLKLKDLEKMVNREREPKLYEALKARLEAHKDDPAKAFAEPFYKY | |
| | | DKAGNRTQQVKAVRVEQVQKTGVWVRNHNGIADNATMVRVDVFEKGD | |
| | | KYYLVPIYSWQVAKGILPDRAVVQGKDEEDWQLIDDSFNFKFSLHPNDLV | |
| | | EVITKKARMFGYFASCHRGTGNINIRIHDLDHKIGKNGILEGIGVKTALSFQ | |
| | | KYQIDELGKEIRPCRLKKRPPVR | |
| ScaCas9 | Streptococcus | MEKKYSIGLDIGTNSVGWAVITDDYKVPSKKFKVLGNTNRKSIKKNLMGA | N872A |
| | canis | LLFDSGETAEATRLKRTARRRYTRRKNRIRYLQEIFANEMAKLDDSFFQRL | |
| | | EESFLVEEDKKNERHPIFGNLADEVAYHRNYPTIYHLRKKLADSPEKADLR | |
| | | LIYLALAHIIKFRGHFLIEGKLNAENSDVAKLFYQLIQTYNQLFEESPLDEIE | |
| | | VDAKGILSARLSKSKRLEKLIAVFPNEKKNGLFGNIIALALGLTPNFKSNFD | |
| | | LTEDAKLQLSKDTYDDDLDELLGQIGDQYADLFSAAKNLSDAILLSDILRS | |
| | | NSEVTKAPLSASMVKRYDEHHQDLALLKTLVRQQFPEKYAEIFKDDTKNG | |
| | | YAGYVGIGIKHRKRTTKLATQEEFYKFIKPILEKMDGAEELLAKLNRDDLL | |
| | | RKQRTFDNGSIPHQIHLKELHAILRRQEEFYPFLKENREKIEKILTFRIPYYV | |
| | | GPLARGNSRFAWLTRKSEEAITPWNFEEVVDKGASAQSFIERMTNFDEQLP | |
| | | NKKVLPKHSLLYEYFTVYNELTKVKYVTERMRKPEFLSGEQKKAIVDLLF | |
| | | KTNRKVTVKQLKEDYFKKIECFDSVEIIGVEDRFNASLGTYHDLLKIIKDKD | |
| | | FLDNEENEDILEDIVLTLTLFEDREMIEERLKTYAHLFDDKVMKQLKRRHY | |
| | | TGWGRLSRKMINGIRDKQSGKTILDFLKSDGFSNRNFMQLIHDDSLTFKEEI | |
| | | EKAQVSGQGDSLHEQIADLAGSPAIKKGILQTVKIVDELVKVMGHKPENIV | |
| | | IEMARENQTTTKGLQQSRERKKRIEEGIKELESQILKENPVENTQLQNEKLY | |
| | | LYYLQNGRDMYVDQELDINRLSDYDVDHIVPQSFIKDDSIDNKVLTRSVEN | |
| | | RGKSDNVPSEEVVKKMKNYWRQLLNAKLITQRKFDNLTKAERGGLSEAD | |
| | | KAGFIKRQLVETRQITKHVARILDSRMNTKRDKNDKPIREVKVITLKSKLVS | |
| | | DFRKDFQLYKVRDINNYHHAHDAYLNAVVGTALIKKYPKLESEFVYGDY | |
| | | KVYDVRKMIAKSEQEIGKATAKRFFYSNIMNFFKTEVKLANGEIRKRPLIET | |
| | | NGETGEVVWNKEKDFATVRKVLAMPQVNIVKKTEVQTGGFSKESILSKRE | |
| | | SAKLIPRKKGWDTRKYGGFGSPTVAYSILVVAKVEKGKAKKLKSVKVLVG | |
| | | ITIMEKGSYEKDPIGFLEAKGYKDIKKELIFKLPKYSLFELENGRRRMLASA | |
| | | TELQKANELVLPQHLVRLLYYTQNISATTGSNNLGYIEQHREEFKEIFEKIID | |
| | | FSEKYILKNKVNSNLKSSFDEQFAVSDSILLSNSFVSLLKYTSFGASGGFTFL | |
| | | DLDVKQGRLRYQTVTEVLDATLIYQSITGLYETRTDLSQLGGD | |
| ScaCas9- | Streptococcus | MEKKYSIGLDIGTNSVGWAVITDDYKVPSKKFKVLGNTNRKSIKKNLMGA | N872A |
| HiFi-Sc++ | canis | LLFDSGETAEATRLKRTARRRYTRRKNRIRYLQEIFANEMAKLDDSFFQRL | |
| | | EESFLVEEDKKNERHPIFGNLADEVAYHRNYPTIYHLRKKLADSPEKADLR | |
| | | LIYLALAHIIKFRGHFLIEGKLNAENSDVAKLFYQLIQTYNQLFEESPLDEIE | |
| | | VDAKGILSARLSKSKRLEKLIAVFPNEKKNGLFGNIIALALGLTPNFKSNFD | |
| | | LTEDAKLQLSKDTYDDDLDELLGQIGDQYADLFSAAKNLSDAILLSDILRS | |
| | | NSEVTKAPLSASMVKRYDEHHQDLALLKTLVRQQFPEKYAEIFKDDTKNG | |
| | | YAGYVGADKKLRKRSGKLATEEEFYKFIKPILEKMDGAEELLAKLNRDDL | |
| | | LRKQRTFDNGSIPHQIHLKELHAILRRQEEFYPFLKENREKIEKILTFRIPYYV | |
| | | GPLARGNSRFAWLTRKSEEAITPWNFEEVVDKGASAQSFIERMTNFDEQLP | |
| | | NKKVLPKHSLLYEYFTVYNELTKVKYVTERMRKPEFLSGEQKKAIVDLLF | |
| | | KTNRKVTVKQLKEDYFKKIECFDSVEIIGVEDRFNASLGTYHDLLKIIKDKD | |
| | | FLDNEENEDILEDIVLTLTLFEDREMIEERLKTYAHLFDDKVMKQLKRRHY | |
| | | TGWGRLSRKMINGIRDKQSGKTILDFLKSDGFSNANFMQLIHDDSLTFKEEI | |
| | | EKAQVSGQGDSLHEQIADLAGSPAIKKGILQTVKIVDELVKVMGHKPENIV | |
| | | IEMARENQTTTKGLQQSRERKKRIEEGIKELESQILKENPVENTQLQNEKLY | |
| | | LYYLQNGRDMYVDQELDINRLSDYDVDHIVPQSFIKDDSIDNKVLTRSVEN | |
| | | RGKSDNVPSEEVVKKMKNYWRQLLNAKLITQRKFDNLTKAERGGLSEAD | |
| | | KAGFIKRQLVETRQITKHVARILDSRMNTKRDKNDKPIREVKVITLKSKLVS | |
| | | DFRKDFQLYKVRDINNYHHAHDAYLNAVVGTALIKKYPKLESEFVYGDY | |
| | | KVYDVRKMIAKSEQEIGKATAKRFFYSNIMNFFKTEVKLANGEIRKRPLIET | |
| | | NGETGEVVWNKEKDFATVRKVLAMPQVNIVKKTEVQTGGFSKESILSKRE | |
| | | SAKLIPRKKGWDTRKYGGFGSPTVAYSILVVAKVEKGKAKKLKSVKVLVG | |
| | | ITIMEKGSYEKDPIGFLEAKGYKDIKKELIFKLPKYSLFELENGRRRMLASA | |
| | | KELQKANELVLPQHLVRLLYYTQNISATTGSNNLGYIEQHREEFKEIFEKIID | |
| | | FSEKYILKNKVNSNLKSSFDEQFAVSDSILLSNSFVSLLKYTSFGASGGFTFL | |
| | | DLDVKQGRLRYQTVTEVLDATLIYQSITGLYETRTDLSQLGGD | |
| SpyCas9- | Streptococcus | MDKKYSIGLDIGTNSVGWAVITDEYKVPSKKFKVLGNTDRHSIKKNLIGAL | N863A |
| 3var-NRRH | pyogenes | LFDSGETAEATRLKRTARRRYTRRKNRICYLQEIFSNEMAKVDDSFFHRLE | |
| | | ESFLVEEDKKHERHPIFGNIVDEVAYHEKYPTIYHLRKKLVDSTDKADLRLI | |
| | | YLALAHMIKFRGHFLIEGDLNPDNSDVDKLFIQLVQTYNQLFEENPINASG | |
| | | VDAKAILSARLSKSRRLENLIAQLPGEKKNGLFGNLIALSLGLTPNFKSNFD | |
| | | LAEDAKLQLSKDTYDDDLDNLLAQIGDQYADLFLAAKNLSDAILLSDILRV | |
| | | NTEITKAPLSASMVKRYDEHHQDLTLLKALVRQQLPEKYKEIFFDQSKNGY | |
| | | AGYIDGGASQEEFYKFIKPILEKMDGTEELLVKLNREDLLRKQRTFDNGIIP | |
| | | HQIHLGELHAILRRQGDFYPFLKDNREKIEKILTFRIPYYVGPLARGNSRFA | |
| | | WMTRKSEETITPWNFEEVVDKGASAQSFIERMTNFDKNLPNEKVLPKHSLL | |
| | | YEYFTVYNELTKVKYVTEGMRKPAFLSGEQKKAIVDLLFKTNRKVTVKQL | |
| | | KEDYFKKIECFDSVEISGVEDRFNASLGTYHDLLKIIKDKDFLDNEENEDILE | |
| | | DIVLTLTLFEDREMIEERLKTYAHLFDDKVMKQLKRLRYTGWGRLSRKLIN | |
| | | GIRDKQSGKTILDFLKSDGFANRNFMQLIHDDSLTFKEDIQKAQVSGQGDS | |
| | | LHEHIANLAGSPAIKKGILQTVKVVDELVKVMGGHKPENIVIEMARENQTT | |
| | | QKGQKNSRERMKRIEEGIKELGSQILKEHPVENTQLQNEKLYLYYLQNGR | |
| | | DMYVDQELDINRLSDYDVDHIVPQSFLKDDSIDNKVLTRSDKNRGKSDNV | |
| | | PSEEVVKKMKNYWRQLLNAKLITQRKFDNLTKAERGGLSELDKAGFIKRQ | |
| | | LVETRQITKHVAQILDSRMNTKYDENDKLIREVKVITLKSKLVSDFRKDFQ | |
| | | FYKVREINNYHHAHDAYLNAVVGTALIKKYPKLESEFVYGDYKVYDVRK | |
| | | MIAKSEQEIGKATAKYFFYSNIMNFFKTEITLANGEIRKRPLIETNGETGEIV | |
| | | WDKGRDFATVRKVLSMPQVNIVKKTEVQTGGFSKESILPKGNSDKLIARK | |
| | | KDWDPKKYGGFNSPTAAYSVLVVAKVEKGKSKKLKSVKELLGITIMERSS | |
| | | FEKNPIGFLEAKGYKEVKKDLIIKLPKYSLFELENGRKRMLASAGVLHKGN | |
| | | ELALPSKYVNFLYLASHYEKLKGSPEDNEQKQLFVEQHKHYLDEIIEQISEF | |
| | | SKRVILADANLDKVLSAYNKHRDKPIREQAENIIHLFTLTNLGVPAAFKYF | |
| | | DTTIDKKRYTSTKEVLDATLIHQSITGLYETRIDLSQLGGD | |
| SpyCas9- | Streptococcus | MDKKYSIGLDIGTNSVGWAVITDEYKVPSKKFKVLGNTDRHSIKKNLIGAL | N863A |
| 3var-NRTH | pyogenes | LFDSGETAEATRLKRTARRRYTRRKNRICYLQEIFSNEMAKVDDSFFHRLE | |
| | | ESFLVEEDKKHERHPIFGNIVDEVAYHEKYPTIYHLRKKLVDSTDKADLRLI | |
| | | YLALAHMIKFRGHFLIEGDLNPDNSDVDKLFIQLVQTYNQLFEENPINASG | |
| | | VDAKAILSARLSKSRRLENLIAQLPGEKKNGLFGNLIALSLGLTPNFKSNFD | |
| | | LAEDAKLQLSKDTYDDDLDNLLAQIGDQYADLFLAAKNLSDAILLSDILRV | |
| | | NTEITKAPLSASMVKRYDEHHQDLTLLKALVRQQLPEKYKEIFFDQSKNGY | |
| | | AGYIDGGASQEEFYKFIKPILEKMDGTEELLVKLNREDLLRKQRTFDNGIIP | |
| | | HQIHLGELHAILRRQGDFYPFLKDNREKIEKILTFRIPYYVGPLARGNSRFA | |
| | | WMTRKSEETITPWNFEEVVDKGASAQSFIERMTNFDKNLPNEKVLPKHSLL | |
| | | YEYFTVYNELTKVKYVTEGMRKPAFLSGEQKKAIVDLLFKTNRKVTVKQL | |
| | | KEDYFKKIECFDSVEISGVEDRFNASLGTYHDLLKIIKDKDFLDNEENEDILE | |
| | | DIVLTLTLFEDREMIEERLKTYAHLFDDKVMKQLKRLRYTGWGRLSRKLIN | |
| | | GIRDKQSGKTILDFLKSDGFANRNFMQLIHDDSLTFKEDIQKAQVSGQGDS | |
| | | LHEHIANLAGSPAIKKGILQTVKVVDELVKVMGGHKPENIVIEMARENQTT | |
| | | QKGQKNSRERMKRIEEGIKELGSQILKEHPVENTQLQNEKLYLYYLQNGR | |
| | | DMYVDQELDINRLSDYDVDHIVPQSFLKDDSIDNKVLTRSDKNRGKSDNV | |
| | | PSEEVVKKMKNYWRQLLNAKLITQRKFDNLTKAERGGLSELDKAGFIKRQ | |
| | | LVETRQITKHVAQILDSRMNTKYDENDKLIREVKVITLKSKLVSDFRKDFQ | |
| | | FYKVREINNYHHAHDAYLNAVVGTALIKKYPKLESEFVYGDYKVYDVRK | |
| | | MIAKSEQEIGKATAKYFFYSNIMNFFKTEITLANGEIRKRPLIETNGETGEIV | |
| | | WDKGRDFATVRKVLSMPQVNIVKKTEVQTGGFSKESILPKGNSDKLIARK | |
| | | KDWDPKKYGGFNSPTVAYSVLVVAKVEKGKSKKLKSVKELLGITIMERSS | |
| | | FEKNPIGFLEAKGYKEVKKDLIIKLPKYSLFELENGRKRMLASASVLHKGN | |
| | | ELALPSKYVNFLYLASHYEKLKGSSEDNKQKQLFVEQHKHYLDEIIEQISEF | |
| | | SKRVILADANLDKVLSAYNKHRDKPIREQAENIIHLFTLTNLGASAAFKYF | |
| | | DTTIGRKLYTSTKEVLDATLIHQSITGLYETRIDLSQLGGD | |
| SpyCas9- | Streptococcus | MDKKYSIGLDIGTNSVGWAVITDEYKVPSKKFKVLGNTDRHSIKKNLIGAL | N863A |
| 3var-NRCH | pyogenes | LFDSGETAEATRLKRTARRRYTRRKNRICYLQEIFSNEMAKVDDSFFHRLE | |
| | | ESFLVEEDKKHERHPIFGNIVDEVAYHEKYPTIYHLRKKLVDSTDKADLRLI | |
| | | YLALAHMIKFRGHFLIEGDLNPDNSDVDKLFIQLVQTYNQLFEENPINASG | |
| | | VDAKAILSARLSKSRRLENLIAQLPGEKKNGLFGNLIALSLGLTPNFKSNFD | |
| | | LAEDAKLQLSKDTYDDDLDNLLAQIGDQYADLFLAAKNLSDAILLSDILRV | |
| | | NTEITKAPLSASMVKRYDEHHQDLTLLKALVRQQLPEKYKEIFFDQSKNGY | |
| | | AGYIDGGASQEEFYKFIKPILEKMDGTEELLVKLNREDLLRKQRTFDNGIIP | |
| | | HQIHLGELHAILRRQGDFYPFLKDNREKIEKILTFRIPYYVGPLARGNSRFA | |
| | | WMTRKSEETITPWNFEEVVDKGASAQSFIERMTNFDKNLPNEKVLPKHSLL | |
| | | YEYFTVYNELTKVKYVTEGMRKPAFLSGEQKKAIVDLLFKTNRKVTVKQL | |
| | | KEDYFKKIECFDSVEISGVEDRFNASLGTYHDLLKIIKDKDFLDNEENEDILE | |
| | | DIVLTLTLFEDREMIEERLKTYAHLFDDKVMKQLKRLRYTGWGRLSRKLIN | |
| | | GIRDKQSGKTILDFLKSDGFANRNFMQLIHDDSLTFKEDIQKAQVSGQGDS | |
| | | LHEHIANLAGSPAIKKGILQTVKVVDELVKVMGGHKPENIVIEMARENQTT | |
| | | QKGQKNSRERMKRIEEGIKELGSQILKEHPVENTQLQNEKLYLYYLQNGR | |
| | | DMYVDQELDINRLSDYDVDHIVPQSFLKDDSIDNKVLTRSDKNRGKSDNV | |
| | | PSEEVVKKMKNYWRQLLNAKLITQRKFDNLTKAERGGLSELDKAGFIKRQ | |
| | | LVETRQITKHVAQILDSRMNTKYDENDKLIREVKVITLKSKLVSDFRKDFQ | |
| | | FYKVREINNYHHAHDAYLNAVVGTALIKKYPKLESEFVYGDYKVYDVRK | |
| | | MIAKSEQEIGKATAKYFFYSNIMNFFKTEITLANGEIRKRPLIETNGETGEIV | |
| | | WDKGRDFATVRKVLSMPQVNIVKKTEVQTGGFSKESILPKGNSDKLIARK | |
| | | KDWDPKKYGGFNSPTVAYSVLVVAKVEKGKSKKLKSVKELLGITIMERSS | |
| | | FEKNPIDFLEAKGYKEVKKDLIIKLPKYSLFELENGRKRMLASAGVLQKGN | |
| | | ELALPSKYVNFLYLASHYEKLKGSPEDNEQKQLFVEQHKHYLDEIIEQISEF | |
| | | SKRVILADANLDKVLSAYNKHRDKPIREQAENIIHLFTLTNLGAPAAFKYF | |
| | | DTTINRKQYNTTKEVLDATLIRQSITGLYETRIDLSQLGGD | |
| SpyCas9- | Streptococcus | MDKKYSIGLDIGTNSVGWAVITDEYKVPSKKFKVLGNTDRHSIKKNLIGAL | N863A |
| HF1 | pyogenes | LFDSGETAEATRLKRTARRRYTRRKNRICYLQEIFSNEMAKVDDSFFHRLE | |
| | | ESFLVEEDKKHERHPIFGNIVDEVAYHEKYPTIYHLRKKLVDSTDKADLRLI | |
| | | YLALAHMIKFRGHFLIEGDLNPDNSDVDKLFIQLVQTYNQLFEENPINASG | |
| | | VDAKAILSARLSKSRRLENLIAQLPGEKKNGLFGNLIALSLGLTPNFKSNFD | |
| | | LAEDAKLQLSKDTYDDDLDNLLAQIGDQYADLFLAAKNLSDAILLSDILRV | |
| | | NTEITKAPLSASMIKRYDEHHQDLTLLKALVRQQLPEKYKEIFFDQSKNGY | |
| | | AGYIDGGASQEEFYKFIKPILEKMDGTEELLVKLNREDLLRKQRTFDNGSIP | |
| | | HQIHLGELHAILRRQEDFYPFLKDNREKIEKILTFRIPYYVGPLARGNSRFA | |
| | | WMTRKSEETITPWNFEEVVDKGASAQSFIERMTNFDKNLPNEKVLPKHSLL | |
| | | YEYFTVYNELTKVKYVTEGMRKPAFLSGEQKKAIVDLLFKTNRKVTVKQL | |
| | | KEDYFKKIECFDSVEISGVEDRFNASLGTYHDLLKIIKDKDFLDNEENEDILE | |
| | | DIVLTLTLFEDREMIEERLKTYAHLFDDKVMKQLKRRRYTGWGRLSRKLI | |
| | | NGIRDKQSGKTILDFLKSDGFANRNFMQLIHDDSLTFKEDIQKAQVSGQGD | |
| | | SLHEHIANLAGSPAIKKGILQTVKVVDELVKVMGRHKPENIVIEMARENQT | |
| | | TQKGQKNSRERMKRIEEGIKELGSQILKEHPVENTQLQNEKLYLYYLQNGR | |
| | | DMYVDQELDINRLSDYDVDHIVPQSFLKDDSIDNKVLTRSDKNRGKSDNV | |
| | | PSEEVVKKMKNYWRQLLNAKLITQRKFDNLTKAERGGLSELDKAGFIKRQ | |
| | | LVETRQITKHVAQILDSRMNTKYDENDKLIREVKVITLKSKLVSDFRKDFQ | |
| | | FYKVREINNYHHAHDAYLNAVVGTALIKKYPKLESEFVYGDYKVYDVRK | |
| | | MIAKSEQEIGKATAKYFFYSNIMNFFKTEITLANGEIRKRPLIETNGETGEIV | |
| | | WDKGRDFATVRKVLSMPQVNIVKKTEVQTGGFSKESILPKRNSDKLIARK | |
| | | KDWDPKKYGGFDSPTVAYSVLVVAKVEKGKSKKLKSVKELLGITIMERSS | |
| | | FEKNPIDFLEAKGYKEVKKDLIIKLPKYSLFELENGRKRMLASAGELQKGN | |
| | | ELALPSKYVNFLYLASHYEKLKGSPEDNEQKQLFVEQHKHYLDEIIEQISEF | |
| | | SKRVILADANLDKVLSAYNKHRDKPIREQAENIIHLFTLTNLGAPAAFKYF | |
| | | DTTIDRKRYTSTKEVLDATLIHQSITGLYETRIDLSQLGGD | |
| SpyCas9- | Streptococcus | MDKKYSIGLDIGTNSVGWAVITDEYKVPSKKFKVLGNTDRHSIKKNLIGAL | N863A |
| QQR1 | pyogenes | LFDSGETAEATRLKRTARRRYTRRKNRICYLQEIFSNEMAKVDDSFFHRLE | |
| | | ESFLVEEDKKHERHPIFGNIVDEVAYHEKYPTIYHLRKKLVDSTDKADLRLI | |
| | | YLALAHMIKFRGHFLIEGDLNPDNSDVDKLFIQLVQTYNQLFEENPINASG | |
| | | VDAKAILSARLSKSRRLENLIAQLPGEKKNGLFGNLIALSLGLTPNFKSNFD | |
| | | LAEDAKLQLSKDTYDDDLDNLLAQIGDQYADLFLAAKNLSDAILLSDILRV | |
| | | NTEITKAPLSASMIKRYDEHHQDLTLLKALVRQQLPEKYKEIFFDQSKNGY | |
| | | AGYIDGGASQEEFYKFIKPILEKMDGTEELLVKLNREDLLRKQRTFDNGSIP | |
| | | HQIHLGELHAILRRQEDFYPFLKDNREKIEKILTFRIPYYVGPLARGNSRFA | |
| | | WMTRKSEETITPWNFEEVVDKGASAQSFIERMTNFDKNLPNEKVLPKHSLL | |
| | | YEYFTVYNELTKVKYVTEGMRKPAFLSGEQKKAIVDLLFKTNRKVTVKQL | |
| | | KEDYFKKIECFDSVEISGVEDRFNASLGTYHDLLKIIKDKDFLDNEENEDILE | |
| | | DIVLTLTLFEDREMIEERLKTYAHLFDDKVMKQLKRRRYTGWGRLSRKLI | |
| | | NGIRDKQSGKTILDFLKSDGFANRNFMQLIHDDSLTFKEDIQKAQVSGQGD | |
| | | SLHEHIANLAGSPAIKKGILQTVKVVDELVKVMGRHKPENIVIEMARENQT | |
| | | TQKGQKNSRERMKRIEEGIKELGSQILKEHPVENTQLQNEKLYLYYLQNGR | |
| | | DMYVDQELDINRLSDYDVDHIVPQSFLKDDSIDNKVLTRSDKNRGKSDNV | |
| | | PSEEVVKKMKNYWRQLLNAKLITQRKFDNLTKAERGGLSELDKAGFIKRQ | |
| | | LVETRQITKHVAQILDSRMNTKYDENDKLIREVKVITLKSKLVSDFRKDFQ | |
| | | FYKVREINNYHHAHDAYLNAVVGTALIKKYPKLESEFVYGDYKVYDVRK | |
| | | MIAKSEQEIGKATAKYFFYSNIMNFFKTEITLANGEIRKRPLIETNGETGEIV | |
| | | WDKGRDFATVRKVLSMPQVNIVKKTEVQTGGFSKESILPKRNSDKLIARK | |
| | | KDWDPKKYGGFDSPTVAYSVLVVAKVEKGKSKKLKSVKELLGITIMERSS | |
| | | FEKNPIDFLEAKGYKEVKKDLIIKLPKYSLFELENGRKRMLASARELQKGN | |
| | | ELALPSKYVNFLYLASHYEKLKGSPEDNEQKQLFVEQHKHYLDEIIEQISEF | |
| | | SKRVILADAQLDKVLSAYNKHRDKPIREQAENIIHLFTLTNLGAPAAFKYF | |
| | | DTTFKQKQYRSTKEVLDATLIHQSITGLYETRIDLSQLGGD | |
| SpyCas9- | Streptococcus | MDKKYSIGLDIGTNSVGWAVITDEYKVPSKKFKVLGNTDRHSIKKNLIGAL | N863A |
| SpG | pyogenes | LFDSGETAEATRLKRTARRRYTRRKNRICYLQEIFSNEMAKVDDSFFHRLE | |
| | | ESFLVEEDKKHERHPIFGNIVDEVAYHEKYPTIYHLRKKLVDSTDKADLRLI | |
| | | YLALAHMIKFRGHFLIEGDLNPDNSDVDKLFIQLVQTYNQLFEENPINASG | |
| | | VDAKAILSARLSKSRRLENLIAQLPGEKKNGLFGNLIALSLGLTPNFKSNFD | |
| | | LAEDAKLQLSKDTYDDDLDNLLAQIGDQYADLFLAAKNLSDAILLSDILRV | |
| | | NTEITKAPLSASMIKRYDEHHQDLTLLKALVRQQLPEKYKEIFFDQSKNGY | |
| | | AGYIDGGASQEEFYKFIKPILEKMDGTEELLVKLNREDLLRKQRTFDNGSIP | |
| | | HQIHLGELHAILRRQEDFYPFLKDNREKIEKILTFRIPYYVGPLARGNSRFA | |
| | | WMTRKSEETITPWNFEEVVDKGASAQSFIERMTNFDKNLPNEKVLPKHSLL | |
| | | YEYFTVYNELTKVKYVTEGMRKPAFLSGEQKKAIVDLLFKTNRKVTVKQL | |
| | | KEDYFKKIECFDSVEISGVEDRFNASLGTYHDLLKIIKDKDFLDNEENEDILE | |
| | | DIVLTLTLFEDREMIEERLKTYAHLFDDKVMKQLKRRRYTGWGRLSRKLI | |
| | | NGIRDKQSGKTILDFLKSDGFANRNFMQLIHDDSLTFKEDIQKAQVSGQGD | |
| | | SLHEHIANLAGSPAIKKGILQTVKVVDELVKVMGRHKPENIVIEMARENQT | |
| | | TQKGQKNSRERMKRIEEGIKELGSQILKEHPVENTQLQNEKLYLYYLQNGR | |
| | | DMYVDQELDINRLSDYDVDHIVPQSFLKDDSIDNKVLTRSDKNRGKSDNV | |
| | | PSEEVVKKMKNYWRQLLNAKLITQRKFDNLTKAERGGLSELDKAGFIKRQ | |
| | | LVETRQITKHVAQILDSRMNTKYDENDKLIREVKVITLKSKLVSDFRKDFQ | |
| | | FYKVREINNYHHAHDAYLNAVVGTALIKKYPKLESEFVYGDYKVYDVRK | |
| | | MIAKSEQEIGKATAKYFFYSNIMNFFKTEITLANGEIRKRPLIETNGETGEIV | |
| | | WDKGRDFATVRKVLSMPQVNIVKKTEVQTGGFSKESILPKRNSDKLIARK | |
| | | KDWDPKKYGGFLWPTVAYSVLVVAKVEKGKSKKLKSVKELLGITIMERSS | |
| | | FEKNPIDFLEAKGYKEVKKDLIIKLPKYSLFELENGRKRMLASAKQLQKGN | |
| | | ELALPSKYVNFLYLASHYEKLKGSPEDNEQKQLFVEQHKHYLDEIIEQISEF | |
| | | SKRVILADANLDKVLSAYNKHRDKPIREQAENIIHLFTLTNLGAPAAFKYF | |
| | | DTTIDRKQYRSTKEVLDATLIHQSITGLYETRIDLSQLGGD | |
| SpyCas9- | Streptococcus | MDKKYSIGLDIGTNSVGWAVITDEYKVPSKKFKVLGNTDRHSIKKNLIGAL | N863A |
| VQR | pyogenes | LFDSGETAEATRLKRTARRRYTRRKNRICYLQEIFSNEMAKVDDSFFHRLE | |
| | | ESFLVEEDKKHERHPIFGNIVDEVAYHEKYPTIYHLRKKLVDSTDKADLRLI | |
| | | YLALAHMIKFRGHFLIEGDLNPDNSDVDKLFIQLVQTYNQLFEENPINASG | |
| | | VDAKAILSARLSKSRRLENLIAQLPGEKKNGLFGNLIALSLGLTPNFKSNFD | |
| | | LAEDAKLQLSKDTYDDDLDNLLAQIGDQYADLFLAAKNLSDAILLSDILRV | |
| | | NTEITKAPLSASMIKRYDEHHQDLTLLKALVRQQLPEKYKEIFFDQSKNGY | |
| | | AGYIDGGASQEEFYKFIKPILEKMDGTEELLVKLNREDLLRKQRTFDNGSIP | |
| | | HQIHLGELHAILRRQEDFYPFLKDNREKIEKILTFRIPYYVGPLARGNSRFA | |
| | | WMTRKSEETITPWNFEEVVDKGASAQSFIERMTNFDKNLPNEKVLPKHSLL | |
| | | YEYFTVYNELTKVKYVTEGMRKPAFLSGEQKKAIVDLLFKTNRKVTVKQL | |
| | | KEDYFKKIECFDSVEISGVEDRFNASLGTYHDLLKIIKDKDFLDNEENEDILE | |
| | | DIVLTLTLFEDREMIEERLKTYAHLFDDKVMKQLKRRRYTGWGRLSRKLI | |
| | | NGIRDKQSGKTILDFLKSDGFANRNFMQLIHDDSLTFKEDIQKAQVSGQGD | |
| | | SLHEHIANLAGSPAIKKGILQTVKVVDELVKVMGRHKPENIVIEMARENQT | |
| | | TQKGQKNSRERMKRIEEGIKELGSQILKEHPVENTQLQNEKLYLYYLQNGR | |
| | | DMYVDQELDINRLSDYDVDHIVPQSFLKDDSIDNKVLTRSDKNRGKSDNV | |
| | | PSEEVVKKMKNYWRQLLNAKLITQRKFDNLTKAERGGLSELDKAGFIKRQ | |
| | | LVETRQITKHVAQILDSRMNTKYDENDKLIREVKVITLKSKLVSDFRKDFQ | |
| | | FYKVREINNYHHAHDAYLNAVVGTALIKKYPKLESEFVYGDYKVYDVRK | |
| | | MIAKSEQEIGKATAKYFFYSNIMNFFKTEITLANGEIRKRPLIETNGETGEIV | |
| | | WDKGRDFATVRKVLSMPQVNIVKKTEVQTGGFSKESILPKRNSDKLIARK | |
| | | KDWDPKKYGGFVSPTVAYSVLVVAKVEKGKSKKLKSVKELLGITIMERSS | |
| | | FEKNPIDFLEAKGYKEVKKDLIIKLPKYSLFELENGRKRMLASAGELQKGN | |
| | | ELALPSKYVNFLYLASHYEKLKGSPEDNEQKQLFVEQHKHYLDEIIEQISEF | |
| | | SKRVILADANLDKVLSAYNKHRDKPIREQAENIIHLFTLTNLGAPAAFKYF | |
| | | DTTIDRKQYRSTKEVLDATLIHQSITGLYETRIDLSQLGGD | |
| SpyCas9- | Streptococcus | MDKKYSIGLDIGTNSVGWAVITDEYKVPSKKFKVLGNTDRHSIKKNLIGAL | N863A |
| VRER | pyogenes | LFDSGETAEATRLKRTARRRYTRRKNRICYLQEIFSNEMAKVDDSFFHRLE | |
| | | ESFLVEEDKKHERHPIFGNIVDEVAYHEKYPTIYHLRKKLVDSTDKADLRLI | |
| | | YLALAHMIKFRGHFLIEGDLNPDNSDVDKLFIQLVQTYNQLFEENPINASG | |
| | | VDAKAILSARLSKSRRLENLIAQLPGEKKNGLFGNLIALSLGLTPNFKSNFD | |
| | | LAEDAKLQLSKDTYDDDLDNLLAQIGDQYADLFLAAKNLSDAILLSDILRV | |
| | | NTEITKAPLSASMIKRYDEHHQDLTLLKALVRQQLPEKYKEIFFDQSKNGY | |
| | | AGYIDGGASQEEFYKFIKPILEKMDGTEELLVKLNREDLLRKQRTFDNGSIP | |
| | | HQIHLGELHAILRRQEDFYPFLKDNREKIEKILTFRIPYYVGPLARGNSRFA | |
| | | WMTRKSEETITPWNFEEVVDKGASAQSFIERMTNFDKNLPNEKVLPKHSLL | |
| | | YEYFTVYNELTKVKYVTEGMRKPAFLSGEQKKAIVDLLFKTNRKVTVKQL | |
| | | KEDYFKKIECFDSVEISGVEDRFNASLGTYHDLLKIIKDKDFLDNEENEDILE | |
| | | DIVLTLTLFEDREMIEERLKTYAHLFDDKVMKQLKRRRYTGWGRLSRKLI | |
| | | NGIRDKQSGKTILDFLKSDGFANRNFMQLIHDDSLTFKEDIQKAQVSGQGD | |
| | | SLHEHIANLAGSPAIKKGILQTVKVVDELVKVMGRHKPENIVIEMARENQT | |
| | | TQKGQKNSRERMKRIEEGIKELGSQILKEHPVENTQLQNEKLYLYYLQNGR | |
| | | DMYVDQELDINRLSDYDVDHIVPQSFLKDDSIDNKVLTRSDKNRGKSDNV | |
| | | PSEEVVKKMKNYWRQLLNAKLITQRKFDNLTKAERGGLSELDKAGFIKRQ | |
| | | LVETRQITKHVAQILDSRMNTKYDENDKLIREVKVITLKSKLVSDFRKDFQ | |
| | | FYKVREINNYHHAHDAYLNAVVGTALIKKYPKLESEFVYGDYKVYDVRK | |
| | | MIAKSEQEIGKATAKYFFYSNIMNFFKTEITLANGEIRKRPLIETNGETGEIV | |
| | | WDKGRDFATVRKVLSMPQVNIVKKTEVQTGGFSKESILPKRNSDKLIARK | |
| | | KDWDPKKYGGFVSPTVAYSVLVVAKVEKGKSKKLKSVKELLGITIMERSS | |
| | | FEKNPIDFLEAKGYKEVKKDLIIKLPKYSLFELENGRKRMLASARELQKGN | |
| | | ELALPSKYVNFLYLASHYEKLKGSPEDNEQKQLFVEQHKHYLDEIIEQISEF | |
| | | SKRVILADANLDKVLSAYNKHRDKPIREQAENIIHLFTLTNLGAPAAFKYF | |
| | | DTTIDRKEYRSTKEVLDATLIHQSITGLYETRIDLSQLGGD | |
| SpyCas9- | Streptococcus | MDKKYSIGLDIGTNSVGWAVITDEYKVPSKKFKVLGNTDRHSIKKNLIGAL | N863A |
| xCas | pyogenes | LFDSGETAEATRLKRTARRRYTRRKNRICYLQEIFSNEMAKVDDSFFHRLE | |
| | | ESFLVEEDKKHERHPIFGNIVDEVAYHEKYPTIYHLRKKLVDSTDKADLRLI | |
| | | YLALAHMIKFRGHFLIEGDLNPDNSDVDKLFIQLVQTYNQLFEENPINASG | |
| | | VDAKAILSARLSKSRRLENLIAQLPGEKKNGLFGNLIALSLGLTPNFKSNFD | |
| | | LAEDTKLQLSKDTYDDDLDNLLAQIGDQYADLFLAAKNLSDAILLSDILRV | |
| | | NTEITKAPLSASMIKLYDEHHQDLTLLKALVRQQLPEKYKEIFFDQSKNGY | |
| | | AGYIDGGASQEEFYKFIKPILEKMDGTEELLVKLNREDLLRKQRTFDNGIIP | |
| | | HQIHLGELHAILRRQEDFYPFLKDNREKIEKILTFRIPYYVGPLARGNSRFA | |
| | | WMTRKSEETITPWNFEKVVDKGASAQSFIERMTNFDKNLPNEKVLPKHSL | |
| | | LYEYFTVYNELTKVKYVTEGMRKPAFLSGDQKKAIVDLLFKTNRKVTVKQ | |
| | | LKEDYFKKIECFDSVEISGVEDRFNASLGTYHDLLKIIKDKDFLDNEENEDIL | |
| | | EDIVLTLTLFEDREMIEERLKTYAHLFDDKVMKQLKRRRYTGWGRLSRKLI | |
| | | NGIRDKQSGKTILDFLKSDGFANRNFIQLIHDDSLTFKEDIQKAQVSGQGDS | |
| | | LHEHIANLAGSPAIKKGILQTVKVVDELVKVMGRHKPENIVIEMARENQTT | |
| | | QKGQKNSRERMKRIEEGIKELGSQILKEHPVENTQLQNEKLYLYYLQNGR | |
| | | DMYVDQELDINRLSDYDVDHIVPQSFLKDDSIDNKVLTRSDKNRGKSDNV | |
| | | PSEEVVKKMKNYWRQLLNAKLITQRKFDNLTKAERGGLSELDKAGFIKRQ | |
| | | LVETRQITKHVAQILDSRMNTKYDENDKLIREVKVITLKSKLVSDFRKDFQ | |
| | | FYKVREINNYHHAHDAYLNAVVGTALIKKYPKLESEFVYGDYKVYDVRK | |
| | | MIAKSEQEIGKATAKYFFYSNIMNFFKTEITLANGEIRKRPLIETNGETGEIV | |
| | | WDKGRDFATVRKVLSMPQVNIVKKTEVQTGGFSKESILPKRNSDKLIARK | |
| | | KDWDPKKYGGFDSPTVAYSVLVVAKVEKGKSKKLKSVKELLGITIMERSS | |
| | | FEKNPIDFLEAKGYKEVKKDLIIKLPKYSLFELENGRKRMLASAGVLQKGN | |
| | | ELALPSKYVNFLYLASHYEKLKGSPEDNEQKQLFVEQHKHYLDEIIEQISEF | |
| | | SKRVILADANLDKVLSAYNKHRDKPIREQAENIIHLFTLTNLGAPAAFKYF | |
| | | DTTIDRKRYTSTKEVLDATLIHQSITGLYETRIDLSQLGGD | |
| SpyCas9- | Streptococcus | MDKKYSIGLDIGTNSVGWAVITDEYKVPSKKFKVLGNTDRHSIKKNLIGAL | N863A |
| xCas-NG | pyogenes | LFDSGETAEATRLKRTARRRYTRRKNRICYLQEIFSNEMAKVDDSFFHRLE | |
| | | ESFLVEEDKKHERHPIFGNIVDEVAYHEKYPTIYHLRKKLVDSTDKADLRLI | |
| | | YLALAHMIKFRGHFLIEGDLNPDNSDVDKLFIQLVQTYNQLFEENPINASG | |
| | | VDAKAILSARLSKSRRLENLIAQLPGEKKNGLFGNLIALSLGLTPNFKSNFD | |
| | | LAEDTKLQLSKDTYDDDLDNLLAQIGDQYADLFLAAKNLSDAILLSDILRV | |
| | | NTEITKAPLSASMIKLYDEHHQDLTLLKALVRQQLPEKYKEIFFDQSKNGY | |
| | | AGYIDGGASQEEFYKFIKPILEKMDGTEELLVKLNREDLLRKQRTFDNGIIP | |
| | | HQIHLGELHAILRRQEDFYPFLKDNREKIEKILTFRIPYYVGPLARGNSRFA | |
| | | WMTRKSEETITPWNFEKVVDKGASAQSFIERMTNFDKNLPNEKVLPKHSL | |
| | | LYEYFTVYNELTKVKYVTEGMRKPAFLSGDQKKAIVDLLFKTNRKVTVKQ | |
| | | LKEDYFKKIECFDSVEISGVEDRFNASLGTYHDLLKIIKDKDFLDNEENEDIL | |
| | | EDIVLTLTLFEDREMIEERLKTYAHLFDDKVMKQLKRRRYTGWGRLSRKLI | |
| | | NGIRDKQSGKTILDFLKSDGFANRNFIQLIHDDSLTFKEDIQKAQVSGQGDS | |
| | | LHEHIANLAGSPAIKKGILQTVKVVDELVKVMGRHKPENIVIEMARENQTT | |
| | | QKGQKNSRERMKRIEEGIKELGSQILKEHPVENTQLQNEKLYLYYLQNGR | |
| | | DMYVDQELDINRLSDYDVDHIVPQSFLKDDSIDNKVLTRSDKNRGKSDNV | |
| | | PSEEVVKKMKNYWRQLLNAKLITQRKFDNLTKAERGGLSELDKAGFIKRQ | |
| | | LVETRQITKHVAQILDSRMNTKYDENDKLIREVKVITLKSKLVSDFRKDFQ | |
| | | FYKVREINNYHHAHDAYLNAVVGTALIKKYPKLESEFVYGDYKVYDVRK | |
| | | MIAKSEQEIGKATAKYFFYSNIMNFFKTEITLANGEIRKRPLIETNGETGEIV | |
| | | WDKGRDFATVRKVLSMPQVNIVKKTEVQTGGFSKESIRPKRNSDKLIARK | |
| | | KDWDPKKYGGFVSPTVAYSVLVVAKVEKGKSKKLKSVKELLGITIMERSS | |
| | | FEKNPIDFLEAKGYKEVKKDLIIKLPKYSLFELENGRKRMLASARFLQKGN | |
| | | ELALPSKYVNFLYLASHYEKLKGSPEDNEQKQLFVEQHKHYLDEIIEQISEF | |
| | | SKRVILADANLDKVLSAYNKHRDKPIREQAENIIHLFTLTNLGAPRAFKYFD | |
| | | TTIDRKVYRSTKEVLDATLIHQSITGLYETRIDLSQLGGD | |
| St1Cas9- | Streptococcus | MSDLVLGLDIGIGSVGVGILNKVTGEIIHKNSRIFPAAQAENNLVRRTNRQG | N622A |
| CNRZ1066 | thermophilus | RRLARRKKHRRVRLNRLFEESGLITDFTKISINLNPYQLRVKGLTDELSNEE | |
| | | LFIALKNMVKHRGISYLDDASDDGNSSVGDYAQIVKENSKQLETKTPGQIQ | |
| | | LERYQTYGQLRGDFTVEKDGKKHRLINVFPTSAYRSEALRILQTQQEFNPQI | |
| | | TDEFINRYLEILTGKRKYYHGPGNEKSRTDYGRYRTSGETLDNIFGILIGKC | |
| | | TFYPDEFRAAKASYTAQEFNLLNDLNNLTVPTETKKLSKEQKNQIINYVKN | |
| | | EKAMGPAKLFKYIAKLLSCDVADIKGYRIDKSGKAEIHTFEAYRKMKTLET | |
| | | LDIEQMDRETLDKLAYVLTLNTEREGIQEALEHEFADGSFSQKQVDELVQF | |
| | | RKANSSIFGKGWHNFSVKLMMELIPELYETSEEQMTILTRLGKQKTTSSSN | |
| | | KTKYIDEKLLTEEIYNPVVAKSVRQAIKIVNAAIKEYGDFDNIVIEMARETN | |
| | | EDDEKKAIQKIQKANKDEKDAAMLKAANQYNGKAELPHSVFHGHKQLAT | |
| | | KIRLWHQQGERCLYTGKTISIHDLINNSNQFEVDHILPLSITFDDSLANKVLV | |
| | | YATANQEKGQRTPYQALDSMDDAWSFRELKAFVRESKTLSNKKKEYLLT | |
| | | EEDISKFDVRKKFIERNLVDTRYASRVVLNALQEHFRAHKIDTKVSVVRGQ | |
| | | FTSQLRRHWGIEKTRDTYHHHAVDALIIAASSQLNLWKKQKNTLVSYSEE | |
| | | QLLDIETGELISDDEYKESVFKAPYQHFVDTLKSKEFEDSILFSYQVDSKFN | |
| | | RKISDATIYATRQAKVGKDKKDETYVLGKIKDIYTQDGYDAFMKIYKKDK | |
| | | SKFLMYRHDPQTFEKVIEPILENYPNKQMNEKGKEVPCNPFLKYKEEHGYI | |
| | | RKYSKKGNGPEIKSLKYYDSKLLGNPIDITPENSKNKVVLQSLKPWRTDVY | |
| | | FNKATGKYEILGLKYADLQFEKGTGTYKISQEKYNDIKKKEGVDSDSEFKF | |
| | | TLYKNDLLLVKDTETKEQQLFRFLSRTLPKQKHYVELKPYDKQKFEGGEA | |
| | | LIKVLGNVANGGQCIKGLAKSNISIYKVRTDVLGNQHIIKNEGDKPKLDF | |
| St1Cas9- | Streptococcus | MSDLVLGLDIGIGSVGVGILNKVTGEIIHKNSRIFPAAQAENNLVRRTNRQG | N622A |
| LMG1831 | thermophilus | RRLARRKKHRRVRLNRLFEESGLITDFTKISINLNPYQLRVKGLTDELSNEE | |
| | | LFIALKNMVKHRGISYLDDASDDGNSSVGDYAQIVKENSKQLETKTPGQIQ | |
| | | LERYQTYGQLRGDFTVEKDGKKHRLINVFPTSAYRSEALRILQTQQEFNPQI | |
| | | TDEFINRYLEILTGKRKYYHGPGNEKSRTDYGRYRTSGETLDNIFGILIGKC | |
| | | TFYPDEFRAAKASYTAQEFNLLNDLNNLTVPTETKKLSKEQKNQIINYVKN | |
| | | EKAMGPAKLFKYIAKLLSCDVADIKGYRIDKSGKAEIHTFEAYRKMKTLET | |
| | | LDIEQMDRETLDKLAYVLTLNTEREGIQEALEHEFADGSFSQKQVDELVQF | |
| | | RKANSSIFGKGWHNFSVKLMMELIPELYETSEEQMTILTRLGKQKTTSSSN | |
| | | KTKYIDEKLLTEEIYNPVVAKSVRQAIKIVNAAIKEYGDFDNIVIEMARETN | |
| | | EDDEKKAIQKIQKANKDEKDAAMLKAANQYNGKAELPHSVFHGHKQLAT | |
| | | KIRLWHQQGERCLYTGKTISIHDLINNSNQFEVDHILPLSITFDDSLANKVLV | |
| | | YATANQEKGQRTPYQALDSMDDAWSFRELKAFVRESKTLSNKKKEYLLT | |
| | | EEDISKFDVRKKFIERNLVDTRYASRVVLNALQEHFRAHKIDTKVSVVRGQ | |
| | | FTSQLRRHWGIEKTRDTYHHHAVDALIIAASSQLNLWKKQKNTLVSYSEE | |
| | | QLLDIETGELISDDEYKESVFKAPYQHFVDTLKSKEFEDSILFSYQVDSKFN | |
| | | RKISDATIYATRQAKVGKDKKDETYVLGKIKDIYTQDGYDAFMKIYKKDK | |
| | | SKFLMYRHDPQTFEKVIEPILENYPNKQMNEKGKEVPCNPFLKYKEEHGYI | |
| | | RKYSKKGNGPEIKSLKYYDSKLLGNPIDITPENSKNKVVLQSLKPWRTDVY | |
| | | FNKNTGKYEILGLKYADLQFEKKTGTYKISQEKYNGIMKEEGVDSDSEFKF | |
| | | TLYKNDLLLVKDTETKEQQLFRFLSRTMPNVKYYVELKPYSKDKFEKNES | |
| | | LIEILGSADKSGRCIKGLGKSNISIYKVRTDVLGNQHIIKNEGDKPKLDF | |
| St1Cas9- | Streptococcus | MSDLVLGLDIGIGSVGVGILNKVTGEIIHKNSRIFPAAQAENNLVRRTNRQG | N622A |
| MTH17CL39 | thermophilus | RRLARRKKHRRVRLNRLFEESGLITDFTKISINLNPYQLRVKGLTDELSNEE | |
| 6 | | LFIALKNMVKHRGISYLDDASDDGNSSVGDYAQIVKENSKQLETKTPGQIQ | |
| | | LERYQTYGQLRGDFTVEKDGKKHRLINVFPTSAYRSEALRILQTQQEFNPQI | |
| | | TDEFINRYLEILTGKRKYYHGPGNEKSRTDYGRYRTSGETLDNIFGILIGKC | |
| | | TFYPDEFRAAKASYTAQEFNLLNDLNNLTVPTETKKLSKEQKNQIINYVKN | |
| | | EKAMGPAKLFKYIAKLLSCDVADIKGYRIDKSGKAEIHTFEAYRKMKTLET | |
| | | LDIEQMDRETLDKLAYVLTLNTEREGIQEALEHEFADGSFSQKQVDELVQF | |
| | | RKANSSIFGKGWHNFSVKLMMELIPELYETSEEQMTILTRLGKQKTTSSSN | |
| | | KTKYIDEKLLTEEIYNPVVAKSVRQAIKIVNAAIKEYGDFDNIVIEMARETN | |
| | | EDDEKKAIQKIQKANKDEKDAAMLKAANQYNGKAELPHSVFHGHKQLAT | |
| | | KIRLWHQQGERCLYTGKTISIHDLINNSNQFEVDHILPLSITFDDSLANKVLV | |
| | | YATANQEKGQRTPYQALDSMDDAWSFRELKAFVRESKTLSNKKKEYLLT | |
| | | EEDISKFDVRKKFIERNLVDTRYASRVVLNALQEHFRAHKIDTKVSVVRGQ | |
| | | FTSQLRRHWGIEKTRDTYHHHAVDALIIAASSQLNLWKKQKNTLVSYSED | |
| | | QLLDIETGELISDDEYKESVFKAPYQHFVDTLKSKEFEDSILFSYQVDSKFN | |
| | | RKISDATIYATRQAKVGKDKADETYVLGKIKDIYTQDGYDAFMKIYKKDK | |
| | | SKFLMYRHDPQTFEKVIEPILENYPNKQINEKGKEVPCNPFLKYKEEHGYIR | |
| | | KYSKKGNGPEIKSLKYYDSKLGNHIDITPKDSNNKVVLQSLKPWRTDVYF | |
| | | NKNTGKYEILGLKYSDMQFEKGTGKYSISKEQYENIKVREGVDENSEFKFT | |
| | | LYKNDLLLLKDSENGEQILLRFTSRNDTSKHYVELKPYNRQKFEGSEYLIKS | |
| | | LGTVAKGGQCIKGLGKSNISIYKVRTDVLGNQHIIKNEGDKPKLDF | |
| St1Cas9- | Streptococcus | MSDLVLGLDIGIGSVGVGILNKVTGEIIHKNSRIFPAAQAENNLVRRTNRQG | N622A |
| TH1477 | thermophilus | RRLARRKKHRRVRLNRLFEESGLITDFTKISINLNPYQLRVKGLTDELSNEE | |
| | | LFIALKNMVKHRGISYLDDASDDGNSSVGDYAQIVKENSKQLETKTPGQIQ | |
| | | LERYQTYGQLRGDFTVEKDGKKHRLINVFPTSAYRSEALRILQTQQEFNPQI | |
| | | TDEFINRYLEILTGKRKYYHGPGNEKSRTDYGRYRTSGETLDNIFGILIGKC | |
| | | TFYPDEFRAAKASYTAQEFNLLNDLNNLTVPTETKKLSKEQKNQIINYVKN | |
| | | EKAMGPAKLFKYIAKLLSCDVADIKGYRIDKSGKAEIHTFEAYRKMKTLET | |
| | | LDIEQMDRETLDKLAYVLTLNTEREGIQEALEHEFADGSFSQKQVDELVQF | |
| | | RKANSSIFGKGWHNFSVKLMMELIPELYETSEEQMTILTRLGKQKTTSSSN | |
| | | KTKYIDEKLLTEEIYNPVVAKSVRQAIKIVNAAIKEYGDFDNIVIEMARETN | |
| | | EDDEKKAIQKIQKANKDEKDAAMLKAANQYNGKAELPHSVFHGHKQLAT | |
| | | KIRLWHQQGERCLYTGKTISIHDLINNSNQFEVDHILPLSITFDDSLANKVLV | |
| | | YATANQEKGQRTPYQALDSMDDAWSFRELKAFVRESKTLSNKKKEYLLT | |
| | | EEDISKFDVRKKFIERNLVDTRYASRVVLNALQEHFRAHKIDTKVSVVRGQ | |
| | | FTSQLRRHWGIEKTRDTYHHHAVDALIIAASSQLNLWKKQKNTLVSYSED | |
| | | QLLDIETGELISDDEYKESVFKAPYQHFVDTLKSKEFEDSILFSYQVDSKFN | |
| | | RKISDATIYATRQAKVGKDKADETYVLGKIKDIYTQDGYDAFMKIYKKDK | |
| | | SKFLMYRHDPQTFEKVIEPILENYPNKQINEKGKEVPCNPFLKYKEEHGYIR | |
| | | KYSKKGNGPEIKSLKYYDSKLGNHIDITPKDSNNKVVLQSLKPWRTDVYF | |
| | | NKNTGKYEILGLKYSDMQFEKGTGKYSISKEQYENIKVREGVDENSEFKFT | |
| | | LYKNDLLLLKDSENGEQILLRFTSRNDTSKHYVELKPYNRQKFEGSEYLIKS | |
| | | LGTVVKGGRCIKGLGKSNISIYKVRTDVLGNQHIIKNEGDKPKLDF | |

[0584] In some embodiments, the DNA binding domain comprises a Cas domain, e.g., a Cas9 domain. In embodiments, the DNA binding domain comprises a nuclease-active Cas domain, a Cas nickase (nCas) domain, or a nuclease-inactive Cas (dCas) domain. In embodiments, the DNA binding domain comprises a nuclease-active Cas9 domain, a Cas9 nickase (nCas9) domain, or a nuclease-inactive Cas9 (dCas9) domain. In some embodiments, the DNA binding domain comprises a Cas9 domain of Cas9 (e.g., dCas9 and nCas9), Cas12a/Cpf1, Cas12b/C2cl, Cas12c/C2c3, Cas12d/CasY, Cas12e/CasX, Cas12g, Cas12h, or Cas12i. In some embodiments, the DNA binding domain comprises a Cas9 (e.g., dCas9 and nCas9), Cas12a/Cpf1, Cas12b/C2cl, Cas12c/C2c3, Cas12d/CasY, Cas12e/CasX, Cas12g, Cas12h, or Cas12i. In some embodiments, the DNA binding domain comprises an S. pyogenes or an S. thermophilus Cas9, or a functional fragment thereof. In some embodiments, the DNA binding domain comprises a Cas9 sequence, e.g., as described in Chylinski, Rhun, and Charpentier (2013) RNA Biology 10:5, 726-737; incorporated herein by reference. In some embodiments, the DNA binding domain comprises the HNH nuclease subdomain and/or the RuvC1 subdomain of a Cas, e.g., Cas9, e.g., as described herein, or a variant thereof. In some embodiments, the DNA binding domain comprises Cas12a/Cpf1, Cas12b/C2cl, Cas12c/C2c3, Cas12d/CasY, Cas12e/CasX, Cas12g, Cas12h, or Cas12i. In some embodiments, the DNA binding domain comprises a Cas polypeptide (e.g., enzyme), or a functional fragment thereof. In embodiments, the Cas polypeptide (e.g., enzyme) is selected from Cas1, Cas1B, Cas2, Cas3, Cas4, Cas5, Cas5d, Cas5t, Cas5h, Cas5a, Cas6, Cas7, Cas8, Cas8a, Cas8b, Cas8c, Cas9 (e.g., Csn1 or Csx12), Cas10, Cas10d, Cas12a/Cpf1, Cas12b/C2cl, Cas12c/C2c3, Cas12d/CasY, Cas12e/CasX, Cas12g, Cas12h, Cas12i, Csy1, Csy2, Csy3, Csy4, Cse1, Cse2, Cse3, Cse4, Cse5e, Csc1, Csc2, Csa5, Csn1, Csn2, Csm1, Csm2, Csm3, Csm4, Csm5, Csm6, Cmr1, Cmr3, Cmr4, Cmr5, Cmr6, Csb1, Csb2, Csb3, Csx17, Csx14, Csx10, Csx16, CsaX, Csx3, Csx1, Csx1S, Csx11, Csf1, Csf2, CsO, Csf4, Csd1, Csd2, Cst1, Cst2, Csh1, Csh2, Csa1, Csa2, Csa3, Csa4, Csa5, Type II Cas effector proteins, Type V Cas effector proteins, Type VI Cas effector proteins, CARF, DinG, Cpf1, Cas12b/C2cl, Cas12c/C2c3, Cas12b/C2cl, Cas12c/C2c3, SpCas9(K855A), eSpCas9(1.1), SpCas9-HF1, hyper accurate Cas9 variant (HypaCas9), homologues thereof, modified or engineered versions thereof, and/or functional fragments thereof. In embodiments, the Cas9 comprises one or more substitutions, e.g., selected from H840A, D10A, P475A, W476A, N477A, D 1125A, W 1126A, and D 1127A. In embodiments, the Cas9 comprises one or more mutations at positions selected from: D10, G12, G17, E762, H840, N854, N863, H982, H983, A984, D986, and/or A987, e.g., one or more substitutions selected from D10A, G12A, G17A, E762A, H840A, N854A, N863A, H982A, H983A, A984A, and/or D986A. In some embodiments, the DNA binding domain comprises a Cas (e.g., Cas9) sequence from Corynebacterium ulcerans, Corynebacterium diphtheria, Spiroplasma syrphidicola, Prevotella intermedia, Spiroplasma taiwanense, Streptococcus iniae, Belliella baltica, Psychroflexus torquis, Streptococcus thermophilus, Listeria innocua, Campylobacter jejuni, Neisseria meningitidis, Streptococcus pyogenes, or Staphylococcus aureus, or a fragment or variant thereof.

[0585] In some embodiments, the DNA binding domain comprises a Cpf1 domain, e.g., comprising one or more substitutions, e.g., at position D917, E1006A, D1255 or any combination thereof, e.g., selected from D917A, E1006A, D1255A, D917A/E1006A, D917A/D1255A, E1006A/D1255A, and D917A/E1006A/D1255A.

[0586] In some embodiments, the DNA binding domain comprises spCas9, spCas9-VRQR, spCas9-VRER, xCas9 (sp), saCas9, saCas9-KKH, spCas9-MQKSER, spCas9-LRKIQK, or spCas9-LRVSQL.

[0587] In some embodiments, the DNA-binding domain comprises an amino acid sequence as listed in Table 5 below, or an amino acid sequence having at least 80%, 85%, 90%, 95%, 96%, 97%, 98%, or 99% sequence identity thereto. In some embodiments, the DNA-binding domain comprises an amino acid sequence that has no more than 1, 2, 3, 4, 5, 6, 7, 8, 9, 10, 11, 12, 13, 14, 15, 16, 17, 18, 19, 20, 21, 22, 23, 24, 25, 26, 27, 28, 29, 30, 31, 32, 33, 34, 35, 36, 37, 38, 39, 40, 41, 42, 43, 44, 45, 46, 47, 48, 49, or 50 differences (e.g., mutations) relative to any of the amino acid sequences described herein.

TABLE 5
Each of the Reference Sequences are incorporated by reference in their entirety.

| Name | Amino Acid Sequence or Reference Sequence |
|---|---|
| Streptococcus pyogenes Cas9 | |
| Exemplary Linker | SGSETPGTSESATPES |
| Exemplary Linker Motif | (SGGS)ₙ |
| Exemplary Linker Motif | (GGGS)ₙ |
| Exemplary Linker Motif | (GGGGS)ₙ |
| Exemplary Linker Motif | (G)ₙ |
| Exemplary Linker Motif | (EAAAK)ₙ |
| Exemplary Linker Motif | (GGS)ₙ |
| Exemplary Linker Motif | (XP)ₙ |
| Cas9 from Streptococcus | NCBI Reference Sequence: NC_002737.2 and Uniprot Reference |
| pyogenes | Sequence: Q99ZW2 |
| Cas9 from Corynebacterium | NCBI Refs: NC_015683.1, NC_017317.1 |
| ulcerans | |
| Cas9 from Corynebacterium | NCBI Refs: NC_016782.1, NC_016786.1 |
| diphtheria | |
| Cas9 from Spiroplasma | NCBI Ref: NC_021284.1 |
| syrphidicola | |
| Cas9 from Prevotella | NCBI Ref: NC_017861.1 |
| intermedia | |
| Cas9 from Spiroplasma | NCBI Ref: NC_021846.1 |
| taiwanense | |
| Cas9 from Streptococcus iniae | NCBI Ref: NC_021314.1 |
| Cas9 from Belliella baltica | NCBI Ref: NC_018010.1 |
| Cas9 from Psychroflexus | NCBI Ref: NC_018721.1 |
| torquisI | |
| Cas9 from Streptococcus | NCBI Ref: YP_820832.1 |
| thermophilus | |
| Cas9 from Listeria innocua | NCBI Ref: NP_472073.1 |
| Cas9 from Campylobacter | NCBI Ref: YP_002344900.1 |
| jejuni | |
| Cas9 from Neisseria | NCBI Ref: YP_002342100.1 |
| meningitidis | |
| dCas9 (D10A and H840A) | |
| Catalytically inactive Cas9 | |
| (dCas9) | |
| Cas9 nickase (nCas9) | |
| Catalytically active Cas9 | |
| CasY | ((ncbi.nlm.nih.gov/protein/APG80656.1) |
| | >APG80656.1 CRISPR-associated protein CasY [uncultured |
| | Parcubacteria group bacterium]) |
| CasX | uniprot.org/uniprot/F0NN87; uniprot.org/uniprot/F0NH53 |
| CasX | >tr\|F0NH53\|F0NH53_SULIR CRISPR associated protein, |
| | Casx OS = Sulfolobus islandicus (strain REY15A) |
| | GN = SiRe_0771 PE = 4 SV = 1 |
| Deltaproteobacteria CasX | |
| Cas12b/C2c1 | ((uniprot.org/uniprot/T0D7A2#2) sp\|T0D7A2\|C2C1_ALIAG |
| | CRISPR-associated endonuclease C2c1 OS = Alicyclobacillus |
| | acidoterrestris (strain ATCC 49025/DSM 3922/CIP 106132/ |
| | NCIMB 13137/GD3B) GN = c2c1 PE = 1 SV = 1) |
| BhCas12b (Bacillus hisashii) | NCBI Reference Sequence: WP_095142515 |
| BvCas12b (Bacillus sp. V3-13) | NCBI Reference Sequence: WP_101661451.1 |
| Wild-type Francisella novicida | |
| Cpf1 | |
| Francisella novicida Cpf1 | |
| D917A | |
| Francisella novicida Cpf1 | |
| E1006A | |
| Francisella novicida Cpf1 | |
| D1255A | |
| Francisella novicida Cpf1 | |
| D917A/E1006A | |
| Francisella novicida Cpf1 | |
| D917A/D1255A | |
| Francisella novicida Cpf1 | |
| E1006A/D1255A | |
| Francisella novicida Cpf1 | |
| D917A/E1006A | |
| SaCas9 | |
| SaCas9n | |
| PAM-binding SpCas9 | |
| PAM-binding SpCas9n | |
| PAM-binding SpEQR Cas9 | |
| PAM-binding SpVQR Cas9 | |
| PAM-binding SpVRER Cas9 | |
| PAM-binding SpVRQR Cas9 | |
| SpyMacCas9 | |

[0588] In some embodiments, the Cas polypeptide binds a gRNA that directs DNA binding. In some embodiments, the gRNA comprises, e.g., from 5′ to 3′ (1) a gRNA spacer; (2) a gRNA scaffold. In some embodiments:
[0589] (1) Is a Cas9 spacer of ˜18-22 nt, e.g., is 20 nt
[0590] (2) Is a gRNA scaffold comprising one or more hairpin loops, e.g., 1, 2, of 3 loops for associating the template with a nickase Cas9 domain. In some embodiments, the gRNA scaffold carries the sequence, from 5′ to 3′,

GTTTTAGAGCTAGAAATAGCAAGTTAAAATAAGGCTAGTCCGTT
ATCAACTTGAAAAAGTGGGACCGAGTCGGTCC.

[0591] In some embodiments, a Gene Writing system described herein is used to make an edit in HEK293, K562, U2OS, or HeLa cells. In some embodiment, a Gene Writing system is used to make an edit in primary cells, e.g., primary cortical neurons from E18.5 mice.

[0592] In some embodiments, a system or method described herein involves a CRISPR DNA targeting enzyme or system described in US Pat. App. Pub. No. 20200063126, 20190002889, or 20190002875 (each of which is incorporated by reference herein in its entirety) or a functional fragment or variant thereof. For instance, in some embodiments, a GeneWriter polypeptide or Cas endonuclease described herein comprises a polypeptide sequence of any of the applications mentioned in this paragraph, and in some embodiments a guide RNA comprises a nucleic acid sequence of any of the applications mentioned in this paragraph.

[0593] In some embodiments, the DNA binding domain (e.g., a target binding domain or a template binding domain) comprises a meganuclease domain, or a functional fragment thereof. In some embodiments, the meganuclease domain possesses endonuclease activity, e.g., double-strand cleavage and/or nickase activity. In other embodiments, the meganuclease domain has reduced activity, e.g., lacks endonuclease activity, e.g., the meganuclease is catalytically inactive. In some embodiments, a catalytically inactive meganuclease is used as a DNA binding domain, e.g., as described in Fonfara et al. Nucleic Acids Res 40(2):847-860 (2012), incorporated herein by reference in its entirety. In embodiments, the DNA binding domain comprises one or more modifications relative to a wild-type DNA binding domain, e.g., a modification via directed evolution, e.g., phage-assisted continuous evolution (PACE).

### Inteins

[0594] In some embodiments, as described in more detail below, Intein-N may be fused to the N-terminal portion of a polypeptide (e.g., a Gene Writer polypeptide) described herein, e.g., at a first domain. In embodiments, intein-C may be fused to the C-terminal portion of the polypeptide described herein (e.g., at a second domain), e.g., for the joining of the N-terminal portion to the C-terminal portion, thereby joining the first and second domains. In some embodiments, the first and second domains are each independently chosen from a DNA binding domain and a catalytic domain, e.g., a recombinase domain. In some embodiments, a single domain is split using the intein strategy described herein, e.g., a DNA binding domain, e.g., a dCas9 domain.

[0595] In some embodiments, a system or method described herein involves an intein that is a self-splicing protein intron (e.g., peptide), e.g., which ligates flanking N-terminal and C-terminal exteins (e.g., fragments to be joined). An intein may, in some instances, comprise a fragment of a protein that is able to excise itself and join the remaining fragments (the exteins) with a peptide bond in a process known as protein splicing. Inteins are also referred to as “protein inons.” The process of an intein excising itself and joining the remaining portions of the protein is herein termed “protein splicing” or “intein-mediated protein splicing.” In some embodiments, an intein of a precursor protein (an intein containing protein prior to intein-mediated protein splicing) comes from two genes. Such intein is referred to herein as a split intein (e.g., split intein-N and split intein-C). For example, in cyanobacteria, DnaE, the catalytic subunit a of DNA polymerase III, is encoded by two separate genes, dnaE-n and dnaE-c. The intein encoded by the dnaE-n gene may be herein referred as “intein-N.” The intein encoded by the dnaE-c gene may be herein referred as “intein-C.”

[0596] Use of inteins for joining heterologous protein fragments is described, for example, in Wood et al., J. Biol. Chem.289(21); 14512-9 (2014) (incorporated herein by reference in its entirety). For example, when fused to separate protein fragments, the inteins IntN and IntC may recognize each other, splice themselves out, and/or simultaneously ligate the flanking N- and C-terminal exteins of the protein fragments to which they were fused, thereby reconstituting a full-length protein from the two protein fragments.

[0597] In some embodiments, a synthetic intein based on the dnaE intein, the Cfa-N(e.g., split intein-N) and Cfa-C(e.g., split intein-C) intein pair, is used. Examples of such inteins have been described, e.g., in Stevens et al., J Am Chem Soc. 2016 Feb. 24; 138(7):2162-5 (incorporated herein by reference in its entirety). Non-limiting examples of intein pairs that may be used in accordance with the present disclosure include: Cfa DnaE intein, Ssp GyrB intein, Ssp DnaX intein, Ter DnaE3 intein, Ter ThyX intein, Rma DnaB intein and Cne Prp8 intein (e.g., as described in U.S. Pat. No. 8,394,604, incorporated herein by reference.

[0598] In some embodiments, Intein-N and intein-C may be fused to the N-terminal portion of the split Cas9 and the C-terminal portion of a split Cas9, respectively, for the joining of the N-terminal portion of the split Cas9 and the C-terminal portion of the split Cas9. For example, in some embodiments, an intein-N is fused to the C-terminus of the N-terminal portion of the split Cas9, i.e., to form a structure of N [N-terminal portion of the split Cas9]-[intein-N]˜C. In some embodiments, an intein-C is fused to the N-terminus of the C-terminal portion of the split Cas9, i.e., to form a structure of N-[intein-C]˜[C-terminal portion of the split Cas9]-C. The mechanism of intein-mediated protein splicing for joining the proteins the inteins are fused to (e.g., split Cas9) is described in Shah et al., Chem Sci. 2014; 5(1):446-461, incorporated herein by reference. Methods for designing and using inteins are known in the art and described, for example by WO2020051561, WO2014004336, WO2017132580, US20150344549, and US20180127780, each of which is incorporated herein by reference in their entirety.

[0599] In some embodiments, a split refers to a division into two or more fragments. In some embodiments, a split Cas9 protein or split Cas9 comprises a Cas9 protein that is provided as an N-terminal fragment and a C-terminal fragment encoded by two separate nucleotide sequences. The polypeptides corresponding to the N-terminal portion and the C-terminal portion of the Cas9 protein may be spliced to form a reconstituted Cas9 protein. In embodiments, the Cas9 protein is divided into two fragments within a disordered region of the protein, e.g., as described in Nishimasu et al., Cell, Volume 156, Issue 5, pp. 935-949, 2014, or as described in Jiang et al. (2016) Science 351: 867-871 and PDB file: 5F9R (each of which is incorporated herein by reference in its entirety). A disordered region may be determined by one or more protein structure determination techniques known in the art, including, without limitation, X-ray crystallography, NMR spectroscopy, electron microscopy (e.g., cryoEM), and/or in silico protein modeling. In some embodiments, the protein is divided into two fragments at any C, T, A, or S, e.g., within a region of SpCas9 between amino acids A292-G364, F445-K483, or E565-T637, or at corresponding positions in any other Cas9, Cas9 variant (e.g., nCas9, dCas9), or other napDNAbp. In some embodiments, protein is divided into two fragments at SpCas9 T310, T313, A456, S469, or C574. In some embodiments, the process of dividing the protein into two fragments is referred to as splitting the protein.

[0600] In some embodiments, a protein fragment ranges from about 2-1000 amino acids (e.g., between 2-10, 10-50, 50-100, 100-200, 200-300, 300-400, 400-500, 500-600, 600-700, 700-800, 800-900, or 900-1000 amino acids) in length. In some embodiments, a protein fragment ranges from about 5-500 amino acids (e.g., between 5-10, 10-50, 50-100, 100-200, 200-300, 300-400, or 400-500 amino acids) in length. In some embodiments, a protein fragment ranges from about 20-200 amino acids (e.g., between 20-30, 30-40, 40-50, 50-100, or 100-200 amino acids) in length.

[0601] In some embodiments, a portion or fragment of a Gene Writer polypeptide, e.g., as described herein, is fused to an intein. The nuclease can be fused to the N-terminus or the C-terminus of the intein. In some embodiments, a portion or fragment of a fusion protein is fused to an intein and fused to an AAV capsid protein. The intein, nuclease and capsid protein can be fused together in any arrangement (e.g., nuclease-intein-capsid, intein-nuclease-capsid, capsid-intein-nuclease, etc.). In some embodiments, the N-terminus of an intein is fused to the C-terminus of a fusion protein and the C-terminus of the intein is fused to the N-terminus of an AAV capsid protein.

[0602] In some embodiments, a Gene Writer polypeptide (e.g., comprising a nickase Cas9 domain) is fused to intein-N and a polypeptide comprising a polymerase domain is fused to an intein-C.

[0603] Exemplary nucleotide and amino acid sequences of interns are provided below:

DnaE Intein-N DNA:
TGCCTGTCATACGAAACCGAGATACTGACAGTAGAATATGGCCT
TCTGCCAATCGGGAAGATTGTGGAGAAACGGATAGAATGCACAG
TTTACTCTGTCGATAACAATGGTAACATTTATACTCAGCCAGTT
GCCCAGTGGCACGACCGGGGAGAGCAGGAAGTATTCGAATACTG
TCTGGAGGATGGAAGTCTCATTAGGGCCACTAAGGACCACAAAT
TTATGACAGTCGATGGCCAGATGCTGCCTATAGACGAAATCTTT
GAGCGAGAGTTGGACCTCATGCGAGTTGACAACCTTCCTAAT
DnaE Intein-N Protein:
CLSYETEILTVEYGLLPIGKIVEKRIECTVYSVDNNGNIYTQPV
AQWHDRGEQEVFEYCLEDGSLIRATKDHKFMTVDGQMLPIDEIF
ERELDLMRVDNLPN
DnaE Intein-C DNA:
ATGATCAAGATAGCTACAAGGAAGTATCTTGGCAAACAAAACGT
TTATGATATTGGAGTCGAAAGAGATCACAACTTTGCTCTGAAGA
ACGGATTCATAGCTTCTAAT
Intein-C:
MIKIATRKYLGKQNVYDIGVERDHNFALKNGFIASN
Cfa-N DNA:
TGCCTGTCTTATGATACCGAGATACTTACCGTTGAATATGGCTT
CTTGCCTATTGGAAAGATTGTCGAAGAGAGAATTGAATGCACAG
TATATACTGTAGACAAGAATGGTTTCGTTTACACACAGCCCATT
GCTCAATGGCACAATCGCGGCGAACAAGAAGTATTTGAGTACTG
TCTCGAGGATGGAAGCATCATACGAGCAACTAAAGATCATAAAT
TCATGACCACTGACGGGCAGATGTTGCCAATAGATGAGATATTC
GAGCGGGGCTTGGATCTCAAACAAGTGGATGGATTG CCA
Cfa-N Protein:
CLSYDTEILTVEYGFLPIGKIVEERIECTVYTVDKNGFVYTQPI
AQWHNRGEQEVFEYCLEDGSIIRATKDHKFMTTDGQMLPIDEIF
ERGLDLKQVDGLP
Cfa-C DNA:
ATGAAGAGGACTGCCGATGGATCAGAGTTTGAATCTCCCAAGAA
GAAGAGGAAAGTAAAGATAATATCTCGAAAAAGTCTTGGTACCC
AAAATGTCTATGATATTGGAGTGGAGAAAGATCACAACTTCCTT
CTCAAGAACGGTCTCGTAGCCAGCAAC
Cfa-C Protein:
MKRTADGSEFESPKKKRKVKIISRKSLGTQNVYDIGVEKDHNFL
LKNGLVASN

### Genomic Safe Harbor Sites

[0604] In some embodiments, a Gene Writer targets a genomic safe harbor site (e.g., directs insertion of a heterologous object sequence into a position having a safe harbor score of at least 3, 4, 5, 6, 7, or 8). In some embodiments the genomic safe harbor site is a Natural Harbor™ site. In some embodiments, a Natural Harbor™ site is derived from the native target of a mobile genetic element, e.g., a recombinase, transposon, or retrovirus. The native targets of mobile elements may serve as ideal locations for genomic integration given their evolutionary selection. In some embodiments the Natural Harbor™ site is ribosomal DNA (rDNA). In some embodiments the Natural Harbor™ site is 5S rDNA, 18S rDNA, 5.8S rDNA, or 28S rDNA. In some embodiments the Natural Harbor™ site is the Mutsu site in 5S rDNA. In some embodiments the Natural Harbor™ site is the R2 site, the R5 site, the R6 site, the R4 site, the R1 site, the R9 site, or the RT site in 28S rDNA. In some embodiments the Natural Harbor™ site is the R8 site or the R7 site in 18S rDNA. In some embodiments the Natural Harbor™ site is DNA encoding transfer RNA (tRNA). In some embodiments the Natural Harbor™ site is DNA encoding tRNA-Asp or tRNA-Glu. In some embodiments the Natural Harbor™ site is DNA encoding spliceosomal RNA. In some embodiments the Natural Harbor™ site is DNA encoding small nuclear RNA (snRNA) such as U2 snRNA.

[0605] Thus, in some aspects, the present disclosure provides a method comprising comprises using a GeneWriter system described herein to insert a heterologous object sequence into a Natural Harbor™ site. In some embodiments, the Natural Harbor™ site is a site described in Table 6 below. In some embodiments, the heterologous object sequence is inserted within 20, 50, 100, 150, 200, 250, 500, or 1000 base pairs of the Natural Harbor™ site. In some embodiments, the heterologous object sequence is inserted within 0.1 kb, 0.25 kb, 0.5 kb, 0.75, kb, 1 kb, 2 kb, 3 kb, 4 kb, 5 kb, 7.5 kb, 10 kb, 15 kb, 20 kb, 25 kb, 50, 75 kb, or 100 kb of the Natural Harbor™ site. In some embodiments, the heterologous object sequence is inserted into a site having at least 70%, 75%, 80%, 85%, 90%, 95%, 96%, 97%, 98%, or 99% identity to a sequence shown in Table 6. In some embodiments, the heterologous object sequence is inserted within 20, 50, 100, 150, 200, 250, 500, or 1000 base pairs, or within 0.1 kb, 0.25 kb, 0.5 kb, 0.75, kb, 1 kb, 2 kb, 3 kb, 4 kb, 5 kb, 7.5 kb, 10 kb, 15 kb, 20 kb, 25 kb, 50, 75 kb, or 100 kb, of a site having at least 70%, 75%, 80%, 85%, 90%, 95%, 96%, 97%, 98%, or 99% identity to a sequence shown in Table 6. In some embodiments, the heterologous object sequence is inserted within a gene indicated in Column 5 of Table 6, or within 20, 50, 100, 150, 200, 250, 500, or 1000 base pairs, or within 0.1 kb, 0.25 kb, 0.5 kb, 0.75, kb, 1 kb, 2 kb, 3 kb, 4 kb, 5 kb, 7.5 kb, 10 kb, 15 kb, 20 kb, 25 kb, 50, 75 kb, or 100 kb, of the gene.

TABLE 6
Natural Harbor™ sites. Column 1 indicates a retrotransposon
that inserts into the Natural Harbor™ site. Column 2 indicates
the gene at the Natural Harbor™ site. Columns 3 and 4 show
exemplary human genome sequence 5′ and 3′ of the insertion
site (for example, 250 bp). Columns 5 and 6 list the example
gene symbol and corresponding Gene ID.

| | | | | Example | |
|---|---|---|---|---|---|
| Target | Target | 5′ flanking | 3′ flanking | Gene | Example |
| Site | Gene | sequence | sequence | Symbol | Gene ID |
| R2 | 28S | CCGGTCCCCCCCGCC | GTAGCCAAATGCCTC | RNA28SN1 | 106632264 |
| | rDNA | GGGTCCGCCCCCGGG | GTCATCTAATTAGTG | | |
| | | GCCGCGGTTCCGCGC | ACGCGCATGAATGGA | | |
| | | GGCGCCTCGCCTCGG | TGAACGAGATTCCCA | | |
| | | CCGGCGCCTAGCAGC | CTGTCCCTACCTACTA | | |
| | | CGACTTAGAACTGGT | TCCAGCGAAACCACA | | |
| | | GCGGACCAGGGGAAT | GCCAAGGGAACGGGC | | |
| | | CCGACTGTTTAATTA | TTGGCGGAATCAGCG | | |
| | | AAACAAAGCATCGCG | GGGAAAGAAGACCCT | | |
| | | AAGGCCCGCGGCGGG | GTTGAGCTTGACTCT | | |
| | | TGTTGACGCGATGTG | AGTCTGGCACGGTGA | | |
| | | ATTTCTGCCCAGTGCT | AGAGACATGAGAGGT | | |
| | | CTGAATGTCAAAGTG | GTAGAATAAGTGGGA | | |
| | | AAGAAATTCAATGAA | GGCCCCCGGCGCCCC | | |
| | | GCGCGGGTAAACGGC | CCCGGTGTCCCCGCG | | |
| | | GGGAGTAACTATGAC | AGGGGCCCGGGGCGG | | |
| | | TCTCTTAAG (SEQ ID | GGTCCGCCG (SEQ ID | | |
| | | NO: 3453) | NO: 3464) | | |
| R4 | 28S | GCGGTTCCGCGCGGC | CGCATGAATGGATGA | RNA28SN1 | 106632264 |
| | rDNA | GCCTCGCCTCGGCCG | ACGAGATTCCCACTG | | |
| | | GCGCCTAGCAGCCGA | TCCCTACCTACTATCC | | |
| | | CTTAGAACTGGTGCG | AGCGAAACCACAGCC | | |
| | | GACCAGGGGAATCCG | AAGGGAACGGGCTTG | | |
| | | ACTGTTTAATTAAAA | GCGGAATCAGCGGGG | | |
| | | CAAAGCATCGCGAAG | AAAGAAGACCCTGTT | | |
| | | GCCCGCGGCGGGTGT | GAGCTTGACTCTAGT | | |
| | | TGACGCGATGTGATT | CTGGCACGGTGAAGA | | |
| | | TCTGCCCAGTGCTCTG | GACATGAGAGGTGTA | | |
| | | AATGTCAAAGTGAAG | GAATAAGTGGGAGGC | | |
| | | AAATTCAATGAAGCG | CCCCGGCGCCCCCCC | | |
| | | CGGGTAAACGGCGGG | GGTGTCCCCGCGAGG | | |
| | | AGTAACTATGACTCT | GGCCCGGGGCGGGGT | | |
| | | CTTAAGGTAGCCAAA | CCGCCGGCCCTGCGG | | |
| | | TGCCTCGTCATCTAAT | GCCGCCGGTGAAATA | | |
| | | TAGTGACG (SEQ ID | CCACTACTC (SEQ ID | | |
| | | NO: 3454) | NO: 3465) | | |
| R5 | 28S | TCCCCCCCGCCGGGT | CCAAATGCCTCGTCA | RNA28SN1 | 106632264 |
| | rDNA | CCGCCCCCGGGGCCG | TCTAATTAGTGACGC | | |
| | | CGGTTCCGCGCGGCG | GCATGAATGGATGAA | | |
| | | CCTCGCCTCGGCCGG | CGAGATTCCCACTGT | | |
| | | CGCCTAGCAGCCGAC | CCCTACCTACTATCCA | | |
| | | TTAGAACTGGTGCGG | GCGAAACCACAGCCA | | |
| | | ACCAGGGGAATCCGA | AGGGAACGGGCTTGG | | |
| | | CTGTTTAATTAAAAC | CGGAATCAGCGGGGA | | |
| | | AAAGCATCGCGAAGG | AAGAAGACCCTGTTG | | |
| | | CCCGCGGCGGGTGTT | AGCTTGACTCTAGTCT | | |
| | | GACGCGATGTGATTT | GGCACGGTGAAGAGA | | |
| | | CTGCCCAGTGCTCTG | CATGAGAGGTGTAGA | | |
| | | AATGTCAAAGTGAAG | ATAAGTGGGAGGCCC | | |
| | | AAATTCAATGAAGCG | CCGGCGCCCCCCCGG | | |
| | | CGGGTAAACGGCGGG | TGTCCCCGCGAGGGG | | |
| | | AGTAACTATGACTCT | CCCGGGGCGGGGTCC | | |
| | | CTTAAGGTAG (SEQ ID | GCCGGCCC (SEQ ID | | |
| | | NO: 3455) | NO: 3466) | | |
| R9 | 28S | CGGCGCGCTCGCCGG | TAGCTGGTTCCCTCCG | RNA28SN1 | 106632264 |
| | rDNA | CCGAGGTGGGATCCC | AAGTTTCCCTCAGGA | | |
| | | GAGGCCTCTCCAGTC | TAGCTGGCGCTCTCG | | |
| | | CGCCGAGGGCGCACC | CAGACCCGACGCACC | | |
| | | ACCGGCCCGTCTCGC | CCCGCCACGCAGTTT | | |
| | | CCGCCGCGCCGGGGA | TATCCGGTAAAGCGA | | |
| | | GGTGGAGCACGAGCG | ATGATTAGAGGTCTT | | |
| | | CACGTGTTAGGACCC | GGGGCCGAAACGATC | | |
| | | GAAAGATGGTGAACT | TCAACCTATTCTCAA | | |
| | | ATGCCTGGGCAGGGC | ACTTTAAATGGGTAA | | |
| | | GAAGCCAGAGGAAAC | GAAGCCCGGCTCGCT | | |
| | | TCTGGTGGAGGTCCG | GGCGTGGAGCCGGGC | | |
| | | TAGCGGTCCTGACGT | GTGGAATGCGAGTGC | | |
| | | GCAAATCGGTCGTCC | CTAGTGGGCCACTTTT | | |
| | | GACCTGGGTATAGGG | GGTAAGCAGAACTGG | | |
| | | GCGAAAGACTAATCG | CGCTGCGGGATGAAC | | |
| | | AACCATCTAG (SEQ ID | CGAACGCC (SEQ ID | | |
| | | NO: 3456) | NO: 3467) | | |
| R8 | 18S | GCATTCGTATTGCGC | TGAAACTTAAAGGAA | RNA18SN1 | 106631781 |
| | rDNA | CGCTAGAGGTGAAAT | TTGACGGAAGGGCAC | | |
| | | TCTTGGACCGGCGCA | CACCAGGAGTGGAGC | | |
| | | AGACGGACCAGAGCG | CTGCGGCTTAATTTG | | |
| | | AAAGCATTTGCCAAG | ACTCAACACGGGAAA | | |
| | | AATGTTTTCATTAATC | CCTCACCCGGCCCGG | | |
| | | AAGAACGAAAGTCGG | ACACGGACAGGATTG | | |
| | | AGGTTCGAAGACGAT | ACAGATTGATAGCTC | | |
| | | CAGATACCGTCGTAG | TTTCTCGATTCCGTGG | | |
| | | TTCCGACCATAAACG | GTGGTGGTGCATGGC | | |
| | | ATGCCGACCGGCGAT | CGTTCTTAGTTGGTGG | | |
| | | GCGGCGGCGTTATTC | AGCGATTTGTCTGGTT | | |
| | | CCATGACCCGCCGGG | AATTCCGATAACGAA | | |
| | | CAGCTTCCGGGAAAC | CGAGACTCTGGCATG | | |
| | | CAAAGTCTTTGGGTT | CTAACTAGTTACGCG | | |
| | | CCGGGGGGAGTATGG | ACCCCCGAGCGGTCG | | |
| | | TTGCAAAGC (SEQ ID | GCGTCCC (SEQ ID NO: | | |
| | | NO: 3457) | 3468) | | |
| R4- | tRNA- | | | TRD- | 100189207 |
| 2_SRa | Asp | | | GTC1-1 | |
| LIN25_ | tRNA- | | | TRE- | 100189384 |
| SM | Glu | | | CTC1-1 | |
| R1 | 28S | TAGCAGCCGACTTAG | ACCTACTATCCAGCG | RNA28SN1 | 106632264 |
| | rDNA | AACTGGTGCGGACCA | AAACCACAGCCAAGG | | |
| | | GGGGAATCCGACTGT | GAACGGGCTTGGCGG | | |
| | | TTAATTAAAACAAAG | AATCAGCGGGGAAAG | | |
| | | CATCGCGAAGGCCCG | AAGACCCTGTTGAGC | | |
| | | CGGCGGGTGTTGACG | TTGACTCTAGTCTGGC | | |
| | | CGATGTGATTTCTGCC | ACGGTGAAGAGACAT | | |
| | | CAGTGCTCTGAATGT | GAGAGGTGTAGAATA | | |
| | | CAAAGTGAAGAAATT | AGTGGGAGGCCCCCG | | |
| | | CAATGAAGCGCGGGT | GCGCCCCCCCGGTGT | | |
| | | AAACGGCGGGAGTAA | CCCCGCGAGGGGCCC | | |
| | | CTATGACTCTCTTAAG | GGGGCGGGGTCCGCC | | |
| | | GTAGCCAAATGCCTC | GGCCCTGCGGGCCGC | | |
| | | GTCATCTAATTAGTG | CGGTGAAATACCACT | | |
| | | ACGCGCATGAATGGA | ACTCTGATCGTTTTTT | | |
| | | TGAACGAGATTCCCA | CACTGACCCGGTGAG | | |
| | | CTGTCCCT (SEQ ID | GCGGGGGG (SEQ ID | | |
| | | NO: 3458) | NO: 3469) | | |
| R6 | 28S | CCCCCCGCCGGGTCC | AAATGCCTCGTCATC | RNA28SN1 | 106632264 |
| | rDNA | GCCCCCGGGGCCGCG | TAATTAGTGACGCGC | | |
| | | GTTCCGCGCGGCGCC | ATGAATGGATGAACG | | |
| | | TCGCCTCGGCCGGCG | AGATTCCCACTGTCC | | |
| | | CCTAGCAGCCGACTT | CTACCTACTATCCAG | | |
| | | AGAACTGGTGCGGAC | CGAAACCACAGCCAA | | |
| | | CAGGGGAATCCGACT | GGGAACGGGCTTGGC | | |
| | | GTTTAATTAAAACAA | GGAATCAGCGGGGAA | | |
| | | AGCATCGCGAAGGCC | AGAAGACCCTGTTGA | | |
| | | CGCGGCGGGTGTTGA | GCTTGACTCTAGTCTG | | |
| | | CGCGATGTGATTTCT | GCACGGTGAAGAGAC | | |
| | | GCCCAGTGCTCTGAA | ATGAGAGGTGTAGAA | | |
| | | TGTCAAAGTGAAGAA | TAAGTGGGAGGCCCC | | |
| | | ATTCAATGAAGCGCG | CGGCGCCCCCCCGGT | | |
| | | GGTAAACGGCGGGAG | GTCCCCGCGAGGGGC | | |
| | | TAACTATGACTCTCTT | CCGGGGCGGGGTCCG | | |
| | | AAGGTAGCC (SEQ ID | CCGGCCCTG (SEQ ID | | |
| | | NO: 3459) | NO: 3470) | | |
| R7 | 18S | GCGCAAGACGGACCA | GGAGCCTGCGGCTTA | RNA18SN1 | 106631781 |
| | rDNA | GAGCGAAAGCATTTG | ATTTGACTCAACACG | | |
| | | CCAAGAATGTTTTCA | GGAAACCTCACCCGG | | |
| | | TTAATCAAGAACGAA | CCCGGACACGGACAG | | |
| | | AGTCGGAGGTTCGAA | GATTGACAGATTGAT | | |
| | | GACGATCAGATACCG | AGCTCTTTCTCGATTC | | |
| | | TCGTAGTTCCGACCA | CGTGGGTGGTGGTGC | | |
| | | TAAACGATGCCGACC | ATGGCCGTTCTTAGTT | | |
| | | GGCGATGCGGCGGCG | GGTGGAGCGATTTGT | | |
| | | TTATTCCCATGACCCG | CTGGTTAATTCCGAT | | |
| | | CCGGGCAGCTTCCGG | AACGAACGAGACTCT | | |
| | | GAAACCAAAGTCTTT | GGCATGCTAACTAGT | | |
| | | GGGTTCCGGGGGGAG | TACGCGACCCCCGAG | | |
| | | TATGGTTGCAAAGCT | CGGTCGGCGTCCCCC | | |
| | | GAAACTTAAAGGAAT | AACTTCTTAGAGGGA | | |
| | | TGACGGAAGGGCACC | CAAGTGGCGTTCAGC | | |
| | | ACCAGGAGT (SEQ ID | CACCCGAG (SEQ ID | | |
| | | NO: 3460) | NO: 3471) | | |
| RT | 28S | GGCCGGGCGCGACCC | AACTGGCTTGTGGCG | RNA28SN1 | 106632264 |
| | rDNA | GCTCCGGGGACAGTG | GCCAAGCGTTCATAG | | |
| | | CCAGGTGGGGAGTTT | CGACGTCGCTTTTTGA | | |
| | | GACTGGGGCGGTACA | TCCTTCGATGTCGGCT | | |
| | | CCTGTCAAACGGTAA | CTTCCTATCATTGTGA | | |
| | | CGCAGGTGTCCTAAG | AGCAGAATTCACCAA | | |
| | | GCGAGCTCAGGGAGG | GCGTTGGATTGTTCA | | |
| | | ACAGAAACCTCCCGT | CCCACTAATAGGGAA | | |
| | | GGAGCAGAAGGGCA | CGTGAGCTGGGTTTA | | |
| | | AAAGCTCGCTTGATC | GACCGTCGTGAGACA | | |
| | | TTGATTTTCAGTACGA | GGTTAGTTTTACCCTA | | |
| | | ATACAGACCGTGAAA | CTGATGATGTGTTGTT | | |
| | | GCGGGGCCTCACGAT | GCCATGGTAATCCTG | | |
| | | CCTTCTGACCTTTTGG | CTCAGTACGAGAGGA | | |
| | | GTTTTAAGCAGGAGG | ACCGCAGGTTCAGAC | | |
| | | TGTCAGAAAAGTTAC | ATTTGGTGTATGTGCT | | |
| | | CACAGGGAT (SEQ ID | TGGC (SEQ ID NO: | | |
| | | NO: 3461) | 3472) | | |
| Mutsu | 5S rDNA | GTCTACGGCCATACC | TGAACGCGCCCGATC | RNA5S1 | 100169751 |
| | | ACCC (SEQ ID NO: | TCGTCTGATCTCGGA | | |
| | | 3462) | AGCTAAGCAGGGTCG | | |
| | | | GGCCTGGTTAGTACT | | |
| | | | TGGATGGGAGACCGC | | |
| | | | CTGGGAATACCGGGT | | |
| | | | GCTGTAGGCTTT (SEQ | | |
| | | | ID NO: 3473) | | |
| Utopia/ | U2 | ATCGCTTCTCGGCCTT | TCTGTTCTTATCAGTT | RNU2-1 | 6066 |
| Keno | snRNA | TTGGCTAAGATCAAG | TAATATCTGATACGT | | |
| | | TGTAGTA (SEQ ID NO: | CCTCTATCCGAGGAC | | |
| | | 3463) | AATATATTAAATGGA | | |
| | | | TTTTTGGAGCAGGGA | | |
| | | | GATGGAATAGGAGCT | | |
| | | | TGCTCCGTCCACTCCA | | |
| | | | CGCATCGACCTGGTA | | |
| | | | TTGCAGTACCTCCAG | | |
| | | | GAACGGTGCACCC | | |
| | | | (SEQ ID NO: 3474) | | |

### Additional Functional Characteristics for Gene Writers™

[0606] A Gene Writer as described herein may, in some instances, be characterized by one or more functional measurements or characteristics. In some embodiments, the DNA binding domain (e.g., target binding domain) has one or more of the functional characteristics described below. In some embodiments, the template binding domain has one or more of the functional characteristics described below. In some embodiments, the template (e.g., template DNA) has one or more of the functional characteristics described below. In some embodiments, the target site altered by the Gene Writer has one or more of the functional characteristics described below following alteration by the Gene Writer.

### Gene Writer Polypeptide

### DNA Binding Domain

[0607] In some embodiments, the DNA binding domain is capable of binding to a target sequence (e.g., a dsDNA target sequence) with greater affinity than a reference DNA binding domain. In some embodiments, the reference DNA binding domain is a DNA binding domain from phiC31 recombinase from the Streptomyces bacteriophage phiC31. In some embodiments, the DNA binding domain is capable of binding to a target sequence (e.g., a dsDNA target sequence) with an affinity between 100 pM-10 nM (e.g., between 100 pM-1 nM or 1 nM-10 nM).

[0608] In some embodiments, the affinity of a DNA binding domain for its target sequence (e.g., dsDNA target sequence) is measured in vitro, e.g., by thermophoresis, e.g., as described in Asmari et al. Methods 146:107-119 (2018) (incorporated by reference herein in its entirety).

[0609] In embodiments, the DNA binding domain is capable of binding to its target sequence (e.g., dsDNA target sequence), e.g, with an affinity between 100 pM-10 nM (e.g., between 100 pM-1 nM or 1 nM-10 nM) in the presence of a molar excess of scrambled sequence competitor dsDNA, e.g., of about 100-fold molar excess.

[0610] In some embodiments, the DNA binding domain is found associated with its target sequence (e.g., dsDNA target sequence) more frequently than any other sequence in the genome of a target cell, e.g., human target cell, e.g., as measured by ChIP-seq (e.g., in HEK293T cells), e.g., as described in He and Pu (2010) Curr. Protoc Mol Biol Chapter 21 (incorporated herein by reference in its entirety). In some embodiments, the DNA binding domain is found associated with its target sequence (e.g., dsDNA target sequence) at least about 5-fold or 10-fold, more frequently than any other sequence in the genome of a target cell, e.g., as measured by ChIP-seq (e.g., in HEK293T cells), e.g., as described in He and Pu (2010), supra.

### Template Binding Domain

[0611] In some embodiments, the template binding domain is capable of binding to a template DNA with greater affinity than a reference DNA binding domain. In some embodiments, the reference DNA binding domain is a DNA binding domain from phiC31 recombinase from the Streptomyces bacteriophage phiC31. In some embodiments, the template binding domain is capable of binding to a template DNA with an affinity between 100 pM-10 nM (e.g., between 100 pM-1 nM or 1 nM-10 nM). In some embodiments, the affinity of a DNA binding domain for its template DNA is measured in vitro, e.g., by thermophoresis, e.g., as described in Asmari et al. Methods 146:107-119 (2018) (incorporated by reference herein in its entirety). In some embodiments, the affinity of a DNA binding domain for its template DNA is measured in cells (e.g., by FRET or ChIP-Seq).

[0612] In some embodiments, the DNA binding domain is associated with the template DNA in vitro with at least 50% template DNA bound in the presence of 10 nM competitor DNA, e.g., as described in Yant et al. Mol Cell Biol 24(20):9239-9247 (2004) (incorporated by reference herein in its entirety). In some embodiments, the DNA binding domain is associated with the template DNA in cells (e.g., in HEK293T cells) at a frequency at least about 5-fold or 10-fold higher than with a scrambled DNA. In some embodiments, the frequency of association between the DNA binding domain and the template DNA or scrambled DNA is measured by ChIP-seq, e.g., as described in He and Pu (2010), supra.

### Target Site

[0613] In some embodiments, after Gene Writing, the target site surrounding the integrated sequence contains a limited number of insertions or deletions, for example, in less than about 50% or 10% of integration events, e.g., as determined by long-read amplicon sequencing of the target site, e.g., as described in Karst et al. Nature Methods 18:165-169 (2021) (incorporated by reference herein in its entirety). For example, indels have been observed after the integration of insert DNA into human genome pseudosites by phiC31 integrase, as described in Thyagarajan et al Mol Cell Biol 21(12):3926-3934 (2001), the teachings of which are incorporated herein by reference in its entirety. In some embodiments, a Gene Writing system of this invention may result in a genomic modification (e.g., an insertion or deletion) at the target site (e.g., the site of insert DNA integration, e.g., adjacent to the integration of the insert DNA) comprising less than nt, e.g., less than 20, 19, 18, 17, 16, 15, 14, 13, 12, 11, 10, 9, 8, 7, 6, 5, 4, 3, 2, or less than 1 nt of DNA. In some embodiments, a Gene Writing system of this invention may result in an insertion at the target site (e.g., the site of insert DNA integration, e.g., adjacent to the integration of the insert DNA) comprising less than 20 nucleotides or base pairs, e.g., less than 20, 19, 18, 17, 16, 15, 14, 13, 12, 11, 10, 9, 8, 7, 6, 5, 4, 3, 2, or less than 1 nucleotides or base pairs of DNA. In some embodiments, a Gene Writing system of this invention may result in a deletion at the target site (e.g., the site of insert DNA integration, e.g., adjacent to the integration of the insert DNA) comprising less than 20 nucleotides or base pairs, e.g., less than 20, 19, 18, 17, 16, 15, 14, 13, 12, 11, 10, 9, 8, 7, 6, 5, 4, 3, 2, or less than 1 nucleotide or base pair of genomic DNA. In some embodiments, the fraction of insertion or deletion events is lower when a core region, e.g., a central dinucleotide, of a recognition sequence at a target site, e.g., an attB, attP, or pseudosite thereof, comprises 100% identity to a core region, e.g., a central dinucleotide, of a recognition sequence, e.g., an attP or attB site, on the insert DNA. In some embodiments, the fraction of unintended insertion or deletion events is lower, e.g., at least 1.1, 1.2, 1.3, 1.4, 1.5, 1.6, 1.7, 1.8, 1.9, 2.0, 3.0, 4.0, 5.0, 10, 20, 30, 40, 50, 60, 70, 80, 90, or at least 100-fold lower at targeted genomic sites when the central dinucleotide of the recognition sequence at the target site is identical to the central dinucleotide of the recognition sequence in the insert DNA.

[0614] In some embodiments, the target site does not show multiple insertion events, e.g., head-to-tail or head-to-head duplications, e.g., as determined by long-read amplicon sequencing of the target site, e.g., as described in Karst et al. (2021), supra, or by molecular combing (Example 29). In some embodiments, the target site shows less than 100 insert copies at the target site, e.g., 75 insert copies, 50 insert copies, 45 insert copies, 40 insert copies, 35 insert copies, 30 insert copies, 25 insert copies, 20 insert copies, 15 insert copies, 14 insert copies, 13 insert copies, 12 insert copies, 11 insert copies, 10 insert copies, 9 insert copies, 8 insert copies, 7 insert copies, 6 insert copies, 5 insert copies, 4 insert copies, 3 insert copies, 2 insert copies, or a single insert copy. In some embodiments, target sites showing more than one copy of the insert sequence are present in less than 95% of target sites containing inserts, e.g., in less than 90%, 80%, 70%, 60%, 50%, 40%, 30%, 20%1, 0%, 9%, 8%, 7%, 6%, 4%, 4%, 3%, 2% or less than 1% of target sites containing inserts, e.g., as determined by long-read amplicon sequencing of the target site, e.g., as described in Karst et al. (2021), supra, or by molecular combing (Example 29). In some embodiments, target sites showing more than two copies of the insert sequence are present in less than 95% of target sites containing inserts, e.g., in less than 90%, 80%, 70%, 60%, 50%, 40%, 30%, 20%, 10%, 9%, 8%, 7%, 6%, 4%, 4%, 3%, 2% or less than 1% of target sites containing inserts, e.g., as determined by long-read amplicon sequencing of the target site, e.g., as described in Karst et al. (2021), supra, or by molecular combing (Example 29). In some embodiments, target sites showing more than three copies of the insert sequence are present in less than 95% of target sites containing inserts, e.g., in less than 90%, 80%, 70%, 60%, 50%, 40%, 30%, 20%, 10%, 9%, 8%, 7%, 6%, 4%, 4%, 3%, 2% or less than 1% of target sites containing inserts, e.g., as determined by long-read amplicon sequencing of the target site, e.g., as described in Karst et al. (2021), supra, or by molecular combing (Example 29). In some embodiments, the target site shows at least 1, 2, 3, 4, 5, 6, 7, 8, 9, 10 or more copies per target site. In some embodiments, target sites showing multiple copies of the insert sequence are present in 1%, 5%, 10%, 20%, 30%, 40%, 50% 60%, 70%, 80%, 90%, 95%, 99% or more of target sites containing inserts, e.g., as determined by long-read amplicon sequencing of the target site, e.g., as described in Karst et al. (2021), supra, or by molecular combing (Example 29). In some embodiments, the copies are concatemers, i.e., are concatemerized. In some embodiments, the target site contains an integrated sequence corresponding to the template DNA (e.g., an entire plasmid, minicircle, or viral vector genome). In some embodiments, the target site contains a completely integrated template molecule. In some embodiments, the target site contains components of the vector DNA, e.g., AAV ITRs. In some embodiments, the target site contains 0, 1, 2, 3, 4, 5, 6, 7, 8, 9, 10 or more ITRs after integration. In some embodiments, at least one ITR is present in at least 1% of target sites after integration, e.g., at least 1%, 5%, 10%, 15%, 20%, 25%, 50%, 60%, 70%, 80%, 90, 95%, 96%, 97%, 98%, or at least 99% of target sites after integration. In some embodiments, at least one ITR is present in less than 50% of target sites after integration, e.g., less than 50%, 40%, 30%, 20%, 10%, 9%, 8%, 7%, 6%, 4%, 4%, 3%, 2% or less than 1% of target sites after integration, e.g., as determined by long-read amplicon sequencing of the target site, e.g., as described in Karst et al. (2021), supra, or by molecular combing (Example 29). In some embodiments, the multiple copies are arranged in head-to-head, tail-to-tail, or head-to-tail arrangements, or a mixture thereof. In some embodiments, e.g., when a template DNA is first excised from a viral vector or plasmid by a first recombination event prior to integration, the target site does not contain insertions comprising DNA exogenous to the recognition site-flanked cassette, e.g., vector DNA, e.g., AAV ITRs, in more than about 50% of events, e.g., in more than about 50%, 40%, 30%, 20%, 10%, 9%, 8%, 7%, 6%, 4%, 4%, 3%, 2% or more than about 1% of events, e.g., as determined by long-read amplicon sequencing of the target site, e.g., as described in Karst et al. (2021), supra, or by molecular combing (Example 29). In some embodiments, the integrated DNA does not comprise any bacterial antibiotic resistance gene.

[0615] In some embodiments, the DNA integrated at a target site by a Gene Writing system described herein comprises terminal hybrid recognition sequences (e.g., a first and/or second parapalindromic sequence, e.g., as described herein), e.g., attL and attR sequences formed by recombination between a recognition site of the insert DNA, e.g., an attP or attB of the insert DNA, and a recognition site in the target DNA, e.g., an attP or attB site or pseudosite thereof. In some embodiments, the integrated DNA comprises one or more ITRs, e.g., 1, 2, 3, 4, or more ITRs, between the terminal hybrid recognition sequences, e.g., attL and attR sequences. In some embodiments, at least 1% of target sites with integrated DNA comprise ITRs between the terminal hybrid recognition sequences, e.g., attL and attR sequences, e.g. at least 1%, 5%, 10%, 20%, 30%, 40%, 50%, 60%, 70%, 80%, or at least 90% of integrated DNA. In some embodiments, the integrated DNA that comprises ITRs between terminal hybrid recognition sequences, e.g., attL and attR sequences, comprises a single copy of insert DNA, e.g., is a monomeric insertion. In some embodiments, a monomeric insertion comprises terminal hybrid recognition sequences, e.g., attL and attR sequences, and lacks any internal ITRs. In some embodiments, a monomeric insertion comprises terminal hybrid recognition sequences, e.g., attL and attR sequences, and a single internal ITR. In some embodiments, a monomeric insertion comprises terminal hybrid recognition sequences, e.g., attL and attR sequences, and multiple internal ITRs, e.g., two internal ITRs. In some embodiments, the integrated DNA that comprises ITRs between terminal hybrid recognition sequences, e.g., attL and attR sequences, comprises multiple copies of insert DNA, e.g., is a concatemeric insertion. In some embodiments, a concatemeric insertion comprises terminal hybrid recognition sequences, e.g., attL and attR sequences, and at least two, e.g., at least 2, 3, or 4 copies of the insert DNA. In some embodiments, insertions comprising terminal hybrid recognition sequences, e.g., attL and attR sequences, that comprise fewer copies of the insert DNA are present at a higher frequency as compared to those with more copies of the insert DNA (e.g., insertions with 1 copy are present at higher frequency than insertions with 2 copies, insertions with 2 copies are present at higher frequency than insertions with 3 copies, or insertions with 1 copy are present at higher frequency than insertions with 3 copies), show a higher frequency of occurrence, e.g., are 1.1, 1.2, 1.3, 1.4, 1.5, 2.0, 2.5, 3.0, 4.0, 5.0, 10, 20, 30, 40, 50, 60, 70, 80, 90, 100, or more times more frequent. In some embodiments, monomeric insertions are present more frequently than dimeric insertions, e.g, are at least 1.1, 1.2, 1.3, 1.4, 1.5, 2.0, 2.5, 3.0, 4.0, 5.0, 10, 20, 30, 40, 50, 60, 70, 80, 90, 100, or more times more frequent than dimeric insertions. In some embodiments, dimeric insertions are present more frequently than trimeric insertions, e.g, are at least 1.1, 1.2, 1.3, 1.4, 1.5, 2.0, 2.5, 3.0, 4.0, 5.0, 10, 20, 30, 40, 50, 60, 70, 80, 90, 100, or more times more frequent than trimeric insertions. In some embodiments, monomeric plus dimeric insertions are present more frequently than concatameric insertions (3 or more insertions), e.g, are at least 1.1, 1.2, 1.3, 1.4, 1.5, 2.0, 2.5, 3.0, 4.0, 5.0, 10, 20, 30, 40, 50, 60, 70, 80, 90, 100, or more times more frequent than concatameric insertions. In some embodiments, a concatemeric insertion comprises terminal hybrid recognition sequences, e.g., attL and attR sequences, and one or more internal recombinase recognition sequences, e.g., 1, 2, 3, 4, or more internal recognition sequences, e.g., attB or attP sequences. In some embodiments, a concatemeric insertion comprises terminal hybrid recognition sequences, e.g., attL and attR sequences, and one or more internal ITRs, e.g., 1, 2, 3, 4, 5, 6 or more internal ITRs. The copy number of insert DNA, recognition sequences, and ITRs, as well as the relative positioning of these components, as described herein, can be determined using molecular combing as described in Example 29 and in Kaykov et al Sci Rep 6:19636 (2016), incorporated herein by reference in its entirety.

[0616] In some embodiments, insertion events may occur in which the integrated DNA does not comprise terminal hybrid recognition sequences, e.g., attL and attR sequences. In some embodiments, integrated DNA may comprise one terminal recognition sequence, e.g., attL or attR sequence. In some embodiments, integrated DNA may not have any terminal hybrid recognition sequences, e.g., attL or attR, e.g., neither terminus of the integrated DNA comprises a hybrid recognition sequence, e.g., attL or attR sequence. In some embodiments, integrated DNA that does not comprise terminal hybrid recognition sequences, e.g., attL or attR sequences, comprises a fragment of an insert DNA (e.g., an incomplete insert DNA, e.g., an insert DNA with an incomplete promoter, gene, or heterologous object sequence). In some embodiments, integrated DNA that does not comprise terminal hybrid recognition sequences, e.g., attL or attR sequences, comprises an incomplete multiple insert DNA sequences, e.g., contains less than 1, more than 1 and less than 2, more than 2 and less than 3, more than 3 and less than 4, or another incomplete multiple number of copies of the complete insert DNA.

[0617] In some embodiments, following the use of a Gene Writing system, newly integrated DNA that comprises terminal hybrid recognition sequences, e.g., attL and attR sequences, is present at a higher frequency in a cell or population of cells, e.g., comprises more than 50%, more than 60%, more than 70%, more than 80%, more than 90%, more than 95%, more than 96%, more than 97%, more than 98%, more than 99%, more than 99.5%, or more than 99.9% of total insertion events, compared to newly integrated DNA that comprises one or fewer terminal hybrid recognition sequences, e.g., attL or attR sequences, as measured by an assay described herein, e.g., long-read sequencing or molecular combing. In some embodiments, following the use of a Gene Writing system, newly integrated DNA that comprises terminal hybrid recognition sequences, e.g., attL and attR sequences, comprises a lower average insert DNA copy number per insertion event, e.g., comprises at least 0.1, 0.2, 0.3, 0.4, 0.5, 0.6, 0.7, 0.8, 0.9, 1.0, 1.5, or 2.0 copies fewer per insertion event on average, as compared to the average insert DNA copy number of integration events that comprise one or fewer terminal hybrid recognition sequences, e.g., attL or attP sequences. In some embodiments, following the use of a Gene Writing system, newly integrated DNA that comprises terminal hybrid recognition sequences, e.g., attL and attR sequences, comprises a higher percentage of complete insert DNA sequences, e.g., comprises at least 0.1×, 0.2×, 0.3×, 0.4×, 0.5×, 0.6×, 0.7×, 0.8×, 0.9×, 1.0×, 1.5×, 2.0×, 3×, 4×, 5×, 6×, 7×, 8×, 9×, 10× or more percent complete insert DNA sequences, as compared to the percentage of insert DNA sequences that comprise one or fewer terminal hybrid recognition sequences, e.g., attL or attP sequences.

[0618] In some embodiments, a Gene Writer described herein is capable of site-specific editing of target DNA, e.g., insertion of template DNA into a target DNA. In some embodiments, a site-specific Gene Writer is capable of generating an edit, e.g., an insertion, that is present at the target site with a higher frequency than any other site in the genome. In some embodiments, a site-specific Gene Writer is capable of generating an edit, e.g., an insertion in a target site at a frequency of at least 2, 3, 4, 5, 10, 50, 100, or 1000-fold that of the frequency at all other sites in the human genome. In some embodiments, the location of integration sites is determined by unidirectional sequencing, e.g., as in Example 18. The incorporation of unique molecular identifiers (UMI) in the adapters or primers used in library preparation allows the quantification of discrete insertion events, which can be compared between on-target insertions and all other insertions to determine the preference for the defined target site. In some embodiments, an inverse PCR approach is used to determine the integration sites targeted by a particular Gene Writer, e.g., as in Example 30.

[0619] In some embodiments, a Gene Writing system is used to edit a target DNA sequence that is present at a single location in the human genome. In some embodiments, a Gene Writing system is used to edit a target DNA sequence that is present at a single location in the human genome on a single homologous chromosome, e.g., is haplotype-specific. In some embodiments, a Gene Writing system is used to edit a target DNA sequence that is present at a single location in the human genome on two homologous chromosomes. In some embodiments, a Gene Writing system is used to edit a target DNA sequence that is present in multiple locations in the genome, e.g., at least 2, 3, 4, 5, 10, 20, 50, 100, 200, 500, 1000, 5000, 10000, 100000, 200000, 500000, 1000000 (e.g., Alu elements) locations in the genome. In some embodiments, a Gene Writing system used herein performs integration at a single target sequence in the human genome, that may be present in one or more locations. In some embodiments, a Gene Writing system used herein performs integration at multiple sequences that are present at least once in the human genome, e.g., recognizes more than 1, e.g., more than 1, 2, 3, 4, 5, 10, 20, 50, or more than 100 sequences, or less than 100, e.g., less than 100, 90, 80, 70, 60, 50, 40, 30, 25, 20, 15, 10, or less than 5 sequences that are present at least once in the human genome. Thus, in some embodiments, a Gene Writer described herein may result in the integration of an insert DNA at at least 1, e.g., at least 1, 2, 3, 4, 5, 6, 7, 8, 9, or at least 10 copies per cell, or less than 10, e.g., less than 10, 9, 8, 7, 6, 5, 4, 3, or less than 2 copies per cell.

[0620] In some embodiments, a Gene Writer system is able to edit a genome without introducing undesirable mutations. In some embodiments, a Gene Writer system is able to edit a genome by inserting a template, e.g., template DNA, into the genome. In some embodiments, the resulting modification in the genome contains minimal mutations relative to the template DNA sequence. In some embodiments, the average error rate of genomic insertions relative to the template DNA is less than 10-4, 10-5, or 10-6 mutations per nucleotide. In some embodiments, the number of mutations relative to a template DNA that is introduced into a target cell averages less than 1, 2, 3, 4, 5, 10, 20, 30, 40, 50, 60, 70, 80, 90, or 100 nucleotides per genome. In some embodiments, the error rate of insertions in a target genome is determined by long-read amplicon sequencing across known target sites, e.g., as described in Karst et al. (2021), supra, and comparing to the template DNA sequence. In some embodiments, errors enumerated by this method include nucleotide substitutions relative to the template sequence. In some embodiments, errors enumerated by this method include nucleotide deletions relative to the template sequence. In some embodiments, errors enumerated by this method include nucleotide insertions relative to the template sequence. In some embodiments, errors enumerated by this method include a combination of one or more of nucleotide substitutions, deletions, or insertions relative to the template sequence.

[0621] Efficiency of integration events can be used as a measure of editing of target sites or target cells by a Gene Writer system. In some embodiments, a Gene Writer system described herein is capable of integrating a heterologous object sequence in a fraction of target sites or target cells. In some embodiments, a Gene Writer system is capable of editing at least 1%, 2%, 5%, 10%, 20%, 30%, 40%, 50%, 60%, 70%, 80%, 90%, 95%, 96%, 97%, 98%, 99%, 99.5%, 99.9% or 100% of target loci as measured by the detection of the edit when amplifying across the target and analyzing with long-read amplicon sequencing, e.g., as described in Karst et al. (2021), supra. In some embodiments, a Gene Writer system is capable of editing cells at an average copy number of at least 0.1, e.g., at least 0.1, 0.5, 1, 2, 3, 4, 5, 10, or 100 copies per genome as normalized to a reference gene, e.g., RPP30, across a population of cells, e.g., as determined by ddPCR with transgene-specific primer-probe sets, e.g., as according to the methods in Lin et al. Hum Gene Ther Methods 27(5):197-208 (2016).

[0622] In some embodiments, the copy number per cell is analyzed by single-cell ddPCR (sc-ddPCR), e.g., as according to the methods of Igarashi et al. Mol Ther Methods C/in Dev 6:8-16 (2017), incorporated herein by reference in its entirety. In some embodiments, at least 1%, e.g., at least 1%, 2%, 5%, 10%, 20%, 30%, 40%, 50%, 60%, 70%, 80%, 90%, 95%, 96%, 97%, 98%, 99%, 99.5%, 99.9% or 100%, of target cells are positive for integration as assessed by sc-ddPCR using transgene-specific primer-probe sets. In some embodiments, the average copy number is at least 0.1, e.g., at least 0.1, 0.5, 1, 2, 3, 4, 5, 10, or 100 copies per cell as measured by sc-ddPCR using transgene-specific primer-probe sets.

[0623] In some embodiments, the target site comprises a pair of nucleic acid sequences, wherein one of the nucleic acid sequences is either a palindrome relative to the other nucleic acid sequence, or has at least 20% (e.g., at least 20%, 25%, 30%, 35%, 40%, 45%, 50%, 55%, 60%, 65%, 70%, 75%, 80%, 85%, 90%, 95%, 96%, 97%, 98%, 99%, or 100%), e.g., at least 50%, sequence identity to a palindrome relative to the other nucleic acid sequence, or has no more than 1, 2, 3, 4, 5, 6, 7, 8, 9, 10, 11, 12, 13, 14, 15, 16, 17, 18, 19, or 20 sequence mismatches relative to the other nucleic acid sequence.

### Template DNA

[0624] In some embodiments, a template DNA as described herein comprises a nucleic acid sequence that can be integrated into a target DNA molecule, e.g., by a recombinase polypeptide (e.g., a serine recombinase polypeptide), e.g., as described herein. The template DNA typically is able to bind one or more recombinase polypeptides (e.g., a plurality of copies of a recombinase polypeptide) of the system. In some embodiments the template DNA comprises a region that is capable of binding a recombinase polypeptide (e.g., a recognition sequence as described herein). In some embodiments, the template DNA is reverse transcribed from a template RNA, e.g., by a reverse transcriptase polypeptide domain, e.g., as described herein.

[0625] An template DNA may, in some embodiments, comprise an object sequence for insertion into a target DNA. The object sequence may be coding or non-coding. In some embodiments, the object sequence may contain an open reading frame. In some embodiments the template DNA comprises a Kozak sequence. In some embodiments the template DNA comprises an internal ribosome entry site. In some embodiments the template DNA comprises a self-cleaving peptide such as a T2A or P2A site. In some embodiments the template DNA comprises a start codon. In some embodiments the template DNA comprises a splice acceptor site. In some embodiments the template DNA comprises a splice donor site. In some embodiments the template DNA comprises a microRNA binding site, e.g., downstream of the stop codon. In some embodiments the template DNA comprises a polyA tail, e.g., downstream of the stop codon of an open reading frame. In some embodiments the template DNA comprises one or more exons. In some embodiments the template DNA comprises one or more introns. In some embodiments the template DNA comprises a eukaryotic transcriptional terminator. In some embodiments the template DNA comprises an enhanced translation element or a translation enhancing element. In some embodiments the template DNA comprises a microRNA sequence, a siRNA sequence, a guide RNA sequence, a piwi RNA sequence. In some embodiments the template DNA comprises a gene expression unit composed of at least one regulatory region operably linked to an effector sequence. The effector sequence may be a sequence that is transcribed into RNA (e.g., a coding sequence or a non-coding sequence such as a sequence encoding a micro RNA). In some embodiments, the object sequence may contain a non-coding sequence. For example, the template DNA may comprise a promoter or enhancer sequence. In some embodiments the template DNA comprises a tissue specific promoter or enhancer, each of which may be unidirectional or bidirectional. In some embodiments the promoter is an RNA polymerase I promoter, RNA polymerase II promoter, or RNA polymerase III promoter. In some embodiments the promoter comprises a TATA element. In some embodiments the promoter comprises a B recognition element. In some embodiments the promoter has one or more binding sites for transcription factors.

[0626] In some embodiments the object sequence of the template DNA is inserted into a target genome in an endogenous intron. In some embodiments the object sequence of the template DNA is inserted into a target genome and thereby acts as a new exon. In some embodiments the insertion of the object sequence into the target genome results in replacement of a natural exon or the skipping of a natural exon. In some embodiments the object sequence of the template DNA is inserted into the target genome in a genomic safe harbor site, such as AAVS1, CCR5, or ROSA26. In some embodiment the object sequence of the template DNA is added to the genome in an intergenic or intragenic region. In some embodiments the object sequence of the template DNA is added to the genome 5′ or 3′ within 0.1 kb, 0.25 kb, 0.5 kb, 0.75, kb, 1 kb, 2 kb, 3 kb, 4 kb, 5 kb, 7.5 kb, 10 kb, 15 kb, 20 kb, 25 kb, 50, 75 kb, or 100 kb of an endogenous active gene. In some embodiments the object sequence of the template DNA is added to the genome 5′ or 3′ within 0.1 kb, 0.25 kb, 0.5 kb, 0.75, kb, 1 kb, 2 kb, 3 kb, 4 kb, 5 kb, 7.5 kb, 10 kb, 15 kb, 20 kb, 25 kb, 50, 75 kb, or 100 kb of an endogenous promoter or enhancer. In some embodiments the object sequence of the template DNA can be, e.g., 50-50,000 base pairs (e.g., between 50-40,000 bp, between 500-30,000 bp between 500-20,000 bp, between 100-15,000 bp, between 500-10,000 bp, between 50-10,000 bp, between 50-5,000 bp. In some embodiments the object sequence of the template DNA can be, e.g., 1-50 base pairs.

[0627] In certain embodiments, an template DNA can be identified, designed, engineered and constructed to contain sequences altering or specifying the genome function of a target cell or target organism, for example by introducing a heterologous coding region into a genome; affecting or causing exon structure/alternative splicing; causing disruption of an endogenous gene; causing transcriptional activation of an endogenous gene; causing epigenetic regulation of an endogenous DNA; causing up- or down-regulation of operably liked genes, etc. In certain embodiments, an template DNA can be engineered to contain sequences coding for exons and/or transgenes, provide for binding sites to transcription factor activators, repressors, enhancers, etc., and combinations of thereof. In other embodiments, the coding sequence can be further customized with splice acceptor sites, poly-A tails.

[0628] As an alternative to other methods of delivery described herein, in some embodiments, nucleic acid (e.g., encoding a recombinase, or a template nucleic acid, or both) delivered to cells is designed as minicircles, where plasmid backbone sequences not pertaining to Gene Writing™ are removed before administration to cells. Minicircles have been shown to result in higher transfection efficiencies and gene expression as compared to plasmids with backbones containing bacterial parts (e.g., bacterial origin of replication, antibiotic selection cassette) and have been used to improve the efficiency of transposition (Sharma et al. Mol Ther Nucleic Acids 2:E74 (2013)). In some embodiments, the DNA vector encoding the Gene Writer™ polypeptide is delivered as a minicircle. In some embodiments, the DNA vector containing the Gene Writer™ template is delivered as a minicircle. In some embodiments of such alternative means for delivering a nucleic acid, the bacterial parts are flanked by recombination sites, e.g., attP/attB, loxP, FRT sites. In some embodiments, the addition of a cognate recombinase results in intramolecular recombination and excision of the bacterial parts. In some embodiments, the recombinase sites are recognized by phiC31 recombinase. In some embodiments, the recombinase sites are recognized by Cre recombinase. In some embodiments, the recombinase sites are recognized by FLP recombinase. In some embodiments, minicircles are generated in a bacterial production strain, e.g., an E. coli strain stably expressing inducible minicircle assembling enzymes, e.g., a producer strain as according to Kay et al. Nat Biotechnol 28(12):1287-1289 (2010). Minicircle DNA vector preparations and methods of production are described in U.S. Pat. No. 9,233,174, incorporated herein by reference in its entirety.

[0629] In addition to plasmid DNA, minicircles can be generated by excising the desired construct, e.g., recombinase expression cassette or therapeutic expression cassette, from a viral backbone, e.g., an AAV vector. Previously, it has been shown that excision and circularization of the donor sequence from a viral backbone may be important for transposase-mediated integration efficiency (Yant et al. Nat Biotechnol 20(10):999-1005 (2002)). In some embodiments, minicircles are first formulated and then delivered to target cells. In other embodiments, minicircles are formed from a DNA vector (e.g., plasmid DNA, rAAV, scAAV, ceDNA, doggybone DNA) intracellularly by co-delivery of a recombinase, resulting in excision and circularization of the recombinase recognition site-flanked nucleic acid, e.g., a nucleic acid encoding the Gene Writer™ polypeptide, or DNA template, or both. In some embodiments, the same recombinase is used for a first excision event (e.g., intramolecular recombination) and a second integration (e.g., target site integration) event. In some embodiments, the recombination site on an excised circular DNA (e.g., after a first recombination event, e.g., intramolecular recombination) is used as the template recognition site for a second recombination (e.g., target site integration) event.

[0630] In some embodiments, minicircle DNA as described herein is generated by a recombinase excision event and the Gene Writer functions to insert the minicircle DNA by a recombinase integration event. In some embodiments, the excision event and integration event are catalyzed by the same enzyme, e.g., by the same serine recombinase. In some embodiments, the cassette for excision from a vector is flanked by attL and attR sites and the excision event results in the generation of an attB or attP site that is used for integration at a cognate genomic attP or attB site. In some embodiments, the excision event involving attL and attR sites is catalyzed by the addition of a recombination directionality factor (RDF) that enables the Gene Writer recombinase polypeptide to perform the excision. In some embodiments, the Gene Writer recombinase polypeptide functions to catalyze an integration event in the absence of an RDF.

### Long Terminal Repeats (LTRs)

[0631] In some embodiments, a template RNA described herein comprises an LTR, e.g., comprises two LTRs. The two LTRs may have identical sequences or may have sequence differences relative to one another. In some embodiments, the LTRs are lentiviral LTRs. In some embodiments, the LTRs are located at the two ends of the template RNA.

[0632] In some embodiments, the LTR comprises one or more of (e.g., all of) U3, R, and U5. In some embodiments, the LTR is a wild-type LTR. In other embodiments, the LTR comprises one or more sequence difference (e.g., deletion or substitution) compared to a corresponding wild-type LTR. In some embodiments, the LTR comprises reduced (e.g., abrogated) promoter and/or enhancer activity compared to a corresponding wild-type LTR. In some embodiments, the LTR comprises a deletion of U3, e.g., in the U3 of the 3′ LTR of the viral genome, which corresponds to the 5′ LTR after one round of reverse transcription. In some embodiments, the LTR is a self-inactivating LTR, e.g., as described in Cesana et al. “Uncovering and Dissecting the Genotoxicity of Self-inactivating Lentiviral Vectors In Vivo” doi:10.1038/mt.2014.3, which is herein incorporated by reference in its entirety.

### Linkers

[0633] In some embodiments, domains of the compositions and systems described herein (e.g., the recombinase domain and/or DNA recognition domains of a recombinase polypeptide, e.g., as described herein) may be joined by a linker. A composition described herein comprising a linker element has the general form S1-L-S2, wherein S1 and S2 may be the same or different and represent two domain moieties (e.g., each a polypeptide or nucleic acid domain) associated with one another by the linker. In some embodiments, a linker may connect two polypeptides. In some embodiments, a linker may connect two nucleic acid molecules. In some embodiments, a linker may connect a polypeptide and a nucleic acid molecule. A linker may be a chemical bond, e.g., one or more covalent bonds or non-covalent bonds. A linker may be flexible, rigid, and/or cleavable. In some embodiments, the linker is a peptide linker. Generally, a peptide linker is at least 2, 3, 4, 5, 6, 7, 8, 9, 10 or more amino acids in length, e.g., 2-50 amino acids in length, 2-30 amino acids in length.

[0634] The most commonly used flexible linkers have sequences consisting primarily of stretches of Gly and Ser residues (“GS” linker). Flexible linkers may be useful for joining domains that require a certain degree of movement or interaction and may include small, non-polar (e.g. Gly) or polar (e.g. Ser or Thr) amino acids. Incorporation of Ser or Thr can also maintain the stability of the linker in aqueous solutions by forming hydrogen bonds with the water molecules, and therefore reduce unfavorable interactions between the linker and the other moieties. Examples of such linkers include those having the structure [GGS]^{≥1} or [GGGS]^{≥1}. Rigid linkers are useful to keep a fixed distance between domains and to maintain their independent functions. Rigid linkers may also be useful when a spatial separation of the domains is critical to preserve the stability or bioactivity of one or more components in the agent. Rigid linkers may have an alpha helix-structure or Pro-rich sequence, (XP)n, with X designating any amino acid, preferably Ala, Lys, or Glu. Cleavable linkers may release free functional domains in vivo. In some embodiments, linkers may be cleaved under specific conditions, such as the presence of reducing reagents or proteases. In vivo cleavable linkers may utilize the reversible nature of a disulfide bond. One example includes a thrombin-sensitive sequence (e.g., PRS) between the two Cys residues. In vitro thrombin treatment of CPRSC results in the cleavage of the thrombin-sensitive sequence, while the reversible disulfide linkage remains intact. Such linkers are known and described, e.g., in Chen et al. 2013. Fusion Protein Linkers: Property, Design and Functionality. Adv Drug Deliv Rev. 65(10): 1357-1369. In vivo cleavage of linkers in compositions described herein may also be carried out by proteases that are expressed in vivo under pathological conditions (e.g. cancer or inflammation), in specific cells or tissues, or constrained within certain cellular compartments. The specificity of many proteases offers slower cleavage of the linker in constrained compartments.

[0635] In some embodiments the amino acid linkers are (or are homologous to) the endogenous amino acids that exist between such domains in a native polypeptide. In some embodiments the endogenous amino acids that exist between such domains are substituted but the length is unchanged from the natural length. In some embodiments, additional amino acid residues are added to the naturally existing amino acid residues between domains.

[0636] In some embodiments, the amino acid linkers are designed computationally or screened to maximize protein function (Anad et al., FEBS Letters, 587:19, 2013).

[0637] In some embodiments, a Gene Writer polypeptide may comprise a linker, e.g., a peptide linker, e.g., a linker as described in Table 7. In some embodiments, a Gene Writer polypeptide comprises a flexible linker.

TABLE 7
Exemplary linker sequences
Amino Acid Sequence

GGS
GGSGGS
GGSGGSGGS
GGSGGSGGSGGS
GGSGGSGGSGGSGGS
GGSGGSGGSGGSGGSGGS
GGGGS
GGGGSGGGGS
GGGGSGGGGSGGGGS
GGGGSGGGGSGGGGSGGGGS
GGGGSGGGGSGGGGSGGGGSGGGGS
GGGGSGGGGSGGGGSGGGGSGGGGSGGGGS
GGG
GGGG
GGGGG
GGGGGG
GGGGGGG
GGGGGGGG
GSS
GSSGSS
GSSGSSGSS
GSSGSSGSSGSS
GSSGSSGSSGSSGSS
GSSGSSGSSGSSGSSGSS
EAAAK
EAAAKEAAAK
EAAAKEAAAKEAAAK
EAAAKEAAAKEAAAKEAAAK
EAAAKEAAAKEAAAKEAAAKEAAAK
EAAAKEAAAKEAAAKEAAAKEAAAKEAAAK
PAP
PAPAP
PAPAPAP
PAPAPAPAP
PAPAPAPAPAP
PAPAPAPAPAPAP
GGSGGG
GGGGGS
GGSGSS
GSSGGS
GGSEAAAK
EAAAKGGS
GGSPAP
PAPGGS
GGGGSS
GSSGGG
GGGEAAAK
EAAAKGGG
GGGPAP
PAPGGG
GSSEAAAK
EAAAKGSS
GSSPAP
PAPGSS
EAAAKPAP
PAPEAAAK
GGSGGGGSS
GGSGSSGGG
GGGGGSGSS
GGGGSSGGS
GSSGGSGGG
GSSGGGGGS
GGSGGGEAAAK
GGSEAAAKGGG
GGGGGSEAAAK
GGGEAAAKGGS
EAAAKGGSGGG
EAAAKGGGGGS
GGSGGGPAP
GGSPAPGGG
GGGGGSPAP
GGGPAPGGS
PAPGGSGGG
PAPGGGGGS
GGSGSSEAAAK
GGSEAAAKGSS
GSSGGSEAAAK
GSSEAAAKGGS
EAAAKGGSGSS
EAAAKGSSGGS
GGSGSSPAP
GGSPAPGSS
GSSGGSPAP
GSSPAPGGS
PAPGGSGSS
PAPGSSGGS
GGSEAAAKPAP
GGSPAPEAAAK
EAAAKGGSPAP
EAAAKPAPGGS
PAPGGSEAAAK
PAPEAAAKGGS
GGGGSSEAAAK
GGGEAAAKGSS
GSSGGGEAAAK
GSSEAAAKGGG
EAAAKGGGGSS
EAAAKGSSGGG
GGGGSSPAP
GGGPAPGSS
GSSGGGPAP
GSSPAPGGG
PAPGGGGSS
PAPGSSGGG
GGGEAAAKPAP
GGGPAPEAAAK
EAAAKGGGPAP
EAAAKPAPGGG
PAPGGGEAAAK
PAPEAAAKGGG
GSSEAAAKPAP
GSSPAPEAAAK
EAAAKGSSPAP
EAAAKPAPGSS
PAPGSSEAAAK
PAPEAAAKGSS
AEAAAKEAAAKEAAAKEAAAKALEAEAAAKEAAAKEAAAKEAAAKA
GGGGSEAAAKGGGGS
EAAAKGGGGSEAAAK
SGSETPGTSESATPES
GSAGSAAGSGEF
SGGSSGGSSGSETPGTSESATPESSGGSSGGSS

Additional Gene Writer characteristics

[0638] In some embodiments, the Gene Writer system may result in complete writing without requiring endogenous host factors. In some embodiments, the system may result in complete writing without the need for DNA repair. In some embodiments, the system may result in complete writing without eliciting a DNA damage response.

[0639] In some embodiments, the system does not require DNA repair by the NHEJ pathway, homologous recombination repair pathway, base excision repair pathway, or any combination thereof. Participation by a DNA repair pathway can be assayed, for example, via the application of DNA repair pathway inhibitors or DNA repair pathway deficient cell lines. For example, when applying DNA repair pathway inhibitors, PrestoBlue cell viability assay can be performed first to determine the toxicity of the inhibitors and whether any normalization should be applied. SCR7 is an inhibitor for NHEJ, which can be applied at a series of dilutions during Gene Writer™ delivery. PARP protein is a nuclear enzyme that binds as homodimers to both single- and double-strand breaks. Thus, its inhibitors can be used in the test of relevant DNA repair pathways, including homologous recombination repair pathway and base excision repair pathway. The experiment procedure is the same with that of SCR7. Cell lines with deficient core proteins of nucleotide excision repair (NER) pathway can be used to test the effect of NER on Gene Writing™. After the delivery of the Gene Writer™ system into the cell, ddPCR can used to evaluate the insertion of a heterologous object sequence in the context of inhibition of DNA repair pathways. Sequencing analysis can also be performed to evaluate whether certain DNA repair pathways play a role. In some embodiments, Gene Writing™ into the genome is not decreased by the knockdown of a DNA repair pathway described herein. In some embodiments, Gene Writing™ into the genome is not decreased by more than 50% by the knockdown of the DNA repair pathway.

### Circular RNAs in Gene Writing Systems

[0640] It is contemplated that it may be useful to employ circular and/or linear RNA states during the formulation, delivery, or Gene Writing reaction within the target cell. Thus, in some embodiments of any of the aspects described herein, a Gene Writing system comprises one or more circular RNAs (circRNAs). In some embodiments of any of the aspects described herein, a Gene Writing system comprises one or more linear RNAs. In some embodiments, a nucleic acid as described herein (e.g., a nucleic acid molecule encoding a Gene Writer polypeptide, or both) is a circRNA. In some embodiments, a circular RNA molecule encodes the Gene Writer polypeptide. In some embodiments, the circRNA molecule encoding the Gene Writer polypeptide is delivered to a host cell. In some embodiments, a circular RNA molecule encodes a recombinase, e.g., as described herein. In some embodiments, the circRNA molecule encoding the recombinase is delivered to a host cell. In some embodiments, the circRNA molecule encoding the Gene Writer polypeptide is linearized (e.g., in the host cell) prior to translation.

[0641] Circular RNAs (circRNAs) have been found to occur naturally in cells and have been found to have diverse functions, including both non-coding and protein coding roles in human cells. It has been shown that a circRNA can be engineered by incorporating a self-splicing intron into an RNA molecule (or DNA encoding the RNA molecule) that results in circularization of the RNA, and that an engineered circRNA can have enhanced protein production and stability (Wesselhoeft et al. Nature Communications 2018). In some embodiments, the Gene Writer™ polypeptide is encoded as circRNA. In certain embodiments, the template nucleic acid is a DNA, such as a dsDNA or ssDNA.

[0642] In some embodiments, the circRNA comprises one or more ribozyme sequence. In some embodiments, the ribozyme sequence is activated for autocleavage, e.g., in a host cell, e.g., thereby resulting in linearization of the circRNA. In some embodiments, the ribozyme is activated when the concentration of magnesium reaches a sufficient level for cleavage, e.g., in a host cell. In some embodiments the circRNA is maintained in a low magnesium environment prior to delivery to the host cell. In some embodiments, the ribozyme is a protein-responsive ribozyme. In some embodiments, the ribozyme is a nucleic acid-responsive ribozyme.

[0643] In some embodiments, the circRNA is linearized in the nucleus of a target cell. In some embodiments, linearization of a circRNA in the nucleus of a cell involves components present in the nucleus of the cell, e.g., to activate a cleavage event. For example, the B2 and ALU retrotransposons contain self-cleaving ribozymes whose activity is enhanced by interaction with the Polycomb protein, EZH2 (Hernandez et al. PNAS 117(1):415-425 (2020)). Thus, in some embodiments, a ribozyme, e.g., a ribozyme from a B2 or ALU element, that is responsive to a nuclear element, e.g., a nuclear protein, e.g., a genome-interacting protein, e.g., an epigenetic modifier, e.g., EZH2, is incorporated into a circRNA, e.g., of a Gene Writing system. In some embodiments, nuclear localization of the circRNA results in an increase in autocatalytic activity of the ribozyme and linearization of the circRNA.

[0644] In some embodiments, an inducible ribozyme (e.g., in a circRNA as described herein) is created synthetically, for example, by utilizing a protein ligand-responsive aptamer design. A system for utilizing the satellite RNA of tobacco ringspot virus hammerhead ribozyme with an MS2 coat protein aptamer has been described (Kennedy et al. Nucleic Acids Res 42(19):12306-12321 (2014), incorporated herein by reference in its entirety) that results in activation of the ribozyme activity in the presence of the MS2 coat protein. In embodiments, such a system responds to protein ligand localized to the cytoplasm or the nucleus. In some embodiments the protein ligand is not MS2. Methods for generating RNA aptamers to target ligands have been described, for example, based on the systematic evolution of ligands by exponential enrichment (SELEX) (Tuerk and Gold, Science 249(4968):505-510 (1990); Ellington and Szostak, Nature 346(6287):818-822 (1990); the methods of each of which are incorporated herein by reference) and have, in some instances, been aided by in silico design (Bell et al. PNAS 117(15):8486-8493, the methods of which are incorporated herein by reference). Thus, in some embodiments, an aptamer for a target ligand is generated and incorporated into a synthetic ribozyme system, e.g., to trigger ribozyme-mediated cleavage and circRNA linearization, e.g., in the presence of the protein ligand. In some embodiments, circRNA linearization is triggered in the cytoplasm, e.g., using an aptamer that associates with a ligand in the cytoplasm. In some embodiments, circRNA linearization is triggered in the nucleus, e.g., using an aptamer that associates with a ligand in the nucleus. In embodiments, the ligand comprises an epigenetic modifier or a transcription factor. In some embodiments the ligand that triggers linearization is present at higher levels in on-target cells than off-target cells.

[0645] It is further contemplated that a nucleic acid-responsive ribozyme system can be employed for circRNA linearization. For example, biosensors that sense defined target nucleic acid molecules to trigger ribozyme activation are described, e.g., in Penchovsky (Biotechnology Advances 32(5):1015-1027 (2014), incorporated herein by reference). By these methods, a ribozyme naturally folds into an inactive state and is only activated in the presence of a defined target nucleic acid molecule (e.g., an RNA molecule). In some embodiments, a circRNA of a Gene Writing system comprises a nucleic acid-responsive ribozyme that is activated in the presence of a defined target nucleic acid, e.g., an RNA, e.g., an mRNA, miRNA, guide RNA, gRNA, sgRNA, ncRNA, lncRNA, tRNA, snRNA, or mtRNA. In some embodiments the nucleic acid that triggers linearization is present at higher levels in on-target cells than off-target cells.

[0646] In some embodiments of any of the aspects herein, a Gene Writing system incorporates one or more ribozymes with inducible specificity to a target tissue or target cell of interest, e.g., a ribozyme that is activated by a ligand or nucleic acid present at higher levels in a target tissue or target cell of interest. In some embodiments, the Gene Writing system incorporates a ribozyme with inducible specificity to a subcellular compartment, e.g., the nucleus, nucleolus, cytoplasm, or mitochondria. In some embodiments, the ribozyme that is activated by a ligand or nucleic acid present at higher levels in the target subcellular compartment. In some embodiments, an RNA component of a Gene Writing system is provided as circRNA, e.g., that is activated by linearization. In some embodiments, linearization of a circRNA encoding a Gene Writing polypeptide activates the molecule for translation. In some embodiments, a signal that activates a circRNA component of a Gene Writing system is present at higher levels in on-target cells or tissues, e.g., such that the system is specifically activated in these cells.

[0647] In some embodiments, an RNA component of a Gene Writing system is provided as a circRNA that is inactivated by linearization. In some embodiments, a circRNA encoding the Gene Writer polypeptide is inactivated by cleavage and degradation. In some embodiments, a circRNA encoding the Gene Writing polypeptide is inactivated by cleavage that separates a translation signal from the coding sequence of the polypeptide. In some embodiments, a signal that inactivates a circRNA component of a Gene Writing system is present at higher levels in off-target cells or tissues, such that the system is specifically inactivated in these cells.

### Evolved Variants of Gene Writers

[0648] In some embodiments, the invention provides evolved variants of Gene Writers. Evolved variants can, in some embodiments, be produced by mutagenizing a reference Gene Writer, or one of the fragments or domains comprised therein. In some embodiments, one or more of the domains (e.g., the catalytic domain or DNA binding domain (e.g., target binding domain or template binding domain), including, for example, sequence-guided DNA binding elements) is evolved. One or more of such evolved variant domains can, in some embodiments, be evolved alone or together with other domains. An evolved variant domain or domains may, in some embodiments, be combined with unevolved cognate component(s) or evolved variants of the cognate component(s), e.g., which may have been evolved in either a parallel or serial manner.

[0649] In some embodiments, the process of mutagenizing a reference Gene Writer, or fragment or domain thereof, comprises mutagenizing the reference Gene Writer or fragment or domain thereof. In embodiments, the mutagenesis comprises a continuous evolution method (e.g., PACE) or non-continuous evolution method (e.g., PANCE), e.g., as described herein. In some embodiments, the evolved Gene Writer, or a fragment or domain thereof (e.g., a DNA binding domain, e.g., a target binding domain or a template binding domain), comprises one or more amino acid variations introduced into its amino acid sequence relative to the amino acid sequence of the reference Gene Writer, or fragment or domain thereof. In embodiments, amino acid sequence variations may include one or more mutated residues (e.g., conservative substitutions, non-conservative substitutions, or a combination thereof) within the amino acid sequence of a reference Gene Writer, e.g., as a result of a change in the nucleotide sequence encoding the gene writer that results in, e.g., a change in the codon at any particular position in the coding sequence, the deletion of one or more amino acids (e.g., a truncated protein), the insertion of one or more amino acids, or any combination of the foregoing. The evolved variant Gene Writer may include variants in one or more components or domains of the Gene Writer (e.g., variants introduced into a catalytic domain, DNA binding domain, or combinations thereof).

[0650] In some aspects, the invention provides Gene Writers, systems, kits, and methods using or comprising an evolved variant of a Gene Writer, e.g., employs an evolved variant of a Gene Writer or a Gene Writer produced or produceable by PACE or PANCE. In embodiments, the unevolved reference Gene Writer is a Gene Writer as disclosed herein.

[0651] The term “phage-assisted continuous evolution (PACE),” as used herein, generally refers to continuous evolution that employs phage as viral vectors. Examples of PACE technology have been described, for example, in International PCT Application No. PCT/US 2009/056194, filed Sep. 8, 2009, published as WO 2010/028347 on Mar. 11, 2010; International PCT Application, PCT/US2011/066747, filed Dec. 22, 2011, published as WO 2012/088381 on Jun. 28, 2012; U.S. Pat. No. 9,023,594, issued May 5, 2015; U.S. Pat. No. 9,771,574, issued Sep. 26, 2017; U.S. Pat. No. 9,394,537, issued Jul. 19, 2016; International PCT Application, PCT/US2015/012022, filed Jan. 20, 2015, published as WO 2015/134121 on Sep. 11, 2015; U.S. Pat. No. 10,179,911, issued Jan. 15, 2019; and International PCT Application, PCT/US2016/027795, filed Apr. 15, 2016, published as WO 2016/168631 on Oct. 20, 2016, the entire contents of each of which are incorporated herein by reference.

[0652] The term “phage-assisted non-continuous evolution (PANCE),” as used herein, generally refers to non-continuous evolution that employs phage as viral vectors. Examples of PANCE technology have been described, for example, in Suzuki T. et al, Crystal structures reveal an elusive functional domain of pyrrolysyl-tRNA synthetase, Nat Chem Biol. 13(12): 1261-1266 (2017), incorporated herein by reference in its entirety. Briefly, PANCE is a technique for rapid in vivo directed evolution using serial flask transfers of evolving selection phage (SP), which contain a gene of interest to be evolved, across fresh host cells (e.g., E. coli cells). Genes inside the host cell may be held constant while genes contained in the SP continuously evolve. Following phage growth, an aliquot of infected cells may be used to transfect a subsequent flask containing host E. coli. This process can be repeated and/or continued until the desired phenotype is evolved, e.g., for as many transfers as desired.

[0653] Methods of applying PACE and PANCE to Gene Writers may be readily appreciated by the skilled artisan by reference to, inter alia, the foregoing references. Additional exemplary methods for directing continuous evolution of genome-modifying proteins or systems, e.g., in a population of host cells, e.g., using phage particles, can be applied to generate evolved variants of Gene Writers, or fragments or subdomains thereof. Non-limiting examples of such methods are described in International PCT Application, PCT/US2009/056194, filed Sep. 8, 2009, published as WO 2010/028347 on Mar. 11, 2010; International PCT Application, PCT/US2011/066747, filed Dec. 22, 2011, published as WO 2012/088381 on Jun. 28, 2012; U.S. Pat. No. 9,023,594, issued May 5, 2015; U.S. Pat. No. 9,771,574, issued Sep. 26, 2017; U.S. Pat. No. 9,394,537, issued Jul. 19, 2016; International PCT Application, PCT/US2015/012022, filed Jan. 20, 2015, published as WO 2015/134121 on Sep. 11, 2015; U.S. Pat. No. 10,179,911, issued Jan. 15, 2019; International Application No. PCT/US2019/37216, filed Jun. 14, 2019, International Patent Publication WO 2019/023680, published Jan. 31, 2019, International PCT Application, PCT/US2016/027795, filed Apr. 15, 2016, published as WO 2016/168631 on Oct. 20, 2016, and International Patent Publication No. PCT/US2019/47996, filed Aug. 23, 2019, each of which is incorporated herein by reference in its entirety.

[0654] In some non-limiting illustrative embodiments, a method of evolution of a evolved variant Gene Writer, of a fragment or domain thereof, comprises: (a) contacting a population of host cells with a population of viral vectors comprising the gene of interest (the starting Gene Writer or fragment or domain thereof), wherein: (1) the host cell is amenable to infection by the viral vector; (2) the host cell expresses viral genes required for the generation of viral particles; (3) the expression of at least one viral gene required for the production of an infectious viral particle is dependent on a function of the gene of interest; and/or (4) the viral vector allows for expression of the protein in the host cell, and can be replicated and packaged into a viral particle by the host cell. In some embodiments, the method comprises (b) contacting the host cells with a mutagen, using host cells with mutations that elevate mutation rate (e.g., either by carrying a mutation plasmid or some genome modification—e.g., proofing-impaired DNA polymerase, SOS genes, such as UmuC, UmuD′, and/or RecA, which mutations, if plasmid-bound, may be under control of an inducible promoter), or a combination thereof. In some embodiments, the method comprises (c) incubating the population of host cells under conditions allowing for viral replication and the production of viral particles, wherein host cells are removed from the host cell population, and fresh, uninfected host cells are introduced into the population of host cells, thus replenishing the population of host cells and creating a flow of host cells. In some embodiments, the cells are incubated under conditions allowing for the gene of interest to acquire a mutation. In some embodiments, the method further comprises (d) isolating a mutated version of the viral vector, encoding an evolved gene product (e.g., an evolved variant Gene Writer, or fragment or domain thereof), from the population of host cells.

[0655] The skilled artisan will appreciate a variety of features employable within the above-described framework. For example, in some embodiments, the viral vector or the phage is a filamentous phage, for example, an M13 phage, e.g., an M13 selection phage. In certain embodiments, the gene required for the production of infectious viral particles is the M13 gene III (gIII). In embodiments, the phage may lack a functional gIII, but otherwise comprise gI, gII, gIV, gV, gVI, gVII, gVIII, gIX, and a gX. In some embodiments, the generation of infectious VSV particles involves the envelope protein VSV-G. Various embodiments can use different retroviral vectors, for example, Murine Leukemia Virus vectors, or Lentiviral vectors, e.g., packaged with VSV-G envelope protein, e.g., as a substitute for the native envelope protein of the virus.

[0656] In some embodiments, host cells are incubated according to a suitable number of viral life cycles, e.g., at least 10, at least 20, at least 30, at least 40, at least 50, at least 100, at least 200, at least 300, at least 400, at least, 500, at least 600, at least 700, at least 800, at least 900, at least 1000, at least 1250, at least 1500, at least 1750, at least 2000, at least 2500, at least 3000, at least 4000, at least 5000, at least 7500, at least 10000, or more consecutive viral life cycles, which in on illustrative and non-limiting examples of M13 phage is 10-20 minutes per virus life cycle. Similarly, conditions can be modulated to adjust the time a host cell remains in a population of host cells, e.g., about 10, about 11, about 12, about 13, about 14, about 15, about 16, about 17, about 18, about 19, about 20, about 21, about 22, about 23, about 24, about 25, about 30, about 35, about 40, about 45, about 50, about 55, about 60, about 70, about 80, about 90, about 100, about 120, about 150, or about 180 minutes. Host cell populations can be controlled in part by density of the host cells, or, in some embodiments, the host cell density in an inflow, e.g., 10³ cells/ml, about 10⁴ cells/ml, about 10⁵ cells/ml, about 5-10⁵ cells/ml, about 10⁶ cells/ml, about 5-10⁶ cells/ml, about 10⁷ cells/ml, about 5-10⁷ cells/ml, about 10⁸ cells/ml, about 5-10⁸ cells/ml, about 10⁹ cells/ml, about 5·10⁹ cells/ml, about 10¹⁰ cells/ml, or about 5·10¹⁰ cells/ml.

### Nucleic Acids

### Promoters

[0657] In some embodiments, one or more promoter or enhancer elements are operably linked to a nucleic acid encoding a Gene Writer polypeptide or a template nucleic acid, e.g., that controls expression of the heterologous object sequence. In certain embodiments, the one or more promoter or enhancer elements comprise cell-type or tissue specific elements. In some embodiments, the promoter or enhancer is the same or derived from the promoter or enhancer that naturally controls expression of the heterologous object sequence. For example, the ornithine transcarbomylase promoter and enhancer may be used to control expression of the ornithine transcarbomylase gene in a system or method provided by the invention for correcting ornithine transcarbomylase deficiencies. In some embodiments, the promoter is a promoter of Table 8 or a functional fragment or variant thereof.

[0658] Exemplary tissue specific promoters that are commercially available can be found, for example, at a uniform resource locator (e.g., https://www.invivogen.com/tissue-specific-promoters). In some embodiments, a promoter is a native promoter or a minimal promoter, e.g., which consists of a single fragment from the 5′ region of a given gene. In some embodiments, a native promoter comprises a core promoter and its natural 5′ UTR. In some embodiments, the 5′ UTR comprises an intron. In other embodiments, these include composite promoters, which combine promoter elements of different origins or were generated by assembling a distal enhancer with a minimal promoter of the same origin. In some embodiments, a tissue-specific expression-control sequence(s) comprises one or more of the sequences in Table 2 or Table 3 of PCT Publication No. WO2020014209 (incorporated herein by reference in its entirety).

[0659] Exemplary cell or tissue specific promoters are provided in the tables, below, and exemplary nucleic acid sequences encoding them are known in the art and can be readily accessed using a variety of resources, such as the NCBI database, including RefSeq, as well as the Eukaryotic Promoter Database (http://epd.epfl.ch//index.php).

TABLE 8
Exemplary cell or tissue-specific promoters

| Promoter | Target cells |
|---|---|
| B29 Promoter | B cells |
| CD14 Promoter | Monocytic Cells |
| CD43 Promoter | Leukocytes and platelets |
| CD45 Promoter | Hematopoeitic cells |
| CD68 promoter | macrophages |
| Desmin promoter | muscle cells |
| Elastase-1 | pancreatic acinar cells |
| promoter | |
| Endoglin promoter | endothelial cells |
| fibronectin | differentiating cells, healing |
| promoter | tissue |
| Flt-1 promoter | endothelial cells |
| GFAP promoter | Astrocytes |
| GPIIB promoter | megakaryocytes |
| ICAM-2 Promoter | Endothelial cells |
| INF-Beta promoter | Hematopoeitic cells |
| Mb promoter | muscle cells |
| Nphs1 promoter | podocytes |
| OG-2 promoter | Osteoblasts, Odonblasts |
| SP-B promoter | Lung |
| Syn1 promoter | Neurons |
| WASP promoter | Hematopoeitic cells |
| SV40/bAlb | Liver |
| promoter | |
| SV40/bAlb | Liver |
| promoter | |
| SV40/Cd3 | Leukocytes and platelets |
| promoter | |
| SV40/CD45 | hematopoeitic cells |
| promoter | |
| NSE/RU5′ | Mature Neurons |
| promoter | |

TABLE 9
Additional exemplary cell or tissue-specific promoters

| Promoter | Gene Description | Gene Specificity |
|---|---|---|
| APOA2 | Apolipoprotein A-II | Hepatocytes (from hepatocyte |
| | | progenitors) |
| SERPINA | Serpin peptidase inhibitor, clade A | Hepatocytes (from |
| 1 (hAAT) | (alpha-1 antiproteinase, antitrypsin), | definitive endoderm stage) |
| | member 1 (also named alpha 1 | |
| | anti-tryps in) | |
| CYP3A | Cytochrome P450, family 3, | Mature Hepatocytes |
| | subfamily A, polypeptide | |
| MIR122 | MicroRNA 122 | Hepatocytes |
| | | (from early stage embryonic |
| | | liver cells) |
| | | and endoderm |

Pancreatic specific promoters

| | | |
|---|---|---|
| INS | Insulin | Pancreatic beta cells |
| | | (from definitive endoderm stage) |
| IRS2 | Insulin receptor substrate 2 | Pancreatic beta cells |
| Pdx1 | Pancreatic and duodenal | Pancreas |
| | homeobox 1 | (from definitive endoderm stage) |
| Alx3 | Aristaless-like homeobox 3 | Pancreatic beta cells |
| | | (from definitive endoderm stage) |
| Ppy | Pancreatic polypeptide | PP pancreatic cells |
| | | (gamma cells) |

Cardiac specific promoters

| | | |
|---|---|---|
| Myh6 | Myosin, heavy chain 6, cardiac | Late differentiation marker of cardiac |
| (aMHC) | muscle, alpha | muscle cells (atrial specificity) |
| MYL2 | Myosin, light chain 2, regulatory, | Late differentiation marker of cardiac |
| (MLC-2v) | cardiac, slow | muscle cells (ventricular specificity) |
| ITNNl3 | Troponin I type 3 (cardiac) | Cardiomyocytes |
| (cTnl) | | (from immature state) |
| ITNNl3 | Troponin I type 3 (cardiac) | Cardiomyocytes |
| (cTnl) | | (from immature state) |
| NPPA | Natriuretic peptide precursor A (also | Atrial specificity in adult cells |
| (ANF) | named Atrial Natriuretic Factor) | |
| Slc8a1 | Solute carrier family 8 | Cardiomyocytes from early |
| (Ncx1) | (sodium/calcium exchanger), member | developmental stages |
| | 1 | |

CNS specific promoters

| | | |
|---|---|---|
| SYN1 | Synapsin I | Neurons |
| (hSyn) | | |
| GFAP | Glial fibrillary acidic protein | Astrocytes |
| INA | Internexin neuronal intermediate | Neuroprogenitors |
| | filament protein, alpha (a-internexin) | |
| NES | Nestin | Neuroprogenitors and ectoderm |
| MOBP | Myelin-associated oligodendrocyte | Oligodendrocytes |
| | basic protein | |
| MBP | Myelin basic protein | Oligodendrocytes |
| TH | Tyrosine hydroxylase | Dopaminergic neurons |
| FOXA2 | Forkhead box A2 | Dopaminergic neurons (also used as a |
| (HNF3 | | marker of endoderm) |
| beta) | | |

Skin specific promoters

| | | |
|---|---|---|
| FLG | Filaggrin | Keratinocytes from granular layer |
| K14 | Keratin 14 | Keratinocytes from granular |
| | | and basal layers |
| TGM3 | Transglutaminase 3 | Keratinocytes from granular layer |

Immune cell specific promoters

| | | |
|---|---|---|
| ITGAM | Integrin, alpha M (complement | Monocytes, macrophages, granulocytes, |
| (CD11B) | component 3 receptor 3 subunit) | natural killer cells |

Urogential cell specific promoters

| | | |
|---|---|---|
| Pbsn | Probasin | Prostatic epithelium |
| Upk2 | Uroplakin 2 | Bladder |
| Sbp | Spermine binding protein | Prostate |
| Fer1l4 | Fer-1-like 4 | Bladder |

Endothelial cell specific promoters

| | | |
|---|---|---|
| ENG | Endoglin | Endothelial cells |

Pluripotent and embryonic cell specific promoters

| | | |
|---|---|---|
| Oct4 | POU class 5 homeobox 1 | Pluripotent cells |
| (POU5F1) | | (germ cells, ES cells, iPS cells) |
| NANOG | Nanog homeobox | Pluripotent cells |
| | | (ES cells, iPS cells) |
| Synthetic | Synthetic promoter based on a Oct-4 | Pluripotent cells (ES cells, iPS cells) |
| Oct4 | core enhancer element | |
| T | Brachyury | Mesoderm |
| brachyury | | |
| NES | Nestin | Neuroprogenitors and Ectoderm |
| SOX17 | SRY (sex determining region Y)-box | Endoderm |
| | 17 | |
| FOXA2 | Forkhead box A2 | Endoderm (also used as a marker of |
| (HNFJ | | dopaminergic neurons) |
| beta) | | |
| MIR122 | MicroRNA 122 | Endoderm and hepatocytes |
| | | (from early stage embryonic liver cells~ |

[0660] Depending on the host/vector system utilized, any of a number of suitable transcription and translation control elements, including constitutive and inducible promoters, transcription enhancer elements, transcription terminators, etc. may be used in the expression vector (see e.g., Bitter et al. (1987) Methods in Enzymology, 153:516-544; incorporated herein by reference in its entirety).

[0661] In some embodiments, a nucleic acid encoding a Gene Writer or template nucleic acid is operably linked to a control element, e.g., a transcriptional control element, such as a promoter. The transcriptional control element may, in some embodiment, be functional in either a eukaryotic cell, e.g., a mammalian cell; or a prokaryotic cell (e.g., bacterial or archaeal cell). In some embodiments, a nucleotide sequence encoding a polypeptide is operably linked to multiple control elements, e.g., that allow expression of the nucleotide sequence encoding the polypeptide in both prokaryotic and eukaryotic cells.

[0662] For illustration purposes, examples of spatially restricted promoters include, but are not limited to, neuron-specific promoters, adipocyte-specific promoters, cardiomyocyte-specific promoters, smooth muscle-specific promoters, photoreceptor-specific promoters, etc. Neuron-specific spatially restricted promoters include, but are not limited to, a neuron-specific enolase (NSE) promoter (see, e.g., EMBL HSENO2, X51956); an aromatic amino acid decarboxylase (AADC) promoter, a neurofilament promoter (see, e.g., GenBank HUMNFL, L04147); a synapsin promoter (see, e.g., GenBank HUMSYNIB, M55301); a thy-1 promoter (see, e.g., Chen et al. (1987) Cell 51:7-19; and Llewellyn, et al. (2010) Nat. Med. 16(10):1161-1166); a serotonin receptor promoter (see, e.g., GenBank 562283); a tyrosine hydroxylase promoter (TH) (see, e.g., Oh et al. (2009) Gene Ther 16:437; Sasaoka et al. (1992) Mol. Brain Res. 16:274; Boundy et al. (1998) J. Neurosci. 18:9989; and Kaneda et al. (1991) Neuron 6:583-594); a GnRH promoter (see, e.g., Radovick et al. (1991) Proc. Natl. Acad. Sci. USA 88:3402-3406); an L7 promoter (see, e.g., Oberdick et al. (1990) Science 248:223-226); a DNMT promoter (see, e.g., Bartge et al. (1988) Proc. Natl. Acad. Sci. USA 85:3648-3652); an enkephalin promoter (see, e.g., Comb et al. (1988) EMBO J. 17:3793-3805); a myelin basic protein (MBP) promoter; a Ca2+-calmodulin-dependent protein kinase II-alpha (CamKIIa) promoter (see, e.g., Mayford et al. (1996) Proc. Natl. Acad. Sci. USA 93:13250; and Casanova et al. (2001) Genesis 31:37); a CMV enhancer/platelet-derived growth factor-O promoter (see, e.g., Liu et al. (2004) Gene Therapy 11:52-60); and the like.

[0663] Adipocyte-specific spatially restricted promoters include, but are not limited to, the aP2 gene promoter/enhancer, e.g., a region from −5.4 kb to +21 bp of a human aP2 gene (see, e.g., Tozzo et al. (1997) Endocrinol. 138:1604; Ross et al. (1990) Proc. Natl. Acad. Sci. USA 87:9590; and Pavjani et al. (2005) Nat. Med. 11:797); a glucose transporter-4 (GLUT4) promoter (see, e.g., Knight et al. (2003) Proc. Natl. Acad. Sci. USA 100:14725); a fatty acid translocase (FAT/CD36) promoter (see, e.g., Kuriki et al. (2002) Biol. Pharm. Bull. 25:1476; and Sato et al. (2002) J. Biol. Chem. 277:15703); a stearoyl-CoA desaturase-1 (SCD1) promoter (Tabor et al. (1999) J. Biol. Chem. 274:20603); a leptin promoter (see, e.g., Mason et al. (1998) Endocrinol. 139:1013; and Chen et al. (1999) Biochem. Biophys. Res. Comm. 262:187); an adiponectin promoter (see, e.g., Kita et al. (2005) Biochem. Biophys. Res. Comm. 331:484; and Chakrabarti (2010) Endocrinol. 151:2408); an adipsin promoter (see, e.g., Platt et al. (1989) Proc. Natl. Acad. Sci. USA 86:7490); a resistin promoter (see, e.g., Seo et al. (2003) Molec. Endocrinol. 17:1522); and the like.

[0664] Cardiomyocyte-specific spatially restricted promoters include, but are not limited to, control sequences derived from the following genes: myosin light chain-2, a-myosin heavy chain, AE3, cardiac troponin C, cardiac actin, and the like. Franz et al. (1997) Cardiovasc. Res. 35:560-566; Robbins et al. (1995) Ann. N.Y. Acad. Sci. 752:492-505; Linn et al. (1995) Circ. Res. 76:584-591; Parmacek et al. (1994) Mol. Cell. Biol. 14:1870-1885; Hunter et al. (1993) Hypertension 22:608-617; and Sartorelli et al. (1992) Proc. Natl. Acad. Sci. USA 89:4047-4051.

[0665] Smooth muscle-specific spatially restricted promoters include, but are not limited to, an SM22a promoter (see, e.g., Akyurek et al. (2000) Mol. Med. 6:983; and U.S. Pat. No. 7,169,874); a smoothelin promoter (see, e.g., WO 2001/018048); an a-smooth muscle actin promoter; and the like. For example, a 0.4 kb region of the SM22a promoter, within which lie two CArG elements, has been shown to mediate vascular smooth muscle cell-specific expression (see, e.g., Kim, et al. (1997) Mol. Cell. Biol. 17, 2266-2278; Li, et al., (1996) J. Cell Biol. 132, 849-859; and Moessler, et al. (1996) Development 122, 2415-2425).

[0666] Photoreceptor-specific spatially restricted promoters include, but are not limited to, a rhodopsin promoter; a rhodopsin kinase promoter (Young et al. (2003) Ophthalmol. Vis. Sci. 44:4076); a beta phosphodiesterase gene promoter (Nicoud et al. (2007) J. Gene Med. 9:1015); a retinitis pigmentosa gene promoter (Nicoud et al. (2007) supra); an interphotoreceptor retinoid-binding protein (IRBP) gene enhancer (Nicoud et al. (2007) supra); an IRBP gene promoter (Yokoyama et al. (1992) Exp Eye Res. 55:225); and the like.

### Nonlimiting Exemplary Cell-Specific Promoters

[0667] Cell-specific promoters known in the art may be used to direct expression of a Gene Writer protein, e.g., as described herein. Nonlimiting exemplary mammalian cell-specific promoters have been characterized and used in mice expressing Cre recombinase in a cell-specific manner. Certain nonlimiting exemplary mammalian cell-specific promoters are listed in Table 1 of U.S. Pat. No. 9,845,481, incorporated herein by reference.

[0668] In some embodiments, the cell-specific promoter is a promoter that is active in plants. Many exemplary cell-specific plant promoters are known in the art. See, e.g., U.S. Pat. Nos. 5,097,025; 5,783,393; 5,880,330; 5,981,727; 7,557,264; 6,291,666; 7,132,526; and 7,323,622; and U.S. Publication Nos. 2010/0269226; 2007/0180580; 2005/0034192; and 2005/0086712, which are incorporated by reference herein in their entireties for any purpose.

[0669] In some embodiments, a vector as described herein comprises an expression cassette. The term “expression cassette”, as used herein, refers to a nucleic acid construct comprising nucleic acid elements sufficient for the expression of the nucleic acid molecule of the instant invention. Typically, an expression cassette comprises the nucleic acid molecule of the instant invention operatively linked to a promoter sequence. The term “operatively linked” refers to the association of two or more nucleic acid fragments on a single nucleic acid fragment so that the function of one is affected by the other. For example, a promoter is operatively linked with a coding sequence when it is capable of affecting the expression of that coding sequence (e.g., the coding sequence is under the transcriptional control of the promoter). Encoding sequences can be operatively linked to regulatory sequences in sense or antisense orientation. In certain embodiments, the promoter is a heterologous promoter. The term “heterologous promoter”, as used herein, refers to a promoter that is not found to be operatively linked to a given encoding sequence in nature. In certain embodiments, an expression cassette may comprise additional elements, for example, an intron, an enhancer, a polyadenylation site, a woodchuck response element (WRE), and/or other elements known to affect expression levels of the encoding sequence. A “promoter” typically controls the expression of a coding sequence or functional RNA. In certain embodiments, a promoter sequence comprises proximal and more distal upstream elements and can further comprise an enhancer element. An “enhancer” can typically stimulate promoter activity and may be an innate element of the promoter or a heterologous element inserted to enhance the level or tissue-specificity of a promoter. In certain embodiments, the promoter is derived in its entirety from a native gene. In certain embodiments, the promoter is composed of different elements derived from different naturally occurring promoters. In certain embodiments, the promoter comprises a synthetic nucleotide sequence. It will be understood by those skilled in the art that different promoters will direct the expression of a gene in different tissues or cell types, or at different stages of development, or in response to different environmental conditions or to the presence or the absence of a drug or transcriptional co-factor. Ubiquitous, cell-type-specific, tissue-specific, developmental stage-specific, and conditional promoters, for example, drug-responsive promoters (e.g., tetracycline-responsive promoters) are well known to those of skill in the art. Examples of promoter include, but are not limited to, the phosphoglycerate kinase (PKG) promoter, CAG (composite of the CMV enhancer the chicken beta actin promoter (CBA) and the rabbit beta globin intron.), NSE (neuronal specific enolase), synapsin or NeuN promoters, the SV40 early promoter, mouse mammary tumor virus LTR promoter; adenovirus major late promoter (Ad MLP); a herpes simplex virus (HSV) promoter, a cytomegalovirus (CMV) promoter such as the CMV immediate early promoter region (CMVIE), SFFV promoter, rous sarcoma virus (RSV) promoter, synthetic promoters, hybrid promoters, and the like. Other promoters can be of human origin or from other species, including from mice. Common promoters include, e.g., the human cytomegalovirus (CMV) immediate early gene promoter, the SV40 early promoter, the Rous sarcoma virus long terminal repeat, [beta]-actin, rat insulin promoter, the phosphoglycerate kinase promoter, the human alpha-1 antitrypsin (hAAT) promoter, the transthyretin promoter, the TBG promoter and other liver-specific promoters, the desmin promoter and similar muscle-specific promoters, the EF1-alpha promoter, the CAG promoter and other constitutive promoters, hybrid promoters with multi-tissue specificity, promoters specific for neurons like synapsin and glyceraldehyde-3-phosphate dehydrogenase promoter, all of which are promoters well known and readily available to those of skill in the art, can be used to obtain high-level expression of the coding sequence of interest. In addition, sequences derived from non-viral genes, such as the murine metallothionein gene, will also find use herein. Such promoter sequences are commercially available from, e.g., Stratagene (San Diego, CA). Additional exemplary promoter sequences are described, for example, in WO2018213786A1 (incorporated by reference herein in its entirety).

[0670] In some embodiments, the apolipoprotein E enhancer (ApoE) or a functional fragment thereof is used, e.g., to drive expression in the liver. In some embodiments, two copies of the ApoE enhancer or a functional fragment thereof is used. In some embodiments, the ApoE enhancer or functional fragment thereof is used in combination with a promoter, e.g., the human alpha-1 antitrypsin (hAAT) promoter.

[0671] In some embodiments, the regulatory sequences impart tissue-specific gene expression capabilities. In some cases, the tissue-specific regulatory sequences bind tissue-specific transcription factors that induce transcription in a tissue specific manner. Various tissue-specific regulatory sequences (e.g., promoters, enhancers, etc.) are known in the art. Exemplary tissue-specific regulatory sequences include, but are not limited to, the following tissue-specific promoters: a liver-specific thyroxin binding globulin (TBG) promoter, a insulin promoter, a glucagon promoter, a somatostatin promoter, a pancreatic polypeptide (PPY) promoter, a synapsin-1 (Syn) promoter, a creatine kinase (MCK) promoter, a mammalian desmin (DES) promoter, a α-myosin heavy chain (a-MHC) promoter, or a cardiac Troponin T (cTnT) promoter. Other exemplary promoters include Beta-actin promoter, hepatitis B virus core promoter, Sandig et al., Gene Ther., 3:1002-9 (1996); alpha-fetoprotein (AFP) promoter, Arbuthnot et al., Hum. Gene Ther., 7:1503-14 (1996)), bone osteocalcin promoter (Stein et al., Mol. Biol. Rep., 24:185-96 (1997)); bone sialoprotein promoter (Chen et al., J. Bone Miner. Res., 11:654-64 (1996)), CD2 promoter (Hansal et al., J. Immunol., 161:1063-8 (1998); immunoglobulin heavy chain promoter; T cell receptor a-chain promoter, neuronal such as neuron-specific enolase (NSE) promoter (Andersen et al., Cell. Mol. Neurobiol., 13:503-15 (1993)), neurofilament light-chain gene promoter (Piccioli et al., Proc. Natl. Acad. Sci. USA, 88:5611-5 (1991)), and the neuron-specific vgf gene promoter (Piccioli et al., Neuron, 15:373-84 (1995)), and others. Additional exemplary promoter sequences are described, for example, in U.S. patent Ser. No. 10/300,146 (incorporated herein by reference in its entirety). In some embodiments, a tissue-specific regulatory element, e.g., a tissue-specific promoter, is selected from one known to be operably linked to a gene that is highly expressed in a given tissue, e.g., as measured by RNA-seq or protein expression data, or a combination thereof. Methods for analyzing tissue specificity by expression are taught in Fagerberg et al. Mol Cell Proteomics 13(2):397-406 (2014), which is incorporated herein by reference in its entirety.

[0672] In some embodiments, a vector described herein is a multicistronic expression construct. Multicistronic expression constructs include, for example, constructs harboring a first expression cassette, e.g. comprising a first promoter and a first encoding nucleic acid sequence, and a second expression cassette, e.g. comprising a second promoter and a second encoding nucleic acid sequence. Such multicistronic expression constructs may, in some instances, be particularly useful in the delivery of non-translated gene products, such as hairpin RNAs, together with a polypeptide, for example, a gene writer and gene writer template. In some embodiments, multicistronic expression constructs may exhibit reduced expression levels of one or more of the included transgenes, for example, because of promoter interference or the presence of incompatible nucleic acid elements in close proximity. If a multicistronic expression construct is part of a viral vector, the presence of a self-complementary nucleic acid sequence may, in some instances, interfere with the formation of structures necessary for viral reproduction or packaging.

[0673] In some embodiments, the sequence encodes an RNA with a hairpin. In some embodiments, the hairpin RNA is a guide RNA, a template RNA, shRNA, or a microRNA. In some embodiments, the first promoter is an RNA polymerase I promoter. In some embodiments, the first promoter is an RNA polymerase II promoter. In some embodiments, the second promoter is an RNA polymerase III promoter. In some embodiments, the second promoter is a U6 or H1 promoter. In some embodiments, the nucleic acid construct comprises the structure of AAV construct B1 or B2.

[0674] Without wishing to be bound by theory, multicistronic expression constructs may not achieve optimal expression levels as compared to expression systems containing only one cistron. One of the suggested causes of lower expression levels achieved with multicistronic expression constructs comprising two or more promoter elements is the phenomenon of promoter interference (see, e.g., Curtin J A, Dane A P, Swanson A, Alexander I E, Ginn S L. Bidirectional promoter interference between two widely used internal heterologous promoters in a late-generation lentiviral construct. Gene Ther. 2008 March; 15(5):384-90; and Martin-Duque P, Jezzard S, Kaftansis L, Vassaux G. Direct comparison of the insulatingproperties of two genetic elements in an adenoviral vector containing two different expression cassettes. Hum Gene Ther. 2004 October; 15(10):995-1002; both references incorporated herein by reference for disclosure of promoter interference phenomenon). In some embodiments, the problem of promoter interference may be overcome, e.g., by producing multicistronic expression constructs comprising only one promoter driving transcription of multiple encoding nucleic acid sequences separated by internal ribosomal entry sites. In some embodiments, single-promoter driven expression of multiple cistrons may result in uneven expression levels of the cistrons. In some embodiments, a promoter cannot efficiently be isolated and isolation elements may not be compatible with some gene transfer vectors, for example, some retroviral vectors.

### MicroRNAs

[0675] MicroRNAs (miRNAs) and other small interfering nucleic acids generally regulate gene expression via target RNA transcript cleavage/degradation or translational repression of the target messenger RNA (mRNA). miRNAs may, in some instances, be natively expressed, typically as final 19-25 non-translated RNA products. miRNAs generally exhibit their activity through sequence-specific interactions with the 3′ untranslated regions (UTR) of target mRNAs. These endogenously expressed miRNAs may form hairpin precursors that are subsequently processed into an miRNA duplex, and further into a mature single stranded miRNA molecule. This mature miRNA generally guides a multiprotein complex, miRISC, which identifies target 3′ UTR regions of target mRNAs based upon their complementarity to the mature miRNA. Useful transgene products may include, for example, miRNAs or miRNA binding sites that regulate the expression of a linked polypeptide. A non-limiting list of miRNA genes; the products of these genes and their homologues are useful as transgenes or as targets for small interfering nucleic acids (e.g., miRNA sponges, antisense oligonucleotides), e.g., in methods such as those listed in U.S. Ser. No. 10/300,146, 22:25-25:48, incorporated by reference. In some embodiments, one or more binding sites for one or more of the foregoing miRNAs are incorporated in a transgene, e.g., a transgene delivered by a rAAV vector, e.g., to inhibit the expression of the transgene in one or more tissues of an animal harboring the transgene. In some embodiments, a binding site may be selected to control the expression of a transgene in a tissue specific manner. For example, binding sites for the liver-specific miR-122 may be incorporated into a transgene to inhibit expression of that transgene in the liver. Additional exemplary miRNA sequences are described, for example, in U.S. patent Ser. No. 10/300,146 (incorporated herein by reference in its entirety). For liver-specific Gene Writing, however, overexpression of miR-122 may be utilized instead of using binding sites to effect miR-122-specific degradation. This miRNA is positively associated with hepatic differentiation and maturation, as well as enhanced expression of liver specific genes. Thus, in some embodiments, the coding sequence for miR-122 may be added to a component of a Gene Writing system to enhance a liver-directed therapy.

[0676] A miR inhibitor or miRNA inhibitor is generally an agent that blocks miRNA expression and/or processing. Examples of such agents include, but are not limited to, microRNA antagonists, microRNA specific antisense, microRNA sponges, and microRNA oligonucleotides (double-stranded, hairpin, short oligonucleotides) that inhibit miRNA interaction with a Drosha complex. MicroRNA inhibitors, e.g., miRNA sponges, can be expressed in cells from transgenes (e.g., as described in Ebert, M. S. Nature Methods, Epub Aug. 12, 2007; incorporated by reference herein in its entirety). In some embodiments, microRNA sponges, or other miR inhibitors, are used with the AAVs. microRNA sponges generally specifically inhibit miRNAs through a complementary heptameric seed sequence. In some embodiments, an entire family of miRNAs can be silenced using a single sponge sequence. Other methods for silencing miRNA function (derepression of miRNA targets) in cells will be apparent to one of ordinary skill in the art.

[0677] In some embodiments, a miRNA as described herein comprises a sequence listed in Table 4 of PCT Publication No. WO2020014209, incorporated herein by reference. Also incorporated herein by reference are the listing of exemplary miRNA sequences from WO2020014209.

[0678] In some embodiments, it is advantageous to silence one or more components of a Gene Writing system (e.g., mRNA encoding a Gene Writer polypeptide, a Gene Writer Template RNA, or a heterologous object sequence expressed from the genome after successful Gene Writing) in a portion of cells. In some embodiments, it is advantageous to restrict expression of a component of a Gene Writing system to select cell types within a tissue of interest.

[0679] For example, it is known that in a given tissue, e.g., liver, macrophages and immune cells, e.g., Kupffer cells in the liver, may engage in uptake of a delivery vehicle for one or more components of a Gene Writing system. In some embodiments, at least one binding site for at least one miRNA highly expressed in macrophages and immune cells, e.g., Kupffer cells, is included in at least one component of a Gene Writing system, e.g., nucleic acid encoding a Gene Writing polypeptide or a transgene. In some embodiments, a miRNA that targets the one or more binding sites is listed in a table referenced herein, e.g., miR-142, e.g., mature miRNA hsa-miR-142-5p or hsa-miR-142-3p.

[0680] In some embodiments, there may be a benefit to decreasing Gene Writer levels and/or Gene Writer activity in cells in which Gene Writer expression or overexpression of a transgene may have a toxic effect. For example, it has been shown that delivery of a transgene overexpression cassette to dorsal root ganglion neurons may result in toxicity of a gene therapy (see Hordeaux et al Sci Transl Med 12(569):eaba9188 (2020), incorporated herein by reference in its entirety). In some embodiments, at least one miRNA binding site may be incorporated into a nucleic acid component of a Gene Writing system to reduce expression of a system component in a neuron, e.g., a dorsal root ganglion neuron. In some embodiments, the at least one miRNA binding site incorporated into a nucleic acid component of a Gene Writing system to reduce expression of a system component in a neuron is a binding site of miR-182, e.g., mature miRNA hsa-miR-182-5p or hsa-miR-182-3p. In some embodiments, the at least one miRNA binding site incorporated into a nucleic acid component of a Gene Writing system to reduce expression of a system component in a neuron is a binding site of miR-183, e.g., mature miRNA hsa-miR-183-5p or hsa-miR-183-3p. In some embodiments, combinations of miRNA binding sites may be used to enhance the restriction of expression of one or more components of a Gene Writing system to a tissue or cell type of interest.

[0681] The table below provides exemplary miRNAs and corresponding expressing cells, e.g., a miRNA for which one can, in some embodiments, incorporate binding sites (complementary sequences) in the transgene or polypeptide nucleic acid, e.g., to decrease expression in that off-target cell.

TABLE 10
Exemplary miRNA from off-target cells and tissues

| Silenced | miRNA | Mature | |
|---|---|---|---|
| cell type | name | miRNA | miRNA sequence |
| Kupffer cells | miR-142 | hsa-miR- | cauaaaguagaaag |
| | | 142-5p | cacuacu |
| Kupffer cells | miR-142 | hsa-miR- | uguaguguuuccua |
| | | 142-3p | cuuuaugga |
| Dorsal root | miR-182 | hsa-miR- | uuuggcaaugguag |
| ganglion neurons | | 182-5p | aacucacacu |
| Dorsal root | miR-182 | hsa-miR- | ugguucuagacuug |
| ganglion neurons | | 182-3p | ccaacua |
| Dorsal root | miR-183 | hsa-miR- | uauggcacugguag |
| ganglion neurons | | 183-5p | aauucacu |
| Dorsal root | miR-183 | hsa-miR- | gugaauuaccgaag |
| ganglion neurons | | 183-3p | ggccauaa |
| Hepatocytes | miR-122 | hsa-miR- | uggagugugacaau |
| | | 122-5p | gguguuug |
| Hepatocytes | miR-122 | hsa-miR- | aacgccauuaucac |
| | | 122-3p | acuaaaua |

### 5′ UTR and 3′ UTR

[0682] In certain embodiments, a nucleic acid comprising an open reading frame encoding a Gene Writer polypeptide (e.g., as described herein) comprises a 5′ UTR and/or a 3′ UTR. In embodiments, a 5′ UTR and 3′ UTR for protein expression, e.g., mRNA (or DNA encoding the RNA) for a Gene Writer polypeptide or heterologous object sequence, comprise optimized expression sequences. In some embodiments, the 5′ UTR comprises GGGAAAUAAGAGAGAAAAGAAGAGUAAGAAGAAAUAUAAGAGCCACC and/or the 3′ UTR comprising UGAUAAUAGGCUGGAGCCUCGGUGGCCAUGCUUCUUGCCCCUUGGGCCUCCCCCC AGCCCCUCCUCCCCUUCCUGCACCCGUACCCCCGUGGUCUUUGAAUAAAGUCUGA, e.g., as described in Richner et al. Cell 168(6): P1114-1125 (2017), the sequences of which are incorporated herein by reference.

[0683] In some embodiments, an open reading frame of a Gene Writer system, e.g., an ORF of an mRNA (or DNA encoding an mRNA) encoding a Gene Writer polypeptide or one or more ORFs of an mRNA (or DNA encoding an mRNA) of a heterologous object sequence, is flanked by a 5′ and/or 3′ untranslated region (UTR) that enhances the expression thereof. In some embodiments, the 5′ UTR of an mRNA component (or transcript produced from a DNA component) of the system comprises the sequence 5′-GGGAAAUAAGAGAGAAAAGAAGAGUAAGAAGAAAUAUAAGAGCCACC-3′. In some embodiments, the 3′ UTR of an mRNA component (or transcript produced from a DNA component) of the system comprises the sequence 5′-UGAUAAUAGGCUGGAGCCUCGGUGGCCAUGCUUCUUGCCCCUUGGGCCUCCCCCC AGCCCCUCCUCCCCUUCCUGCACCCGUACCCCCGUGGUCUUUGAAUAAAGUCUGA-3′. This combination of 5′ UTR and 3′ UTR has been shown to result in desirable expression of an operably linked ORF by Richner et al. Cell 168(6): P1114-1125 (2017), the teachings and sequences of which are incorporated herein by reference. In some embodiments, a system described herein comprises a DNA encoding a transcript, wherein the DNA comprises the corresponding 5′ UTR and 3′ UTR sequences, with T substituting for U in the above-listed sequence). In some embodiments, a DNA vector used to produce an RNA component of the system further comprises a promoter upstream of the 5′ UTR for initiating in vitro transcription, e.g., a T7, T3, or SP6 promoter. The 5′ UTR above begins with GGG, which is a suitable start for optimizing transcription using T7 RNA polymerase. For tuning transcription levels and altering the transcription start site nucleotides to fit alternative 5′ UTRs, the teachings of Davidson et al. Pac Symp Biocomput 433-443 (2010) describe T7 promoter variants, and the methods of discovery thereof, that fulfill both of these traits.

### Viral Vectors and Components Thereof

[0684] Viruses are a useful source of delivery vehicles for the systems described herein, in addition to a source of relevant enzymes or domains as described herein, e.g., as sources of recombinases and DNA binding domains used herein, e.g., Cre recombinase, lambda integrase, or the DNA binding domains from AAV Rep proteins. Some enzymes may have multiple activities. In some embodiments, the virus used as a Gene Writer delivery system or a source of components thereof may be selected from a group as described by Baltimore BacteriolRev 35(3):235-241 (1971).

[0685] In some embodiments, the virus is selected from a Group I virus, e.g., is a DNA virus and packages dsDNA into virions. In some embodiments, the Group I virus is selected from, e.g., Adenoviruses, Herpesviruses, Poxviruses.

[0686] In some embodiments, the virus is selected from a Group II virus, e.g., is a DNA virus and packages ssDNA into virions. In some embodiments, the Group II virus is selected from, e.g., Parvoviruses. In some embodiments, the parvovirus is a dependoparvovirus, e.g., an adeno-associated virus (AAV).

[0687] In some embodiments, the virus is selected from a Group III virus, e.g., is an RNA virus and packages dsRNA into virions. In some embodiments, the Group III virus is selected from, e.g., Reoviruses. In some embodiments, one or both strands of the dsRNA contained in such virions is a coding molecule able to serve directly as mRNA upon transduction into a host cell, e.g., can be directly translated into protein upon transduction into a host cell without requiring any intervening nucleic acid replication or polymerization steps.

[0688] In some embodiments, the virus is selected from a Group IV virus, e.g., is an RNA virus and packages ssRNA(+) into virions. In some embodiments, the Group IV virus is selected from, e.g., Coronaviruses, Picornaviruses, Togaviruses. In some embodiments, the ssRNA(+) contained in such virions is a coding molecule able to serve directly as mRNA upon transduction into a host cell, e.g., can be directly translated into protein upon transduction into a host cell without requiring any intervening nucleic acid replication or polymerization steps.

[0689] In some embodiments, the virus is selected from a Group V virus, e.g., is an RNA virus and packages ssRNA(−) into virions. In some embodiments, the Group V virus is selected from, e.g., Orthomyxoviruses, Rhabdoviruses. In some embodiments, an RNA virus with an ssRNA(−) genome also carries an enzyme inside the virion that is transduced to host cells with the viral genome, e.g., an RNA-dependent RNA polymerase, capable of copying the ssRNA(−) into ssRNA(+) that can be translated directly by the host.

[0690] In some embodiments, the virus is selected from a Group VI virus, e.g., is a retrovirus and packages ssRNA(+) into virions. In some embodiments, the Group VI virus is selected from, e.g., Retroviruses. In some embodiments, the retrovirus is a lentivirus, e.g., HIV-1, HIV-2, SIV, BIV. In some embodiments, the retrovirus is a spumavirus, e.g., a foamy virus, e.g., HFV, SFV, BFV. In some embodiments, the ssRNA(+) contained in such virions is a coding molecule able to serve directly as mRNA upon transduction into a host cell, e.g., can be directly translated into protein upon transduction into a host cell without requiring any intervening nucleic acid replication or polymerization steps. In some embodiments, the ssRNA(+) is first reverse transcribed and copied to generate a dsDNA genome intermediate from which mRNA can be transcribed in the host cell. In some embodiments, an RNA virus with an ssRNA(+) genome also carries an enzyme inside the virion that is transduced to host cells with the viral genome, e.g., an RNA-dependent DNA polymerase, capable of copying the ssRNA(+) into dsDNA that can be transcribed into mRNA and translated by the host.

[0691] In further embodiments, the virus is selected from a Group VI virus, e.g., is a retrovirus and packages ssRNA(+) into virions. In some embodiments, the Group VI virus is selected from, e.g., Retroviruses. In some embodiments, the retrovirus is a lentivirus, e.g., HIV-1 or HIV-2. In some embodiments, the retrovirus is a spumavirus, e.g., a foamy virus, e.g., human foamy virus (HFV). In some embodiments, the retrovirus is a deltaretrovirus, e.g., Human T-lymphotropic virus type 1 (HTLV-1) or HTLV-2. In some embodiments, the retrovirus is a gammaretrovirus, e.g., murine leukemia virus (MLV). In some embodiments, the ssRNA(+) contained in such virions is a coding molecule able to serve directly as mRNA upon transduction into a host cell, e.g., can be directly translated into protein upon transduction into a host cell without requiring any intervening nucleic acid replication or polymerization steps. In some embodiments, the ssRNA(+) is first reverse transcribed and copied to generate a dsDNA genome intermediate from which mRNA can be transcribed in the host cell. In some embodiments, an RNA virus with an ssRNA(+) genome also carries an enzyme inside the virion that is transduced to host cells with the viral genome, e.g., an RNA-dependent DNA polymerase, capable of copying the ssRNA(+) into dsDNA that can be transcribed into mRNA and translated by the host. In some embodiments, the reverse transcriptase domain is substituted with a heterologous reverse transcriptase domain, including, without limitation, a reverse transcriptase domain from a heterologous retrovirus, RNA virus, non-LTR retrotransposon, group II intron, diversity-generating element, retron, telomerase, retroplasmid, or an engineered polymerase, e.g., RTX (Ellefson et al Science 2016). The diversity of reverse transcriptases has been described in, but not limited to, those used by prokaryotes (Zimmerly et al. Microbiol 5 Spectr 3(2):MDNA3-0058-2014 (2015); Lampson B.C. (2007) Prokaryotic Reverse Transcriptases. In: Polaina J., MacCabe A.P. (eds) Industrial Enzymes. Springer, Dordrecht), viruses (Herschhorn et al. Cell Mol Life Sci 67(16):2717-2747 (2010); Menendez-Arias et al. Virus Res 234:153-176 (2017)), and mobile elements (Eickbush et al. Virus Res 134(1-2):221-234 (2008); Craig et al. Mobile DNA III 3^{rd} 10 Ed. DOI:10.1128/9781555819217 (2015)), each of which is incorporated herein by reference.

[0692] In some embodiments, the virus is selected from a Group VII virus, e.g., is a retrovirus and packages dsRNA into virions. In some embodiments, the Group VII virus is selected from, e.g., Hepadnaviruses. In some embodiments, one or both strands of the dsRNA contained in such virions is a coding molecule able to serve directly as mRNA upon transduction into a host cell, e.g., can be directly translated into protein upon transduction into a host cell without requiring any intervening nucleic acid replication or polymerization steps. In some embodiments, one or both strands of the dsRNA contained in such virions is first reverse transcribed and copied to generate a dsDNA genome intermediate from which mRNA can be transcribed in the host cell. In some embodiments, an RNA virus with a dsRNA genome also carries an enzyme inside the virion that is transduced to host cells with the viral genome, e.g., an RNA-dependent DNA polymerase, capable of copying the dsRNA into dsDNA that can be transcribed into mRNA and translated by the host.

[0693] In some embodiments, virions used to deliver nucleic acid in this invention may also carry enzymes involved in the process of Gene Writing. For example, a virion may contain a recombinase domain that is delivered into a host cell along with the nucleic acid. In some embodiments, a template nucleic acid may be associated with a Gene Writer polypeptide within a virion, such that both are co-delivered to a target cell upon transduction of the nucleic acid from the viral particle. In some embodiments, the nucleic acid in a virion may comprise DNA, e.g., linear ssDNA, linear dsDNA, circular ssDNA, circular dsDNA, minicircle DNA, dbDNA, ceDNA. In some embodiments, the nucleic acid in a virion may comprise RNA, e.g., linear ssRNA, linear dsRNA, circular ssRNA, circular dsRNA. In some embodiments, a viral genome may circularize upon transduction into a host cell, e.g., a linear ssRNA molecule may undergo a covalent linkage to form a circular ssRNA, a linear dsRNA molecule may undergo a covalent linkage to form a circular dsRNA or one or more circular ssRNA. In some embodiments, a viral genome may replicate by rolling circle replication in a host cell. In some embodiments, a viral genome may comprise a single nucleic acid molecule, e.g., comprise a non-segmented genome.

[0694] In some embodiments, a viral genome may comprise two or more nucleic acid molecules, e.g., comprise a segmented genome. In some embodiments, a nucleic acid in a virion may be associated with one or proteins. In some embodiments, one or more proteins in a virion may be delivered to a host cell upon transduction. In some embodiments, a natural virus may be adapted for nucleic acid delivery by the addition of virion packaging signals to the target nucleic acid, wherein a host cell is used to package the target nucleic acid containing the packaging signals.

[0695] In some embodiments, a virion used as a delivery vehicle may comprise a commensal human virus. In some embodiments, a virion used as a delivery vehicle may comprise an anellovirus, the use of which is described in WO2018232017A1, which is incorporated herein by reference in its entirety.

### Lentiviral Components and Helper Cells

[0696] In some embodiments, the retroviral nucleic acid comprises one or more of (e.g., all of): a 5′ promoter (e.g., to control expression of the entire packaged RNA), a 5′ LTR (e.g., that includes R (polyadenylation tail signal) and/or U5 which includes a primer activation signal), a primer binding site, a psi packaging signal, a RRE element for nuclear export, a promoter directly upstream of the transgene to control transgene expression, a transgene (or other exogenous agent element), a polypurine tract, and a 3′ LTR (e.g., that includes a mutated U3, a R, and U5). In some embodiments, the retroviral nucleic acid further comprises one or more of a cPPT and a WPRE.

[0697] A retrovirus typically replicates by reverse transcription of its genomic RNA into a linear double-stranded DNA copy and subsequently covalently integrates its genomic DNA into a host genome. Illustrative retroviruses suitable for use in particular embodiments, include, but are not limited to: Moloney murine leukemia virus (M-MuLV), Moloney murine sarcoma virus (MoMSV), Harvey murine sarcoma virus (HaMuSV), murine mammary tumor virus (MuMTV), gibbon ape leukemia virus (GaLV), feline leukemia virus (FLV), spumavirus, Friend murine leukemia virus, Murine Stem Cell Virus (MSCV) and Rous Sarcoma Virus (RSV)) and lentivirus.

[0698] In some embodiments the retrovirus is a Gammretrovirus. In some embodiments the retrovirus is an Epsilonretrovirus. In some embodiments the retrovirus is an Alpharetrovirus. In some embodiments the retrovirus is a Betaretrovirus. In some embodiments the retrovirus is a Deltaretrovirus. In some embodiments the retrovirus is a Lentivirus. In some embodiments the retrovirus is a Spumaretrovirus.

[0699] Illustrative lentiviruses include, but are not limited to: HIV (human immunodeficiency virus; including HIV type 1, and HIV type 2); visna-maedi virus (VMV) virus; the caprine arthritis-encephalitis virus (CAEV); equine infectious anemia virus (EIAV); feline immunodeficiency virus (FIV); bovine immune deficiency virus (BIV); and simian immunodeficiency virus (SIV). In some embodiments, HIV based vector backbones (i.e., HIV cis-acting sequence elements) are used.

[0700] In some embodiments, a vector herein is a nucleic acid molecule capable transferring or transporting another nucleic acid molecule. The transferred nucleic acid is generally linked to, e.g., inserted into, the vector nucleic acid molecule. A vector may include sequences that direct autonomous replication in a cell, or may include sequences sufficient to allow integration into host cell DNA. Useful vectors include, for example, plasmids (e.g., DNA plasmids or RNA plasmids), transposons, cosmids, bacterial artificial chromosomes, and viral vectors. Useful viral vectors include, e.g., replication defective retroviruses and lentiviruses.

[0701] A viral vector can comprise, e.g., a nucleic acid molecule (e.g., a transfer plasmid) that includes virus-derived nucleic acid elements that typically facilitate transfer of the nucleic acid molecule or integration into the genome of a cell or to a viral particle that mediates nucleic acid transfer. Viral particles will typically include various viral components and sometimes also host cell components in addition to nucleic acid(s). A viral vector can comprise, e.g., a virus or viral particle capable of transferring a nucleic acid into a cell, or to the transferred nucleic acid (e.g., as naked DNA). Viral vectors and transfer plasmids can comprise structural and/or functional genetic elements that are primarily derived from a virus. A retroviral vector can comprise a viral vector or plasmid containing structural and functional genetic elements, or portions thereof, that are primarily derived from a retrovirus. A lentiviral vector can comprise a viral vector or plasmid containing structural and functional genetic elements, or portions thereof, including LTRs that are primarily derived from a lentivirus.

[0702] In embodiments, a lentiviral vector (e.g., lentiviral expression vector) may comprise a lentiviral transfer plasmid (e.g., as naked DNA) or an infectious lentiviral particle. With respect to elements such as cloning sites, promoters, regulatory elements, heterologous nucleic acids, etc., it is to be understood that the sequences of these elements can be present in RNA form in lentiviral particles and can be present in DNA form in DNA plasmids.

[0703] In some vectors described herein, at least part of one or more protein coding regions that contribute to or are essential for replication may be absent compared to the corresponding wild-type virus. This makes the viral vector replication-defective. In some embodiments, the vector is capable of transducing a target non-dividing host cell and/or integrating its genome into a host genome.

[0704] The structure of a wild-type retrovirus genome often comprises a 5′ long terminal repeat (LTR) and a 3′ LTR, between or within which are located a packaging signal to enable the genome to be packaged, a primer binding site, integration sites to enable integration into a host cell genome and gag, pol and env genes encoding the packaging components which promote the assembly of viral particles. More complex retroviruses have additional features, such as rev and RRE sequences in HIV, which enable the efficient export of RNA transcripts of the integrated provirus from the nucleus to the cytoplasm of an infected target cell. In the provirus, the viral genes are flanked at both ends by regions called long terminal repeats (LTRs). The LTRs are involved in proviral integration and transcription. LTRs also serve as enhancer-promoter sequences and can control the expression of the viral genes. Encapsidation of the retroviral RNAs occurs by virtue of a psi sequence located at the 5′ end of the viral genome.

[0705] The LTRs themselves are typically similar (e.g., identical) sequences that can be divided into three elements, which are called U3, R and U5. U3 is derived from the sequence unique to the 3′ end of the RNA. R is derived from a sequence repeated at both ends of the RNA and U5 is derived from the sequence unique to the 5′ end of the RNA. The sizes of the three elements can vary considerably among different retroviruses. For the viral genome, the site of transcription initiation is typically at the boundary between U3 and R in one LTR and the site of poly (A) addition (termination) is at the boundary between R and U5 in the other LTR. U3 contains most of the transcriptional control elements of the provirus, which include the promoter and multiple enhancer sequences responsive to cellular and in some cases, viral transcriptional activator proteins. Some retroviruses comprise any one or more of the following genes that code for proteins that are involved in the regulation of gene expression: tot, rev, tax and rex.

[0706] With regard to the structural genes gag, pol and env themselves, gag encodes the internal structural protein of the virus. Gag protein is proteolytically processed into the mature proteins MA (matrix), CA (capsid) and NC (nucleocapsid). The pol gene encodes the reverse transcriptase (RT), which contains DNA polymerase, associated RNase H and integrase (IN), which mediate replication of the genome. The env gene encodes the surface (SU) glycoprotein and the transmembrane (TM) protein of the virion, which form a complex that interacts specifically with cellular receptor proteins. This interaction promotes infection, e.g., by fusion of the viral membrane with the cell membrane.

[0707] In a replication-defective retroviral vector genome, gag and/or pol may be absent or not functional. The R regions at both ends of the RNA are typically repeated sequences. U5 and U3 represent unique sequences at the 5′ and 3′ ends of the RNA genome respectively.

[0708] Retroviruses may also contain additional genes which code for proteins other than gag, pol and env. Examples of additional genes include (in HIV), one or more of vif, vpr, vpx, vpu, tat, rev and nef. EIAV has (amongst others) the additional gene S2. Proteins encoded by additional genes serve various functions, some of which may be duplicative of a function provided by a cellular protein. In EIAV, for example, tat acts as a transcriptional activator of the viral LTR (Derse and Newbold 1993 Virology 194:530-6; Maury et al. 1994 Virology 200:632-42). It binds to a stable, stem-loop RNA secondary structure referred to as TAR. Rev regulates and co-ordinates the expression of viral genes through rev-response elements (RRE) (Martarano et al. 1994 J. Virol. 68:3102-11). The mechanisms of action of these two proteins are thought to be broadly similar to the analogous mechanisms in the primate viruses. In addition, an EIAV protein, Ttm, has been identified that is encoded by the first exon of tat spliced to the env coding sequence at the start of the transmembrane protein. In addition to protease, reverse transcriptase and integrase, non-primate lentiviruses contain a fourth pol gene product which codes for a dUTPase. This may play a role in the ability of these lentiviruses to infect certain non-dividing or slowly dividing cell types.

[0709] In embodiments, a recombinant lentiviral vector (RLV) is a vector with sufficient retroviral genetic information to allow packaging of an RNA genome, in the presence of packaging components, into a viral particle capable of infecting a target cell. Infection of the target cell can comprise reverse transcription and integration into the target cell genome. The RLV typically carries non-viral coding sequences which are to be delivered by the vector to the target cell. In embodiments, an RLV is incapable of independent replication to produce infectious retroviral particles within the target cell. In some embodiments, the RLV lacks a functional gag and/or pol gene and/or other genes involved in replication. The vector may be configured as a split-intron vector, e.g., as described in PCT patent application WO 99/15683, which is herein incorporated by reference in its entirety.

[0710] In some embodiments, the lentiviral vector comprises a minimal viral genome, e.g., the viral vector has been manipulated so as to remove the non-essential elements and to retain the essential elements in order to provide the required functionality to infect, transduce and deliver a nucleotide sequence of interest to a target host cell, e.g., as described in WO 98/17815, which is herein incorporated by reference in its entirety.

[0711] A minimal lentiviral genome may comprise, e.g., (5′)R-U5-one or more first nucleotide sequences-U3-R(3′) However, the plasmid vector used to produce the lentiviral genome within a source cell can also include transcriptional regulatory control sequences operably linked to the lentiviral genome to direct transcription of the genome in a source cell. These regulatory sequences may comprise the natural sequences associated with the transcribed retroviral sequence, e.g., the 5′ U3 region, or they may comprise a heterologous promoter such as another viral promoter, for example the CMV promoter. Some lentiviral genomes comprise additional sequences to promote efficient virus production. For example, in the case of HIV, rev and RRE sequences may be included. Alternatively or combination, codon optimization may be used, e.g., the gene encoding the exogenous agent may be codon optimized, e.g., as described in WO 01/79518, which is herein incorporated by reference in its entirety. Alternative sequences which perform a similar or the same function as the rev/RRE system may also be used. For example, a functional analogue of the rev/RRE system is found in the Mason Pfizer monkey virus. This is known as CTE and comprises an RRE-type sequence in the genome which is believed to interact with a factor in the infected cell. The cellular factor can be thought of as a rev analogue. Thus, CTE may be used as an alternative to the rev/RRE system. In addition, the Rex protein of HTLV-I can functionally replace the Rev protein of HIV-I. Rev and Rex have similar effects to IRE-BP.

[0712] In some embodiments, a retroviral nucleic acid (e.g., a lentiviral nucleic acid, e.g., a primate or non-primate lentiviral nucleic acid) (1) comprises a deleted gag gene wherein the deletion in gag removes one or more nucleotides downstream of about nucleotide 350 or 354 of the gag coding sequence; (2) has one or more accessory genes absent from the retroviral nucleic acid; (3) lacks the tat gene but includes the leader sequence between the end of the 5′ LTR and the ATG of gag; and (4) combinations of (1), (2) and (3). In an embodiment the lentiviral vector comprises all of features (1) and (2) and (3). This strategy is described in more detail in WO 99/32646, which is herein incorporated by reference in its entirety.

[0713] In some embodiments, a primate lentivirus minimal system requires none of the HIV/SIV additional genes vif, vpr, vpx, vpu, tat, rev and nef for either vector production or for transduction of dividing and non-dividing cells. In some embodiments, an EIAV minimal vector system does not require S2 for either vector production or for transduction of dividing and non dividing cells.

[0714] The deletion of additional genes may permit vectors to be produced without the genes associated with disease in lentiviral (e.g. HIV) infections. In particular, tat is associated with disease. Secondly, the deletion of additional genes permits the vector to package more heterologous DNA. Thirdly, genes whose function is unknown, such as S2, may be omitted, thus reducing the risk of causing undesired effects. Examples of minimal lentiviral vectors are disclosed in WO 99/32646 and in WO 98/17815.

[0715] In some embodiments, the retroviral nucleic acid is devoid of at least tat and S2 (if it is an EIAV vector system), and possibly also vif, vpr, vpx, vpu and nef. In some embodiments, the retroviral nucleic acid is also devoid of rev, RRE, or both. In some embodiments the retroviral nucleic acid comprises vpx. The Vpx polypeptide binds to and induces the degradation of the SAMHD1 restriction factor, which degrades free dNTPs in the cytoplasm. Thus, the concentration of free dNTPs in the cytoplasm increases as Vpx degrades SAMIID1 and reverse transcription activity is increased, thus facilitating reverse transcription of the retroviral genome and integration into the target cell genome.

[0716] Different cells differ in their usage of particular codons. This codon bias corresponds to a bias in the relative abundance of particular tRNAs in the cell type. By altering the codons in the sequence so that they are tailored to match with the relative abundance of corresponding tRNAs, it is possible to increase expression. By the same token, it is possible to decrease expression by deliberately choosing codons for which the corresponding tRNAs are known to be rare in the particular cell type. Thus, an additional degree of translational control is available. An additional description of codon optimization is found, e.g., in WO 99/41397, which is herein incorporated by reference in its entirety.

[0717] Many viruses, including HIV and other lentiviruses, use a large number of rare codons and by changing these to correspond to commonly used mammalian codons, increased expression of the packaging components in mammalian producer cells can be achieved.

[0718] Codon optimization has a number of other advantages. By virtue of alterations in their sequences, the nucleotide sequences encoding the packaging components may have RNA instability sequences (INS) reduced or eliminated from them. At the same time, the amino acid sequence coding sequence for the packaging components is retained so that the viral components encoded by the sequences remain the same, or at least sufficiently similar that the function of the packaging components is not compromised. In some embodiments, codon optimization also overcomes the Rev/RRE requirement for export, rendering optimized sequences Rev independent. In some embodiments, codon optimization also reduces homologous recombination between different constructs within the vector system (for example between the regions of overlap in the gag-pol and env open reading frames). In some embodiments, codon optimization leads to an increase in viral titer and/or improved safety.

[0719] In some embodiments, only codons relating to INS are codon optimized. In other embodiments, the sequences are codon optimized in their entirety, with the exception of the sequence encompassing the frameshift site of gag-pol.

[0720] The gag-pol gene comprises two overlapping reading frames encoding the gag-pol proteins. The expression of both proteins depends on a frameshift during translation. This frameshift occurs as a result of ribosome “slippage” during translation. This slippage is thought to be caused at least in part by ribosome-stalling RNA secondary structures. Such secondary structures exist downstream of the frameshift site in the gag-pol gene. For HIV, the region of overlap extends from nucleotide 1222 downstream of the beginning of gag (wherein nucleotide 1 is the A of the gag ATG) to the end of gag (nt 1503). Consequently, a 281 bp fragment spanning the frameshift site and the overlapping region of the two reading frames is preferably not codon optimized. In some embodiments, retaining this fragment will enable more efficient expression of the gag-pol proteins. For EIAV, the beginning of the overlap is at nt 1262 (where nucleotide 1 is the A of the gag ATG). The end of the overlap is at nt 1461. In order to ensure that the frameshift site and the gag-pol overlap are preserved, the wild type sequence may be retained from nt 1156 to 1465.

[0721] Derivations from optimal codon usage may be made, for example, in order to accommodate convenient restriction sites, and conservative amino acid changes may be introduced into the gag-pol proteins.

[0722] In some embodiments, codon optimization is based on codons with poor codon usage in mammalian systems. The third and sometimes the second and third base may be changed.

[0723] Due to the degenerate nature of the genetic code, it will be appreciated that numerous gag-pol sequences can be achieved by a skilled worker. Also, there are many retroviral variants described which can be used as a starting point for generating a codon optimized gag-pol sequence. Lentiviral genomes can be quite variable. For example there are many quasi-species of HIV-I which are still functional. This is also the case for EIAV. These variants may be used to enhance particular parts of the transduction process. Examples of HIV-I variants may be found in the HIV databases maintained by Los Alamos National Laboratory. Details of EIAV clones may be found at the NCBI database maintained by the National Institutes of Health.

[0724] The strategy for codon optimized gag-pol sequences can be used in relation to any retrovirus, e.g., EIAV, FIV, BIV, CAEV, VMR, SIV, HIV-I and HIV-2. In addition this method could be used to increase expression of genes from HTLV-I, HTLV-2, HFV, HSRV, MLV and other retroviruses.

[0725] As described above, the packaging components for a retroviral vector can include expression products of gag, pol and env genes. In addition, packaging can utilize a short sequence of 4 stem loops followed by a partial sequence from gag and env as a packaging signal. Thus, inclusion of a deleted gag sequence in the retroviral vector genome (in addition to the full gag sequence on the packaging construct) can be used. In embodiments, the retroviral vector comprises a packaging signal that comprises about 40, or from 255 to 360 nucleotides of gag. In some embodiments, the retroviral vector includes a gag sequence which comprises one or more deletions, e.g., the gag sequence comprises about 360 nucleotides derivable from the N-terminus.

[0726] The retroviral vector, helper cell, helper virus, or helper plasmid may comprise retroviral structural and accessory proteins, for example gag, pol, env, tat, rev, vif, vpr, vpu, vpx, or nef proteins or other retroviral proteins. In some embodiments the retroviral proteins are derived from the same retrovirus. In some embodiments the retroviral proteins are derived from more than one retrovirus, e.g. 2, 3, 4, or more retroviruses.

[0727] The gag and pol coding sequences are generally organized as the Gag-Pol Precursor in native lentivirus. The gag sequence codes for a 55-kD Gag precursor protein, also called p55.

[0728] The p55 is cleaved by the virally encoded protease4 (a product of the pol gene) during the process of maturation into four smaller proteins designated MA (matrix [pl7]), CA (capsid

[0729] [p24]), NC (nucleocapsid [p9]), and p6. The pol precursor protein is cleaved away from Gag by a virally encoded protease, and further digested to separate the protease (plO), RT (p50), RNase H (p15), and integrase (p31) activities.

[0730] Native Gag-Pol sequences can be utilized in a helper vector (e.g., helper plasmid or helper virus), or modifications can be made. These modifications include, chimeric Gag-Pol, where the Gag and Pol sequences are obtained from different viruses (e.g., different species, subspecies, strains, clades, etc.), and/or where the sequences have been modified to improve transcription and/or translation, and/or reduce recombination.

[0731] In various examples, the retroviral nucleic acid includes a polynucleotide encoding a 150-250 (e.g., 168) nucleotide portion of a gag protein that (i) includes a mutated INS1 inhibitory sequence that reduces restriction of nuclear export of RNA relative to wild-type INS 1, (ii) contains two nucleotide insertion that results in frame shift and premature termination, and/or (iii) does not include INS2, INS3, and INS4 inhibitory sequences of gag. In some embodiments, a vector described herein is a hybrid vector that comprises both retroviral (e.g., lentiviral) sequences and non-lentiviral viral sequences. In some embodiments, a hybrid vector comprises retroviral e.g., lentiviral, sequences for reverse transcription, replication, integration and/or packaging.

[0732] According to certain specific embodiments, most or all of the viral vector backbone sequences are derived from a lentivirus, e.g., HIV-l. However, it is to be understood that many different sources of retroviral and/or lentiviral sequences can be used, or combined and numerous substitutions and alterations in certain of the lentiviral sequences may be accommodated without impairing the ability of a transfer vector to perform the functions described herein. A variety of lentiviral vectors are described in Naldini et ah, (1996a, 1996b, and 1998); Zufferey et ah, (1997); Dull et ah, 1998, U.S. Pat. Nos. 6,013,516; and 5,994,136, many of which may be adapted to produce a retroviral nucleic acid.

[0733] At each end of the provirus, long terminal repeats (LTRs) are typically found. An LTR typically comprises a domain located at the ends of retroviral nucleic acid which, in their natural sequence context, are direct repeats and contain U3, R and U5 regions. LTRs generally promote the expression of retroviral genes (e.g., promotion, initiation and polyadenylation of gene transcripts) and viral replication. The LTR can comprise numerous regulatory signals including transcriptional control elements, polyadenylation signals and sequences for replication and integration of the viral genome. The viral LTR is typically divided into three regions called U3, R and U5. The U3 region typically contains the enhancer and promoter elements. The U5 region is typically the sequence between the primer binding site and the R region and can contain the polyadenylation sequence. The R (repeat) region can be flanked by the U3 and U5 regions. The LTR is typically composed of U3, R and U5 regions and can appear at both the 5′ and 3′ ends of the viral genome. In some embodiments, adjacent to the 5′ LTR are sequences for reverse transcription of the genome (the tRNA primer binding site) and for efficient packaging of viral RNA into particles (the Psi site).

[0734] A packaging signal can comprise a sequence located within the retroviral genome which mediate insertion of the viral RNA into the viral capsid or particle, see e.g., Clever et ah, 1995. J. of Virology, Vol. 69, No. 4; pp. 2101-2109. Several retroviral vectors use a minimal packaging signal (a psi [Y] sequence) for encapsidation of the viral genome. In various embodiments, retroviral nucleic acids comprise modified 5′ LTR and/or 3′ LTRs. Either or both of the LTR may comprise one or more modifications including, but not limited to, one or more deletions, insertions, or substitutions. Modifications of the 3′ LTR are often made to improve the safety of lentiviral or retroviral systems by rendering viruses replication-defective, e.g., virus that is not capable of complete, effective replication such that infective virions are not produced (e.g., replication-defective lentiviral progeny).

[0735] In some embodiments, a vector is a self-inactivating (SIN) vector, e.g., replication-defective vector, e.g., retroviral or lentiviral vector, in which the right (3′) LTR enhancer-promoter region, known as the U3 region, has been modified (e.g., by deletion or substitution) to prevent viral transcription beyond the first round of viral replication. This is because the right (3′) LTR U3 region can be used as a template for the left (5′) LTR U3 region during viral replication and, thus, absence of the U3 enhancer-promoter inhibits viral replication. In embodiments, the 3′ LTR is modified such that the U5 region is removed, altered, or replaced, for example, with an exogenous poly(A) sequence The 3′ LTR, the 5′ LTR, or both 3′ and 5′ LTRs, may be modified LTRs.

[0736] In some embodiments, the U3 region of the 5′ LTR is replaced with a heterologous promoter to drive transcription of the viral genome during production of viral particles.

[0737] Examples of heterologous promoters which can be used include, for example, viral simian virus 40 (SV40) (e.g., early or late), cytomegalovirus (CMV) (e.g., immediate early), Moloney murine leukemia virus (MoMLV), Rous sarcoma virus (RSV), and herpes simplex virus (HSV) (thymidine kinase) promoters. In some embodiments, promoters are able to drive high levels of transcription in a Tat-independent manner. In certain embodiments, the heterologous promoter has additional advantages in controlling the manner in which the viral genome is transcribed. Lor example, the heterologous promoter can be inducible, such that transcription of all or part of the viral genome will occur only when the induction factors are present. Induction factors include, but are not limited to, one or more chemical compounds or the physiological conditions such as temperature or pH, in which the host cells are cultured.

[0738] In some embodiments, viral vectors comprise a TAR (trans-activation response) element, e.g., located in the R region of lentiviral (e.g., HIV) LTRs. This element interacts with the lentiviral trans-activator (tat) genetic element to enhance viral replication. However, this element is not required, e.g., in embodiments wherein the U3 region of the 5′ LTR is replaced by a heterologous promoter.

[0739] The R region, e.g., the region within retroviral LTRs beginning at the start of the capping group (i.e., the start of transcription) and ending immediately prior to the start of the poly A tract can be flanked by the U3 and U5 regions. The R region plays a role during reverse transcription in the transfer of nascent DNA from one end of the genome to the other.

[0740] The retroviral nucleic acid can also comprise a FLAP element, e.g., a nucleic acid whose sequence includes the central polypurine tract and central termination sequences (cPPT and CTS) of a retrovirus, e.g., HIV-1 or HIV-2. Suitable FLAP elements are described in U.S. Pat. No. 6,682,907 and in Zennou, et al., 2000, Cell, 101:173, which are herein incorporated by reference in their entireties. During HIV-1 reverse transcription, central initiation of the plus-strand DNA at the central polypurine tract (cPPT) and central termination at the central termination sequence (CTS) can lead to the formation of a three-stranded DNA structure: the HIV-1 central DNA flap. In some embodiments, the retroviral or lentiviral vector backbones comprise one or more FLAP elements upstream or downstream of the gene encoding the exogenous agent. For example, in some embodiments a transfer plasmid includes a FLAP element, e.g., a FLAP element derived or isolated from HIV-L

[0741] In embodiments, a retroviral or lentiviral nucleic acid comprises one or more export elements, e.g., a cis-acting post-transcriptional regulatory element which regulates the transport of an RNA transcript from the nucleus to the cytoplasm of a cell. Examples of RNA export elements include, but are not limited to, the human immunodeficiency virus (HIV) rev response element (RRE) (see e.g., Cullen et ah, 1991. J. Virol. 65:1053; and Cullen et ah, 1991. Cell 58: 423), and the hepatitis B virus post-transcriptional regulatory element (HPRE), which are herein incorporated by reference in their entireties. Generally, the RNA export element is placed within the 3′ UTR of a gene, and can be inserted as one or multiple copies.

[0742] In some embodiments, expression of heterologous sequences in viral vectors is increased by incorporating one or more of, e.g., all of, posttranscriptional regulatory elements,
[0743] polyadenylation sites, and transcription termination signals into the vectors. A variety of posttranscriptional regulatory elements can increase expression of a heterologous nucleic acid at the protein, e.g., woodchuck hepatitis virus posttranscriptional regulatory element (WPRE; Zufferey et al., 1999, J. Virol., 73:2886); the posttranscriptional regulatory element present in hepatitis B virus (HPRE) (Huang et al., Mol. Cell. Biol., 5:3864); and the like (Liu et al., 1995, Genes Dev., 9:1766), each of which is herein incorporated by reference in its entirety. In some embodiments, a retroviral nucleic acid described herein comprises a posttranscriptional regulatory element such as a WPRE or HPRE

[0744] In some embodiments, a retroviral nucleic acid described herein lacks or does not comprise a posttranscriptional regulatory element such as a WPRE or HPRE.

[0745] Elements directing the termination and polyadenylation of the heterologous nucleic acid transcripts may be included, e.g., to increases expression of the exogenous agent. Transcription termination signals may be found downstream of the polyadenylation signal. In some embodiments, vectors comprise a polyadenylation sequence 3′ of a polynucleotide encoding the exogenous agent. A polyA site may comprise a DNA sequence which directs both the termination and polyadenylation of the nascent RNA transcript by RNA polymerase II.

[0746] Polyadenylation sequences can promote mRNA stability by addition of a polyA tail to the 3′ end of the coding sequence and thus, contribute to increased translational efficiency. Illustrative examples of polyA signals that can be used in a retroviral nucleic acid, include AATAAA,
[0747] ATT AAA, AGTAAA, a bovine growth hormone polyA sequence (BGHpA), a rabbit b-globin polyA sequence (rPgpA), or another suitable heterologous or endogenous polyA sequence.

[0748] In various embodiments, the vectors comprise a promoter operably linked to a polynucleotide encoding an exogenous agent. The vectors may have one or more LTRs, wherein either LTR comprises one or more modifications, such as one or more nucleotide substitutions, additions, or deletions. The vectors may further comprise one of more accessory elements to increase transduction efficiency (e.g., a cPPT/FLAP), viral packaging (e.g., a Psi (Y) packaging signal, RRE), and/or other elements that increase exogenous gene expression (e.g., poly (A) sequences), and may optionally comprise a WPRE or HPRE.

[0749] In some embodiments, a lentiviral nucleic acid comprises one or more of, e.g., all of, e.g., from 5′ to 3′, a promoter (e.g., CMV), an R sequence (e.g., comprising TAR), a U5 sequence (e.g., for integration), a PBS sequence (e.g., for reverse transcription), a DIS sequence (e.g., for genome dimerization), a psi packaging signal, a partial gag sequence, an RRE sequence (e.g., for nuclear export), a cPPT sequence (e.g., for nuclear import), a promoter to drive expression of the exogenous agent, a gene encoding the exogenous agent, a WPRE sequence (e.g., for efficient transgene expression), a PPT sequence (e.g., for reverse transcription), an R sequence (e.g., for polyadenylation and termination), and a U5 signal (e.g., for integration).

### Vectors Engineered to Remove Splice Sites

[0750] Some lentiviral vectors integrate inside active genes and possess strong splicing and polyadenylation signals that could lead to the formation of aberrant and possibly truncated transcripts.

[0751] Mechanisms of proto-oncogene activation may involve the generation of chimeric transcripts originating from the interaction of promoter elements or splice sites contained in the genome of the insertional mutagen with the cellular transcriptional unit targeted by integration (Gabriel et al. 2009. Nat Med 15: 1431-1436; Bokhoven, et al. J Virol 83:283-29). Chimeric fusion transcripts comprising vector sequences and cellular mRNAs can be generated either by read-through transcription starting from vector sequences and proceeding into the flanking cellular genes, or vice versa.

[0752] In some embodiments, a lentiviral nucleic acid described herein comprises a lentiviral backbone in which at least two of the splice sites have been eliminated, e.g., to improve the safety profile of the lentiviral vector. Species of such splice sites and methods of identification are described in WO2012156839A2, all of which is included by reference.

### Retroviral Production Methods

[0753] Large scale viral particle production is often useful to achieve a desired viral titer. Viral particles can be produced by transfecting a transfer vector into a packaging cell line that comprises viral structural and/or accessory genes, e.g., gag, pol, env, tat, rev, vif, vpr, vpu, vpx, or nef genes or other retroviral genes.

[0754] In embodiments, the packaging vector is an expression vector or viral vector that lacks a packaging signal and comprises a polynucleotide encoding one, two, three, four or more viral structural and/or accessory genes. Typically, the packaging vectors are included in a packaging cell, and are introduced into the cell via transfection, transduction or infection. A retroviral, e.g., lentiviral, transfer vector can be introduced into a packaging cell line, via transfection, transduction or infection, to generate a source cell or cell line. The packaging vectors can be introduced into human cells or cell lines by standard methods including, e.g., calcium phosphate transfection, lipofection or electroporation. In some embodiments, the packaging vectors are introduced into the cells together with a dominant selectable marker, such as neomycin, hygromycin, puromycin, blastocidin, zeocin, thymidine kinase, DHFR, Gln synthetase or ADA, followed by selection in the presence of the appropriate drug and isolation of clones. A selectable marker gene can be linked physically to genes encoding by the packaging vector, e.g., by IRES or self cleaving viral peptides.

[0755] Packaging cell lines include cell lines that do not contain a packaging signal, but do stably or transiently express viral structural proteins and replication enzymes (e.g., gag, pol, and env) which can package viral particles. Any suitable cell line can be employed, e.g., mammalian cells, e.g., human cells. Suitable cell lines which can be used include, for example, CHO cells, BHK cells, MDCK cells, C3H 10T1/2 cells, FLY cells, Psi-2 cells, BOSC 23 cells, PA317 cells, WEHI cells, COS cells, BSC 1 cells, BSC 40 cells, BMT 10 cells, VERO cells, W138 cells, MRC5 cells, A549 cells, HT1080 cells, 293 cells, 293T cells, B-50 cells, 3T3 cells, NIH3T3 cells, HepG2 cells, Saos-2 cells, Huh7 cells, HeLa cells, W163 cells, 211 cells, and 211 A cells.

[0756] In embodiments, the packaging cells are 293 cells, 293T cells, or A549 cells.

[0757] A source cell line includes a cell line which is capable of producing recombinant retroviral particles, comprising a packaging cell line and a transfer vector construct comprising a packaging signal. Methods of preparing viral stock solutions are illustrated by, e.g., Y. Soneoka et al. (1995) Nucl. Acids Res. 23:628-633, and N. R. Landau et al. (1992) J. Virol. 66:5110-5113, which are incorporated herein by reference. Infectious virus particles may be collected from the packaging cells, e.g., by cell lysis, or collection of the supernatant of the cell culture. Optionally, the collected virus particles may be enriched or purified.

### Packaging Plasmids and Cell Lines

[0758] In some embodiments, the source cell comprises one or more plasmids coding for viral structural proteins and replication enzymes (e.g., gag, pol, and env) which can package viral particles. In some embodiments, the sequences coding for at least two of the gag, pol, and env precursors are on the same plasmid. In some embodiments, the sequences coding for the gag, pol, and env precursors are on different plasmids. In some embodiments, the sequences coding for the gag, pol, and env precursors have the same expression signal, e.g., promoter. In some embodiments, the sequences coding for the gag, pol, and env precursors have a different expression signal, e.g., different promoters. In some embodiments, expression of the gag, pol, and env precursors is inducible. In some embodiments, the plasmids coding for viral structural proteins and replication enzymes are transfected at the same time or at different times. In some embodiments, the plasmids coding for viral structural proteins and replication enzymes are transfected at the same time or at a different time from the packaging vector.

[0759] In some embodiments, the source cell line comprises one or more stably integrated viral structural genes. In some embodiments expression of the stably integrated viral structural genes is inducible.

[0760] In some embodiments, expression of the viral structural genes is regulated at the transcriptional level. In some embodiments, expression of the viral structural genes is regulated at the translational level. In some embodiments, expression of the viral structural genes is regulated at the post-translational level.

[0761] In some embodiments, expression of the viral structural genes is regulated by a tetracycline (Tet)-dependent system, in which a Tet-regulated transcriptional repressor (Tet-R) binds to DNA sequences included in a promoter and represses transcription by steric hindrance (Yao et al, 1998; Jones et al, 2005). Upon addition of doxycycline (dox), Tet-R is released, allowing transcription. Multiple other suitable transcriptional regulatory promoters, transcription factors, and small molecule inducers are suitable to regulate transcription of viral structural genes.

[0762] In some embodiments, the third-generation lentivirus components, human immunodeficiency virus type 1 (HIV) Rev, Gag/Pol, and an envelope under the control of Tet-regulated promoters and coupled with antibiotic resistance cassettes are separately integrated into the source cell genome. In some embodiments the source cell only has one copy of each of Rev, Gag/Pol, and an envelope protein integrated into the genome. In some embodiments a nucleic acid encoding the exogenous agent (e.g., a retroviral nucleic acid encoding the exogenous agent) is also integrated into the source cell genome. In some embodiments a nucleic acid encoding the exogenous agent is maintained episomally. In some embodiments a nucleic acid encoding the exogenous agent is transfected into the source cell that has stably integrated Rev, Gag/Pol, and an envelope protein in the genome. See, e.g., Milani et al. EMBO Molecular Medicine, 2017, which is herein incorporated by reference in its entirety.

[0763] In some embodiments, a retroviral nucleic acid described herein is unable to undergo reverse transcription. Such a nucleic acid, in embodiments, is able to transiently express an exogenous agent. The retrovirus or VLP, may comprise a disabled reverse transcriptase protein, or may not comprise a reverse transcriptase protein. In embodiments, the retroviral nucleic acid comprises a disabled primer binding site (PBS) and/or att site. In embodiments, one or more viral accessory genes, including rev, tat, vif, nef, vpr, vpu, vpx and S2 or functional equivalents thereof, are disabled or absent from the retroviral nucleic acid. In embodiments, one or more accessory genes selected from S2, rev and tat are disabled or absent from the retroviral nucleic acid.

### Strategies for Packaging a Retroviral Nucleic Acid

[0764] Typically, modern retroviral vector systems consist of viral genomes bearing cis-acting vector sequences for transcription, reverse-transcription, integration, translation and packaging of viral RNA into the viral particles, and (2) producer cells lines which express the trans-acting retroviral gene sequences (e.g., gag, pol and env) needed for production of virus particles. By separating the cis- and trans-acting vector sequences completely, the virus is unable to maintain replication for more than one cycle of infection. Generation of live virus can be avoided by a number of strategies, e.g., by minimizing the overlap between the cis- and trans-acting sequences to avoid recombination.

[0765] A viral vector particle which comprises a sequence that is devoid of or lacking viral RNA may be the result of removing or eliminating the viral RNA from the sequence. In one embodiment this may be achieved by using an endogenous packaging signal binding site on gag. Alternatively, the endogenous packaging signal binding site is on pol. In this embodiment, the RNA which is to be delivered will contain a cognate packaging signal. In another embodiment, a heterologous binding domain (which is heterologous to gag) located on the RNA to be delivered, and a cognate binding site located on gag or pol, can be used to ensure packaging of the RNA to be delivered. The heterologous sequence could be non-viral or it could be viral, in which case it may be derived from a different virus. The vector particles could be used to deliver therapeutic RNA, in which case functional integrase and/or reverse transcriptase is not required. These vector particles could also be used to deliver a therapeutic gene of interest, in which case pol is typically included.

[0766] In an embodiment, gag-pol are altered, and the packaging signal is replaced with a corresponding packaging signal. In this embodiment, the particle can package the RNA with the new packaging signal. The advantage of this approach is that it is possible to package an RNA sequence which is devoid of viral sequence for example, RNAi.

[0767] An alternative approach is to rely on over-expression of the RNA to be packaged. In one embodiment the RNA to be packaged is over-expressed in the absence of any RNA containing a packaging signal. This may result in a significant level of therapeutic RNA being packaged, and that this amount is sufficient to transduce a cell and have a biological effect.

[0768] In some embodiments, a polynucleotide comprises a nucleotide sequence encoding a viral gag protein or retroviral gag and pol proteins, wherein the gag protein or pol protein comprises a heterologous RNA binding domain capable of recognising a corresponding sequence in an RNA sequence to facilitate packaging of the RNA sequence into a viral vector particle.

[0769] In some embodiments, the heterologous RNA binding domain comprises an RNA binding domain derived from a bacteriophage coat protein, a Rev protein, a protein of the U 1 small nuclear ribonucleoprotein particle, a Nova protein, a TF111 A protein, a TIS 11 protein, a trp RNA-binding attenuation protein (TRAP) or a pseudouridine synthase.

[0770] In some embodiments, a method herein comprises detecting or confirming the absence of replication competent retrovirus. The methods may include assessing RNA levels of one or more target genes, such as viral genes, e.g. structural or packaging genes, from which gene products are expressed in certain cells infected with a replication-competent retrovirus, such as a gammaretro virus or lentivirus, but not present in a viral vector used to transduce cells with a heterologous nucleic acid and not, or not expected to be, present and/or expressed in cells not containing replication-competent retrovirus. Replication competent retrovirus may be determined to be present if RNA levels of the one or more target genes is higher than a reference value, which can be measured directly or indirectly, e.g. from a positive control sample containing the target gene. For further disclosure, see WO2018023094A1.

### Repression of a Gene Encoding an Exogenous Agent in a Source Cell

[0771] (Over-)expressed protein in the source cell may have an indirect or direct effect on vector virion assembly and/or infectivity. Incorporation of the exogenous agent into vector virions may also impact downstream processing of vector particles.

[0772] In some embodiments, a tissue-specific promoter is used to limit expression of the exogenous agent in source cells. In some embodiments, a heterologous translation control system is used in eukaryotic cell cultures to repress the translation of the exogenous agent in source cells. More specifically, the retroviral nucleic acid may comprise a binding site operably linked to the gene encoding the exogenous agent, wherein the binding site is capable of interacting with an RNA-binding protein such that translation of the exogenous agent is repressed or prevented in the source cell.

[0773] In some embodiments, the RNA-binding protein is tryptophan RNA-binding attenuation protein (TRAP), for example bacterial tryptophan RNA-binding attenuation protein. The use of an RNA-binding protein (e.g. the bacterial trp operon regulator protein, tryptophan RNA-binding attenuation protein, TRAP), and RNA targets to which it binds, will repress or prevent transgene translation within a source cell. This system is referred to as the Transgene Repression In vector Production cell system or TRIP system.

[0774] In embodiments, the placement of a binding site for an RNA binding protein (e.g., a TRAP-binding sequence, tbs) upstream of the NOI translation initiation codon allows specific repression of translation of mRNA derived from the internal expression cassette, while having no detrimental effect on production or stability of vector RNA. The number of nucleotides between the tbs and translation initiation codon of the gene encoding the exogenous agent may be varied from 0 to 12 nucleotides. The tbs may be placed downstream of an internal ribosome entry site (IRES) to repress translation of the gene encoding the exogenous agent in a multicistronic mRNA. Kill switch systems and amplification

[0775] In some embodiments, a polynucleotide or cell harboring the gene encoding the exogenous agent utilizes a suicide gene, e.g., an inducible suicide gene, to reduce the risk of direct toxicity and/or uncontrolled proliferation. In specific aspects, the suicide gene is not immunogenic to the host cell harboring the exogenous agent. Examples of suicide genes include caspase-9, caspase-8, or cytosine deaminase. Caspase-9 can be activated using a specific chemical inducer of dimerization (CID).

[0776] In certain embodiments, vectors comprise gene segments that cause target cells, e.g., immune effector cells, e.g., T cells, to be susceptible to negative selection in vivo. For instance, the transduced cell can be eliminated as a result of a change in the in vivo condition of the individual. The negative selectable phenotype may result from the insertion of a gene that confers sensitivity to an administered agent, for example, a compound. Negative selectable genes are known in the art, and include, inter alia the following: the Herpes simplex virus type I thymidine kinase (HSV-I TK) gene (Wigler et ah, Cell 11:223, 1977) which confers ganciclovir sensitivity; the cellular hypoxanthine phosphribosyltransferase (HPRT) gene, the cellular adenine phosphoribosyltransferase (APRT) gene, and bacterial cytosine deaminase, (Mullen et ah, Proc. Natl. Acad. Sci. USA. 89:33 (1992)).

[0777] In some embodiments, transduced cells, e.g., immune effector cells, such as T cells, comprise a polynucleotide further comprising a positive marker that enables the selection of cells of the negative selectable phenotype in vitro. The positive selectable marker may be a gene which, upon being introduced into the target cell, expresses a dominant phenotype permitting positive selection of cells carrying the gene. Genes of this type include, inter alia, hygromycin-B phosphotransferase gene (hph) which confers resistance to hygromycin B, the amino glycoside phosphotransferase gene (neo or aph) from Tn5 which codes for resistance to the antibiotic G418, the dihydrofolate reductase (DHFR) gene, the adenosine deaminase gene (ADA), and the multi-drug resistance (MDR) gene.

[0778] In some embodiments, the positive selectable marker and the negative selectable element are linked such that loss of the negative selectable element necessarily also is accompanied by loss of the positive selectable marker. For instance, the positive and negative selectable markers can be fused so that loss of one obligatorily leads to loss of the other. An example of a fused polynucleotide that yields as an expression product a polypeptide that confers both the desired positive and negative selection features described above is a hygromycin phosphotransferase thymidine kinase fusion gene (HyTK). Expression of this gene yields a polypeptide that confers hygromycin B resistance for positive selection in vitro, and ganciclovir sensitivity for negative selection in vivo. See Lupton S. D., et al, Mol. and Cell. Biology 1 1:3374-3378, 1991. In addition, in embodiments, the polynucleotides encoding the chimeric receptors are in retroviral vectors containing the fused gene, particularly those that confer hygromycin B resistance for positive selection in vitro, and ganciclovir sensitivity for negative selection in vivo, for example the HyTK retroviral vector described in Lupton, S. D. et al. (1991), supra. See also the publications of PCT U591/08442 and PCT/US94/05601, describing the use of bifunctional selectable fusion genes derived from fusing dominant positive selectable markers with negative selectable markers.

[0779] Suitable positive selectable markers can be derived from genes selected from the group consisting of hph, nco, and gpt, and suitable negative selectable markers can be derived from genes selected from the group consisting of cytosine deaminase, HSV-I TK, VZV TK, HPRT, APRT and gpt. Other suitable markers are bifunctional selectable fusion genes wherein the positive selectable marker is derived from hph or neo, and the negative selectable marker is derived from cytosine deaminase or a TK gene or selectable marker.

### Integration-Deficient Retroviral Systems

[0780] A Gene Writer system as described herein may include an integration-deficient retroviral system (e.g., derived from a retrovirus, such as a lentivirus). A retrovirus (e.g., lentivirus) can be engineered to be integration-deficient, such that integration of a template DNA (e.g., encoded by a template RNA as described herein), or a portion thereof, by the retroviral integrase is reduced, e.g., by at least 75% 80%, 85% 90%, 95%, 96%, 97%, 98%, 99%, or 100%, relative to an otherwise similar unmodified retrovirus. In some instances, a retrovirus is engineered to be non-integrating—e.g., such that the retroviral integrase, or equivalent thereof, cannot integrate the viral genome, or any substantial portion thereof, into the genome of the cell. In some instances, the viral genome, or a portion thereof, of an integration-deficient retroviral system can be integrated into the genome of the cell by another recombinase (e.g., a recombinase provided in cis with the integration-deficient retroviral system or a recombinase provided in trans). In some instances, the viral genome, or a portion thereof, is engineered to comprise a recognition sequence for the recombinase (e.g., an attP or attB site). In some instances, the genome of the cell comprises a cognate recognition sequence for the recombinase, such that the recombinase can recombine the recognition sequence in the viral genome (or a DNA molecule reverse transcribed therefrom, e.g., by the retroviral reverse transcriptase) with the cognate recombination sequence in the genome of the cell, thereby inducing integration of the viral genome sequence, or a portion thereof, into the genome of the cell.

[0781] In some instances, an integration-deficient system (e.g., a composition comprising a virus, a viral vector, e.g., a retroviral vector, e.g., a lentiviral vector) or a polypeptide thereof is substantially unable to integrate a template DNA into a target DNA (e.g., a genomic DNA, e.g., a chromosome or mitochondrial DNA). In some instances, an integration-deficient system comprises a mutation to an integrase (e.g., as described herein), a template RNA lacking a wild-type viral LTR sequence, or an inhibitor of the integrase. In some instances, an integration-deficient system results in a decrease in the level of integrated template DNA relative to an otherwise similar integration-competent viral system by at least 20%, 30%, 40%, 50%, 60%, 70%, 75%, 80%, 85%, 90%, 95%, 96%, 97%, 98%, 99%, 99.9%, or 100%. In some embodiments, an integration-deficient system can be supplemented with an exogenous integrase.

[0782] In some instances, making a retrovirus (e.g., lentivirus) integration-deficient promotes circularization of linear viral DNA after reverse transcriptase (thereby forming an episome) over integration of the linear viral DNA into the genome of the cell (e.g., by reducing or eliminating integration of the linear viral DNA into the genome of the cell). Linear retroviral DNA is generally formed by reverse transcription of a retroviral RNA genome (e.g., by a reverse transcriptase encoded by the pol gene of the retrovirus). A certain amount of circularization of the linear retroviral DNA can naturally occur, e.g., by mechanisms that include, without limitation, nonhomologous end-joining (NHEJ), homologous recombination via strand-invasion or single-strand annealing, closure of intermediate products of reverse transcription, auto-integration, and ligation if nicks present in intermediate products formed during reverse transcription (e.g., as described in Wanische et al. 2009, Mol. Therap. 17(8): 1316-1332; incorporated herein by reference in its entirety). Circularization can result in the formation of episomes containing two retroviral LTRs (e.g., when formed by NHEJ) or episosomes containing a single retroviral LTR (e.g., when formed by homologous recombination of ligation).

[0783] A retrovirus (e.g., lentivirus) can be rendered integration-deficient via several possible means. In some instances, the retroviral integrase (IN) is mutated such that its capacity to integrate the viral DNA (or portions thereof) into the genome is substantially reduced or abrogated. In some instances, the mutation of the retroviral integrase is a class I mutation, i.e., a mutation that specifically affects integrase function regarding DNA cleavage and/or integration. Class I mutations include, for example, mutations of the catalytic triad of the retroviral integrase. For example, class I mutations for HIV-1 include mutations of residues D64 (e.g., D64V), D116, and E152. In some instances, a class I mutation does not substantially alter the levels of viral DNA present. In some instances, the mutation comprises a non-class I mutation (e.g., a class II mutation).

[0784] In some embodiments, a retrovirus (e.g., lentivirus) is rendered integration-deficient by modifying one or both attachment sites at the ends of the viral genome, e.g., by mutating or deleting the attachment site(s). In some embodiments, a retrovirus (e.g., lentivirus) is rendered integration-deficient by the presence of one or more integrase inhibitors (e.g., small molecule integrase inhibitors). In embodiments, the integrase inhibitor is a strand-transfer inhibitor. In embodiments, the integrase inhibitor is raltegravir or elvitegravir.

[0785] In some embodiments, the recombinase used to integrate the viral genome sequence (or portion thereof) of an integration-deficient retroviral system into the genome of a cell is a serine recombinase (e.g., a serine integrase, e.g., as described herein). In some embodiments, the recombinase is packaged into the retroviral particle. In embodiments, the recombinase is fused to a retroviral protein (e.g., gag, pol, or a domain or portion thereof, e.g., a matrix protein). In some embodiments, the recombinase is provided in trans (e.g., by transfecting the cell with a DNA or RNA encoding the recombinase).

[0786] In some embodiments, successful integration of a sequence from the genome of an integration-deficient retroviral vector (e.g., as described herein) into the genome of a cell can be determined by unidirectional sequencing with primers capable of hybridizing to a sequence comprised in the sequence to be integrated. In some embodiments, the primers are capable of hybridizing to an LTR sequence comprised in the genome of the integration-deficient retroviral vector, or the reverse complement thereof. In some embodiments, successful integration of a sequence from the genome of an integration-deficient retroviral vector (e.g., as described herein) into the genome of a cell can be determined by ddPCR, e.g., targeting a specific sequence comprised in the genome of the integration-deficient retroviral vector, or the reverse complement thereof.

[0787] In some embodiments, an integration-deficient retroviral vector comprises one or more long terminal repeats (LTRs). In some embodiments, an integration-deficient retroviral vector comprises a 5′ LTR. In some embodiments, an integration-deficient retroviral vector comprises a 3′ LTR. In some embodiments, an integration-deficient retroviral vector comprises an LTR (e.g., a 5′ LTR) sequence comprising the nucleic acid sequence GGGTCTCTCTGGTTAGACCAGATCTGAGCCTGGGAGCTCTCTGGCTAACTAGGGAAC CCACTGCTTAAGCCTCAATAAAGCTTGCCTTGAGTGCTTCAAGTAGTGTGTGCCCGT CTGTTGTGTGACTCTGGTAACTAGAGATCCCTCAGACCCTTTTAGTCAGTGTGGAAA ATCTCTAGCA, or a nucleic acid sequence having at least 75%, 80%, 85%, 90%, 95%, 96%, 97%, 98%, or 99% sequence identity thereto. In some embodiments, an integration-deficient retroviral vector comprises an LTR (e.g., a 3′ LTR) sequence comprising the nucleic acid sequence GGGTCTCTCTGGTTAGACCAGATCTGAGCCTGGGAGCTCTCTGGCTAACTAGGGAAC CCACTGCTTAAGCCTCAATAAAGCTTGCCTTGAGTGCTTCAAGTAGTGTGTGCCCGT CTGTTGTGTGACTCTGGTAACTAGAGATCCCTCAGACCCTTTTAGTCAGTGTGGAAA ATCTCTAGCA, or a nucleic acid sequence having at least 75%, 80%, 85%, 90%, 95%, 96%, 97%, 98%, or 99% sequence identity thereto. In some embodiments, an integration-deficient retroviral vector comprises an LTR (e.g., a 5′ LTR) sequence comprising the nucleic acid sequence GGGTCTCTCTGGTTAGACCAGATCTGAGCCTGGGAGCTCTCTGGCTAACTAGGGAAC CCACTGCTTAAGCCTCAATAAAGCTTGCCTTGAGTGCTTCAAGTAGTGTGTGCCCGT CTGTTGTGTGACTCTGGTAACTAGAGATCCCTCAGACCCTTTTAGTCAGTGTGGAAA ATCTCTAGCA, or a nucleic acid sequence having at least 75%, 80%, 85%, 90%, 95%, 96%, 97%, 98%, or 99% sequence identity thereto. In some embodiments, an integration-deficient retroviral vector comprises an LTR (e.g., a 3′ LTR) sequence comprising the nucleic acid sequence TGGAAGGGCTAATTCACTCCCAACGAAGACAAGATCTGCTTTTTGCTTGTACTGGGT CTCTCTGGTTAGACCAGATCTGAGCCTGGGAGCTCTCTGGCTAACTAGGGAACCCAC TGCTTAAGCCTCAATAAAGCTTGCCTTGAGTGCTTCAAGTAGTGTGTGCCCGTCTGTT GTGTGACTCTGGTAACTAGAGATCCCTCAGACCCTTTTAGTCAGTGTGGAAAATCTC TAGCA, or a nucleic acid sequence having at least 75%, 80%, 85%, 90%, 95%, 96%, 97%, 98%, or 99% sequence identity thereto. In some embodiments, the LTR is a self-inactivating (SIN) LTR.

[0788] In some embodiments, an integration-deficient retroviral vector comprises a gag protein, a gag-pol protein, and/or an env protein, and/or functional fragments thereof (e.g., functional domains thereof). In some embodiments, an integration-deficient retroviral vector comprises an HIV-1 gag protein, a gag-pol protein, and/or an env protein, and/or functional fragments thereof (e.g., functional domains thereof). In some embodiments, an integration-deficient retroviral vector comprises one or more polypeptides having at least 75%, 80%, 85%, 90%, 95%, 96%, 97%, 98%, or 99% amino acid sequence identity to a gag protein, a gag-pol protein, and/or an env protein as listed in Table 11.

TABLE 11
Exemplary amino acid sequences of the
HIV-1 GAG, GAG-POL, and ENV polyproteins

| | NCBI | | |
|---|---|---|---|
| Protein | (RefSeq) | UniProt | Protein Sequence |
| GAG | NP_057850 | P04591 | MGARASVLSGGELDRWEKIRLRPGGKKKYKLKHIVWASRELERFA |
| | | | VNPGLLETSEGCRQILGQLQPSLQTGSEELRSLYNTVATLYCVHQRIE |
| | | | IKDTKEALDKIEEEQNKSKKKAQQAAADTGHSNQVSQNYPIVQNIQ |
| | | | GQMVHQAISPRTLNAWVKVVEEKAFSPEVIPMFSALSEGATPQDLN |
| | | | TMLNTVGGHQAAMQMLKETINEEAAEWDRVHPVHAGPIAPGQMR |
| | | | EPRGSDIAGTTSTLQEQIGWMTNNPPIPVGEIYKRWIILGLNKIVRMY |
| | | | SPTSILDIRQGPKEPFRDYVDRFYKTLRAEQASQEVKNWMTETLLVQ |
| | | | NANPDCKTILKALGPAATLEEMMTACQGVGGPGHKARVLAEAMSQ |
| | | | VTNSATIMMQRGNFRNQRKIVKCFNCGKEGHTARNCRAPRKKGCW |
| | | | KCGKEGHQMKDCTERQANFLGKIWPSYKGRPGNFLQSRPEPTAPPE |
| | | | ESFRSGVETTTPPQKQEPIDKELYPLTSLRSLFGNDPSSQ |
| GAG- | NP_057849 | P04585 | MGARASVLSGGELDRWEKIRLRPGGKKKYKLKHIVWASRELERFA |
| POL | | | VNPGLLETSEGCRQILGQLQPSLQTGSEELRSLYNTVATLYCVHQRIE |
| | | | IKDTKEALDKIEEEQNKSKKKAQQAAADTGHSNQVSQNYPIVQNIQ |
| | | | GQMVHQAISPRTLNAWVKVVEEKAFSPEVIPMFSALSEGATPQDLN |
| | | | TMLNTVGGHQAAMQMLKETINEEAAEWDRVHPVHAGPIAPGQMR |
| | | | EPRGSDIAGTTSTLQEQIGWMTNNPPIPVGEIYKRWIILGLNKIVRMY |
| | | | SPTSILDIRQGPKEPFRDYVDRFYKTLRAEQASQEVKNWMTETLLVQ |
| | | | NANPDCKTILKALGPAATLEEMMTACQGVGGPGHKARVLAEAMSQ |
| | | | VTNSATIMMQRGNFRNQRKIVKCFNCGKEGHTARNCRAPRKKGCW |
| | | | KCGKEGHQMKDCTERQANFLREDLAFLQGKAREFSSEQTRANSPTR |
| | | | RELQVWGRDNNSPSEAGADRQGTVSFNFPQVTLWQRPLVTIKIGGQ |
| | | | LKEALLDTGADDTVLEEMSLPGRWKPKMIGGIGGFIKVRQYDQILIEI |
| | | | CGHKAIGTVLVGPTPVNIIGRNLLTQIGCTLNFPISPIETVPVKLKPGM |
| | | | DGPKVKQWPLTEEKIKALVEICTEMEKEGKISKIGPENPYNTPVFAIK |
| | | | KKDSTKWRKLVDFRELNKRTQDFWEVQLGIPHPAGLKKKKSVTVL |
| | | | DVGDAYFSVPLDEDFRKYTAFTIPSINNETPGIRYQYNVLPQGWKGS |
| | | | PAIFQSSMTKILEPFRKQNPDIVIYQYMDDLYVGSDLEIGQHRTKIEEL |
| | | | RQHLLRWGLTTPDKKHQKEPPFLWMGYELHPDKWTVQPIVLPEKD |
| | | | SWTVNDIQKLVGKLNWASQIYPGIKVRQLCKLLRGTKALTEVIPLTE |
| | | | EAELELAENREILKEPVHGVYYDPSKDLIAEIQKQGQGQWTYQIYQE |
| | | | PFKNLKTGKYARMRGAHTNDVKQLTEAVQKITTESIVIWGKTPKFK |
| | | | LPIQKETWETWWTEYWQATWIPEWEFVNTPPLVKLWYQLEKEPIVG |
| | | | AETFYVDGAANRETKLGKAGYVTNRGRQKVVTLTDTTNQKTELQA |
| | | | IYLALQDSGLEVNIVTDSQYALGIIQAQPDQSESELVNQIIEQLIKKEK |
| | | | VYLAWVPAHKGIGGNEQVDKLVSAGIRKVLFLDGIDKAQDEHEKY |
| | | | HSNWRAMASDFNLPPVVAKEIVASCDKCQLKGEAMHGQVDCSPGI |
| | | | WQLDCTHLEGKVILVAVHVASGYIEAEVIPAETGQETAYFLLKLAGR |
| | | | WPVKTIHTDNGSNFTGATVRAACWWAGIKQEFGIPYNPQSQGVVES |
| | | | MNKELKKIIGQVRDQAEHLKTAVQMAVFIHNFKRKGGIGGYSAGER |
| | | | IVDIIATDIQTKELQKQITKIQNFRVYYRDSRNPLWKGPAKLLWKGE |
| | | | GAVVIQDNSDIKVVPRRKAKIIRDYGKQMAGDDCVASRQDED |
| ENV | NP_057856 | P04578 | MRVKEKYQHLWRWGWRWGTMLLGMLMICSATEKLWVTVYYGVP |
| | | | VWKEATTTLFCASDAKAYDTEVHNVWATHACVPTDPNPQEVVLVN |
| | | | VTENFNMWKNDMVEQMHEDIISLWDQSLKPCVKLTPLCVSLKCTD |
| | | | LKNDTNTNSSSGRMIMEKGEIKNCSFNISTSIRGKVQKEYAFFYKLDII |
| | | | PIDNDTTSYKLTSCNTSVITQACPKVSFEPIPIHYCAPAGFAILKCNNK |
| | | | TFNGTGPCTNVSTVQCTHGIRPVVSTQLLLNGSLAEEEVVIRSVNFTD |
| | | | NAKTIIVQLNTSVEINCTRPNNNTRKRIRIQRGPGRAFVTIGKIGNMR |
| | | | QAHCNISRAKWNNTLKQIASKLREQFGNNKTIIFKQSSGGDPEIVTHS |
| | | | FNCGGEFFYCNSTQLFNSTWFNSTWSTEGSNNTEGSDTITLPCRIKQII |
| | | | NMWQKVGKAMYAPPISGQIRCSSNITGLLLTRDGGNSNNESEIFRPG |
| | | | GGDMRDNWRSELYKYKVVKIEPLGVAPTKAKRRVVQREKRAVGIG |
| | | | ALFLGFLGAAGSTMGAASMTLTVQARQLLSGIVQQQNNLLRAIEAQ |
| | | | QHLLQLTVWGIKQLQARILAVERYLKDQQLLGIWGCSGKLICTTAVP |
| | | | WNASWSNKSLEQIWNHTTWMEWDREINNYTSLIHSLIEESQNQQEK |
| | | | NEQELLELDKWASLWNWFNITNWLWYIKLFIMIVGGLVGLRIVFAV |
| | | | LSIVNRVRQGYSPLSFQTHLPTPRGPDRPEGIEEEGGERDRDRSIRLV |
| | | | NGSLALIWDDLRSLCLFSYHRLRDLLLIVTRIVELLGRRGWEALKYW |
| | | | WNLLQYWSQELKNSAVSLLNATAIAVAEGTDRVIEVVQGACRAIRH |
| | | | IPRRIRQGLERILL |

[0789] In some embodiments, an integration-deficient retroviral vector comprises one or more polypeptides comprising a sequence at least 750, 800, 850, 900, 95q 96ec, 97e, 98%, or 9900 amino acid sequence identity to a gag-pol protein, matrix protein, capsid protein, nucleocapsid protein, pol protein, protease protein, RNaseH, reverse transcriptase (RT), integrase, peptidase A2 domain, reverse transcriptase domain, RnaseH domain, integrase catalytic domain, nuclear export signal, NLS, and/or tryptophan repeat motif, e.g., as listed in Table 12.

TABLE 12
Proteins comprising the HIV-1 GAG-POL
polyprotein and domains of particular importance

| Name | Type | Length | Start | Stop | Sequence |
|---|---|---|---|---|---|
| Gag-Pol | Protein | 1434 | 2 | 1435 | (See Table 11) |
| polyprotein | | | | | |
| Matrix | Protein | 131 | 2 | 132 | GARASVLSGGELDRWEKIRLRPGGKKKYKLKHIVW |
| protein p17 | | | | | ASRELERFAVNPGLLETSEGCRQILGQLQPSLQTGSE |
| | | | | | ELRSLYNTVATLYCVHQRIEIKDTKEALDKIEEEQN |
| | | | | | KSKKKAQQAAADTGHSNQVSQNY |
| Capsid | Protein | 231 | 133 | 363 | PIVQNIQGQMVHQAISPRTLNAWVKVVEEKAFSPEV |
| protein p24 | | | | | IPMFSALSEGATPQDLNTMLNTVGGHQAAMQMLK |
| | | | | | ETINEEAAEWDRVHPVHAGPIAPGQMREPRGSDIAG |
| | | | | | TTSTLQEQIGWMTNNPPIPVGEIYKRWIILGLNKIVR |
| | | | | | MYSPTSILDIRQGPKEPFRDYVDRFYKTLRAEQASQ |
| | | | | | EVKNWMTETLLVQNANPDCKTILKALGPAATLEEM |
| | | | | | MTACQGVGGPGHKARVL |
| Nucleocapsid | Protein | 55 | 378 | 432 | MQRGNFRNQRKIVKCFNCGKEGHTARNCRAPRKK |
| protein p7 | | | | | GCWKCGKEGHQMKDCTERQAN |
| p6-pol | Protein | 48 | 441 | 488 | LQGKAREFSSEQTRANSPTRRELQVWGRDNNSPSE |
| | | | | | AGADRQGTVSFNF |
| Protease | Protein | 99 | 489 | 587 | PQVTLWQRPLVTIKIGGQLKEALLDTGADDTVLEE |
| | | | | | MSLPGRWKPKMIGGIGGFIKVRQYDQILIEICGHKAI |
| | | | | | GTVLVGPTPVNIIGRNLLTQIGCTLNF |
| RT/RNaseH | Protein | 560 | 588 | 1147 | PISPIETVPVKLKPGMDGPKVKQWPLTEEKIKALVEI |
| (p66) | | | | | CTEMEKEGKISKIGPENPYNTPVFAIKKKDSTKWRK |
| | | | | | LVDFRELNKRTQDFWEVQLGIPHPAGLKKKKSVTV |
| | | | | | LDVGDAYFSVPLDEDFRKYTAFTIPSINNETPGIRYQ |
| | | | | | YNVLPQGWKGSPAIFQSSMTKILEPFRKQNPDIVIYQ |
| | | | | | YMDDLYVGSDLEIGQHRTKIEELRQHLLRWGLTTP |
| | | | | | DKKHQKEPPFLWMGYELHPDKWTVQPIVLPEKDS |
| | | | | | WTVNDIQKLVGKLNWASQIYPGIKVRQLCKLLRGT |
| | | | | | KALTEVIPLTEEAELELAENREILKEPVHGVYYDPSK |
| | | | | | DLIAEIQKQGQGQWTYQIYQEPFKNLKTGKYARMR |
| | | | | | GAHTNDVKQLTEAVQKITTESIVIWGKTPKFKLPIQ |
| | | | | | KETWETWWTEYWQATWIPEWEFVNTPPLVKLWY |
| | | | | | QLEKEPIVGAETFYVDGAANRETKLGKAGYVTNRG |
| | | | | | RQKVVTLTDTTNQKTELQAIYLALQDSGLEVNIVTD |
| | | | | | SQYALGIIQAQPDQSESELVNQIIEQLIKKEKVYLAW |
| | | | | | VPAHKGIGGNEQVDKLVSAGIRKVL |
| RT (p51) | Protein | 440 | 588 | 1027 | PISPIETVPVKLKPGMDGPKVKQWPLTEEKIKALVEI |
| | | | | | CTEMEKEGKISKIGPENPYNTPVFAIKKKDSTKWRK |
| | | | | | LVDFRELNKRTQDFWEVQLGIPHPAGLKKKKSVTV |
| | | | | | LDVGDAYFSVPLDEDFRKYTAFTIPSINNETPGIRYQ |
| | | | | | YNVLPQGWKGSPAIFQSSMTKILEPFRKQNPDIVIYQ |
| | | | | | YMDDLYVGSDLEIGQHRTKIEELRQHLLRWGLTTP |
| | | | | | DKKHQKEPPFLWMGYELHPDKWTVQPIVLPEKDS |
| | | | | | WTVNDIQKLVGKLNWASQIYPGIKVRQLCKLLRGT |
| | | | | | KALTEVIPLTEEAELELAENREILKEPVHGVYYDPSK |
| | | | | | DLIAEIQKQGQGQWTYQIYQEPFKNLKTGKYARMR |
| | | | | | GAHTNDVKQLTEAVQKITTESIVIWGKTPKFKLPIQ |
| | | | | | KETWETWWTEYWQATWIPEWEFVNTPPLVKLWY |
| | | | | | QLEKEPIVGAETF |
| RNase H | Protein | 120 | 1028 | 1147 | YVDGAANRETKLGKAGYVTNRGRQKVVTLTDTTN |
| | | | | | QKTELQAIYLALQDSGLEVNIVTDSQYALGIIQAQP |
| | | | | | DQSESELVNQIIEQLIKKEKVYLAWVPAHKGIGGNE |
| | | | | | QVDKLVSAGIRKVL |
| Integrase | Protein | 288 | 1148 | 1435 | FLDGIDKAQDEHEKYHSNWRAMASDFNLPPVVAK |
| | | | | | EIVASCDKCQLKGEAMHGQVDCSPGIWQLDCTHLE |
| | | | | | GKVILVAVHVASGYIEAEVIPAETGQETAYFLLKLA |
| | | | | | GRWPVKTIHTDNGSNFTGATVRAACWWAGIKQEF |
| | | | | | GIPYNPQSQGVVESMNKELKKIIGQVRDQAEHLKTA |
| | | | | | VQMAVFIHNFKRKGGIGGYSAGERIVDIIATDIQTKE |
| | | | | | LQKQITKIQNFRVYYRDSRNPLWKGPAKLLWKGEG |
| | | | | | AVVIQDNSDIKVVPRRKAKIIRDYGKQMAGDDCVA |
| | | | | | SRQDED |
| Peptidase A2 | Domain | 70 | 508 | 577 | KEALLDTGADDTVLEEMSLPGRWKPKMIGGIGGFI |
| domain | | | | | KVRQYDQILIEICGHKAIGTVLVGPTPVNIIGRNL |
| Reverse | Domain | 191 | 631 | 821 | EGKISKIGPENPYNTPVFAIKKKDSTKWRKLVDFRE |
| transcriptase | | | | | LNKRTQDFWEVQLGIPHPAGLKKKKSVTVLDVGDA |
| domain | | | | | YFSVPLDEDFRKYTAFTIPSINNETPGIRYQYNVLPQ |
| | | | | | GWKGSPAIFQSSMTKILEPFRKQNPDIVIYQYMDDL |
| | | | | | YVGSDLEIGQHRTKIEELRQHLLRWGLTTPDKKHQ |
| | | | | | KEPPFLWMGYEL |
| RNase H | Domain | 124 | 1021 | 1144 | IVGAETFYVDGAANRETKLGKAGYVTNRGRQKVV |
| domain | | | | | TLTDTTNQKTELQAIYLALQDSGLEVNIVTDSQYAL |
| | | | | | GIIQAQPDQSESELVNQIIEQLIKKEKVYLAWVPAHK |
| | | | | | GIGGNEQVDKLVSAGIR |
| Integrase | Domain | 151 | 1201 | 1351 | VDCSPGIWQLDCTHLEGKVILVAVHVASGYIEAEVI |
| catalytic | | | | | PAETGQETAYFLLKLAGRWPVKTIHTDNGSNFTGA |
| domain | | | | | TVRAACWWAGIKQEFGIPYNPQSQGVVESMNKELK |
| | | | | | KIIGQVRDQAEHLKTAVQMAVFIHNFKRKGGIGGY |
| | | | | | SAGERIVDII |
| Nuclear | Motif | 7 | 16 | 22 | WEKIRLR |
| export signal | | | | | |
| Nuclear | Motif | 7 | 26 | 32 | KKKYKLK |
| localization | | | | | |
| signal | | | | | |
| Tryptophan | Motif | 17 | 985 | 1001 | WETWWTEYWQATWIPEW |
| repeat motif | | | | | |

[0790] Retroviral and lentiviral nucleic acids are disclosed which are lacking or disabled in key proteins/sequences so as to prevent integration of the retroviral or lentiviral genome into the target cell genome. For instance, viral nucleic acids lacking each of the amino acids making up the highly conserved DDE motif (Engelman and Craigie (1992) J. Virol. 66:6361-6369; Johnson et al. (1986) Proc. Natl. Acad. Sci. USA 83:7648-7652; Khan et al. (1991) Nucleic Acids Res. 19:851-860) of retroviral integrase enables the production of integration defective retroviral nucleic acids.

[0791] For instance, in some embodiments, a retroviral nucleic acid herein comprises a lentiviral integrase comprising a mutation that causes said integrase to be unable to catalyze the integration of the viral genome into a cell genome. In some embodiments, said mutations are type I mutations which affect directly the integration, or type II mutations which trigger pleiotropic defects affecting virion morphogenesis and/or reverse transcription. Illustrative non-limitative examples of type I mutations are those mutations affecting any of the three residues that participate in the catalytic core domain of the integrase: DX39-58DX35E (D64, D116 and El 52 residues of the integrase of the HIV-1). In a particular embodiment, the mutation that causes said integrase to be unable to catalyze the integration of the viral genome into a cell genome is the substitution of one or more amino acid residues of the DDE motif of the catalytic core domain of the integrase, preferably the substitution of the first aspartic residue of said DEE motif by an asparagine residue. In some embodiment the retroviral vector does not comprise an integrase protein.

[0792] In some embodiments the retrovirus integrates into active transcription units. In some embodiments the retrovirus does not integrate near transcriptional start sites, the 5′ end of genes, or DNAse 1 cleavage sites. In some embodiments the retrovirus integration does not active proto oncogenes or inactive tumor suppressor genes. In some embodiments the retrovirus is not genotoxic. In some embodiments the lentivirus integrates into introns.

[0793] In some embodiments, the retroviral nucleic acid integrates into the genome of a target cell with a particular copy number. The average copy number may be determined from single cells, a population of cells, or individual cell colonies. Exemplary methods for determining copy number include polymerase chain reaction (PCR) and flow cytometry.

[0794] In some embodiments DNA encoding the exogenous agent is integrated into the genome. In some embodiments DNA encoding the exogenous agent is maintained episomally. In some embodiments the ratio of integrated to episomal DNA encoding the exogenous agent is at least 0.01, 0.1, 0.5, 1.0, 2, 5, 10, 100.

[0795] In some embodiments DNA encoding the exogenous agent is linear. In some embodiments DNA encoding the exogenous agent is circular. In some embodiments the ratio of linear to circular copies of DNA encoding the exogenous agent is at least 0.01, 0.1, 0.5, 1.0, 2, 5, 10, 100.

[0796] In embodiments the DNA encoding the exogenous agent is circular with 1 LTR. In some embodiments the DNA encoding the exogenous agent is circular with 2 LTRs. In some embodiments the ratio of circular, 1 LTR-comprising DNA encoding the exogenous agent to circular, 2 LTR-comprising DNA encoding the exogenous agent is at least 0.1, 0.5, 1.0, 2, 5, 10, 20, 50, 100.

### Maintenance of an Episomal Virus

[0797] In retroviruses deficient in integration, circular cDNA off-products of the retrotranscription (e.g., 1-LTR and 2-LTR) can accumulate in the cell nucleus without integrating into the host genome (see Yanez-Munoz R J et ah, Nat. Med. 2006, 12: 348-353). Like other exogenous DNA those intermediates can then integrate in the cellular DNA at equal frequencies (e.g., 10³ to 10⁵/cell).

[0798] In some embodiments, episomal retroviral nucleic acid does not replicate. Episomal virus DNA can be modified to be maintained in replicating cells through the inclusion of eukaryotic origin of replication and a scaffold/matrix attachment region (S/MAR) for association with the nuclear matrix.

[0799] Thus, in some embodiments, a retroviral nucleic acid described herein comprises a eukaryotic origin of replication or a variant thereof. Examples of eukaryotic origins of replication of interest are the origin of replication of the b-globin gene as have been described by Aladjem et al (Science, 1995, 270: 815-819), a consensus sequence from autonomously replicating sequences associated with alpha-satellite sequences isolated previously from monkey CV-1 cells and human skin fibroblasts as has been described by Price et al Journal of Biological Chemistry, 2003, 278 (22): 19649-59, the origin of replication of the human c-myc promoter region has have been described by McWinney and Leffak (McWinney C. and Leffak M., Nucleic Acid Research 1990, 18(5): 1233-42). In embodiments, the variant substantially maintains the ability to initiate the replication in eukaryotes. The ability of a particular sequence of initiating replication can be determined by any suitable method, for example, the autonomous replication assay based on bromodeoxyuridine incorporation and density shift (Araujo F. D. et ah, supra; Frappier L. et ah, supra).

[0800] In some embodiments, the retroviral nucleic acid comprises a scaffold/matrix attachment region (S/MAR) or variant thereof, e.g., a non-consensus-like AT-rich DNA element several hundred base pairs in length, which organizes the nuclear DNA of the eukaryotic genome into chromatin domains, by periodic attachment to the protein scaffold or matrix of the cell nucleus. They are typically found in non-coding regions such as flanking regions, chromatin border regions, and introns. Examples of S/MAR regions are 1.8 kbp S/MAR of the human IFN-g gene (hIFN-y^{large}) as described by Bode et al (Bode J. et ah, Science, 1992, 255: 195-7), the 0.7 Kbp minimal region of the S/MAR of the human IFN-g gene (hIFN—as has have been described by Ramezani (Ramezani A. et ah, Blood 2003, 101: 4717-24), the 0.2 Kbp minimal region of the S/MAR of the human dehydrofolate reductase gene (hDHFR) as has been described by Mesner F. D. et ah, Proc Natl Acad Sci USA, 2003, 100: 3281-86). In embodiments, the functionally equivalent variant of the S/MAR is a sequence selected based on the set six rules that together or alone have been suggested to contribute to S/MAR function (Kramer et al (1996) Genomics 33, 305; Singh et al (1997) Nucl. Acids Res 25, 1419). These rules have been merged into the MAR-Wiz computer program freely available at genomecluster.secs.oakland.edu/MAR-Wiz. In embodiments, the variant substantially maintains the same functions of the S/MAR from which it derives, in particular, the ability to specifically bind to the nuclear the matrix. The skilled person can determine if a particular variant is able to specifically bind to the nuclear matrix, for example by the in vitro or in vivo MAR assays described by Mesner et al. (Mesner F. D. et al, supra). In some embodiments, a specific sequence is a variant of a S/MAR if the particular variant shows propensity for DNA strand separation. This property can be determined using a specific program based on methods from equilibrium statistical mechanics. The stress-induced duplex destabilization (SIDD) analysis technique “[ . . . ] calculates the extent to which the imposed level of superhelical stress decreases the free energy needed to open the duplex at each position along a DNA sequence. The results are displayed as an SIDD profile, in which sites of strong destabilization appear as deep minima [ . . . ]” as defined in Bode et al (2005) J. Mol. Biol. 358,597. The SIDD algorithm and the mathematical basis (Bi and Benham (2004) Bioinformatics 20, 1477) and the analysis of the SIDD profile can be performed using the freely available internet resource at WebSIDD (www.genomecenter.ucdavis.edu/benham). Accordingly, in some embodiments, the polynucleotide is considered a variant of the S/MAR sequence if it shows a similar SIDD profile as the S/MAR.

[0801] It is understood that in referring to nucleotide distances between elements in nucleotides, unless specified otherwise, distance refers to the number of nucleotides (of a single strand) or base pairs (in a double strand) that are between the elements but not part of the elements. As an example, if a first element occupies nucleotides 1-100, and a second element occupies nucleotides 102-200 of the same nucleic acid, the distance between the first element and the second element is 1 nucleotide.

Gene Writer Systems with Insulators

[0802] A Gene Writer system as described herein may include a template nucleic acid molecule comprising an insulator, a DNA recognition sequence that is specifically bound by a recombinase polypeptide (e.g., a tyrosine recombinase polypeptide or a serine recombinase (e.g., a serine integrase) polypeptide), and a heterologous object sequence. In some embodiments, the insulator is a DNA sequence that can form loop structures via recruitment of insulator proteins, which in turn cause two insulator sequences bound by the insulator proteins to be brought into close proximity with each other. In some instances, the nucleic acid sequence between a first insulator and a second insulator is insulated from one or more of:
[0803] a) heterochromatin formation;
[0804] b) epigenetic regulation (e.g., from both of epigenetic regulation and transcriptional regulation);
[0805] c) transcriptional regulation;
[0806] d) histone deacetylation (e.g., from both of histone deacetylation and histone methylation);
[0807] e) histone methylation;
[0808] f) histone deacetylation; and
[0809] g) DNA methylation, e.g., promoter DNA methylation.

[0810] In some instances, such insulators can act as barriers to heterochromatin entry into a region of a DNA molecule (e.g., a chromosome). For example, a pair of insulators flanking a region within a DNA molecule may reduce heterochromatin formation and/or presence within the sequence between the insulators, e.g., by at least about 25%, 50%, 75%, 80%, 85%, 90%, 95%, 96%, 97%, 98%, 99%, or 100%. In some instances, the insulators (e.g., by reducing or blocking heterochromatin formation) maintain or increase transcriptional activity of the heterologous object sequence positioned between the insulators. In some instances, transcriptional activity of the heterologous object sequence is maintained at approximately the same level (e.g., within about 75%-80%, 80%-85%, 85%-90%, 90%-95%, 95%-96%, 96%-97%, 97%-98%, 98%-99%, 99%-100%, 100%-110%, or 110%-125% of the level of transcription immediately after integration) over a period of time (e.g., a period of at least 1, 2, 3, 4, 5, 6, 7, 8, 9, 10, 20, 30, 40, 50, or 60 minutes, or a period of at least 1, 2, 3, 4, 5, 6, 7, 8, 9, 10, 11, 12, 14, 16, 18, 20, 22, or 24 hours, or a period of at least 1, 2, 3, 4, 5, 6, 7, 8, 9, 10, 20, 30, 40, 50, 60, 70, 80, 90, or 100 days, or more). In some instances, insulators can have enhancer blocking activity (i.e., reducing or eliminating the activity of an enhancer positioned between two insulator sequences). In some instances, transcriptional activity of a heterologous object sequence flanked by insulators is maintained at a level at least 1%, 2%, 3%, 4%, 5%, 10%, 15%, 20%, 25%, 30%, 40%, 50%, 60%, 70%, 80%, 90%, or 100% higher than the transcriptional activity in an otherwise similar heterologous object sequence not flanked by the insulators, at least 10, 20, 30, 40, 50, or 60 minutes, at least 1, 2, 3, 4, 5, 6, 7, 8, 9, 10, 11, 12, 14, 16, 18, 20, 22, or 24 hours, or at least 1, 2, 3, 4, 5, 6, 7, 8, 9, 10, 20, 30, 40, 50, 60, 70, 80, 90, or 100 days after integration. In some instances, enhancer-blocking insulators can reduce the transcription of a gene regulated by the enhancer by at least about 25%, 50%, 75%, 80%, 85%, 90%, 95%, 96%, 97%, 98%, 99%, or 100%.

[0811] In some embodiments, cells treated with a system or method described herein show a decrease in the loss of frequency of expression of the heterologous object sequence at day 28 and/or day 60 after the treatment, e.g., at least 1.1, 1.2, 1.3, 1.4, 1.5, 1.6, 1.7, 1.8, 1.9, 2.0, 2.5, 3, 4, 5, 6, 7, 8, 9, or at least 10-fold lower than cells treated with an otherwise similar template nucleic acid lacking the insulators. In some embodiments, cells treated with template nucleic acid comprising the described insulator configuration show a higher frequency of expression and/or a higher level of expression of the heterologous object sequence at day 28 and/or day 60 post-transduction, e.g., at least 1.1, 1.2, 1.3, 1.4, 1.5, 1.6, 1.7, 1.8, 1.9, 2.0, 2.5, 3, 4, 5, 6, 7, 8, 9, or at least 10-fold higher than cells treated with an otherwise similar template nucleic acid lacking the insulators. In some embodiments, cells treated with template nucleic acid comprising the described insulator configuration demonstrate a smaller increase in frequency of expression and/or level of expression of the heterologous object sequence after further treatment with TSA or 5-aza relative to no treatment with TSA or 5-aza, e.g., at least at least 1.1, 1.2, 1.3, 1.4, 1.5, 1.6, 1.7, 1.8, 1.9, 2.0, 2.5, 3, 4, 5, 6, 7, 8, 9, or at least 10-fold smaller increase than cells treated with an otherwise similar template nucleic acid lacking the insulators. In some embodiments, cells treated with template nucleic acid comprising the described insulator configuration demonstrate an increase in frequency of expression and/or level of expression of the heterologous object sequence after further treatment with TSA or 5-aza of less than 10, 9, 8, 7, 6, 5, 4, 3, 2.5, 2.0, 1.9, 1.8, 1.7, 1.6, 1.5, 1.4, 1.3, 1.2, or less than 1.1-fold increase as compared to no treatment with TSA or 5-aza.

[0812] In some embodiments, treatment of cells with a system or method described herein results in the formation of fewer IL-3 independent colonies, e.g., at least 1.1, 1.2, 1.3, 1.4, 1.5, 1.6, 1.7, 1.8, 1.9, 2.0, 2.5, 3, 4, 5, 6, 7, 8, 9, or at least 10-fold fewer colonies as compared to a an otherwise similar template nucleic acid lacking insulators. In some embodiments, the fraction of mice developing tumors when implanted with cells treated with template nucleic acid comprising an insulator configuration as described herein is lower, e.g., at least 20%, 40%, 60%, 80%, or 100% lower, than mice implanted with cells treated with an otherwise similar template nucleic acid lacking insulators. In some embodiments, the median latency of tumors derived from cells treated with a template nucleic acid comprising an insulator configuration as described herein is longer, e.g., at least 1.1, 1.2, 1.3, 1.4, 1.5, 1.6, 1.7, 1.8, 1.9, or at least 2-fold longer than those derived from cells treated with an otherwise similar template nucleic acid lacking insulators. In some embodiments, the 18-week survival rate of mice implanted with cells treated with template nucleic acid comprising an insulator configuration as described herein is higher, e.g., at least 1.1, 1.2, 1.3, 1.4, 1.5, 1.6, 1.7, 1.8, 1.9, or at least 2-fold higher than that of mice implanted with cells treated with an otherwise similar template nucleic acid lacking insulators.

[0813] In some embodiments, treatment of cells with a system or method described herein results in a change in expression that is lower, e.g., at least 1.1, 1.2, 1.3, 1.4, 1.5, 1.6, 1.7, 1.8, 1.9, 2.0, 2.5, 3, 4, 5, 6, 7, 8, 9, or at least 10-fold lower than the change in expression after integration using an otherwise similar template nucleic acid lacking insulators for at least one gene local to the site of integration. In some embodiments, integration using a template nucleic acid comprising an insulator configuration as described herein results in a less than 10, 9, 8, 7, 6, 5, 4, 3, 2.5, 2.0, 1.9, 1.8, 1.7, 1.6, 1.5, 1.4, 1.3, 1.2, or a less than 1.1-fold change in gene expression for at least one gene local to the site of integration compared to otherwise similar untreated cells. In some embodiments, integration using a template plasmid comprising an insulator configuration as described herein results in a less than 10, 9, 8, 7, 6, 5, 4, 3, 2.5, 2.0, 1.9, 1.8, 1.7, 1.6, 1.5, 1.4, 1.3, 1.2, or a less than 1.1-fold change in expression for at least 90%, e.g., at least 90%, 95%, 96%, 97%, 97%, 99%, 99.5% or at least 99.9% of global transcripts, compared to otherwise similar untreated cells.

[0814] In some instances, a template nucleic acid molecule as described herein comprises a first insulator and a second insulator, with the DNA recognition sequence positioned between the first and second insulator (e.g., as shown in FIGS. 11 and 12). In some instances, the heterologous object sequence is positioned outside of the region between the first and second insulator that comprises the DNA recognition sequence (e.g., as shown in FIGS. 11 and 12). The template nucleic acid molecule may, in some instances, be recombined with a target DNA (e.g., a genomic DNA, e.g., a chromosome or a mitochondrial genome) by a recombinase polypeptide (e.g., a tyrosine recombinase polypeptide or a serine recombinase (e.g., serine integrase) polypeptide), e.g., via recombination of the DNA recognition sequence with a cognate DNA recognition sequence comprised by the target DNA. In some instances, recombination results in integration of the heterologous object sequence into the target DNA, with the first and second insulators flanking the resultant integrated heterologous object sequence.

[0815] In some embodiments, the distance between the first insulator and the DNA recognition sequence is less than 2500, 2000, 1500, 1000, 750, 500, 400, 300, 200, 150, 100, 90, 80, 70, 60, 50, 40, 30, 20, 15, 10, 9, 8, 7, 6, 5, 4, 3, 2, or 1 nucleotides. In some embodiments, the distance between the DNA recognition sequence and the second insulator is less than 2500, 2000, 1500, 1000, 750, 500, 400, 300, 200, 150, 100, 90, 80, 70, 60, 50, 40, 30, 20, 15, 10, 9, 8, 7, 6, 5, 4, 3, 2, or 1 nucleotides. In some embodiments, the distance between the first insulator and the second insulator is less than 1000, 900, 800, 700, 600, 500, 400, 300, 200, 150, 100, 90, 80, 70, 60, or 50 nucleotides.

[0816] It is understood that in referring to nucleotide distances between elements in nucleotides, unless specified otherwise, distance refers to the number of nucleotides (of a single strand) or base pairs (in a double strand) that are between the elements but not part of the elements. As an example, if a first element occupies nucleotides 1-100, and a second element occupies nucleotides 102-200 of the same nucleic acid, the distance between the first element and the second element is 1 nucleotide.

[0817] In some embodiments, the insulator is a chicken P-globin 5′HS4 (cHS4) element, a Scaffold or Matrix Attachment Region (S/MAR) (e.g., MAR X_S29), a Stabilising Anti Repressor (STAR) element (e.g., STAR40), a D4Z4 insulator, A Ubiquitous Chromatin Opening Element (UCOE element) (e.g., aHNRPA2B1-CBX3 locus (A2UCOE), 3′UCOE, or SRF-UCOE), or a functional fragment or variant of any of the foregoing.

[0818] In some embodiments, the insulator comprises one or more (e.g., 2, 3, or 4) CAAT-box binding transcription factor binding site (CTF binding site), e.g., as described in Molecular therapy vol. 22 no. 4, 774-785 April 2014, incorporated herein by reference. In some embodiments, the insulator comprises one or more CCCTC-binding factor (also known as CTCF) binding site, e.g., as described in doi:10.1038/nbt.3062, incorporated herein by reference.

[0819] In some embodiments, the insulator protein that specifically bounds to one or more insulators (e.g., in a system as described herein) is selected from CTCF (CCCTC-binding factor), CTF (CAAT-binding transcription factor 1), USF1 (Upstream Stimulatory Factor 1), USF2 (Upstream Stimulatory Factor 2), PARP-1 (Poly(ADP-ribose) Polymerase-1), and VEZF1 (Vascular Endothelial Zinc Finger 1), or a polypeptide having at least 75%, 80%, 85%, 90%, 95%, 96%, 97%, 98%, or 99% sequence identity thereto.

### Production of Compositions and Systems

[0820] As will be appreciated by one of skill, methods of designing and constructing nucleic acid constructs and proteins or polypeptides (such as the systems, constructs and polypeptides described herein) are routine in the art. Generally, recombinant methods may be used. See, in general, Smales & James (Eds.), Therapeutic Proteins: Methods and Protocols (Methods in Molecular Biology), Humana Press (2005); and Crommelin, Sindelar & Meibohm (Eds.), Pharmaceutical Biotechnology: Fundamentals and Applications, Springer (2013). Methods of designing, preparing, evaluating, purifying and manipulating nucleic acid compositions are described in Green and Sambrook (Eds.), Molecular Cloning: A Laboratory Manual (Fourth Edition), Cold Spring Harbor Laboratory Press (2012).

[0821] Exemplary methods for producing a therapeutic pharmaceutical protein or polypeptide described herein involve expression in mammalian cells, although recombinant proteins can also be produced using insect cells, yeast, bacteria, or other cells under control of appropriate promoters. Mammalian expression vectors may comprise non-transcribed elements such as an origin of replication, a suitable promoter, and other 5′ or 3′ flanking non-transcribed sequences, and 5′ or 3′ non-translated sequences such as necessary ribosome binding sites, a polyadenylation site, splice donor and acceptor sites, and termination sequences. DNA sequences derived from the SV40 viral genome, for example, SV40 origin, early promoter, splice, and polyadenylation sites may be used to provide other genetic elements required for expression of a heterologous DNA sequence. Appropriate cloning and expression vectors for use with bacterial, fungal, yeast, and mammalian cellular hosts are described in Green & Sambrook, Molecular Cloning: A Laboratory Manual (Fourth Edition), Cold Spring Harbor Laboratory Press (2012).

[0822] Various mammalian cell culture systems can be employed to express and manufacture recombinant protein. Examples of mammalian expression systems include CHO, COS, HEK293, HeLA, and BHK cell lines. Processes of host cell culture for production of protein therapeutics are described in Zhou and Kantardjieff (Eds.), Mammalian Cell Cultures for Biologics Manufacturing (Advances in Biochemical Engineering Biotechnology), Springer (2014). Compositions described herein may include a vector, such as a viral vector, e.g., a lentiviral vector, encoding a recombinant protein. In some embodiments, a vector, e.g., a viral vector, may comprise a nucleic acid encoding a recombinant protein.

[0823] Purification of protein therapeutics is described in Franks, Protein Biotechnology: Isolation, Characterization, and Stabilization, Humana Press (2013); and in Cutler, Protein Purification Protocols (Methods in Molecular Biology), Humana Press (2010).

[0824] The disclosure is directed, in part, to comparisons of nucleic acid and amino acid sequences with reference sequences or one another to determine % identity or a number of mismatches between said sequences. A person of skill in the art will understand that a number of methods and/or tools are available to make such determinations, including NCBI's BLAST and pairwise alignment tools that perform global sequence alignment of two input sequences (e.g., using the Needleman-Wunsch alignment algorithm) such as the European Bioinformatics Institute (EBI) and European Molecular Biology Laboratory (EMBL) EMBOSS Needle tool.

[0825] RNAs (e.g., a gRNA or an mRNA, e.g., an mRNA encoding a GeneWriter) may also be produced as described herein. In some embodiments, RNA segments may be produced by chemical synthesis. In some embodiments, RNA segments may be produced by in vitro transcription of a nucleic acid template, e.g., by providing an RNA polymerase to act on a cognate promoter of a DNA template to produce an RNA transcript. In some embodiments, in vitro transcription is performed using, e.g., a T7, T3, or SP6 RNA polymerase, or a derivative thereof, acting on a DNA, e.g., dsDNA, ssDNA, linear DNA, plasmid DNA, linear DNA amplicon, linearized plasmid DNA, e.g., encoding the RNA segment, e.g., under transcriptional control of a cognate promoter, e.g., a T7, T3, or SP6 promoter. In some embodiments, a combination of chemical synthesis and in vitro transcription is used to generate the RNA segments for assembly. In embodiments, the gRNA is produced by chemical synthesis and the heterologous object sequence segment is produced by in vitro transcription. Without wishing to be bound by theory, in vitro transcription may be better suited for the production of longer RNA molecules. In some embodiments, reaction temperature for in vitro transcription may be lowered, e.g., be less than 37° C. (e.g., between 0-10° C., 10-20° C., or 20-30° C.), to result in a higher proportion of full-length transcripts (see Krieg Nucleic Acids Res 18:6463 (1990), which is herein incorporated by reference in its entirety). In some embodiments, a protocol for improved synthesis of long transcripts is employed to synthesize a long RNA, e.g., an RNA greater than 5 kb, such as the use of e.g., T7 RiboMAX Express, which can generate 27 kb transcripts in vitro (Thiel et al. J Gen Virol 82(6):1273-1281 (2001)). In some embodiments, modifications to RNA molecules as described herein may be incorporated during synthesis of RNA segments (e.g., through the inclusion of modified nucleotides or alternative binding chemistries), following synthesis of RNA segments through chemical or enzymatic processes, following assembly of one or more RNA segments, or a combination thereof.

[0826] In some embodiments, an mRNA of the system (e.g., an mRNA encoding a Gene Writer polypeptide) is synthesized in vitro using T7 polymerase-mediated DNA-dependent RNA transcription from a linearized DNA template, where UTP is optionally substituted with 1-methylpseudoUTP. In some embodiments, the transcript incorporates 5′ and 3′ UTRs, e.g., GGGAAAUAAGAGAGAAAAGAAGAGUAAGAAGAAAUAUAAGAGCCACC and UGAUAAUAGGCUGGAGCCUCGGUGGCCAUGCUUCUUGCCCCUUGGGCCUCCCCCC AGCCCCUCCUCCCCUUCCUGCACCCGUACCCCCGUGGUCUUUGAAUAAAGUCUGA, or functional fragments or variants thereof, and optionally includes a poly-A tail, which can be encoded in the DNA template or added enzymatically following transcription. In some embodiments, a donor methyl group, e.g., S-adenosylmethionine, is added to a methylated capped RNA with cap 0 structure to yield a cap 1 structure that increases mRNA translation efficiency (Richner et al. Cell 168(6): P1114-1125 (2017)).

[0827] In some embodiments, the transcript from a T7 promoter starts with a GGG motif. In some embodiments, a transcript from a T7 promoter does not start with a GGG motif. It has been shown that a GGG motif at the transcriptional start, despite providing superior yield, may lead to T7 RNAP synthesizing a ladder of poly(G) products as a result of slippage of the transcript on the three C residues in the template strand from +1 to +3 (Imburgio et al. Biochemistry 39(34):10419-10430 (2000). For tuning transcription levels and altering the transcription start site nucleotides to fit alternative 5′ UTRs, the teachings of Davidson et al. Pac Symp Biocomput 433-443 (2010) describe T7 promoter variants, and the methods of discovery thereof, that fulfill both of these traits.

[0828] In some embodiments, RNA segments may be connected to each other by covalent coupling. In some embodiments, an RNA ligase, e.g., T4 RNA ligase, may be used to connect two or more RNA segments to each other. When a reagent such as an RNA ligase is used, a 5′ terminus is typically linked to a 3′ terminus. In some embodiments, if two segments are connected, then there are two possible linear constructs that can be formed (i.e., (1) 5′-Segment 1-Segment 2-3′ and (2) 5′-Segment 2-Segment 1-3′). In some embodiments, intramolecular circularization can also occur. Both of these issues can be addressed, for example, by blocking one 5′ terminus or one 3′ terminus so that RNA ligase cannot ligate the terminus to another terminus. In embodiments, if a construct of 5′-Segment 1-Segment 2-3′ is desired, then placing a blocking group on either the 5′ end of Segment 1 or the 3′ end of Segment 2 may result in the formation of only the correct linear ligation product and/or prevent intramolecular circularization. Compositions and methods for the covalent connection of two nucleic acid (e.g., RNA) segments are disclosed, for example, in US20160102322A1 (incorporated herein by reference in its entirety), along with methods including the use of an RNA ligase to directionally ligate two single-stranded RNA segments to each other.

[0829] One example of an end blocker that may be used in conjunction with, for example, T4 RNA ligase, is a dideoxy terminator. T4 RNA ligase typically catalyzes the ATP-dependent ligation of phosphodiester bonds between 5′-phosphate and 3′-hydroxyl termini. In some embodiments, when T4 RNA ligase is used, suitable termini must be present on the termini being ligated. One means for blocking T4 RNA ligase on a terminus comprises failing to have the correct terminus format. Generally, termini of RNA segments with a 5-hydroxyl or a 3′-phosphate will not act as substrates for T4 RNA ligase.

[0830] Additional exemplary methods that may be used to connect RNA segments is by click chemistry (e.g., as described in U.S. Pat. Nos. 7,375,234 and 7,070,941, and US Patent Publication No. 2013/0046084, the entire disclosures of which are incorporated herein by reference). For example, one exemplary click chemistry reaction is between an alkyne group and an azide group (see FIG. 11 of US20160102322A1, which is incorporated herein by reference in its entirety). Any click reaction may potentially be used to link RNA segments (e.g., Cu-azide-alkyne, strain-promoted-azide-alkyne, staudinger ligation, tetrazine ligation, photo-induced tetrazole-alkene, thiol-ene, NHS esters, epoxides, isocyanates, and aldehyde-aminooxy). In some embodiments, ligation of RNA molecules using a click chemistry reaction is advantageous because click chemistry reactions are fast, modular, efficient, often do not produce toxic waste products, can be done with water as a solvent, and/or can be set up to be stereospecific.

[0831] In some embodiments, RNA segments may be connected using an Azide-Alkyne Huisgen Cycloaddition. reaction, which is typically a 1,3-dipolar cycloaddition between an azide and a terminal or internal alkyne to give a 1,2,3-triazole for the ligation of RNA segments. Without wishing to be bound by theory, one advantage of this ligation method may be that this reaction can initiated by the addition of required Cu(I) ions. Other exemplary mechanisms by which RNA segments may be connected include, without limitation, the use of halogens (F—, Br—, I—)/alkynes addition reactions, carbonyls/sulfhydryls/maleimide, and carboxyl/amine linkages. For example, one RNA molecule may be modified with thiol at 3′ (using disulfide amidite and universal support or disulfide modified support), and the other RNA molecule may be modified with acrydite at 5′ (using acrylic phosphoramidite), then the two RNA molecules can be connected by a Michael addition reaction. This strategy can also be applied to connecting multiple RNA molecules stepwise. Also provided are methods for linking more than two (e.g., three, four, five, six, etc.) RNA molecules to each other. Without wishing to be bound by theory, this may be useful when a desired RNA molecule is longer than about 40 nucleotides, e.g., such that chemical synthesis efficiency degrades, e.g., as noted in US20160102322A1 (incorporated herein by reference in its entirety).

[0832] By way of illustration, a tracrRNA is typically around 80 nucleotides in length. Such RNA molecules may be produced, for example, by processes such as in vitro transcription or chemical synthesis. In some embodiments, when chemical synthesis is used to produce such RNA molecules, they may be produced as a single synthesis product or by linking two or more synthesized RNA segments to each other. In embodiments, when three or more RNA segments are connected to each other, different methods may be used to link the individual segments together. Also, the RNA segments may be connected to each other in one pot (e.g., a container, vessel, well, tube, plate, or other receptacle), all at the same time, or in one pot at different times or in different pots at different times. In a non-limiting example, to assemble RNA Segments 1, 2 and 3 in numerical order, RNA Segments 1 and 2 may first be connected, 5′ to 3′, to each other. The reaction product may then be purified for reaction mixture components (e.g., by chromatography), then placed in a second pot, for connection of the 3′ terminus with the 5′ terminus of RNA Segment 3. The final reaction product may then be connected to the 5′ terminus of RNA Segment 3.

[0833] In another non-limiting example, RNA Segment 1 (about 30 nucleotides) is the target locus recognition sequence of a crRNA and a portion of Hairpin Region 1. RNA Segment 2 (about 35 nucleotides) contains the remainder of Hairpin Region 1 and some of the linear tracrRNA between Hairpin Region 1 and Hairpin Region 2. RNA Segment 3 (about 35 nucleotides) contains the remainder of the linear tracrRNA between Hairpin Region 1 and Hairpin Region 2 and all of Hairpin Region 2. In this example, RNA Segments 2 and 3 are linked, 5′ to 3′, using click chemistry. Further, the 5′ and 3′ end termini of the reaction product are both phosphorylated. The reaction product is then contacted with RNA Segment 1, having a 3′ terminal hydroxyl group, and T4 RNA ligase to produce a guide RNA molecule.

[0834] A number of additional linking chemistries may be used to connect RNA segments according to method of the invention. Some of these chemistries are set out in Table 6 of US20160102322A1, which is incorporated herein by reference in its entirety.

### Vectors

[0835] The disclosure provides, in part, a nucleic acid, e.g., vector, encoding a Gene Writer polypeptide described herein, a template nucleic acid described herein, or both. In some embodiments, a vector comprises a selective marker, e.g., an antibiotic resistance marker. In some embodiments, the antibiotic resistance marker is a kanamycin resistance marker. In some embodiments, the antibiotic resistance marker does not confer resistance to beta-lactam antibiotics. In some embodiments, the vector does not comprise an ampicillin resistance marker. In some embodiments, the vector comprises a kanamycin resistance marker and does not comprise an ampicillin resistance marker. In some embodiments, a vector encoding a Gene Writer polypeptide is integrated into a target cell genome (e.g., upon administration to a target cell, tissue, organ, or subject). In some embodiments, a vector encoding a Gene Writer polypeptide is not integrated into a target cell genome (e.g., upon administration to a target cell, tissue, organ, or subject). In some embodiments, a vector comprising a template nucleic acid (e.g., template DNA) is not integrated into a target cell genome (e.g., upon administration to a target cell, tissue, organ, or subject). In some embodiments, if a vector is integrated into a target site in a target cell genome, the selective marker is not integrated into the genome. In some embodiments, if a vector is integrated into a target site in a target cell genome, genes or sequences involved in vector maintenance (e.g., plasmid maintenance genes) are not integrated into the genome. In some embodiments, if a vector is integrated into a target site in a target cell genome, transfer regulating sequences (e.g., inverted terminal repeats, e.g., from an AAV) are not integrated into the genome. In some embodiments, administration of a vector (e.g., encoding a Gene Writer polypeptide described herein, a template nucleic acid described herein, or both) to a target cell, tissue, organ, or subject results in integration of a portion of the vector into one or more target sites in the genome(s) of said target cell, tissue, organ, or subject. In some embodiments, less than 99, 95, 90, 80, 70, 60, 50, 40, 30, 20, 10, 5, 4, 3, 2, or 1% of target sites (e.g., no target sites) comprising integrated material comprise a selective marker (e.g., an antibiotic resistance gene), a transfer regulating sequence (e.g., an inverted terminal repeat, e.g., from an AAV), or both from the vector.

### AAV Vectors

[0836] In some embodiments, the vector encoding a Gene Writer polypeptide described herein, a template nucleic acid described herein, or both, is an adeno-associated virus (AAV) vector, e.g., comprising an AAV genome. In some embodiments, the AAV genome comprises two genes that encode four replication proteins and three capsid proteins, respectively. In some embodiments, the genes are flanked on either side by 145-bp inverted terminal repeats (ITRs). In some embodiments, the virion comprises up to three capsid proteins (Vp1, Vp2, and/or Vp3), e.g., produced in a 1:1:10 ratio. In some embodiments, the capsid proteins are produced from the same open reading frame and/or from differential splicing (Vp1) and alternative translational start sites (Vp2 and Vp3, respectively). Generally, Vp3 is the most abundant subunit in the virion and participates in receptor recognition at the cell surface defining the tropism of the virus. In some embodiments, Vp1 comprises a phospholipase domain, e.g., which functions in viral infectivity, in the N-terminus of Vp 1.

[0837] In some embodiments, packaging capacity of the viral vectors limits the size of the base editor that can be packaged into the vector. For example, the packaging capacity of the AAVs can be about 4.5 kb (e.g., about 3.0, 3.5, 4.0, 4.5, 5.0, 5.5, or 6.0 kb), e.g., including one or two inverted terminal repeats (ITRs), e.g., 145 base ITRs.

[0838] In some embodiments, recombinant AAV (rAAV) comprises cis-acting 145-bp ITRs flanking vector transgene cassettes, e.g., providing up to 4.5 kb for packaging of foreign DNA. Subsequent to infection, rAAV can, in some instances, express a protein described herein and persist without integration into the host genome by existing episomally in circular head-to-tail concatemers. rAAV can be used, for example, in vitro and in vivo. In some embodiments, AAV-mediated gene delivery requires that the length of the coding sequence of the gene is equal or greater in size than the wild-type AAV genome.

[0839] AAV delivery of genes that exceed this size and/or the use of large physiological regulatory elements can be accomplished, for example, by dividing the protein(s) to be delivered into two or more fragments. In some embodiments, the N-terminal fragment is fused to a split intein-N. In some embodiments, the C-terminal fragment is fused to a split intein-C. In embodiments, the fragments are packaged into two or more AAV vectors.

[0840] In some embodiments, dual AAV vectors are generated by splitting a large transgene expression cassette in two separate halves (5 and 3 ends, or head and tail), e.g., wherein each half of the cassette is packaged in a single AAV vector (of <5 kb). The re-assembly of the full-length transgene expression cassette can, in some embodiments, then be achieved upon co-infection of the same cell by both dual AAV vectors. In some embodiments, co-infection is followed by one or more of: (1) homologous recombination (HR) between 5 and 3 genomes (dual AAV overlapping vectors); (2) ITR-mediated tail-to-head concatemerization of 5 and 3 genomes (dual AAV trans-splicing vectors); and/or (3) a combination of these two mechanisms (dual AAV hybrid vectors). In some embodiments, the use of dual AAV vectors in vivo results in the expression of full-length proteins. In some embodiments, the use of the dual AAV vector platform represents an efficient and viable gene transfer strategy for transgenes of greater than about 4.0, 4.1, 4.2, 4.3, 4.4, 4.5, 4.6, 4.7, 4.8, 4.9, or 5.0 kb in size. In some embodiments, AAV vectors can also be used to transduce cells with target nucleic acids, e.g., in the in vitro production of nucleic acids and peptides. In some embodiments, AAV vectors can be used for in vivo and ex vivo gene therapy procedures (see, e.g., West et al., Virology 160:38-47 (1987); U.S. Pat. No. 4,797,368; WO 93/24641; Kotin, Human Gene Therapy 5:793-801 (1994); Muzyczka, J. Clin. Invest.94:1351 (1994); each of which is incorporated herein by reference in their entirety). The construction of recombinant AAV vectors is described in a number of publications, including U.S. Pat. No. 5,173,414; Tratschin et al., Mol. Cell. Biol.5:3251-3260 (1985); Tratschin, et al., Mol. Cell. Biol.4:2072-2081 (1984); Hermonat & Muzyczka, PNAS 81:6466-6470 (1984); and Samulski et al., J. Virol.63:03822-3828 (1989) (incorporated by reference herein in their entirety).

[0841] In some embodiments, a Gene Writer described herein (e.g., with or without one or more guide nucleic acids) can be delivered using AAV, lentivirus, adenovirus or other plasmid or viral vector types, in particular, using formulations and doses from, for example, U.S. Pat. No. 8,454,972 (formulations, doses for adenovirus), U.S. Pat. No. 8,404,658 (formulations, doses for AAV) and U.S. Pat. No. 5,846,946 (formulations, doses for DNA plasmids) and from clinical trials and publications regarding the clinical trials involving lentivirus, AAV and adenovirus. For example, for AAV, the route of administration, formulation and dose can be as described in U.S. Pat. No. 8,454,972 and as in clinical trials involving AAV. For Adenovirus, the route of administration, formulation and dose can be as described in U.S. Pat. No. 8,404,658 and as in clinical trials involving adenovirus. For plasmid delivery, the route of administration, formulation and dose can be as described in U.S. Pat. No. 5,846,946 and as in clinical studies involving plasmids. Doses can be based on or extrapolated to an average 70 kg individual (e.g. a male adult human), and can be adjusted for patients, subjects, mammals of different weight and species. Frequency of administration is within the ambit of the medical or veterinary practitioner (e.g., physician, veterinarian), depending on usual factors including the age, sex, general health, other conditions of the patient or subject and the particular condition or symptoms being addressed. In some embodiments, the viral vectors can be injected into the tissue of interest. For cell-type specific Gene Writing, the expression of the Gene Writer and optional guide nucleic acid can, in some embodiments, be driven by a cell-type specific promoter.

[0842] In some embodiments, AAV allows for low toxicity, for example, due to the purification method not requiring ultracentrifugation of cell particles that can activate the immune response. In some embodiments, AAV allows low probability of causing insertional mutagenesis, for example, because it does not substantially integrate into the host genome.

[0843] In some embodiments, AAV has a packaging limit of about 4.4, 4.5, 4.6, 4.7, or 4.75 kb. In some embodiments, a Gene Writer, promoter, and transcription terminator can fit into a single viral vector. SpCas9 (4.1 kb) may, in some instances, be difficult to package into AAV. Therefore, in some embodiments, a Gene Writer is used that is shorter in length than other Gene Writers or base editors. In some embodiments, the Gene Writers are less than about 4.5 kb, 4.4 kb, 4.3 kb, 4.2 kb, 4.1 kb, 4 kb, 3.9 kb, 3.8 kb, 3.7 kb, 3.6 kb, 3.5 kb, 3.4 kb, 3.3 kb, 3.2 kb, 3.1 kb, 3 kb, 2.9 kb, 2.8 kb, 2.7 kb, 2.6 kb, 2.5 kb, 2 kb, or 1.5 kb.

[0844] An AAV can be AAV1, AAV2, AAV5 or any combination thereof. In some embodiments, the type of AAV is selected with respect to the cells to be targeted; e.g., AAV serotypes 1, 2, 5 or a hybrid capsid AAV1, AAV2, AAV5 or any combination thereof can be selected for targeting brain or neuronal cells; or AAV4 can be selected for targeting cardiac tissue. In some embodiments, AAV8 is selected for delivery to the liver. Exemplary AAV serotypes as to these cells are described, for example, in Grimm, D. et al, J. Virol.82: 5887-5911 (2008) (incorporated herein by reference in its entirety). In some embodiments, AAV refers all serotypes, subtypes, and naturally-occurring AAV as well as recombinant AAV. AAV may be used to refer to the virus itself or a derivative thereof. In some embodiments, AAV includes AAV1, AAV2, AAV3, AAV3, AAV4, AAV5, AAV6, AAV6.2, AAV7, AAVrh.64R1, AAVhu.37, AAVrh.8, AAVrh.32.33, AAV8, AAV9, AAV-DJ, AAV2/8, AAVrh10, AAVLK3, AV 1O, AAV 11, AAV 12, rhG, and hybrids thereof, avian AAV, bovine AAV, canine AAV, equine AAV, primate AAV, nonprimate AAV, and ovine AAV. The genomic sequences of various serotypes ofAAV, as well as the sequences ofthe native terminal repeats (TRs), Rep proteins, and capsid subunits are known in the art. Such sequences may be found in the literature or in public databases such as Genflank. Additional exemplary AAV serotypes are listed in Table 13.

TABLE 13
Viral delivery modalities

| Target | | |
|---|---|---|
| Tissue | Vehicle | Reference |
| Liver | AAV (AAV5, AAV6, | 1. Wang et al., Mol. Ther. 18, |
| | AAV8¹, AAVrh.8¹, | 118-25 (2010) |
| | AAVhu.37¹, AAV2/8, | 2. Ginn et al., JHEP Reports, |
| | AAV2/rh10², AAV9, | 100065 (2019) |
| | AAV2, NP40³, NP59^{2, 3}, | 3. Paulk et al., Mol. Ther. 26, |
| | AAV3B⁵, AAV-DJ⁴, | 289-303 (2018). |
| | AAV-LK01⁴, AAV-LK02⁴, | 4. L. Lisowski et al., Nature. |
| | AAV-LK03⁴, AAV-LK19⁴ | 506, 382-6 (2014). |
| | Adenovirus (Ad5, | 5. L. Wang et al., Mol. Ther. 23, |
| | HC-AdV⁶) | 1877-87 (2015). |
| | | 6. Hausl Mol Ther (2010) |
| Lung | AAV (AAV4, AAV5, | 1. Duncan et al., Mol Ther |
| | AAV6¹, AAV9, H22²) | Methods Clin Dev (2018) |
| | Adenovirus (Ad5, Ad3, | 2. Cooney et al., Am J Respir |
| | Ad21, Ad14)³ | Cell Mol Biol (2019) |
| | | 3. Li et al., Mol Ther Methods |
| | | Clin Dev (2019) |
| Skin | AAV6¹, AAV-LK19² | 1. Petek et al., Mol. Ther. (2010) |
| | | 2. L. Lisowski et al., Nature. |
| | | 506, 382-6 (2014). |
| HSCs | HDAd5/35⁺⁺ | Wang et al. Blood Adv (2019) |

[0845] In some embodiments, a pharmaceutical composition (e.g., comprising an AAV as described herein) has less than 1000 empty capsids, less than 8% empty capsids, less than 7% empty capsids, less than 500 empty capsids, less than 30% empty capsids, or less than 1% empty capsids. In some embodiments, the pharmaceutical composition has less than about 5% empty capsids. In some embodiments, the number of empty capsids is below the limit of detection. In some embodiments, it is advantageous for the pharmaceutical composition to have low amounts of empty capsids, e.g., because empty capsids may generate an adverse response (e.g., immune response, inflammatory response, liver response, and/or cardiac response), e.g., with little or no substantial therapeutic benefit.

[0846] In some embodiments, the residual host cell protein (rHCP) in the pharmaceutical composition is less than or equal to 100 ng/ml rHCP per 1×10¹³ vg/ml, e.g., less than or equal to 40 ng/ml rHCP per 1×10¹³ vg/ml or 1-50 ng/ml rHCP per 1×10¹³ vg/ml. In some embodiments, the pharmaceutical composition comprises less than 10 ng rHCP per 1.0×10¹³ vg, or less than 5 ng rHCP per 1.0×10¹³ vg, less than 4 ng rHCP per 1.0×10¹³ vg, or less than 3 ng rHCP per 1.0×10¹³ vg, or any concentration in between. In some embodiments, the residual host cell DNA (hcDNA) in the pharmaceutical composition is less than or equal to 5×10⁶ pg/ml hcDNA per 1×10¹³ vg/ml, less than or equal to 1.2×10⁶ pg/ml hcDNA per 1×10¹³ vg/ml, or 1×10⁵ pg/ml hcDNA per 1×10¹³ vg/ml. In some embodiments, the residual host cell DNA in said pharmaceutical composition is less than 5.0×10⁵ pg per 1×10¹³ vg, less than 2.0×10⁵ pg per 1.0×10¹³ vg, less than 1.1×10⁵ μg per 1.0×10¹³ vg, less than 1.0×10⁵ pg hcDNA per 1.0×10¹³ vg, less than 0.9×10⁵ pg hcDNA per 1.0×10¹³ vg, less than 0.8×10⁵ pg hcDNA per 1.0×10¹³ vg, or any concentration in between.

[0847] In some embodiments, the residual plasmid DNA in the pharmaceutical composition is less than or equal to 1.7×10⁵ pg/ml per 1.0×10¹³ vg/ml, or 1×10⁵ pg/ml per 1×1.0×10¹³ vg/ml, or 1.7×10⁶ pg/ml per 1.0×10¹³ vg/ml. In some embodiments, the residual DNA plasmid in the pharmaceutical composition is less than 10.0×10 5 pg by 1.0×10¹³ vg, less than 8.0×10⁵ pg by 1.0×10¹³ vg or less than 6.8×10 5 pg by 1.0×10¹³ vg. In embodiments, the pharmaceutical composition comprises less than 0.5 ng per 1.0×10¹³ vg, less than 0.3 ng per 1.0×10¹³ vg, less than 0.22 ng per 1.0×10¹³ vg or less than 0.2 ng per 1.0×10¹³ vg or any intermediate concentration of bovine serum albumin (BSA). In embodiments, the benzonase in the pharmaceutical composition is less than 0.2 ng by 1.0×10¹³ vg, less than 0.1 ng by 1.0×10¹³ vg, less than 0.09 ng by 1.0×10¹³ vg, less than 0.08 ng by 1.0×10¹³ vg or any intermediate concentration. In embodiments, Poloxamer 188 in the pharmaceutical composition is about 10 to 150 ppm, about 15 to 100 ppm or about 20 to 80 ppm. In embodiments, the cesium in the pharmaceutical composition is less than 50 pg/g (ppm), less than 30 pg/g (ppm) or less than 20 pg/g (ppm) or any intermediate concentration.

[0848] In embodiments, the pharmaceutical composition comprises total impurities, e.g., as determined by SDS-PAGE, of less than 10%, less than 8%, less than 7%, less than 6%, less than 5%, less than 4%, less than 3%, less than 2%, or any percentage in between. In embodiments, the total purity, e.g., as determined by SDS-PAGE, is greater than 90%, greater than 92%, greater than 93%, greater than 94%, greater than 95%, greater than 96%, greater than 97%, greater than 98%, or any percentage in between. In embodiments, no single unnamed related impurity, e.g., as measured by SDS-PAGE, is greater than 5%, greater than 4%, greater than 3% or greater than 2%, or any percentage in between. In embodiments, the pharmaceutical composition comprises a percentage of filled capsids relative to total capsids (e.g., peak 1+peak 2 as measured by analytical ultracentrifugation) of greater than 85%, greater than 86%, greater than 87%, greater than 88%, greater than 89%, greater than 90%, greater than 91%, greater than 91.9%, greater than 92%, greater than 93%, or any percentage in between. In embodiments of the pharmaceutical composition, the percentage of filled capsids measured in peak 1 by analytical ultracentrifugation is 20-80%, 25-75%, 30-75%, 35-75%, or 37.4-70.3%. In embodiments of the pharmaceutical composition, the percentage of filled capsids measured in peak 2 by analytical ultracentrifugation is 20-80%, 20-70%, 22-65%, 24-62%, or 24.9-60.1%.

[0849] In one embodiment, the pharmaceutical composition comprises a genomic titer of 1.0 to 5.0×10¹³ vg/mL, 1.2 to 3.0×10¹³ vg/mL or 1.7 to 2.3×10¹³ vg/ml. In one embodiment, the pharmaceutical composition exhibits a biological load of less than 5 CFU/mL, less than 4 CFU/mL, less than 3 CFU/mL, less than 2 CFU/mL or less than 1 CFU/mL or any intermediate contraction. In embodiments, the amount of endotoxin according to USP, for example, USP<85> (incorporated by reference in its entirety) is less than 1.0 EU/mL, less than 0.8 EU/mL or less than 0.75 EU/mL. In embodiments, the osmolarity of a pharmaceutical composition according to USP, for example, USP<785> (incorporated by reference in its entirety) is 350 to 450 mOsm/kg, 370 to 440 mOsm/kg or 390 to 430 mOsm/kg. In embodiments, the pharmaceutical composition contains less than 1200 particles that are greater than 25 m per container, less than 1000 particles that are greater than 25 m per container, less than 500 particles that are greater than 25 m per container or any intermediate value. In embodiments, the pharmaceutical composition contains less than 10,000 particles that are greater than 10 m per container, less than 8000 particles that are greater than 10 m per container or less than 600 particles that are greater than 10 μm per container.

[0850] In one embodiment, the pharmaceutical composition has a genomic titer of 0.5 to 5.0×10¹³ vg/mL, 1.0 to4.0×10¹³ vg/mL, 1.5 to3.0×10¹³ vg/ml or1.7 to2.3×10¹³ vg/m 1 In one embodiment, the pharmaceutical composition described herein comprises one or more of the following: less than about 0.09 ng benzonase per 1.0×10¹³ vg, less than about 30 pg/g (ppm) of cesium, about 20 to 80 ppm Poloxamer 188, less than about 0.22 ng BSA per 1.0×10¹³ vg, less than about 6.8×10 5 μg of residual DNA plasmid per 1.0×10¹³ vg, less than about 1.1×10⁵ pg of residual hcDNA per 1.0×10¹³ vg, less than about 4 ng of rHCP per 1.0×10¹³ vg, pH 7.7 to 8.3, about 390 to 430 mOsm/kg, less than about 600 particles that are >25 m in size per container, less than about 6000 particles that are >10 m in size per container, about 1.7×10¹³-2.3×10¹³ vg/mL genomic titer, infectious titer of about 3.9×10⁸ to 8.4×10¹⁰ IU per 1.0×10¹³ vg, total protein of about 100-300 pg per 1.0×10¹³ vg, mean survival of >24 days in A7SMA mice with about 7.5×10¹³ vg/kg dose of viral vector, about 70 to 130% relative potency based on an in vitro cell based assay and/or less than about 5% empty capsid. In various embodiments, the pharmaceutical compositions described herein comprise any of the viral particles discussed here, retain a potency of between ±20%, between +15%, between ±10% or within ±5% of a reference standard. In some embodiments, potency is measured using a suitable in vitro cell assay or in vivo animal model.

[0851] Additional methods of preparation, characterization, and dosing AAV particles are taught in WO2019094253, which is incorporated herein by reference in its entirety.

[0852] Additional rAAV constructs that can be employed consonant with the invention include those described in Wang et al 2019, available at: //doi.org/10.1038/s41573-019-0012-9, including Table 1 thereof, which is incorporated by reference in its entirety.

### Kits, Articles of Manufacture, and Pharmaceutical Compositions

[0853] In an aspect the disclosure provides a kit comprising a Gene Writer or a Gene Writing system, e.g., as described herein. In some embodiments, the kit comprises a Gene Writer polypeptide (or a nucleic acid encoding the polypeptide) and a template DNA. In some embodiments, the kit further comprises a reagent for introducing the system into a cell, e.g., transfection reagent, LNP, and the like. In some embodiments, the kit is suitable for any of the methods described herein. In some embodiments, the kit comprises one or more elements, compositions (e.g., pharmaceutical compositions), Gene Writers, and/or Gene Writer systems, or a functional fragment or component thereof, e.g., disposed in an article of manufacture. In some embodiments, the kit comprises instructions for use thereof.

[0854] In an aspect, the disclosure provides an article of manufacture, e.g., in which a kit as described herein, or a component thereof, is disposed.

[0855] In an aspect, the disclosure provides a pharmaceutical composition comprising a Gene Writer or a Gene Writing system, e.g., as described herein. In some embodiments, the pharmaceutical composition further comprises a pharmaceutically acceptable carrier or excipient. In some embodiments, the pharmaceutical composition comprises a template DNA.

### Chemistry, Manufacturing, and Controls (CMC)

[0856] Purification of protein therapeutics is described, for example, in Franks, Protein Biotechnology: Isolation, Characterization, and Stabilization, Humana Press (2013); and in Cutler, Protein Purification Protocols (Methods in Molecular Biology), Humana Press (2010).

[0857] In some embodiments, a Gene Writer™ system, polypeptide, and/or template nucleic acid (e.g., template DNA) conforms to certain quality standards. In some embodiments, a Gene Writer™ system, polypeptide, and/or template nucleic acid (e.g., template DNA) produced by a method described herein conforms to certain quality standards. Accordingly, the disclosure is directed, in some aspects, to methods of manufacturing a Gene Writer™ system, polypeptide, and/or template nucleic acid that conforms to certain quality standards, e.g., in which said quality standards are assayed. The disclosure is also directed, in some aspects, to methods of assaying said quality standards in a Gene Writer™ system, polypeptide, and/or template nucleic acid. In some embodiments, quality standards include, but are not limited to, one or more (e.g., 1, 2, 3, 4, 5, 6, 7, 8, 9, 10, 11, or 12) of the following:
[0858] (i) the length of the template DNA or the mRNA encoding the GeneWriter polypeptide, e.g., whether the DNA or mRNA has a length that is above a reference length or within a reference length range, e.g., whether at least 80, 85, 90, 95, 96, 97, 98, or 99% of the DNA or mRNA present is greater than 100, 125, 150, 175, or 200 nucleotides long;
[0859] (ii) the presence, absence, and/or length of a polyA tail on the mRNA, e.g., whether at least 80, 85, 90, 95, 96, 97, 98, or 99% of the mRNA present contains a polyA tail (e.g., a polyA tail that is at least 5, 10 (SEQ ID NO: 3540), 20 (SEQ ID NO: 3541), 30 (SEQ ID NO: 3542), 50 (SEQ ID NO: 3543), 70 (SEQ ID NO: 3544), 100 (SEQ ID NO: 3545) nucleotides in length);
[0860] (iii) the presence, absence, and/or type of a 5′ cap on the mRNA, e.g., whether at least 80, 85, 90, 95, 96, 97, 98, or 99% of the mRNA present contains a 5′ cap, e.g., whether that cap is a 7-methylguanosine cap, e.g., a O-Me-m7G cap;
[0861] (iv) the presence, absence, and/or type of one or more modified nucleotides (e.g., selected from pseudouridine, dihydrouridine, inosine, 7-methylguanosine, 1-N-methylpseudouridine (1-Me-Ψ), 5-methoxyuridine (5-MO-U), 5-methylcytidine (5mC), or a locked nucleotide) in the mRNA, e.g., whether at least 80, 85, 90, 95, 96, 97, 98, or 99% of the mRNA present contains one or more modified nucleotides;
[0862] (v) the stability of the template DNA or the mRNA (e.g., over time and/or under a pre-selected condition), e.g., whether at least 80, 85, 90, 95, 96, 97, 98, or 99% of the DNA or mRNA remains intact (e.g., greater than 100, 125, 150, 175, or 200 nucleotides long) after a stability test;
[0863] (vi) the potency of the template DNA or the mRNA in a system for modifying DNA, e.g., whether at least 1% of target sites are modified after a system comprising the DNA or mRNA is assayed for potency;
[0864] (vii) the length of the polypeptide, first polypeptide, or second polypeptide, e.g., whether the polypeptide, first polypeptide, or second polypeptide has a length that is above a reference length or within a reference length range, e.g., whether at least 80, 85, 90, 95, 96, 97, 98, or 99% of the polypeptide, first polypeptide, or second polypeptide present is greater than 600, 650, 700, 750, 800, 850, 900, 950, 1000, 1050, 1100, 1150, 1200, 1250, 1300, 1350, 1400, 1450, 1500, 1600, 1700, 1800, 1900, or 2000 amino acids long (and optionally, no larger than 2500, 2000, 1500, 1400, 1300, 1200, 1100, 1000, 900, 800, 700, or 600 amino acids long);
[0865] (viii) the presence, absence, and/or type of post-translational modification on the polypeptide, first polypeptide, or second polypeptide, e.g., whether at least 80, 85, 90, 95, 96, 97, 98, or 99% of the polypeptide, first polypeptide, or second polypeptide contains phosphorylation, methylation, acetylation, myristoylation, palmitoylation, isoprenylation, glipyatyon, or lipoylation, or any combination thereof,
[0866] (ix) the presence, absence, and/or type of one or more artificial, synthetic, or non-canonical amino acids (e.g., selected from ornithine, P-alanine, GABA, 6-Aminolevulinic acid, PABA, a D-amino acid (e.g., D-alanine or D-glutamate), aminoisobutyric acid, dehydroalanine, cystathionine, lanthionine, Djenkolic acid, Diaminopimelic acid, Homoalanine, Norvaline, Norleucine, Homonorleucine, homoserine, O-methyl-homoserine and O-ethyl-homoserine, ethionine, selenocysteine, selenohomocysteine, selenomethionine, selenoethionine, tellurocysteine, or telluromethionine) in the polypeptide, first polypeptide, or second polypeptide, e.g., whether at least 80, 85, 90, 95, 96, 97, 98, or 99% of the polypeptide, first polypeptide, or second polypeptide present contains one or more artificial, synthetic, or non-canonical amino acids;
[0867] (x) the stability of the polypeptide, first polypeptide, or second polypeptide (e.g., over time and/or under a pre-selected condition), e.g., whether at least 80, 85, 90, 95, 96, 97, 98, or 99% of the polypeptide, first polypeptide, or second polypeptide remains intact (e.g., greater than 600, 650, 700, 750, 800, 850, 900, 950, 1000, 1050, 1100, 1150, 1200, 1250, 1300, 1350, 1400, 1450, 1500, 1600, 1700, 1800, 1900, or 2000 amino acids long (and optionally, no larger than 2500, 2000, 1500, 1400, 1300, 1200, 1100, 1000, 900, 800, 700, or 600 amino acids long)) after a stability test;
[0868] (xi) the potency of the polypeptide, first polypeptide, or second polypeptide in a system for modifying DNA, e.g., whether at least 1% of target sites are modified after a system comprising the polypeptide, first polypeptide, or second polypeptide is assayed for potency; or
[0869] (xii) the presence, absence, and/or level of one or more of a pyrogen, virus, fungus, bacterial pathogen, or host cell protein, e.g., whether the system is free or substantially free of pyrogen, virus, fungus, bacterial pathogen, or host cell protein contamination.

[0870] In some embodiments, a system or pharmaceutical composition described herein is endotoxin free.

[0871] In some embodiments, the presence, absence, and/or level of one or more of a pyrogen, virus, fungus, bacterial pathogen, and/or host cell protein is determined. In embodiments, whether the system is free or substantially free of pyrogen, virus, fungus, bacterial pathogen, and/or host cell protein contamination is determined.

[0872] In some embodiments, a pharmaceutical composition or system as described herein has one or more (e.g., 1, 2, 3, or 4) of the following characteristics:
[0873] (a) less than 1% (e.g., less than 0.5%, 0.4%, 0.3%, 0.2%, or 0.1%) DNA template relative to the RNA encoding the polypeptide, e.g., on a molar basis;
[0874] (b) less than 1% (e.g., less than 0.5%, 0.4%, 0.3%, 0.2%, or 0.1%) uncapped RNA relative to the RNA encoding the polypeptide, e.g., on a molar basis;
[0875] (c) less than 1% (e.g., less than 0.5%, 0.4%, 0.3%, 0.2%, or 0.1%) partial length RNAs relative to the RNA encoding the polypeptide, e.g., on a molar basis;
[0876] (d) substantially lacks unreacted cap dinucleotides.

### Exemplary Heterologous Object Sequences

[0877] In some embodiments, the systems or methods provided herein comprise a heterologous object sequence, wherein the heterologous object sequence or a reverse complementary sequence thereof, encodes a protein (e.g., an antibody) or peptide. In some embodiments, the therapy is one approved by a regulatory agency such as FDA.

[0878] In some embodiments, the protein or peptide is a protein or peptide from the THPdb database (Usmani et al. PLoS One 12(7):e0181748 (2017), herein incorporated by reference in its entirety. In some embodiments, the protein or peptide is a protein or peptide disclosed in Table 14. In some embodiments, the systems or methods disclosed herein, for example, those comprising Gene Writers, may be used to integrate an expression cassette for a protein or peptide from Table 14 into a host cell to enable the expression of the protein or peptide in the host. In some embodiments, the sequences of the protein or peptide in the first column of Table 14 can be found in the patents or applications provided in the third column of Table 14, incorporated by reference in their entireties.

[0879] In some embodiments, the protein or peptide is an antibody disclosed in Table 1 of Lu et al. J Biomed Sci 27(1):1 (2020), herein incorporated by reference in its entirety. In some embodiments, the protein or peptide is an antibody disclosed in Table 15. In some embodiments, the systems or methods disclosed herein, for example, those comprising Gene Writers, may be used to integrate an expression cassette for an antibody from Table 15 into a host cell to enable the expression of the antibody in the host. In some embodiments, a system or method described herein is used to express an agent that binds a target of column 2 of Table 15 (e.g., a monoclonal antibody of column 1 of Table 15) in a subject having an indication of column 3 of Table 15.

TABLE 14
Exemplary protein and peptide therapeutics.

| Therapeutic peptide | Category | Patent Number |
|---|---|---|
| Lepirudin | Antithrombins and Fibrinolytic | CA1339104 |
| | Agents | |
| Cetuximab | Antineoplastic Agents | CA1340417 |
| Dor se alpha | Enzymes | CA2184581 |
| Denileukin diftitox | Antineoplastic Agents | |
| Etanercept | Immunosuppressive Agents | CA2476934 |
| Bivalirudin | Antithrombins | US7582727 |
| Leuprolide | Antineoplastic Agents | |
| Peginterferon alpha-2a | Immunosuppressive Agents | CA2203480 |
| Alteplase | Thrombolytic Agents | |
| Interferon alpha-n1 | Antiviral Agents | |
| Darbepoetin alpha | Anti-anemic Agents | CA2165694 |
| Reteplase | Fibrinolytic Agents | CA2107476 |
| Epoetin alpha | Hematinics | CA1339047 |
| Salmon Calcitonin | Bone Density Conservation | US6440392 |
| | Agents | |
| Interferon alpha-n3 | Immunosuppressive Agents | |
| Pegfilgrastim | Immunosuppressive Agents | CA1341537 |
| Sargramostim | Immunosuppressive Agents | CA1341150 |
| Secretin | Diagnostic Agents | |
| Peginterferon alpha-2b | Immunosuppressive Agents | CA1341567 |
| Asparagi se | Antineoplastic Agents | |
| Thyrotropin alpha | Diagnostic Agents | US5840566 |
| Antihemophilic Factor | Coagulants and Thrombotic agents | CA2124690 |
| A kinra | Antirheumatic Agents | CA2141953 |
| Gramicidin D | Anti-Bacterial Agents | |
| Intravenous | Immunologic Factors | |
| Immunoglobulin | | |
| Anistreplase | Fibrinolytic Agents | |
| Insulin Regular | Antidiabetic Agents | |
| Tenecteplase | Fibrinolytic Agents | CA2129660 |
| Menotropins | Fertility Agents | |
| Interferon gamma-1b | Immunosuppressive Agents | US6936695 |
| Interferon alpha-2a, | | CA2172664 |
| Recombi nt | | |
| Coagulation factor VIIa | Coagulants | |
| Oprelvekin | Antineoplastic Agents | |
| Palifermin | Anti-Mucositis Agents | |
| Glucagon recombi nt | Hypoglycemic Agents | |
| Aldesleukin | Antineoplastic Agents | |
| Botulinum Toxin Type B | Antidystonic Agents | |
| Omalizumab | Anti-Allergic Agents | CA2113813 |
| Lutropin alpha | Fertility Agents | US5767251 |
| Insulin Lispro | Hypoglycemic Agents | US5474978 |
| Insulin Glargine | Hypoglycemic Agents | US7476652 |
| Collage se | | |
| Rasburicase | Gout Suppressants | CA2175971 |
| Adalimumab | Antirheumatic Agents | CA2243459 |
| Imiglucerase | Enzyme Replacement Agents | US5549892 |
| Abciximab | Anticoagulants | CA1341357 |
| Alpha-1-protei se inhibitor | Serine Protei se Inhibitors | |
| Pegaspargase | Antineoplastic Agents | |
| Interferon beta-1a | Antineoplastic Agents | CA1341604 |
| Pegademase bovine | Enzyme Replacement Agents | |
| Human Serum Albumin | Serum substitutes | US6723303 |
| Eptifibatide | Platelet Aggregation Inhibitors | US6706681 |
| Serum albumin iodo ted | Diagnostic Agents | |
| Infliximab | Antirheumatic Agents, | CA2106299 |
| | Anti-Inflammatory Agents, | |
| | Non-Steroidal, Dermatologic | |
| | Agents, Gastrointesti l Agents | |
| | and Immunosuppressive Agents | |
| Follitropin beta | Fertility Agents | US7741268 |
| Vasopressin | Antidiuretic Agents | |
| Interferon beta-1b | Adjuvants, Immunologic and | CA1340861 |
| | Immunosuppressive Agents | |
| Interferon alphacon-1 | Antiviral Agents and | CA1341567 |
| | Immunosuppressive Agents | |
| Hyaluronidase | Adjuvants, Anesthesia and | |
| | Permeabilizing Agents | |
| Insulin, porcine | Hypoglycemic Agents | |
| Trastuzumab | Antineoplastic Agents | CA2103059 |
| Rituximab | Antineoplastic Agents, | CA2149329 |
| | Immunologic Factors and | |
| | Antirheumatic Agents | |
| Basiliximab | Immunosuppressive Agents | CA2038279 |
| Muromo b | Immunologic Factors and | |
| | Immunosuppressive Agents | |
| Digoxin Immune Fab | Antidotes | |
| (Ovine) | | |
| Ibritumomab | | CA2149329 |
| Daptomycin | | US6468967 |
| Tositumomab | | |
| Pegvisomant | Hormone Replacement Agents | US5849535 |
| Botulinum Toxin Type A | Neuromuscular Blocking Agents, | CA2280565 |
| | Anti-Wrinkle Agents and | |
| | Antidystonic Agents | |
| Pancrelipase | Gastrointesti l Agents and Enzyme | |
| | Replacement Agents | |
| Streptoki se | Fibrinolytic Agents and | |
| | Thrombolytic Agents | |
| Alemtuzumab | | CA1339198 |
| Alglucerase | Enzyme Replacement Agents | |
| Capromab | Indicators, Reagents and | |
| | Diagnostic Agents | |
| Laronidase | Enzyme Replacement Agents | |
| Urofollitropin | Fertility Agents | US5767067 |
| Efalizumab | Immunosuppressive Agents | |
| Serum albumin | Serum substitutes | US6723303 |
| Choriogo dotropin alpha | Fertility Agents and Go dotropins | US6706681 |
| Antithymocyte globulin | Immunologic Factors and | |
| | Immunosuppressive Agents | |
| Filgrastim | Immunosuppressive Agents, | CA1341537 |
| | Antineutropenic Agents and | |
| | Hematopoietic Agents | |
| Coagulation factor ix | Coagulants and Thrombotic | |
| | Agents | |
| Becaplermin | Angiogenesis Inducing Agents | CA1340846 |
| Agalsidase beta | Enzyme Replacement Agents | CA2265464 |
| Interferon alpha-2b | Immunosuppressive Agents | CA1341567 |
| Oxytocin | Oxytocics, Anti-tocolytic Agents | |
| | and Labor Induction Agents | |
| Enfuvirtide | HIV Fusion Inhibitors | US6475491 |
| Palivizumab | Antiviral Agents | CA2197684 |
| Daclizumab | Immunosuppressive Agents | |
| Bevacizumab | Angiogenesis Inhibitors | CA2286330 |
| Arcitumomab | Diagnostic Agents | US8420081 |
| Arcitumomab | Diagnostic Agents | US7790142 |
| Eculizumab | | CA2189015 |
| Panitumumab | | |
| Ranibizumab | Ophthalmics | CA2286330 |
| Idursulfase | Enzyme Replacement Agents | |
| Alglucosidase alpha | Enzyme Replacement Agents | CA2416492 |
| Exe tide | Hypoglycemic Agents | US6872700 |
| Mecasermin | | US5681814 |
| Pramlintide | | US5686411 |
| Galsulfase | Enzyme Replacement Agents | |
| Abatacept | Antirheumatic Agents and | CA2110518 |
| | Immunosuppressive Agents | |
| Cosyntropin | Hormones and Diagnostic Agents | |
| Corticotropin | | |
| Insulin aspart | Hypoglycemic Agents and | US5866538 |
| | Antidiabetic Agents | |
| Insulin detemir | Antidiabetic Agents | US5750497 |
| Insulin glulisine | Antidiabetic Agents | US6960561 |
| Pegaptanib | Intended for the prevention of | |
| | respiratory distress syndrome | |
| | (RDS) in premature infants at high | |
| | risk for RDS. | |
| Nesiritide | | |
| Thymalphasin | | |
| Defibrotide | Antithrombins | |
| tural alpha interferon OR | | |
| multiferon | | |
| Glatiramer acetate | | |
| Preotact | | |
| Teicoplanin | Anti-Bacterial Agents | |
| Ca kinumab | Anti-Inflammatory Agents and | |
| | Monoclo l antibodies | |
| Ipilimumab | Antineoplastic Agents and | CA2381770 |
| | Monoclo l antibodies | |
| Sulodexide | Antithrombins and Fibrinolytic | |
| | Agents and Hypoglycemic Agents | |
| | and Anticoagulants and | |
| | Hypolipidemic Agents | |
| Tocilizumab | | CA2201781 |
| Teriparatide | Bone Density Conservation | US6977077 |
| | Agents | |
| Pertuzumab | Monoclo l antibodies | CA2376596 |
| Rilo cept | Immunosuppressive Agents | US5844099 |
| Denosumab | Bone Density Conservation | CA2257247 |
| | Agents and Monoclo l antibodies | |
| Liraglutide | | US6268343 |
| Golimumab | Antipsoriatic Agents and Monoclo | |
| | l antibodies and TNF inhibitor | |
| Belatacept | Antirheumatic Agents and | |
| | Immunosuppressive Agents | |
| Buserelin | | |
| Velaglucerase alpha | Enzymes | US7138262 |
| Tesamorelin | | US5861379 |
| Brentuximab vedotin | | |
| Taliglucerase alpha | Enzymes | |
| Belimumab | Monoclo l antibodies | |
| Aflibercept | Antineoplastic Agents and | US7306799 |
| | Ophthalmics | |
| Asparagi se erwinia | Enzymes | |
| chrysanthemi | | |
| Ocriplasmin | Ophthalmics | |
| Glucarpidase | Enzymes | |
| Teduglutide | | US5789379 |
| Raxibacumab | Anti-Infective Agents and | |
| | Monoclo l antibodies | |
| Certolizumab pegol | TNF inhibitor | CA2380298 |
| Insulin, isophane | Hypoglycemic Agents and | |
| | Antidiabetic Agents | |
| Epoetin zeta | | |
| Obinutuzumab | Antineoplastic Agents | |
| Fibrinolysin aka plasmin | | US3234106 |
| Follitropin alpha | | |
| Romiplostim | Colony-Stimulating Factors and | |
| | Thrombopoietic Agents | |
| Luci ctant | Pulmo ry surfactants | US5407914 |
| talizumab | Immunosuppressive agents | |
| Aliskiren | Renin inhibitor | |
| Ragweed Pollen Extract | | |
| Secukinumab | Inhibitor | US20130202610 |
| Somatotropin Recombi nt | Hormone Replacement Agents | CA1326439 |
| Drotrecogin alpha | Antisepsis | CA2036894 |
| Alefacept | Dermatologic and | |
| | Immunosupressive agents | |
| OspA lipoprotein | Vaccines | |
| Uroki se | | US4258030 |
| Abarelix | Anti-Testosterone Agents | US5968895 |
| Sermorelin | Hormone Replacement Agents | |
| Aprotinin | | US5198534 |
| Gemtuzumab ozogamicin | Antineoplastic agents and | US5585089 |
| | Immunotoxins | |
| Satumomab Pendetide | Diagnostic Agents | |
| Albiglutide | Drugs used in diabetes; alimentary | |
| | tract and metabolism; blood | |
| | glucose lowering drugs, excl. | |
| | insulins. | |
| Alirocumab | | |
| Ancestim | | |
| Antithrombin alpha | | |
| Antithrombin III human | | |
| Asfotase alpha | Enzymes Alimentary Tract and | |
| | Metabolism | |
| Atezolizumab | | |
| Autologous cultured | | |
| chondrocytes | | |
| Beractant | | |
| Bli tumomab | Antineoplastic Agents | US20120328618 |
| | Immunosuppressive Agents | |
| | Monoclo l antibodies | |
| | Antineoplastic and | |
| | Immunomodulating Agents | |
| C1 Esterase Inhibitor | | |
| (Human) | | |
| Coagulation Factor XIII | | |
| A-Subunit (Recombi nt) | | |
| Conestat alpha | | |
| Daratumumab | Antineoplastic Agents | |
| Desirudin | | |
| Dulaglutide | Hypoglycemic Agents; Drugs | |
| | Used in Diabetes; Alimentary | |
| | Tract and Metabolism; Blood | |
| | Glucose Lowering Drugs, Excl. | |
| | Insulins | |
| Elosulfase alpha | Enzymes; Alimentary Tract and | |
| | Metabolism | |
| Elotuzumab | | US2014055370 |
| Evolocumab | Lipid Modifying Agents, Plain; | |
| | Cardiovascular System | |
| Fibrinogen Concentrate | | |
| (Human) | | |
| Filgrastim-sndz | | |
| Gastric intrinsic factor | | |
| Hepatitis B immune | | |
| globulin | | |
| Human calcitonin | | |
| Human clostridium tetani | | |
| toxoid immune globulin | | |
| Human rabies virus | | |
| immune globulin | | |
| Human Rho(D) immune | | |
| globulin | | |
| Hyaluronidase (Human | | US7767429 |
| Recombi nt) | | |
| Idarucizumab | Anticoagulant | |
| Immune Globulin Human | Immunologic Factors; | |
| | Immunosuppressive Agents; | |
| | Anti-Infective Agents | |
| Vedolizumab | Immunosupressive agent, | US2012151248 |
| | Antineoplastic agent | |
| Ustekinumab | Deramtologic agent, | |
| | Immunosuppressive agent, | |
| | antineoplastic agent | |
| Turoctocog alpha | | |
| Tuberculin Purified Protein | | |
| Derivative | | |
| Simoctocog alpha | Antihaemorrhagics: blood | |
| | coagulation factor VIII | |
| Siltuximab | Antineoplastic and | US7612182 |
| | Immunomodulating Agents, | |
| | Immunosuppressive Agents | |
| Sebelipase alpha | Enzymes | |
| Sacrosidase | Enzymes | |
| Ramucirumab | Antineoplastic and | US2013067098 |
| | Immunomodulating Agents | |
| Prothrombin complex | | |
| concentrate | | |
| Poractant alpha | Pulmo ry Surfactants | |
| Pembrolizumab | Antineoplastic and | US2012135408 |
| | Immunomodulating Agents | |
| Peginterferon beta-1a | | |
| Ofatumumab | Antineoplastic and | US8337847 |
| | Immunomodulating Agents | |
| Obiltoxaximab | | |
| Nivolumab | Antineoplastic and | US2013173223 |
| | Immunomodulating Agents | |
| Necitumumab | | |
| Metreleptin | | US20070099836 |
| Methoxy polyethylene | | |
| glycol-epoetin beta | | |
| Mepolizumab | Antineoplastic and | US2008134721 |
| | Immunomodulating Agents, | |
| | Immunosuppressive Agents, | |
| | Interleukin Inhibitors | |
| Ixekizumab | | |
| Insulin Pork | Hypoglycemic Agents, | |
| | Antidiabetic Agents | |
| Insulin Degludec | | |
| Insulin Beef | | |
| Thyroglobulin | Hormone therapy | US5099001 |
| Anthrax immune globulin | Plasma derivative | |
| human | | |
| Anti-inhibitor coagulant | Blood Coagulation Factors, | |
| complex | Antihemophilic Agent | |
| Anti-thymocyte Globulin | Antibody | |
| (Equine) | | |
| Anti-thymocyte Globulin | Antibody | |
| (Rabbit) | | |
| Brodalumab | Antineoplastic and | |
| | Immunomodulating Agents | |
| C1 Esterase Inhibitor | Blood and Blood Forming Organs | |
| (Recombi nt) | | |
| Ca kinumab | Antineoplastic and | |
| | Immunomodulating Agents | |
| Chorionic Go dotropin | Hormones | US6706681 |
| (Human) | | |
| Chorionic Go dotropin | Hormones | US5767251 |
| (Recombi nt) | | |
| Coagulation factor X | Blood Coagulation Factors | |
| human | | |
| Dinutuximab | Antibody, Immunosuppresive | US20140170155 |
| | agent, Antineoplastic agent | |
| Efmoroctocog alpha | Antihemophilic Factor | |
| Factor IX Complex | Antihemophilic agent | |
| (Human) | | |
| Hepatitis A Vaccine | Vaccine | |
| Human Varicella-Zoster | Antibody | |
| Immune Globulin | | |
| Ibritumomab tiuxetan | Antibody, Immunosuppressive | CA2149329 |
| | Agents | |
| Lenograstim | Antineoplastic and | |
| | Immunomodulating Agents | |
| Pegloticase | Enzymes | |
| Protamine sulfate | Heparin Antagonists, Hematologic | |
| | Agents | |
| Protein S human | Anticoagulant plasma protein | |
| Sipuleucel-T | Antineoplastic and | US8153120 |
| | Immunomodulating Agents | |
| Somatropin recombi nt | Hormones, Hormone Substitutes, | CA1326439, CA2252535, |
| | and Hormone Antagonists | US5288703, US5849700, |
| | | US5849704, US5898030, |
| | | US6004297, US6152897, |
| | | US6235004, US6899699 |
| Susoctocog alpha | Blood coagulation factors, | |
| | Antihaemorrhagics | |
| Thrombomodulin alpha | Anticoagulant agent, Antiplatelet | |
| | agent | |

TABLE 15
Exemplary monoclonal antibody therapies.

| mAb | Target | Indication |
|---|---|---|
| Muromonab- | CD3 | Kidney transplant rejection |
| CD3 | | |
| Abciximab | GPIIb/IIIa | Prevention of blood clots in |
| | | angioplasty |
| Rituximab | CD20 | Non-Hodgkin lymphoma |
| Palivizumab | RSV | Prevention of respiratory |
| | | syncytial virus infection |
| Infliximab | TNFα | Crohn's disease |
| Trastuzumab | HER2 | Breast cancer |
| Alemtuzumab | CD52 | Chronic myeloid leukemia |
| Adalimumab | TNFα | Rheumatoid arthritis |
| Ibritumomab | CD20 | Non-Hodgkin lymphoma |
| tiuxetan | | |
| Omalizumab | IgE | Asthma |
| Cetuximab | EGFR | Colorectal cancer |
| Bevacizumab | VEGF-A | Colorectal cancer |
| Natalizumab | ITGA4 | Multiple sclerosis |
| Panitumumab | EGFR | Colorectal cancer |
| Ranibizumab | VEGF-A | Macular degeneration |
| Eculizumab | C5 | Paroxysmal nocturnal hemoglobinuria |
| Certolizumab | TNFα | Crohn's disease |
| pegol | | |
| Ustekinumab | IL-12/23 | Psoriasis |
| Canakinumab | IL-1β | Muckle-Wells syndrome |
| Golimumab | TNFα | Rheumatoid and psoriatic arthritis, |
| | | ankylosing spondylitis |
| Ofatumumab | CD20 | Chronic lymphocytic leukemia |
| Tocilizumab | IL-6R | Rheumatoid arthritis |
| Denosumab | RANKL | Bone loss |
| Belimumab | BLyS | Systemic lupus erythematosus |
| Ipilimumab | CTLA-4 | Metastatic melanoma |
| Brentuximab | CD30 | Hodgkin lymphoma, systemic |
| vedotin | | anaplastic large cell lymphoma |
| Pertuzumab | HER2 | Breast Cancer |
| Trastuzumab | HER2 | Breast cancer |
| emtansine | | |
| Raxibacumab | B. anthrasis | Anthrax infection |
| | PA | |
| Obinutuzumab | CD20 | Chronic lymphocytic leukemia |
| Siltuximab | IL-6 | Castleman disease |
| Ramucirumab | VEGFR2 | Gastric cancer |
| Vedolizumab | α4β7 integrin | Ulcerative colitis, Crohn disease |
| Blinatumomab | CD19, CD3 | Acute lymphoblastic leukemia |
| Nivolumab | PD-1 | Melanoma, non-small cell lung |
| | | cancer |
| Pembrolizumab | PD-1 | Melanoma |
| Idarucizumab | Dabigatran | Reversal of dabigatran-induced |
| | | anticoagulation |
| Necitumumab | EGFR | Non-small cell lung cancer |
| Dinutuximab | GD2 | Neuroblastoma |
| Secukinumab | IL-17α | Psoriasis |
| Mepolizumab | IL-5 | Severe eosinophilic asthma |
| Alirocumab | PCSK9 | High cholesterol |
| Evolocumab | PCSK9 | High cholesterol |
| Daratumumab | CD38 | Multiple myeloma |
| Elotuzumab | SLAMF7 | Multiple myeloma |
| Ixekizumab | IL-17α | Psoriasis |
| Reslizumab | IL-5 | Asthma |
| Olaratumab | PDGFRα | Soft tissue sarcoma |
| Bezlotoxumab | Clostridium | Prevention of Clostridium |
| | difficile | difficile |
| | enterotoxin B | infection recurrence |
| Atezolizumab | PD-L1 | Bladder cancer |
| Obiltoxaximab | B. anthrasis | Prevention of inhalational anthrax |
| | PA | |
| Inotuzumab | CD22 | Acute lymphoblastic leukemia |
| ozogamicin | | |
| Brodalumab | IL-17R | Plaque psoriasis |
| Guselkumab | IL-23 p19 | Plaque psoriasis |
| Dupilumab | IL-4Rα | Atopic dermatitis |
| Sarilumab | IL-6R | Rheumatoid arthritis |
| Avelumab | PD-L1 | Merkel cell carcinoma |
| Ocrelizumab | CD20 | Multiple sclerosis |
| Emicizumab | Factor IXa, X | Hemophilia A |
| Benralizumab | IL-5Rα | Asthma |
| Gemtuzumab | CD33 | Acute myeloid leukemia |
| ozogamicin | | |
| Durvalumab | PD-L1 | Bladder cancer |
| Burosumab | FGF23 | X-linked hypophosphatemia |
| Lanadelumab | Plasma | Hereditary angioedema attacks |
| | kallikrein | |
| Mogamulizumab | CCR4 | Mycosis fungoides or Sézary |
| | | syndrome |
| Erenumab | CGRPR | Migraine prevention |
| Galcanezumab | CGRP | Migraine prevention |
| Tildrakizumab | IL-23 p19 | Plaque psoriasis |
| Cemiplimab | PD-1 | Cutaneous squamous cell |
| | | carcinoma |
| Emapalumab | IFNγ | Primary hemophagocytic |
| | | lymphohistiocytosis |
| Fremanezumab | CGRP | Migraine prevention |
| Ibalizumab | CD4 | HIV infection |
| Moxetumomab | CD22 | Hairy cell leukemia |
| pasudodox | | |
| Ravulizumab | C5 | Paroxysmal nocturnal |
| | | hemoglobinuria |
| Caplacizumab | von Willebrand | Acquired thrombotic |
| | factor | thrombocytopeniarpura |
| Romosozumab | Sclerostin | Osteoporosis in postmenopausal |
| | | women at increased risk of |
| | | fracture |
| Risankizumab | IL-23 p19 | Plaque psoriasis |
| Polatuzumab | CD79β | Diffuse large B-cell lymphoma |
| vedotin | | |
| Brolucizumab | VEGF-A | Macular degeneration |
| Crizanlizumab | P-selectin | Sickle cell disease |

### APPLICATIONS

[0880] Using the systems described herein, optionally using any of delivery modalities described herein (including nanoparticle delivery modalities, such as lipid nanoparticles, and viral delivery modalities, such as AAVs), the invention also provides applications (methods) for modifying a DNA molecule, such as nuclear DNA, i.e., in the genome of a cell, whether in vitro, ex vivo, in situ, or in vivo, e.g., in a tissue in an organism, such as a subject including mammalian subjects, such as a human. By integrating coding genes into a DNA sequence template, the Gene Writer system can address therapeutic needs, for example, by providing expression of a therapeutic transgene (e.g., comprised in an object sequence as described herein) in individuals with loss-of-function mutations, by replacing gain-of-function mutations with normal transgenes, by providing regulatory sequences to eliminate gain-of-function mutation expression, and/or by controlling the expression of operably linked genes, transgenes and systems thereof. In certain embodiments, an object sequence (e.g., a heterologous object sequence) comprises a coding sequence encoding a functional element (e.g., a polypeptide or non-coding RNA, e.g., as described herein) specific to the therapeutic needs of the host cell. In some embodiments, an object sequence (e.g., a heterologous object sequence) comprises a promoter, for example, a tissue specific promotor or enhancer. In some embodiments, a promotor can be operably linked to a coding sequence.

[0881] In certain aspects, the invention this provides methods of modifying a target DNA strand in a cell, tissue or subject, comprising administering a system as described herein (optionally by a modality described herein) to the cell, tissue or subject, where the system inserts the heterologous object sequence into the target DNA strand, thereby modifying the target DNA strand. In certain embodiments, the heterologous object sequence is thus expressed in the cell, tissue, or subject. In some embodiments, the cell, tissue or subject is a mammalian (e.g., human) cell, tissue or subject. Exemplary cells thus modified include a hepatocyte, lung epithelium, an ionocyte. Such a cell may be a primary cell or otherwise not immortalized. In related aspects, the invention also provides methods of treating a mammalian tissue comprising administering a system as described herein to the mammal, thereby treating the tissue, wherein the tissue is deficient in the heterologous object sequence. In certain embodiments of any of the foregoing aspects and embodiments, the Gene Writer polypeptide is provided as a nucleic acid, which is present transiently.

[0882] In some embodiments, a system of the invention is capable of producing an insertion in target DNA. It is conceived that the systems described herein are capable of resulting in the expression of an exogenous non-coding nucleic acid, e.g., miRNA, lncRNA, shRNA, siRNA, tRNA, mtRNA, gRNA, or rRNA, expression of a protein coding sequence, e.g., a therapeutic protein or a regulatory protein, incorporation of a regulatory element, e.g., a promoter, enhancer, transcription factor binding site, epigenetic modifier site, miRNA binding site, splice donor or acceptor site, or a terminator sequence, or incorporation of other DNA sequence, e.g., spacer. Depending on the content and context of the insertion, it is thus possible to express an exogenous protein or alter expression of an endogenous protein or cellular system. In some embodiments, a Gene Writing system may be used to knockout an endogenous gene by insertional mutagenesis, e.g., by integration of an insert DNA into a coding or regulatory region. In some embodiments, a Gene Writing system may be used to simultaneously trigger expression of a transgene cassette, e.g., a CAR, while disrupting expression of an endogenous gene or locus, e.g., TRAC, by mediating integration of an insert DNA encoding the transgene cassette into the endogenous gene or locus. In some embodiments, a Gene Writing system may be used to substitute an allele by integrating a transgene expression cassette into the endogenous allele, thus disrupting its expression.

[0883] In embodiments, the Gene Writer™ gene editor system can provide an object sequence comprising, e.g., a therapeutic agent (e.g., a therapeutic transgene) expressing, e.g., replacement blood factors or replacement enzymes, e.g., lysosomal enzymes. For example, the compositions, systems and methods described herein are useful to express, in a target human genome, agalsidase alpha or beta for treatment of Fabry Disease; imiglucerase, taliglucerase alfa, velaglucerase alfa, or alglucerase for Gaucher Disease; sebelipase alpha for lysosomal acid lipase deficiency (Wolman disease/CESD); laronidase, idursulfase, elosulfase alpha, or galsulfase for mucopolysaccharidoses; alglucosidase alpha for Pompe disease. For example, the compositions, systems and methods described herein are useful to express, in a target human genome factor I, II, V, VII, X, XI, XII or XIII for blood factor deficiencies.

[0884] In some embodiments, the heterologous object sequence encodes an intracellular protein (e.g., a cytoplasmic protein, a nuclear protein, an organellar protein such as a mitochondrial protein or lysosomal protein, or a membrane protein). In some embodiments, the heterologous object sequence encodes a membrane protein, e.g., a membrane protein other than a CAR, and/or an endogenous human membrane protein. In some embodiments, the heterologous object sequence encodes an extracellular protein. In some embodiments, the heterologous object sequence encodes an enzyme, a structural protein, a signaling protein, a regulatory protein, a transport protein, a sensory protein, a motor protein, a defense protein, or a storage protein. Other proteins include an immune receptor protein, e.g. a synthetic immune receptor protein such as a chimeric antigen receptor protein (CAR), a T cell receptor, a B cell receptor, or an antibody.

[0885] A Gene Writing™ system may be used to modify immune cells. In some embodiments, a Gene Writing™ system may be used to modify T cells. In some embodiments, T-cells may include any subpopulation of T-cells, e.g., CD4+, CD8+, gamma-delta, naïve T cells, stem cell memory T cells, central memory T cells, or a mixture of subpopulations. In some embodiments, a Gene Writing™ system may be used to deliver or modify a T-cell receptor (TCR) in a T cell. In some embodiments, a Gene Writing™ system may be used to deliver at least one chimeric antigen receptor (CAR) to T-cells. In some embodiments, a Gene Writing™ system may be used to deliver at least one CAR to natural killer (NK) cells. In some embodiments, a Gene Writing™ system may be used to deliver at least one CAR to natural killer T (NKT) cells. In some embodiments, a Gene Writing™ system may be used to deliver at least one CAR to a progenitor cell, e.g., a progenitor cell of T, NK, or NKT cells. In some embodiments, cells modified with at least one CAR (e.g., CAR-T cells, CAR-NK cells, CAR-NKT cells), or a combination of cells modified with at least one CAR (e.g., a mixture of CAR-NK/T cells) are used to treat a condition as identified in the targetable landscape of CAR therapies in MacKay, et al. Nat Biotechnol 38, 233-244 (2020), incorporated by reference herein in its entirety. In some embodiments, the immune cells comprise a CAR specific to a tumor or a pathogen antigen selected from a group consisting of AChR (fetal acetylcholine receptor), ADGRE2, AFP (alpha fetoprotein), BAFF-R, BCMA, CAIX (carbonic anhydrase IX), CCR1, CCR4, CEA (carcinoembryonic antigen), CD3, CD5, CD8, CD7, CD10, CD13, CD14, CD15, CD19, CD20, CD22, CD30, CD33, CLLI, CD34, CD38, CD41, CD44, CD49f, CD56, CD61, CD64, CD68, CD70,CD74, CD99,CD117, CD123, CD133, CD138, CD44v6, CD267, CD269, CDS, CLEC12A, CS1, EGP-2 (epithelial glycoprotein-2), EGP-40 (epithelial glycoprotein-40), EGFR(HER1), EGFR-VIII, EpCAM (epithelial cell adhesion molecule), EphA2, ERBB2 (HER2, human epidermal growth factor receptor 2), ERBB3, ERBB4, FBP (folate-binding protein), Flt3 receptor, folate receptor-a, GD2 (ganglioside G2), GD3 (ganglioside G3), GPC3 (glypican-3), GPI00, hTERT (human telomerase reverse transcriptase), ICAM-1, integrin B7, interleukin 6 receptor, IL13Ra2 (interleukin-13 receptor 30 subunit alpha-2), kappa-light chain, KDR (kinase insert domain receptor), LeY (Lewis Y), L1CAM (LI cell adhesion molecule), LILRB2 (leukocyte immunoglobulin like receptor B2), MARTI, MAGE-A1 (melanoma associated antigen A1), MAGE-A3, MSLN (mesothelin), MUC16 (mucin 16), MUCI (mucin I), KG2D ligands, NY-ESO-1 (cancer-testis antigen), PRI (proteinase 3), TRBCI, TRBC2, TFM-3, TACI, tyrosinase, survivin, hTERT, oncofetal antigen (h5T4), p53, PSCA (prostate stem cell antigen), PSMA (prostate-specific membrane antigen), hRORI, TAG-72 (tumor-associated glycoprotein 72), VEGF-R2 (vascular endothelial growth factor R2), WT-1 (Wilms tumor protein), and antigens of HIV (human immunodeficiency virus), hepatitis B, hepatitis C, CMV (cytomegalovirus), EBV (Epstein-Barr virus), HPV (human papilloma virus).

[0886] In some embodiments, immune cells, e.g., T-cells, NK cells, NKT cells, or progenitor cells are modified ex vivo and then delivered to a patient. In some embodiments, a Gene Writer™ system is delivered by one of the methods mentioned herein, and immune cells, e.g., T-cells, NK cells, NKT cells, or progenitor cells are modified in vivo in the patient.

[0887] In some embodiments, a Gene Writing system can be used to make multiple modifications to a target cell, either simultaneously or sequentially. In some embodiments, a Gene Writing system can be used to further modify an already modified cell. In some embodiments, a Gene Writing system can be use to modify a cell edited by a complementary technology, e.g., a gene edited cell, e.g., a cell with one or more CRISPR knockouts. In some embodiments, the previously edited cell is a T-cell. In some embodiments, the previous modifications comprise gene knockouts in a T-cell, e.g., endogenous TCR (e.g., TRAC, TRBC), HLA Class I (B2M), PD1, CD52, CTLA-4, TIM-3, LAG-3, DGK. In some embodiments, a Gene Writing system is used to insert a TCR or CAR into a T-cell that has been previously modified.

### Administration

[0888] The composition and systems described herein may be used in vitro or in vivo. In some embodiments the system or components of the system are delivered to cells (e.g., mammalian cells, e.g., human cells), e.g., in vitro or in vivo. The skilled artisan will understand that the components of the Gene Writer system may be delivered in the form of polypeptide, nucleic acid (e.g., DNA, RNA), and combinations thereof.

[0889] In some embodiments, the system and/or components of the system are delivered as nucleic acids. For example, the recombinase polypeptide may be delivered in the form of a DNA or RNA encoding the recombinase polypeptide. In some embodiments the system or components of the system (e.g., an insert DNA and a recombinase polypeptide-encoding nucleic acid molecule) are delivered on 1, 2, 3, 4, or more distinct nucleic acid molecules. In some embodiments the system or components of the system are delivered as a combination of DNA and RNA. In some embodiments the system or components of the system are delivered as a combination of DNA and protein. In some embodiments the system or components of the system are delivered as a combination of RNA and protein. In some embodiments the recombinase polypeptide is delivered as a protein.

[0890] In some embodiments the system or components of the system are delivered to cells, e.g. mammalian cells or human cells, using a vector. The vector may be, e.g., a plasmid or a virus. In some embodiments delivery is in vivo, in vitro, ex vivo, or in situ. In some embodiments the virus is an adeno associated virus (AAV), a lentivirus, an adenovirus. In some embodiments the system or components of the system are delivered to cells with a viral-like particle or a virosome. In some embodiments the delivery uses more than one virus, viral-like particle or virosome.

[0891] In some embodiments, the recombinase is active upon linear or circular single or double stranded DNA. In some embodiments, the recombinase is active upon DNA after it is converted from single stranded to double stranded in the cell. In some embodiments, the recombinase is active upon DNA after it has formed a concatemer in the cell. In some embodiments, the recombinase polypeptide is delivered to or expressed in the cell after the insert DNA is converted from single to double stranded.

[0892] In some embodiments, recombinase recognition sequences are present 5′ and 3′ of the nucleic acid encoding the recombinase polypeptide. In some embodiments, the recombinase recognition sequences are an attB and an attP with compatible spacer regions and central dinucleotides. In some embodiments, the recombinase recognition sequences have a different spacer region and/or central dinucleotide than the recombinase recognition sequences on the insert DNA or at a target site in the genome. In some embodiments, the recombinase recognition sites do not interact with the recombinase recognition sites on the insert DNA or in the genome. In some embodiments the recombinase recognition sequences are directly adjacent to the nucleic acid encoding the open reading frame of the recombinase polypeptide. In some embodiments the recombinase recognition sequences are external to a gene expression unit for the recombinase. In some embodiments the recombinase recognition sequences (e.g. attB and attP) are in the same 5′ to 3′ orientation. In some embodiments the recombinase recognition sequences (e.g. attB and attP) are in the opposite 5′ to 3′ orientation. In some embodiments, the recombinase polypeptide recombines the recognition sequences that are 5′ and 3′ of the nucleic acid encoding the recombinase polypeptide, resulting in a decrease of recombinase gene expression.

[0893] In some embodiments, multiple recombinase recognition sequences are present on the insert DNA. In some embodiments, the insert DNA comprises two or more recognition sequences. In some embodiments, the insert DNA comprises three or more recognition sequences. In some embodiments, the insert DNA comprises two recognition sequences (e.g. an attB and attP) that are compatible with each other, and a third recognition sequence (e.g. an attB or an attP) that is incompatible with the other recognition sequences on the insert DNA. In some embodiments, the recognition sequences on the insert DNA that are compatible with each other are not compatible with recognition sequences in the target genome. In some embodiments, the recognition sequence on the insert DNA that is incompatible with the other recognition sequences on the insert DNA is compatible with recognition sequences in the target genome. In some embodiments the recognition sequences that are compatible with each other have compatible spacer regions and central dinucleotides, and the recognition sequences that are incompatible have incompatible spacer regions and central dinucleotides. In some embodiments, the compatible recognition sequences on the insert DNA are in the same 5′ to 3′ orientation. In some embodiments, the recombinase acts upon the compatible recognition sequences on the insert DNA to form a circular DNA. In some embodiments, the resulting circular DNA comprises an attL, attR, and either an attP or attB sequence, wherein the attP or attB sequence is compatible with recognition sequences in the target genome. In some embodiments, the multiple recombinase recognition sequences described herein are present in a viral vector genome.

[0894] In one embodiment, the compositions and systems described herein can be formulated in liposomes or other similar vesicles. Liposomes are spherical vesicle structures composed of a uni- or multilamellar lipid bilayer surrounding internal aqueous compartments and a relatively impermeable outer lipophilic phospholipid bilayer. Liposomes may be anionic, neutral or cationic. Liposomes are biocompatible, nontoxic, can deliver both hydrophilic and lipophilic drug molecules, protect their cargo from degradation by plasma enzymes, and transport their load across biological membranes and the blood brain barrier (BBB) (see, e.g., Spuch and Navarro, Journal of Drug Delivery, vol. 2011, Article ID 469679, 12 pages, 2011. doi:10.1155/2011/469679 for review).

[0895] Vesicles can be made from several different types of lipids; however, phospholipids are most commonly used to generate liposomes as drug carriers. Methods for preparation of multilamellar vesicle lipids are known in the art (see for example U.S. Pat. No. 6,693,086, the teachings of which relating to multilamellar vesicle lipid preparation are incorporated herein by reference). Although vesicle formation can be spontaneous when a lipid film is mixed with an aqueous solution, it can also be expedited by applying force in the form of shaking by using a homogenizer, sonicator, or an extrusion apparatus (see, e.g., Spuch and Navarro, Journal of Drug Delivery, vol. 2011, Article ID 469679, 12 pages, 2011. doi:10.1155/2011/469679 for review). Extruded lipids can be prepared by extruding through filters of decreasing size, as described in Templeton et al., Nature Biotech, 15:647-652, 1997, the teachings of which relating to extruded lipid preparation are incorporated herein by reference.

[0896] Lipid nanoparticles are another example of a carrier that provides a biocompatible and biodegradable delivery system for the pharmaceutical compositions described herein. Nanostructured lipid carriers (NLCs) are modified solid lipid nanoparticles (SLNs) that retain the characteristics of the SLN, improve drug stability and loading capacity, and prevent drug leakage. Polymer nanoparticles (PNPs) are an important component of drug delivery. These nanoparticles can effectively direct drug delivery to specific targets and improve drug stability and controlled drug release. Lipid-polymer nanoparticles (PLNs), a new type of carrier that combines liposomes and polymers, may also be employed. These nanoparticles possess the complementary advantages of PNPs and liposomes. A PLN is composed of a core-shell structure; the polymer core provides a stable structure, and the phospholipid shell offers good biocompatibility. As such, the two components increase the drug encapsulation efficiency rate, facilitate surface modification, and prevent leakage of water-soluble drugs. For a review, see, e.g., Li et al. 2017, Nanomaterials 7, 122; doi:10.3390/nano7060122.

[0897] Exosomes can also be used as drug delivery vehicles for the compositions and systems described herein. For a review, see Ha et al. July 2016. Acta Pharmaceutica Sinica B. Volume 6, Issue 4, Pages 287-296; https://doi.org/10.1016/j.apsb.2016.02.001.

[0898] In some embodiments, at least one component of a system described herein comprises a fusosome. Fusosomes interact and fuse with target cells, and thus can be used as delivery vehicles for a variety of molecules. They generally consist of a bilayer of amphipathic lipids enclosing a lumen or cavity and a fusogen that interacts with the amphipathic lipid bilayer. The fusogen component has been shown to be engineerable in order to confer target cell specificity for the fusion and payload delivery, allowing the creation of delivery vehicles with programmable cell specificity (see, for example, the sections relating to fusosome design, preparation, and usage in PCT Publication No. WO/2020014209, incorporated herein by reference in its entirety).

[0899] A Gene Writer system can be introduced into cells, tissues and multicellular organisms. In some embodiments the system or components of the system are delivered to the cells via mechanical means or physical means.

[0900] Formulation of protein therapeutics is described in Meyer (Ed.), Therapeutic Protein Drug Products: Practical Approaches to formulation in the Laboratory, Manufacturing, and the Clinic, Woodhead Publishing Series (2012).

[0901] In some embodiments, a Gene Writer™ system described herein is delivered to a tissue or cell from the cerebrum, cerebellum, adrenal gland, ovary, pancreas, parathyroid gland, hypophysis, testis, thyroid gland, breast, spleen, tonsil, thymus, lymph node, bone marrow, lung, cardiac muscle, esophagus, stomach, small intestine, colon, liver, salivary gland, kidney, prostate, blood, or other cell or tissue type. In some embodiments, a Gene Writer™ system described herein is used to treat a disease, such as a cancer, inflammatory disease, infectious disease, genetic defect, or other disease. A cancer can be cancer of the cerebrum, cerebellum, adrenal gland, ovary, pancreas, parathyroid gland, hypophysis, testis, thyroid gland, breast, spleen, tonsil, thymus, lymph node, bone marrow, lung, cardiac muscle, esophagus, stomach, small intestine, colon, liver, salivary gland, kidney, prostate, blood, or other cell or tissue type, and can include multiple cancers.

[0902] In some embodiments, a Gene Writer™ system described herein described herein is administered by enteral administration (e.g. oral, rectal, gastrointestinal, sublingual, sublabial, or buccal administration). In some embodiments, a Gene Writer™ system described herein is administered by parenteral administration (e.g., intravenous, intramuscular, subcutaneous, intradermal, epidural, intracerebral, intracerebroventricular, epicutaneous, nasal, intra-arterial, intra-articular, intracavernous, intraocular, intraosseous infusion, intraperitoneal, intrathecal, intrauterine, intravaginal, intravesical, perivascular, or transmucosal administration). In some embodiments, a Gene Writer™ system described herein is administered by topical administration (e.g., transdermal administration).

[0903] In some embodiments, a Gene Writer™ system as described herein can be used to modify an animal cell, plant cell, or fungal cell. In some embodiments, a Gene Writer™ system as described herein can be used to modify a mammalian cell (e.g., a human cell). In some embodiments, a Gene Writer™ system as described herein can be used to modify a cell from a livestock animal (e.g., a cow, horse, sheep, goat, pig, llama, alpaca, camel, yak, chicken, duck, goose, or ostrich). In some embodiments, a Gene Writer™ system as described herein can be used as a laboratory tool or a research tool, or used in a laboratory method or research method, e.g., to modify an animal cell, e.g., a mammalian cell (e.g., a human cell), a plant cell, or a fungal cell.

[0904] In some embodiments, a Gene Writer™ system as described herein can be used to express a protein, template, or heterologous object sequence (e.g., in an animal cell, e.g., a mammalian cell (e.g., a human cell), a plant cell, or a fungal cell). In some embodiments, a Gene Writer™ system as described herein can be used to express a protein, template, or heterologous object sequence under the control of an inducible promoter (e.g., a small molecule inducible promoter). In some embodiments, a Gene Writing system or payload thereof is designed for tunable control, e.g., by the use of an inducible promoter. For example, a promoter, e.g., Tet, driving a gene of interest may be silent at integration, but may, in some instances, activated upon exposure to a small molecule inducer, e.g., doxycycline. In some embodiments, the tunable expression allows post-treatment control of a gene (e.g., a therapeutic gene), e.g., permitting a small molecule-dependent dosing effect. In embodiments, the small molecule-dependent dosing effect comprises altering levels of the gene product temporally and/or spatially, e.g., by local administration. In some embodiments, a promoter used in a system described herein may be inducible, e.g., responsive to an endogenous molecule of the host and/or an exogenous small molecule administered thereto.

### Treatment of Suitable Indications

[0905] In some embodiments, a Gene Writer™ system described herein, or a component or portion thereof (e.g., a polypeptide or nucleic acid as described herein), is used to treat a disease, disorder, or condition. In some embodiments, the Gene Writer™ system described herein, or component or portion thereof, is used to treat a disease, disorder, or condition listed in any of Tables 16-21. In some embodiments, the Gene Writer™ system described herein, or component or portion thereof, is used to treat a hematopoietic stem cell (HSC) disease, disorder, or condition, e.g., as listed in Table 16. In some embodiments, the Gene Writer™ system described herein, or component or portion thereof, is used to treat a kidney disease, disorder, or condition, e.g., as listed in Table 17. In some embodiments, the Gene Writer™ system described herein, or component or portion thereof, is used to treat a liver disease, disorder, or condition, e.g., as listed in Table 18. In some embodiments, the Gene Writer™ system described herein, or component or portion thereof, is used to treat a lung disease, disorder, or condition, e.g., as listed in Table 19. In some embodiments, the Gene Writer™ system described herein, or component or portion thereof, is used to treat a skeletal muscle disease, disorder, or condition, e.g., as listed in Table 20. In some embodiments, the Gene Writer™ system described herein, or component or portion thereof, is used to treat a skin disease, disorder, or condition, e.g., as listed in Table 21.

### Tables 16-21: Indications Selected for Trans Gene Writers to be Used for Recombinases

TABLE 16
HSCs

| Disease | Gene Affected |
|---|---|
| Adrenoleukodystrophy (CALD) | ABCD1 |
| Alpha-mannosidosis | MAN2B1 |
| Fanconi anemia | FANCA; FANCC; FANCG |
| Gaucher disease | GBA |
| Globoid cell leukodystrophy (Krabbe | GALC |
| disease) | |
| Hemophagocytic lymphohistiocytosis | PRF1; STX11; STXBP2; |
| | UNC13D |
| Malignant infantile osteopetrosis- | TCIRG1; Many genes |
| autosomal recessive osteopetrosis | implicated |
| Metachromatic leukodystrophy | ARSA; PSAP |
| MPS 1S (Scheie syndrome) | IDUA |
| MPS2 | IDS |
| MPS7 | GUSB |
| Mucolipidosis II | GNPTAB |
| Niemann-Pick disease A and B | SMPD1 |
| Niemann-Pick disease C | NPC1 |
| Pompe disease | GAA |
| Sickle cell disease (SCD) | HBB |
| Tay Sachs | HEXA |
| Thalassemia | HBB |

TABLE 17
Kidney

| Disease | Gene Affected |
|---|---|
| Congenital nephrotic syndrome | NPHS2 |
| Cystinosis | CTNS |

TABLE 18
Liver

| Disease | Gene Affected |
|---|---|
| Acute intermittent porphyria | HMBS |
| Alagille syndrome | JAG1 |
| Alpha-1 antitrypsin deficiency | SERPINA1 |
| Carbamoyl phosphate synthetase | CPS1 |
| I deficiency | |
| Citrullinemia I | ASS1 |
| Crigler-Najjar | UGT1A1 |
| Fabry | LPL |
| Familial chylomicronemia syndrome | GLA |
| Gaucher | GBE1 |
| GSD1a | G6Pase |
| GSD IV | GBA |
| Heme A | F8 |
| Heme B | F9 |
| HoFH | LDLRAP1 |
| Methylmalonic acidemia | MMUT |
| MPS II | IDS |
| MPS III | Type IIIa: SGSH |
| | Type IIIb: NAGLU |
| | Type IIIc: HGSNAT |
| | Type IIId: GNS S |
| MPS IV | Type IVA: GALNS |
| | Type IVB: GLB1 |
| MPS VI | ARSB |
| MSUD | Type Ia: BCKDHA |
| | Type Ib: BCKDHB |
| | Type II: DBT |
| OTC Deficiency | OTC |
| Polycystic Liver Disease | PRKCSH |
| Pompe | GAA |
| Primary Hyperoxaluria 1 | AGXT (HAO1 or LDHA |
| | for CRISPR) |
| Progressive familial intrahepatic | ATP8B1 |
| cholestasis type 1 | |
| Progressive familial intrahepatic | ABCB11 |
| cholestasis type 2 | |
| Progressive familial intrahepatic | ABCB4 |
| cholestasis type 3 | |
| Propionic acidemia | PCCB; PCCA |
| Wilson's Disease | ATP7B |

TABLE 19
Lung

| Disease | Gene Affected |
|---|---|
| Alpha-1 antitrypsin deficiency | SERPINA1 |
| Cystic fibrosis | CFTR |
| Primary ciliary dyskinesia | DNAI1 |
| Primary ciliary dyskinesia | DNAH5 |
| Primary pulmonary hypertension I | BMPR2 |
| Surfactant Protein B (SP-B) Deficiency | SFTPB |
| (pulmonary surfactant metabolism dysfunction 1) | |

TABLE 20
Skeletal muscle

| Disease | Gene Affected |
|---|---|
| Becker muscular dystrophy | DMD |
| Becker myotonia | CLCN1 |
| Bethlem myopathy | COL6A2 |
| Centronuclear myopathy, X-linked (motubular) | MTM1 |
| Congenital myasthenic syndrome | CHRNE |
| Duchenne muscular dystrophy | DMD |
| Emery-Dreifuss muscular dystrophy, AD | LMNA |
| Limb-girdle muscular dystrophy 2A | CAPN3 |
| Limb-girdle muscular dystrophy, type 2D | SGCA |

TABLE 21
Skin

| Disease | Gene Affected |
|---|---|
| Epidermolysis Bullosa Dystrophica Recessive | COL7A1 |
| (Hallopeau-Siemens) | |
| Epidermolysis Bullosa Junctional | LAMB3 |
| Epidermolytic Ichthyosis | KRT1; KRT10 |
| Hailey-Hailey Disease | ATP2C1 |
| Lamellar Ichthyosis/Nonbullous Congenital | TGM1 |
| Ichthyosiform Erythroderma (ARCI) | |
| Netherton Syndrome | SPINK5 |

[0906] In some embodiments, a Gene Writing system may be used to treat a healthy individual, e.g., as a preventative therapy. Gene Writing systems can, in some embodiments, be targeted to generate mutations, e.g., knockout mutations, that have been shown to be protective towards a disease of interest. In some embodiments, a Gene Writing system can be used to insert a protective allele into the genome, e.g., a transgene that expresses a variant of a protein that reduces the risk of developing a particular disease. In some embodiments, integration of a transgene is used to increase the levels of an endogenous protein by providing one or more additional copies. In some embodiments, a Gene Writing system may be used to incorporate a regulatory element, e.g., promoter, enhancer, transcription factor binding site, miRNA binding site, or epigenetic modification site, to alter the expression of an endogenous gene to reduce disease risk or lessen its severity. In some embodiments, a Gene Writing system may be used to replace one or more exons of an endogenous protein to remove an allele that increases disease risk or to alter an allele to one that confers disease protection.

### Plant-Modification Methods

[0907] Gene Writer systems described herein may be used to modify a plant or a plant part (e.g., leaves, roots, flowers, fruits, or seeds), e.g., to increase the fitness of a plant.

### A. Delivery to a Plant

[0908] Provided herein are methods of delivering a Gene Writer system described herein to a plant. Included are methods for delivering a Gene Writer system to a plant by contacting the plant, or part thereof, with a Gene Writer system. The methods are useful for modifying the plant to, e.g., increase the fitness of a plant.

[0909] More specifically, in some embodiments, a nucleic acid described herein (e.g., a nucleic acid encoding a GeneWriter) may be encoded in a vector, e.g., inserted adjacent to a plant promoter, e.g., a maize ubiquitin promoter (ZmUBI) in a plant vector (e.g., pHUC411). In some embodiments, the nucleic acids described herein are introduced into a plant (e.g., japonica rice) or part of a plant (e.g., a callus of a plant) via agrobacteria. In some embodiments, the systems and methods described herein can be used in plants by replacing a plant gene (e.g., hygromycin phosphotransferase (HPT)) with a null allele (e.g., containing a base substitution at the start codon). Systems and methods for modifying a plant genome are described in Xu et. al. Development of plant prime—editing systems for precise genome editing, 2020, Plant Communications.

[0910] In one aspect, provided herein is a method of increasing the fitness of a plant, the method including delivering to the plant the Gene Writer system described herein (e.g., in an effective amount and duration) to increase the fitness of the plant relative to an untreated plant (e.g., a plant that has not been delivered the Gene Writer system).

[0911] An increase in the fitness of the plant as a consequence of delivery of a Gene Writer system can manifest in a number of ways, e.g., thereby resulting in a better production of the plant, for example, an improved yield, improved vigor of the plant or quality of the harvested product from the plant, an improvement in pre- or post-harvest traits deemed desirable for agriculture or horticulture (e.g., taste, appearance, shelf life), or for an improvement of traits that otherwise benefit humans (e.g., decreased allergen production). An improved yield of a plant relates to an increase in the yield of a product (e.g., as measured by plant biomass, grain, seed or fruit yield, protein content, carbohydrate or oil content or leaf area) of the plant by a measurable amount over the yield of the same product of the plant produced under the same conditions, but without the application of the instant compositions or compared with application of conventional plant-modifying agents. For example, yield can be increased by at least about 0.5%, about 1%, about 2%, about 3%, about 4%, about 5%, about 10%, about 20%, about 30%, about 40%, about 50%, about 60%, about 70%, about 80%, about 90%, about 100%, or more than 100%. In some instances, the method is effective to increase yield by about 2×-fold, 5×-fold, 10×-fold, 25×-fold, 50×-fold, 75×-fold, 100×-fold, or more than 100×-fold relative to an untreated plant. Yield can be expressed in terms of an amount by weight or volume of the plant or a product of the plant on some basis. The basis can be expressed in terms of time, growing area, weight of plants produced, or amount of a raw material used. For example, such methods may increase the yield of plant tissues including, but not limited to: seeds, fruits, kernels, bolls, tubers, roots, and leaves.

[0912] An increase in the fitness of a plant as a consequence of delivery of a Gene Writer system can also be measured by other means, such as an increase or improvement of the vigor rating, the stand (the number of plants per unit of area), plant height, stalk circumference, stalk length, leaf number, leaf size, plant canopy, visual appearance (such as greener leaf color), root rating, emergence, protein content, increased tillering, bigger leaves, more leaves, less dead basal leaves, stronger tillers, less fertilizer needed, less seeds needed, more productive tillers, earlier flowering, early grain or seed maturity, less plant verse (lodging), increased shoot growth, earlier germination, or any combination of these factors, by a measurable or noticeable amount over the same factor of the plant produced under the same conditions, but without the administration of the instant compositions or with application of conventional plant-modifying agents.

[0913] Accordingly, provided herein is a method of modifying a plant, the method including delivering to the plant an effective amount of any of the Gene Writer systems provided herein, wherein the method modifies the plant and thereby introduces or increases a beneficial trait in the plant (e.g., by about 1%, 2%, 5%, 10%, 20%, 30%, 40%, 50%, 60%, 70%, 80%, 90%, 100%, or more than 100%) relative to an untreated plant. In particular, the method may increase the fitness of the plant (e.g., by about 1%, 2%, 5%10%, 20%, 30%, 40%, 50%, 60%, 70%, 80%, 90%, 100%, or more than 100%) relative to an untreated plant.

[0914] In some instances, the increase in plant fitness is an increase (e.g., by about 1%, 2%, 5%, 10%, 20%, 30%, 40%, 50%, 60%, 70%, 80%, 90%, 100%, or more than 100%) in disease resistance, drought tolerance, heat tolerance, cold tolerance, salt tolerance, metal tolerance, herbicide tolerance, chemical tolerance, water use efficiency, nitrogen utilization, resistance to nitrogen stress, nitrogen fixation, pest resistance, herbivore resistance, pathogen resistance, yield, yield under water-limited conditions, vigor, growth, photosynthetic capability, nutrition, protein content, carbohydrate content, oil content, biomass, shoot length, root length, root architecture, seed weight, or amount of harvestable produce.

[0915] In some instances, the increase in fitness is an increase (e.g., by about 1%, 2%, 5%, 10%, 20%, 30%, 40%, 50%, 60%, 70%, 80%, 90%, 100%, or more than 100%) in development, growth, yield, resistance to abiotic stressors, or resistance to biotic stressors. An abiotic stress refers to an environmental stress condition that a plant or a plant part is subjected to that includes, e.g., drought stress, salt stress, heat stress, cold stress, and low nutrient stress. A biotic stress refers to an environmental stress condition that a plant or plant part is subjected to that includes, e.g. nematode stress, insect herbivory stress, fungal pathogen stress, bacterial pathogen stress, or viral pathogen stress. The stress may be temporary, e.g. several hours, several days, several months, or permanent, e.g. for the life of the plant.

[0916] In some s 10%, 20%, 30%, 40%, 50%, 60%, 70%, 80%, 90%, 100%, or more than 100%) in quality of products harvested from the plant. For example, the increase in plant fitness may be an improvement in commercially favorable features (e.g., taste or appearance) of a product harvested from the plant. In other instances, the increase in plant fitness is an increase in shelf-life of a product harvested from the plant (e.g., by about 1%, 2%, 5%, 10%, 20%, 30%, 40%, 50%, 60%, 70%, 80%, 90%, 100%, or more than 100%).

[0917] Alternatively, the increase in fitness may be an alteration of a trait that is beneficial to human or animal health, such as a reduction in allergen production. For example, the increase in fitness may be a decrease (e.g., by about 1%, 2%, 5%, 10%, 20%, 30%, 40%, 50%, 60%, 70%, 80%, 90%, 100%, or more than 100%) in production of an allergen (e.g., pollen) that stimulates an immune response in an animal (e.g., human).

[0918] The modification of the plant (e.g., increase in fitness) may arise from modification of one or more plant parts. For example, the plant can be modified by contacting leaf, seed, pollen, root, fruit, shoot, flower, cells, protoplasts, or tissue (e.g., meristematic tissue) of the plant. As such, in another aspect, provided herein is a method of increasing the fitness of a plant, the method including contacting pollen of the plant with an effective amount of any of the plant-modifying compositions herein, wherein the method increases the fitness of the plant (e.g., by about 1%, 2%, 5%, 10%, 20%, 30%, 40%, 50%, 60%, 70%, 80%, 90%, 100%, or more than 100%) relative to an untreated plant.

[0919] In yet another aspect, provided herein is a method of increasing the fitness of a plant, the method including contacting a seed of the plant with an effective amount of any of the Gene Writer systems disclosed herein, wherein the method increases the fitness of the plant (e.g., by about 1%, 2%, 5%, 10%, 20%, 30%, 40%, 50%, 60%, 70%, 80%, 90%, 100%, or more than 100%) relative to an untreated plant.

[0920] In another aspect, provided herein is a method including contacting a protoplast of the plant with an effective amount of any of the Gene Writer systems described herein, wherein the method increases the fitness of the plant (e.g., by about 1%, 2%, 5%, 10%, 20%, 30%, 40%, 50%, 60%, 70%, 80%, 90%, 100%, or more than 100%) relative to an untreated plant.

[0921] In a further aspect, provided herein is a method of increasing the fitness of a plant, the method including contacting a plant cell of the plant with an effective amount of any of the Gene Writer system described herein, wherein the method increases the fitness of the plant (e.g., by about 1%, 2%, 5%, 10%, 20%, 30%, 40%, 50%, 60%, 70%, 80%, 90%, 100%, or more than 100%) relative to an untreated plant.

[0922] In another aspect, provided herein is a method of increasing the fitness of a plant, the method including contacting meristematic tissue of the plant with an effective amount of any of the plant-modifying compositions herein, wherein the method increases the fitness of the plant (e.g., by about 1%, 2%, 5%, 10%, 20%, 30%, 40%, 50%, 60%, 70%, 80%, 90%, 100%, or more than 100%) relative to an untreated plant.

[0923] In another aspect, provided herein is a method of increasing the fitness of a plant, the method including contacting an embryo of the plant with an effective amount of any of the plant-modifying compositions herein, wherein the method increases the fitness of the plant (e.g., by about 1%, 2%, 5%, 10%, 20%, 30%, 40%, 50%, 60%, 70%, 80%, 90%, 100%, or more than 100%) relative to an untreated plant.

### B. Application Methods

[0924] A plant described herein can be exposed to any of the Gene Writer system compositions described herein in any suitable manner that permits delivering or administering the composition to the plant. The Gene Writer system may be delivered either alone or in combination with other active (e.g., fertilizing agents) or inactive substances and may be applied by, for example, spraying, injection (e.g., microinjection), through plants, pouring, dipping, in the form of concentrated liquids, gels, solutions, suspensions, sprays, powders, pellets, briquettes, bricks and the like, formulated to deliver an effective concentration of the plant-modifying composition. Amounts and locations for application of the compositions described herein are generally determined by the habitat of the plant, the lifecycle stage at which the plant can be targeted by the plant-modifying composition, the site where the application is to be made, and the physical and functional characteristics of the plant-modifying composition.

[0925] In some instances, the composition is sprayed directly onto a plant, e.g., crops, by e.g., backpack spraying, aerial spraying, crop spraying/dusting etc. In instances where the Gene Writer system is delivered to a plant, the plant receiving the Gene Writer system may be at any stage of plant growth. For example, formulated plant-modifying compositions can be applied as a seed-coating or root treatment in early stages of plant growth or as a total plant treatment at later stages of the crop cycle. In some instances, the plant-modifying composition may be applied as a topical agent to a plant.

[0926] Further, the Gene Writer system may be applied (e.g., in the soil in which a plant grows, or in the water that is used to water the plant) as a systemic agent that is absorbed and distributed through the tissues of a plant. In some instances, plants or food organisms may be genetically transformed to express the Gene Writer system.

[0927] Delayed or continuous release can also be accomplished by coating the Gene Writer system or a composition with the plant-modifying composition(s) with a dissolvable or bioerodable coating layer, such as gelatin, which coating dissolves or erodes in the environment of use, to then make the plant-modifying com Gene Writer system position available, or by dispersing the agent in a dissolvable or erodable matrix. Such continuous release and/or dispensing means devices may be advantageously employed to consistently maintain an effective concentration of one or more of the plant-modifying compositions described herein.

[0928] In some instances, the Gene Writer system is delivered to a part of the plant, e.g., a leaf, seed, pollen, root, fruit, shoot, or flower, or a tissue, cell, or protoplast thereof. In some instances, the Gene Writer system is delivered to a cell of the plant. In some instances, the Gene Writer system is delivered to a protoplast of the plant. In some instances, the Gene Writer system is delivered to a tissue of the plant. For example, the composition may be delivered to meristematic tissue of the plant (e.g., apical meristem, lateral meristem, or intercalary meristem). In some instances, the composition is delivered to permanent tissue of the plant (e.g., simple tissues (e.g., parenchyma, collenchyma, or sclerenchyma) or complex permanent tissue (e.g., xylem or phloem)). In some instances, the Gene Writer system is delivered to a plant embryo.

### C. Plants

[0929] A variety of plants can be delivered to or treated with a Gene Writer system described herein. Plants that can be delivered a Gene Writer system (i.e., “treated”) in accordance with the present methods include whole plants and parts thereof, including, but not limited to, shoot vegetative organs/structures (e.g., leaves, stems and tubers), roots, flowers and floral organs/structures (e.g., bracts, sepals, petals, stamens, carpels, anthers and ovules), seed (including embryo, endosperm, cotyledons, and seed coat) and fruit (the mature ovary), plant tissue (e.g., vascular tissue, ground tissue, and the like) and cells (e.g., guard cells, egg cells, and the like), and progeny of same. Plant parts can further refer parts of the plant such as the shoot, root, stem, seeds, stipules, leaves, petals, flowers, ovules, bracts, branches, petioles, internodes, bark, pubescence, tillers, rhizomes, fronds, blades, pollen, stamen, and the like.

[0930] The class of plants that can be treated in a method disclosed herein includes the class of higher and lower plants, including angiosperms (monocotyledonous and dicotyledonous plants), gymnosperms, ferns, horsetails, psilophytes, lycophytes, bryophytes, and algae (e.g., multicellular or unicellular algae). Plants that can be treated in accordance with the present methods further include any vascular plant, for example monocotyledons or dicotyledons or gymnosperms, including, but not limited to alfalfa, apple, Arabidopsis, banana, barley, canola, castor bean, chrysanthemum, clover, cocoa, coffee, cotton, cottonseed, corn, crambe, cranberry, cucumber, dendrobium, dioscorea, eucalyptus, fescue, flax, gladiolus, liliacea, linseed, millet, muskmelon, mustard, oat, oil palm, oilseed rape, papaya, peanut, pineapple, ornamental plants, Phaseolus, potato, rapeseed, rice, rye, ryegrass, safflower, sesame, sorghum, soybean, sugarbeet, sugarcane, sunflower, strawberry, tobacco, tomato, turfgrass, wheat and vegetable crops such as lettuce, celery, broccoli, cauliflower, cucurbits; fruit and nut trees, such as apple, pear, peach, orange, grapefruit, lemon, lime, almond, pecan, walnut, hazel; vines, such as grapes (e.g., a vineyard), kiwi, hops; fruit shrubs and brambles, such as raspberry, blackberry, gooseberry; forest trees, such as ash, pine, fir, maple, oak, chestnut, popular; with alfalfa, canola, castor bean, corn, cotton, crambe, flax, linseed, mustard, oil palm, oilseed rape, peanut, potato, rice, safflower, sesame, soybean, sugarbeet, sunflower, tobacco, tomato, and wheat. Plants that can be treated in accordance with the methods of the present invention include any crop plant, for example, forage crop, oilseed crop, grain crop, fruit crop, vegetable crop, fiber crop, spice crop, nut crop, turf crop, sugar crop, beverage crop, and forest crop. In certain instances, the crop plant that is treated in the method is a soybean plant. In other certain instances, the crop plant is wheat. In certain instances, the crop plant is corn. In certain instances, the crop plant is cotton. In certain instances, the crop plant is alfalfa. In certain instances, the crop plant is sugarbeet. In certain instances, the crop plant is rice. In certain instances, the crop plant is potato. In certain instances, the crop plant is tomato.

[0931] In certain instances, the plant is a crop. Examples of such crop plants include, but are not limited to, monocotyledonous and dicotyledonous plants including, but not limited to, fodder or forage legumes, ornamental plants, food crops, trees, or shrubs selected from Acer spp., Allium spp., Amaranthus spp., Ananas comosus, Apium graveolens, Arachis spp, Asparagus officinalis, Beta vulgaris, Brassica spp. (e.g., Brassica napus, Brassica rapa ssp. (canola, oilseed rape, turnip rape), Camellia sinensis, Canna indica, Cannabis saliva, Capsicum spp., Castanea spp., Cichorium endivia, Citrullus lanatus, Citrus spp., Cocos spp., Coffea spp., Coriandrum sativum, Corylus spp., Crataegus spp., Cucurbita spp., Cucumis spp., Daucus carota, Fagus spp., Ficus carica, Fragaria spp., Ginkgo biloba, Glycine spp. (e.g., Glycine max, Soja hispida or Soja max), Gossypium hirsutum, Helianthus spp. (e.g., Helianthus annuus), Hibiscus spp., Hordeum spp. (e.g., Hordeum vulgare), Ipomoea batatas, Juglans spp., Lactuca sativa, Linum usitatissimum, Litchi chinensis, Lotus spp., Luffa acutangula, Lupinus spp., Lycopersicon spp. (e.g., Lycopersicon esculenturn, Lycopersicon lycopersicum, Lycopersicon pyriforme), Malus spp., Medicago sativa, Mentha spp., Miscanthus sinensis, Morus nigra, Musa spp., Nicotiana spp., Olea spp., Oryza spp. (e.g., Oryza sativa, Oryza latifolia), Panicum miliaceum, Panicum virgatum, Passiflora edulis, Petroselinum crispum, Phaseolus spp., Pinus spp., Pistacia vera, Pisum spp., Poa spp., Populus spp., Prunus spp., Pyrus communis, Quercus spp., Raphanus sativus, Rheum rhabarbarum, Ribes spp., Ricinus communis, Rubus spp., Saccharum spp., Salix sp., Sambucus spp., Secale cereale, Sesamum spp., Sinapis spp., Solanum spp. (e.g., Solanum tuberosum, Solanum integrifolium or Solanum lycopersicum), Sorghum bicolor, Sorghum halepense, Spinacia spp., Tamarindus indica, Theobroma cacao, Trifolium spp., Triticosecale rimpaui, Triticum spp. (e.g., Triticum aestivum, Triticum durum, Triticum turgidum, Triticum hybernum, Triticum macha, Triticum sativum or Triticum vulgare), Vaccinium spp., Vicia spp., Vigna spp., Viola odorata, Vitis spp., and Zea mays. In certain embodiments, the crop plant is rice, oilseed rape, canola, soybean, corn (maize), cotton, sugarcane, alfalfa, sorghum, or wheat.

The plant or plant part for use in the present invention include plants of any stage of plant development. In certain instances, the delivery can occur during the stages of germination, seedling growth, vegetative growth, and reproductive growth. In certain instances, delivery to the plant occurs during vegetative and reproductive growth stages. In some instances, the composition is delivered to pollen of the plant. In some instances, the composition is delivered to a seed of the plant. In some instances, the composition is delivered to a protoplast of the plant. In some instances, the composition is delivered to a tissue of the plant. For example, the composition may be delivered to meristematic tissue of the plant (e.g., apical meristem, lateral meristem, or intercalary meristem). In some instances, the composition is delivered to permanent tissue of the plant (e.g., simple tissues (e.g., parenchyma, collenchyma, or sclerenchyma) or complex permanent tissue (e.g., xylem or phloem)). In some instances, the composition is delivered to a plant embryo. In some instances, the composition is delivered to a plant cell. The stages of vegetative and reproductive growth are also referred to herein as “adult” or “mature” plants.

[0932] In instances where the Gene Writer system is delivered to a plant part, the plant part may be modified by the plant-modifying agent. Alternatively, the Gene Writer system may be distributed to other parts of the plant (e.g., by the plant's circulatory system) that are subsequently modified by the plant-modifying agent.

### Lipid Nanoparticles

[0933] The methods and systems provided by the invention, may employ any suitable carrier or delivery modality, including, in certain embodiments, lipid nanoparticles (LNPs). Lipid nanoparticles, in some embodiments, comprise one or more ionic lipids, such as non-cationic lipids (e.g., neutral or anionic, or zwitterionic lipids); one or more conjugated lipids (such as PEG-conjugated lipids or lipids conjugated to polymers described in Table 5 of WO2019217941; incorporated herein by reference in its entirety); one or more sterols (e.g., cholesterol); and, optionally, one or more targeting molecules (e.g., conjugated receptors, receptor ligands, antibodies); or combinations of the foregoing.

[0934] Lipids that can be used in nanoparticle formations (e.g., lipid nanoparticles) include, for example those described in Table 4 of WO2019217941, which is incorporated by reference e.g., a lipid-containing nanoparticle can comprise one or more of the lipids in Table 4 of WO2019217941. Lipid nanoparticles can include additional elements, such as polymers, such as the polymers described in Table 5 of WO2019217941, incorporated by reference.

[0935] In some embodiments, conjugated lipids, when present, can include one or more of PEG-diacylglycerol (DAG) (such as 1-(monomethoxy-polyethyleneglycol)-2,3-dimyristoylglycerol (PEG-DMG)), PEG-dialkyloxypropyl (DAA), PEG-phospholipid, PEG-ceramide (Cer), a pegylated phosphatidylethanoloamine (PEG-PE), PEG succinate diacylglycerol (PEGS-DAG) (such as 4-O-(2′,3′-di(tetradecanoyloxy)propyl-1-O-(w-methoxy(polyethoxy)ethyl) butanedioate (PEG-S-DMG)), PEG dialkoxypropylcarbam, N-(carbonyl-methoxypoly ethylene glycol 2000)-1,2-distearoyl-sn-glycero-3-phosphoethanolamine sodium salt, and those described in Table 2 of WO2019051289 (incorporated by reference), and combinations of the foregoing.

[0936] In some embodiments, sterols that can be incorporated into lipid nanoparticles include one or more of cholesterol or cholesterol derivatives, such as those in WO2009/127060 or US2010/0130588, which are incorporated by reference. Additional exemplary sterols include phytosterols, including those described in Eygeris et al (2020), dx.doi.org/10.1021/acs.nanolett.0c01386, incorporated herein by reference.

[0937] In some embodiments, the lipid particle comprises an ionizable lipid, a non-cationic lipid, a conjugated lipid that inhibits aggregation of particles, and a sterol. The amounts of these components can be varied independently and to achieve desired properties. For example, in some embodiments, the lipid nanoparticle comprises an ionizable lipid is in an amount from about 20 mol % to about 90 mol % of the total lipids (in other embodiments it may be 20-70% (mol), 30-60% (mol) or 40-50% (mol); about 50 mol % to about 90 mol % of the total lipid present in the lipid nanoparticle), a non-cationic lipid in an amount from about 5 mol % to about 30 mol % of the total lipids, a conjugated lipid in an amount from about 0.5 mol % to about 20 mol % of the total lipids, and a sterol in an amount from about 20 mol % to about 50 mol % of the total lipids. The ratio of total lipid to nucleic acid (e.g., encoding the Gene Writer or template nucleic acid) can be varied as desired. For example, the total lipid to nucleic acid (mass or weight) ratio can be from about 10:1 to about 30:1.

[0938] In some embodiments, the lipid to nucleic acid ratio (mass/mass ratio; w/w ratio) can be in the range of from about 1:1 to about 25:1, from about 10:1 to about 14:1, from about 3:1 to about 15:1, from about 4:1 to about 10:1, from about 5:1 to about 9:1, or about 6:1 to about 9:1. The amounts of lipids and nucleic acid can be adjusted to provide a desired N/P ratio, for example, N/P ratio of 3, 4, 5, 6, 7, 8, 9, 10 or higher. Generally, the lipid nanoparticle formulation's overall lipid content can range from about 5 mg/ml to about 30 mg/mL.

[0939] Some non-limiting example of lipid compounds that may be used (e.g., in combination with other lipid components) to form lipid nanoparticles for the delivery of compositions described herein, e.g., nucleic acid (e.g., RNA) described herein (e.g., a template nucleic acid or a nucleic acid encoding a GeneWriter) includes,

[chemical structure]

[0940] In some embodiments an LNP comprising Formula (i) is used to deliver a GeneWriter composition described herein to the liver and/or hepatocyte cells.

[chemical structure]

[0941] In some embodiments an LNP comprising Formula (ii) is used to deliver a GeneWriter composition described herein to the liver and/or hepatocyte cells.

[chemical structure]

[0942] In some embodiments an LNP comprising Formula (iii) is used to deliver a GeneWriter composition described herein to the liver and/or hepatocyte cells.

[chemical structure]

[0943] In some embodiments an LNP comprising Formula (v) is used to deliver a GeneWriter composition described herein to the liver and/or hepatocyte cells.

[chemical structure]

[0944] In some embodiments an LNP comprising Formula (vi) is used to deliver a GeneWriter composition described herein to the liver and/or hepatocyte cells.

[chemical structure]

[0945] In some embodiments an LNP comprising Formula (viii) is used to deliver a GeneWriter composition described herein to the liver and/or hepatocyte cells.

[chemical structure]

[0946] In some embodiments an LNP comprising Formula (ix) is used to deliver a GeneWriter composition described herein to the liver and/or hepatocyte cells.

[chemical structure]

wherein
[0947] X¹ is O, NR¹, or a direct bond, X² is C2-5 alkylene, X³ is C(═O) or a direct bond, R¹ is H or Me, R³ is Ci-3 alkyl, R² is Ci-3 alkyl, or R² taken together with the nitrogen atom to which it is attached and 1-3 carbon atoms of X² form a 4-, 5-, or 6-membered ring, or X¹ is NR¹, R¹ and R² taken together with the nitrogen atoms to which they are attached form a 5- or 6-membered ring, or R² taken together with R³ and the nitrogen atom to which they are attached form a 5-, 6-, or 7-membered ring, Y¹ is C2-12 alkylene, Y² is selected from

[chemical structure]

[0948] n is 0 to 3, R⁴ is Ci-15 alkyl, Z¹ is Ci-6 alkylene or a direct bond,

[chemical structure]

[0949] Z² is
[0950] (in either orientation) or absent, provided that if Z¹ is a direct bond, Z² is absent;
[0951] R⁵ is C5-9 alkyl or C6-10 alkoxy, R⁶ is C5-9 alkyl or C6-10 alkoxy, W is methylene or a direct bond, and R⁷ is H or Me, or a salt thereof, provided that if R³ and R² are C2 alkyls, X¹ is O, X² is linear C3 alkylene, X³ is C(═O), Y¹ is linear Ce alkylene, (Y²)n-R⁴ is

[chemical structure]

[0952] R⁴ is linear C5 alkyl, Z¹ is C2 alkylene, Z² is absent, W is methylene, and R⁷ is H, then R⁵ and R6 are not Cx alkoxy.

[0953] In some embodiments an LNP comprising Formula (xii) is used to deliver a GeneWriter composition described herein to the liver and/or hepatocyte cells.

[chemical structure]

[0954] In some embodiments an LNP comprising Formula (xi) is used to deliver a GeneWriter composition described herein to the liver and/or hepatocyte cells.

[chemical structure]

[0955] In some embodiments an LNP comprises a compound of Formula (xiii) and a compound of Formula (xiv).

[chemical structure]

[0956] In some embodiments an LNP comprising Formula (xv) is used to deliver a GeneWriter composition described herein to the liver and/or hepatocyte cells.

### PEI600 Core

[chemical structure]

[0957] In some embodiments an LNP comprising a formulation of Formula (xvi) is used to deliver a GeneWriter composition described herein to the lung endothelial cells.

[chemical structure]

[0958] In some embodiments, a lipid compound used to form lipid nanoparticles for the delivery of compositions described herein, e.g., nucleic acid (e.g., RNA) described herein (e.g., a template nucleic acid or a nucleic acid encoding a GeneWriter) is made by one of the following reactions:

[chemical structure]

[0959] In some embodiments, a composition described herein (e.g., a nucleic acid or a protein) is provided in an LNP that comprises an ionizable lipid. In some embodiments, the ionizable lipid is heptadecan-9-yl 8-((2-hydroxyethyl)(6-oxo-6-(undecyloxy)hexyl)amino)octanoate (SM-102); e.g., as described in Example 1 of US9,867,888 (incorporated by reference here in its entirety). In some embodiments, the ionizable lipid is 9Z,12Z)-3-((4,4-bis(octyloxy)butanoyl)oxy)-2-((((3-(diethylamino)propoxy)carbonyl)oxy)methyl)propyl octadeca-9,12-dienoate (LPO1), e.g., as synthesized in Example 13 of WO2015/095340 (incorporated by reference herein in its entirety). In some embodiments, the ionizable lipid is Di((Z)-non-2-en-1-yl) 9-((4-dimethylamino)butanoyl)oxy)heptadecanedioate (L319), e.g. as synthesized in Example 7, 8, or 9 of US2012/0027803 (incorporated by reference herein in its entirety). In some embodiments, the ionizable lipid is 1,1′-((2-(4-(2-((2-(Bis(2-hydroxydodecyl)amino)ethyl)(2-hydroxydodecyl) amino)ethyl)piperazin-1-yl)ethyl)azanediyl)bis(dodecan-2-ol) (C12-200), e.g., as synthesized in Examples 14 and 16 of WO2010/053572 (incorporated by reference herein in its entirety). In some embodiments, the ionizable lipid is Imidazole cholesterol ester (ICE) lipid (3S, 10R, 13R, 17R)-10, 13-dimethyl-17-((R)-6-methylheptan-2-yl)-2, 3, 4, 7, 8, 9, 10, 11, 12, 13, 14, 15, 16, 17-tetradecahydro-lH-cyclopenta[a]phenanthren-3-yl 3-(1H-imidazol-4-yl)propanoate, e.g., Structure (I) from WO2020/106946 (incorporated by reference herein in its entirety).

[0960] In some embodiments, an ionizable lipid may be a cationic lipid, an ionizable cationic lipid, e.g., a cationic lipid that can exist in a positively charged or neutral form depending on pH, or an amine-containing lipid that can be readily protonated. In some embodiments, the cationic lipid is a lipid capable of being positively charged, e.g., under physiological conditions. Exemplary cationic lipids include one or more amine group(s) which bear the positive charge. In some embodiments, the lipid particle comprises a cationic lipid in formulation with one or more of neutral lipids, ionizable amine-containing lipids, biodegradable alkyn lipids, steroids, phospholipids including polyunsaturated lipids, structural lipids (e.g., sterols), PEG, cholesterol and polymer conjugated lipids. In some embodiments, the cationic lipid may be an ionizable cationic lipid. An exemplary cationic lipid as disclosed herein may have an effective pKa over 6.0. In embodiments, a lipid nanoparticle may comprise a second cationic lipid having a different effective pKa (e.g., greater than the first effective pKa), than the first cationic lipid. A lipid nanoparticle may comprise between 40 and 60 mol percent of a cationic lipid, a neutral lipid, a steroid, a polymer conjugated lipid, and a therapeutic agent, e.g., a nucleic acid (e.g., RNA) described herein (e.g., a template nucleic acid or a nucleic acid encoding a GeneWriter), encapsulated within or associated with the lipid nanoparticle. In some embodiments, the nucleic acid is co-formulated with the cationic lipid. The nucleic acid may be adsorbed to the surface of an LNP, e.g., an LNP comprising a cationic lipid. In some embodiments, the nucleic acid may be encapsulated in an LNP, e.g., an LNP comprising a cationic lipid. In some embodiments, the lipid nanoparticle may comprise a targeting moiety, e.g., coated with a targeting agent. In embodiments, the LNP formulation is biodegradable. In some embodiments, a lipid nanoparticle comprising one or more lipid described herein, e.g., Formula (i), (ii), (ii), (vii) and/or (ix) encapsulates at least 1%, at least 5%, at least 10%, at least 20%, at least 30%, at least 40%, at least 50%, at least 60%, at least 70%, at least 80%, at least 90%, at least 92%, at least 95%, at least 97%, at least 98% or 100% of an RNA molecule, e.g., template RNA and/or a mRNA encoding the Gene Writer polypeptide.

[0961] Exemplary ionizable lipids that can be used in lipid nanoparticle formulations include, without limitation, those listed in Table 1 of WO2019051289, incorporated herein by reference. Additional exemplary lipids include, without limitation, one or more of the following formulae: X of US2016/0311759; I of US20150376115 or in US2016/0376224; I, II or III of US20160151284; I, IA, II, or IIA of US20170210967; I-c of US20150140070; A of US2013/0178541; I of US2013/0303587 or US2013/0123338; I of US2015/0141678; II, III, IV, or V of US2015/0239926; I of US2017/0119904; I or II of WO2017/117528; A of US2012/0149894; A of US2015/0057373; A of WO2013/116126; A of US2013/0090372; A of US2013/0274523; A of US2013/0274504; A of US2013/0053572; A of WO2013/016058; A of WO2012/162210; I of US2008/042973; I, II, III, or IV of US2012/01287670; I or II of US2014/0200257; I, II, or III of US2015/0203446; I or III of US2015/0005363; I, IA, IB, IC, ID, II, IIA, IIB, IIC, IID, or III-XXIV of US2014/0308304; of US2013/0338210; I, II, III, or IV of WO2009/132131; A of US2012/01011478; I or XXXV of US2012/0027796; XIV or XVII of US2012/0058144; of US2013/0323269; I of US2011/0117125; I, II, or III of US2011/0256175; I, II, III, IV, V, VI, VII, VIII, IX, X, XI, XII of US2012/0202871; I, II, III, IV, V, VI, VII, VIII, X, XII, XIII, XIV, XV, or XVI of US2011/0076335; I or II of US2006/008378; I of US2013/0123338; I or X-A-Y-Z of US2015/0064242; XVI, XVII, or XVIII of US2013/0022649; I, II, or III of US2013/0116307; I, II, or III of US2013/0116307; I or II of US2010/0062967; I-X of US2013/0189351; I of US2014/0039032; V of US2018/0028664; I of US2016/0317458; I of US2013/0195920; 5, 6, or 10 of U.S. Pat. No. 10,221,127; 111-3 of WO2018/081480; I-5 or 1-8 of WO2020/081938; 18 or 25 of U.S. Pat. No. 9,867,888; A of US2019/0136231; II of WO2020/219876; 1 of US2012/0027803; OF-02 of US2019/0240349; 23 of U.S. Pat. No. 10,086,013; cKK-E12/A6 of Miao et al (2020); C12-200 of WO2010/053572; 7C1 of Dahlman et al (2017); 304-013 or 503-013 of Whitehead et al; TS-P4C2 of U.S. Pat. No. 9,708,628; I of WO2020/106946; I of WO2020/106946.

[0962] In some embodiments, the ionizable lipid is MC3 (6Z,9Z,28Z,3 lZ)-heptatriaconta-6,9,28,3 1-tetraen-19-yl-4-(dimethylamino) butanoate (DLin-MC3-DMA or MC3), e.g., as described in Example 9 of WO2019051289A9 (incorporated by reference herein in its entirety). In some embodiments, the ionizable lipid is the lipid ATX-002, e.g., as described in Example 10 of WO2019051289A9 (incorporated by reference herein in its entirety). In some embodiments, the ionizable lipid is (13Z,16Z)-A,A-dimethyl-3-nonyldocosa-13, 16-dien-1-amine (Compound 32), e.g., as described in Example 11 of WO2019051289A9 (incorporated by reference herein in its entirety). In some embodiments, the ionizable lipid is Compound 6 or Compound 22, e.g., as described in Example 12 of WO2019051289A9 (incorporated by reference herein in its entirety).

[0963] Exemplary non-cationic lipids include, but are not limited to, distearoyl-sn-glycero-phosphoethanolamine, distearoylphosphatidylcholine (DSPC), dioleoylphosphatidylcholine (DOPC), dipalmitoylphosphatidylcholine (DPPC), dioleoylphosphatidylglycerol (DOPG), dipalmitoylphosphatidylglycerol (DPPG), dioleoyl-phosphatidylethanolamine (DOPE), palmitoyloleoylphosphatidylcholine (POPC), palmitoyloleoylphosphatidylethanolamine (POPE), dioleoyl-phosphatidylethanolamine 4-(N-maleimidomethyl)-cyclohexane-1-carboxylate (DOPE-mal), dipalmitoyl phosphatidyl ethanolamine (DPPE), dimyristoylphosphoethanolamine (DMPE), distearoyl-phosphatidyl-ethanolamine (DSPE), monomethyl-phosphatidylethanolamine (such as 16-O-monomethyl PE), dimethyl-phosphatidylethanolamine (such as 16-O-dimethyl PE), 18-1-trans PE, 1-stearoyl-2-oleoyl-phosphatidyethanolamine (SOPE), hydrogenated soy phosphatidylcholine (HSPC), egg phosphatidylcholine (EPC), dioleoylphosphatidylserine (DOPS), sphingomyelin (SM), dimyristoyl phosphatidylcholine (DMPC), dimyristoyl phosphatidylglycerol (DMPG), distearoylphosphatidylglycerol (DSPG), dierucoylphosphatidylcholine (DEPC), palmitoyloleyolphosphatidylglycerol (POPG), dielaidoyl-phosphatidylethanolamine (DEPE), lecithin, phosphatidylethanolamine, lysolecithin, lysophosphatidylethanolamine, phosphatidylserine, phosphatidylinositol, sphingomyelin, egg sphingomyelin (ESM), cephalin, cardiolipin, phosphatidicacid,cerebrosides, dicetylphosphate, lysophosphatidylcholine, dilinoleoylphosphatidylcholine, or mixtures thereof. It is understood that other diacylphosphatidylcholine and diacylphosphatidylethanolamine phospholipids can also be used. The acyl groups in these lipids are preferably acyl groups derived from fatty acids having C10-C24 carbon chains, e.g., lauroyl, myristoyl, paimitoyl, stearoyl, or oleoyl. Additional exemplary lipids, in certain embodiments, include, without limitation, those described in Kim et al. (2020) dx.doi.org/10.1021/acs.nanolett.0c01386, incorporated herein by reference. Such lipids include, in some embodiments, plant lipids found to improve liver transfection with mRNA (e.g., DGTS).

[0964] Other examples of non-cationic lipids suitable for use in the lipid nanoparticles include, without limitation, nonphosphorous lipids such as, e.g., stearylamine, dodeeylamine, hexadecylamine, acetyl palmitate, glycerol ricinoleate, hexadecyl stereate, isopropyl myristate, amphoteric acrylic polymers, triethanolamine-lauryl sulfate, alkyl-aryl sulfate polyethyloxylated fatty acid amides, dioctadecyl dimethyl ammonium bromide, ceramide, sphingomyelin, and the like. Other non-cationic lipids are described in WO2017/099823 or US patent publication US2018/0028664, the contents of which is incorporated herein by reference in their entirety.

[0965] In some embodiments, the non-cationic lipid is oleic acid or a compound of Formula I, II, or IV of US2018/0028664, incorporated herein by reference in its entirety. The non-cationic lipid can comprise, for example, 0-30% (mol) of the total lipid present in the lipid nanoparticle.

[0966] In some embodiments, the non-cationic lipid content is 5-20% (mol) or 10-15% (mol) of the total lipid present in the lipid nanoparticle. In embodiments, the molar ratio of ionizable lipid to the neutral lipid ranges from about 2:1 to about 8:1 (e.g., about 2:1, 3:1, 4:1, 5:1, 6:1, 7:1, or 8:1).

[0967] In some embodiments, the lipid nanoparticles do not comprise any phospholipids.

[0968] In some aspects, the lipid nanoparticle can further comprise a component, such as a sterol, to provide membrane integrity. One exemplary sterol that can be used in the lipid nanoparticle is cholesterol and derivatives thereof. Non-limiting examples of cholesterol derivatives include polar analogues such as 5a-choiestanol, 53-coprostanol, cholesteryl-(2′-hydroxy)-ethyl ether, cholesteryls-(4′-hydroxy)-butyl ether, and 6-ketocholestanol; non-polar analogues such as 5a-cholestane, cholestenone, 5a-cholestanone, 5p-cholestanone, and cholesteryl decanoate; and mixtures thereof. In some embodiments, the cholesterol derivative is a polar analogue, e.g., cholesteryls-(4′-hydroxy)-butyl ether. Exemplary cholesterol derivatives are described in PCT publication WO2009/127060 and US patent publication US2010/0130588, each of which is incorporated herein by reference in its entirety.

[0969] In some embodiments, the component providing membrane integrity, such as a sterol, can comprise 0-50% (mol) (e.g., 0-10%, 10-20%, 20-30%, 30-40%, or 40-50%) of the total lipid present in the lipid nanoparticle. In some embodiments, such a component is 20-50% (mol) 30-40% (mol) of the total lipid content of the lipid nanoparticle.

[0970] In some embodiments, the lipid nanoparticle can comprise a polyethylene glycol (PEG) or a conjugated lipid molecule. Generally, these are used to inhibit aggregation of lipid nanoparticles and/or provide steric stabilization. Exemplary conjugated lipids include, but are not limited to, PEG-lipid conjugates, polyoxazoline (POZ)-lipid conjugates, polyamide-lipid conjugates (such as ATTA-lipid conjugates), cationic-polymer lipid (CPL) conjugates, and mixtures thereof. In some embodiments, the conjugated lipid molecule is a PEG-lipid conjugate, for example, a (methoxy polyethylene glycol)-conjugated lipid.

[0971] Exemplary PEG-lipid conjugates include, but are not limited to, PEG-diacylglycerol (DAG) (such as 1-(monomethoxy-polyethyleneglycol)-2,3-dimyristoylglycerol (PEG-DMG)), PEG-dialkyloxypropyl (DAA), PEG-phospholipid, PEG-ceramide (Cer), a pegylated phosphatidylethanoloamine (PEG-PE), PEG succinate diacylglycerol (PEGS-DAG) (such as 4-0-(2′,3′-di(tetradecanoyloxy)propyl-l-0-(w-methoxy(polyethoxy)ethyl) butanedioate (PEG-S-DMG)), PEG dialkoxypropylcarbam, N-(carbonyl-methoxypolyethylene glycol 2000)-1,2-distearoyl-sn-glycero-3-phosphoethanolamine sodium salt, or a mixture thereof. Additional exemplary PEG-lipid conjugates are described, for example, in U.S. Pat. Nos. 5,885,613, 6,287,591, US2003/0077829, US2003/0077829, US2005/0175682, US2008/0020058, US2011/0117125, US2010/0130588, US2016/0376224, US2017/0119904, and US/099823, the contents of all of which are incorporated herein by reference in their entirety. In some embodiments, a PEG-lipid is a compound of Formula III, III-a-I, III-a-2, III-b-1, III-b-2, or V of US2018/0028664, the content of which is incorporated herein by reference in its entirety. In some embodiments, a PEG-lipid is of Formula II of US20150376115 or US2016/0376224, the content of both of which is incorporated herein by reference in its entirety. In some embodiments, the PEG-DAA conjugate can be, for example, PEG-dilauryloxypropyl, PEG-dimyristyloxypropyl, PEG-dipalmityloxypropyl, or PEG-distearyloxypropyl. The PEG-lipid can be one or more of PEG-DMG, PEG-dilaurylglycerol, PEG-dipalmitoylglycerol, PEG-disterylglycerol, PEG-dilaurylglycamide, PEG-dimyristylglycamide, PEG-dipalmitoylglycamide, PEG-disterylglycamide, PEG-cholesterol (1-[8′-(Cholest-5-en-3[beta]-oxy)carboxamido-3′,6′-dioxaoctanyl]carbamoyl-[omega]-methyl-poly(ethylene glycol), PEG-DMB (3,4-Ditetradecoxylbenzyl-[omega]-methyl-poly(ethylene glycol) ether), and 1,2-dimyristoyl-sn-glycero-3-phosphoethanolamine-N-[methoxy(polyethylene glycol)-2000]. In some embodiments, the PEG-lipid comprises PEG-DMG, 1,2-dimyristoyl-sn-glycero-3-phosphoethanolamine-N-[methoxy(polyethylene glycol)-2000]. In some embodiments, the PEG-lipid comprises a structure selected from:

[chemical structure]

[0972] In some embodiments, lipids conjugated with a molecule other than a PEG can also bel used in place of PEG-lipid. For example, polyoxazoline (POZ)-lipid conjugates, polyamide-lipid conjugates (such as ATTA-lipid conjugates), and cationic-polymer lipid (GPL) conjugates can be used in place of or in addition to the PEG-lipid.

[0973] Exemplary conjugated lipids, i.e., PEG-lipids, (POZ)-lipid conjugates, ATTA-lipid conjugates and cationic polymer-lipids are described in the PCT and LIS patent applications listed in Table 2 of WO2019051289A9, the contents of all of which are incorporated herein by reference in their entirety.

[0974] In some embodiments, the PEG or the conjugated lipid can comprise 0-20% (mol) of the total lipid present in the lipid nanoparticle. In some embodiments, PEG or the conjugated lipid content is 0.5-10% or 2-5% (mol) of the total lipid present in the lipid nanoparticle. Molar ratios of the ionizable lipid, non-cationic-lipid, sterol, and PEG/conjugated lipid can be varied as needed. For example, the lipid particle can comprise 30-70% ionizable lipid by mole or by total weight of the composition, 0-60% cholesterol by mole or by total weight of the composition, 0-30% non-cationic-lipid by mole or by total weight of the composition and 1-10% conjugated lipid by mole or by total weight of the composition. Preferably, the composition comprises 30-40% ionizable lipid by mole or by total weight of the composition, 40-50% cholesterol by mole or by total weight of the composition, and 10-20% non-cationic-lipid by mole or by total weight of the composition. In some other embodiments, the composition is 50-75% ionizable lipid by mole or by total weight of the composition, 20-40% cholesterol by mole or by total weight of the composition, and 5 to 10% non-cationic-lipid, by mole or by total weight of the composition and 1-10% conjugated lipid by mole or by total weight of the composition. The composition may contain 60-70% ionizable lipid by mole or by total weight of the composition, 25-35% cholesterol by mole or by total weight of the composition, and 5-10% non-cationic-lipid by mole or by total weight of the composition. The composition may also contain up to 90% ionizable lipid by mole or by total weight of the composition and 2 to 15% non-cationic lipid by mole or by total weight of the composition. The formulation may also be a lipid nanoparticle formulation, for example comprising 8-30% ionizable lipid by mole or by total weight of the composition, 5-30% non-cationic lipid by mole or by total weight of the composition, and 0-20% cholesterol by mole or by total weight of the composition; 4-25% ionizable lipid by mole or by total weight of the composition, 4-25% non-cationic lipid by mole or by total weight of the composition, 2 to 25% cholesterol by mole or by total weight of the composition, 10 to 35% conjugate lipid by mole or by total weight of the composition, and 5% cholesterol by mole or by total weight of the composition; or 2-30% ionizable lipid by mole or by total weight of the composition, 2-30% non-cationic lipid by mole or by total weight of the composition, 1 to 15% cholesterol by mole or by total weight of the composition, 2 to 35% conjugate lipid by mole or by total weight of the composition, and 1-20% cholesterol by mole or by total weight of the composition; or even up to 90% ionizable lipid by mole or by total weight of the composition and 2-10% non-cationic lipids by mole or by total weight of the composition, or even 100% cationic lipid by mole or by total weight of the composition. In some embodiments, the lipid particle formulation comprises ionizable lipid, phospholipid, cholesterol and a PEG-ylated lipid in a molar ratio of 50:10:38.5:1.5. In some other embodiments, the lipid particle formulation comprises ionizable lipid, cholesterol and a PEG-ylated lipid in a molar ratio of 60:38.5:1.5.

[0975] In some embodiments, the lipid particle comprises ionizable lipid, non-cationic lipid (e.g. phospholipid), a sterol (e.g., cholesterol) and a PEG-ylated lipid, where the molar ratio of lipids ranges from 20 to 70 mole percent for the ionizable lipid, with a target of 40-60, the mole percent of non-cationic lipid ranges from 0 to 30, with a target of 0 to 15, the mole percent of sterol ranges from 20 to 70, with a target of 30 to 50, and the mole percent of PEG-ylated lipid ranges from 1 to 6, with a target of 2 to 5.

[0976] In some embodiments, the lipid particle comprises ionizable lipid/non-cationic-lipid/sterol/conjugated lipid at a molar ratio of 50:10:38.5:1.5.

[0977] In an aspect, the disclosure provides a lipid nanoparticle formulation comprising phospholipids, lecithin, phosphatidylcholine and phosphatidylethanolamine.

[0978] In some embodiments, one or more additional compounds can also be included. Those compounds can be administered separately or the additional compounds can be included in the lipid nanoparticles of the invention. In other words, the lipid nanoparticles can contain other compounds in addition to the nucleic acid or at least a second nucleic acid, different than the first. Without limitations, other additional compounds can be selected from the group consisting of small or large organic or inorganic molecules, monosaccharides, disaccharides, trisaccharides, oligosaccharides, polysaccharides, peptides, proteins, peptide analogs and derivatives thereof, peptidomimetics, nucleic acids, nucleic acid analogs and derivatives, an extract made from biological materials, or any combinations thereof.

[0979] In some embodiments, LNPs are directed to specific tissues by the addition of targeting domains. For example, biological ligands may be displayed on the surface of LNPs to enhance interaction with cells displaying cognate receptors, thus driving association with and cargo delivery to tissues wherein cells express the receptor. In some embodiments, the biological ligand may be a ligand that drives delivery to the liver, e.g., LNPs that display GalNAc result in delivery of nucleic acid cargo to hepatocytes that display asialoglycoprotein receptor (ASGPR). The work of Akinc et al. Mol Ther 18(7):1357-1364 (2010) teaches the conjugation of a trivalent GalNAc ligand to a PEG-lipid (GalNAc-PEG-DSG) to yield LNPs dependent on ASGPR for observable LNP cargo effect (see, e.g., FIG. 6 of Akinc et al. 2010, supra). Other ligand-displaying LNP formulations, e.g., incorporating folate, transferrin, or antibodies, are discussed in WO2017223135, which is incorporated herein by reference in its entirety, in addition to the references used therein, namely Kolhatkar et al., Curr Drug Discov Technol. 2011 8:197-206; Musacchio and Torchilin, Front Biosci. 2011 16:1388-1412; Yu et al., Mol Membr Biol. 2010 27:286-298; Patil et al., Crit Rev Ther Drug Carrier Syst. 2008 25:1-61; Benoit et al., Biomacromolecules. 2011 12:2708-2714; Zhao et al., Expert Opin Drug Deliv. 2008 5:309-319; Akinc et al., Mol Ther. 2010 18:1357-1364; Srinivasan et al., Methods Mol Biol. 2012 820:105-116; Ben-Arie et al., Methods Mol Biol. 2012 757:497-507; Peer 2010 J Control Release. 20:63-68; Peer et al., Proc Natl Acad Sci USA. 2007 104:4095-4100; Kim et al., Methods Mol Biol. 2011 721:339-353; Subramanya et al., Mol Ther. 2010 18:2028-2037; Song et al., Nat Biotechnol. 2005 23:709-717; Peer et al., Science. 2008 319:627-630; and Peer and Lieberman, Gene Ther. 2011 18:1127-1133.

[0980] In some embodiments, LNPs are selected for tissue-specific activity by the addition of a Selective ORgan Targeting (SORT) molecule to a formulation comprising traditional components, such as ionizable cationic lipids, amphipathic phospholipids, cholesterol and poly(ethylene glycol) (PEG) lipids. The teachings of Cheng et al. Nat Nanotechnol 15(4):313-320 (2020) demonstrate that the addition of a supplemental “SORT” component precisely alters the in vivo RNA delivery profile and mediates tissue-specific (e.g., lungs, liver, spleen) gene delivery and editing as a function of the percentage and biophysical property of the SORT molecule.

[0981] In some embodiments, the LNPs comprise biodegradable, ionizable lipids. In some embodiments, the LNPs comprise (9Z,12Z)-3-((4,4-bis(octyloxy)butanoyl)oxy)-2-((((3-(diethylamino)propoxy)carbonyl)oxy)methyl)propyl octadeca-9,12-dienoate, also called 3-((4,4-bis(octyloxy)butanoyl)oxy)-2-((((3-(diethylamino)propoxy)carbonyl)oxy)methyl)propyl (9Z,12Z)-octadeca-9,12-dienoate) or another ionizable lipid. See, e.g, lipids of WO2019/067992, WO/2017/173054, WO2015/095340, and WO2014/136086, as well as references provided therein. In some embodiments, the term cationic and ionizable in the context of LNP lipids is interchangeable, e.g., wherein ionizable lipids are cationic depending on the pH.

[0982] In some embodiments, multiple components of a Gene Writer system may be prepared as a single LNP formulation, e.g., an LNP formulation comprises mRNA encoding for the Gene Writer polypeptide and an RNA template. Ratios of nucleic acid components may be varied in order to maximize the properties of a therapeutic. In some embodiments, the ratio of RNA template to mRNA encoding a Gene Writer polypeptide is about 1:1 to 100:1, e.g., about 1:1 to 20:1, about 20:1 to 40:1, about 40:1 to 60:1, about 60:1 to 80:1, or about 80:1 to 100:1, by molar ratio. In other embodiments, a system of multiple nucleic acids may be prepared by separate formulations, e.g., one LNP formulation comprising a template RNA and a second LNP formulation comprising an mRNA encoding a Gene Writer polypeptide. In some embodiments, the system may comprise more than two nucleic acid components formulated into LNPs. In some embodiments, the system may comprise a protein, e.g., a Gene Writer polypeptide, and a template RNA formulated into at least one LNP formulation.

[0983] In some embodiments, the average LNP diameter of the LNP formulation may be between 10s of nm and 100s of nm, e.g., measured by dynamic light scattering (DLS). In some embodiments, the average LNP diameter of the LNP formulation may be from about 40 nm to about 150 nm, such as about 40 nm, 45 nm, 50 nm, 55 nm, 60 nm, 65 nm, 70 nm, 75 nm, 80 nm, 85 nm, 90 nm, 95 nm, 100 nm, 105 nm, 110 nm, 115 nm, 120 nm, 125 nm, 130 nm, 135 nm, 140 nm, 145 nm, or 150 nm. In some embodiments, the average LNP diameter of the LNP formulation may be from about 50 nm to about 100 nm, from about 50 nm to about 90 nm, from about 50 nm to about 80 nm, from about 50 nm to about 70 nm, from about 50 nm to about 60 nm, from about 60 nm to about 100 nm, from about 60 nm to about 90 nm, from about 60 nm to about 80 nm, from about 60 nm to about 70 nm, from about 70 nm to about 100 nm, from about 70 nm to about 90 nm, from about 70 nm to about 80 nm, from about 80 nm to about 100 nm, from about 80 nm to about 90 nm, or from about 90 nm to about 100 nm. In some embodiments, the average LNP diameter of the LNP formulation may be from about 70 nm to about 100 nm. In a particular embodiment, the average LNP diameter of the LNP formulation may be about 80 nm. In some embodiments, the average LNP diameter of the LNP formulation may be about 100 nm. In some embodiments, the average LNP diameter of the LNP formulation ranges from about 1 mm to about 500 mm, from about 5 mm to about 200 mm, from about 10 mm to about 100 mm, from about 20 mm to about 80 mm, from about 25 mm to about 60 mm, from about 30 mm to about 55 mm, from about 35 mm to about 50 mm, or from about 38 mm to about 42 mm.

[0984] A LNP may, in some instances, be relatively homogenous. A polydispersity index may be used to indicate the homogeneity of a LNP, e.g., the particle size distribution of the lipid nanoparticles. A small (e.g., less than 0.3) polydispersity index generally indicates a narrow particle size distribution. A LNP may have a polydispersity index from about 0 to about 0.25, such as 0.01, 0.02, 0.03, 0.04, 0.05, 0.06, 0.07, 0.08, 0.09, 0.10, 0.11, 0.12, 0.13, 0.14, 0.15, 0.16, 0.17, 0.18, 0.19, 0.20, 0.21, 0.22, 0.23, 0.24, or 0.25. In some embodiments, the polydispersity index of a LNP may be from about 0.10 to about 0.20.

[0985] The zeta potential of a LNP may be used to indicate the electrokinetic potential of the composition. In some embodiments, the zeta potential may describe the surface charge of a LNP. Lipid nanoparticles with relatively low charges, positive or negative, are generally desirable, as more highly charged species may interact undesirably with cells, tissues, and other elements in the body. In some embodiments, the zeta potential of a LNP may be from about −10 mV to about +20 mV, from about −10 mV to about +15 mV, from about −10 mV to about +10 mV, from about −10 mV to about +5 mV, from about −10 mV to about 0 mV, from about −10 mV to about −5 mV, from about −5 mV to about +20 mV, from about −5 mV to about +15 mV, from about −5 mV to about +10 mV, from about −5 mV to about +5 mV, from about −5 mV to about 0 mV, from about 0 mV to about +20 mV, from about 0 mV to about +15 mV, from about 0 mV to about +10 mV, from about 0 mV to about +5 mV, from about +5 mV to about +20 mV, from about +5 mV to about +15 mV, or from about +5 mV to about +10 mV.

[0986] The efficiency of encapsulation of a protein and/or nucleic acid, e.g., Gene Writer polypeptide or mRNA encoding the polypeptide, describes the amount of protein and/or nucleic acid that is encapsulated or otherwise associated with a LNP after preparation, relative to the initial amount provided. The encapsulation efficiency is desirably high (e.g., close to 100%). The encapsulation efficiency may be measured, for example, by comparing the amount of protein or nucleic acid in a solution containing the lipid nanoparticle before and after breaking up the lipid nanoparticle with one or more organic solvents or detergents. An anion exchange resin may be used to measure the amount of free protein or nucleic acid (e.g., RNA) in a solution. Fluorescence may be used to measure the amount of free protein and/or nucleic acid (e.g., RNA) in a solution. For the lipid nanoparticles described herein, the encapsulation efficiency of a protein and/or nucleic acid may be at least 50%, for example 50%, 55%, 60%, 65%, 70%, 75%, 80%, 85%, 90%, 91%, 92%, 93%, 94%, 95%, 96%, 97%, 98%, 99%, or 100%. In some embodiments, the encapsulation efficiency may be at least 80%. In some embodiments, the encapsulation efficiency may be at least 90%. In some embodiments, the encapsulation efficiency may be at least 95%.

[0987] A LNP may optionally comprise one or more coatings. In some embodiments, a LNP may be formulated in a capsule, film, or table having a coating. A capsule, film, or tablet including a composition described herein may have any useful size, tensile strength, hardness or density.

[0988] Additional exemplary lipids, formulations, methods, and characterization of LNPs are taught by WO2020061457, which is incorporated herein by reference in its entirety.

[0989] In some embodiments, in vitro or ex vivo cell lipofections are performed using Lipofectamine MessengerMax (Thermo Fisher) or TransIT-mRNA Transfection Reagent (Mirus Bio). In certain embodiments, LNPs are formulated using the GenVoy_ILM ionizable lipid mix (Precision NanoSystems). In certain embodiments, LNPs are formulated using 2,2-dilinoleyl-4-dimethylaminoethyl-[1,3]-dioxolane (DLin-KC2-DMA) or dilinoleylmethyl-4-dimethylaminobutyrate (DLin-MC3-DMA or MC3), the formulation and in vivo use of which are taught in Jayaraman et al. Angew Chem Int Ed Engl 51(34):8529-8533 (2012), incorporated herein by reference in its entirety.

[0990] LNP formulations optimized for the delivery of CRISPR-Cas systems, e.g., Cas9-gRNA RNP, gRNA, Cas9 mRNA, are described in WO2019067992 and WO2019067910, both incorporated by reference.

[0991] Additional specific LNP formulations useful for delivery of nucleic acids are described in U.S. Pat. Nos. 8,158,601 and 8,168,775, both incorporated by reference, which include formulations used in patisiran, sold under the name ONPATTRO.

[0992] Exemplary dosing of Gene Writer LNP may include about 0.1, 0.25, 0.3, 0.5, 1, 2, 3, 4, 5, 6, 8, 10, or 100 mg/kg (RNA). Exemplary dosing of AAV comprising a nucleic acid encoding one or more components of the system may include an MOI of about 10¹¹, 10¹², 10¹³, and 1014 vg/kg.

[0993] In some embodiments, a lipid nanoparticle (or a formulation comprising lipid nanoparticles) lacks reactive impurities (e.g., aldehydes or ketones), or comprises less than a preselected level of reactive impurities (e.g., aldehydes or ketones). While not wishing to be bound by theory, in some embodiments, a lipid reagent is used to make a lipid nanoparticle formulation, and the lipid reagent may comprise a contaminating reactive impurity (e.g., an aldehyde or ketone). A lipid regent may be selected for manufacturing based on having less than a preselected level of reactive impurities (e.g., aldehydes or ketones). Without wishing to be bound by theory, in some embodiments, aldehydes can cause modification and damage of RNA, e.g., cross-linking between bases and/or covalently conjugating lipid to RNA (e.g., forming lipid-RNA adducts). This may, in some instances, lead to failure of a reverse transcriptase reaction and/or incorporation of inappropriate bases, e.g., at the site(s) of lesion(s), e.g., a mutation in a newly synthesized target DNA.

[0994] In some embodiments, a lipid nanoparticle formulation is produced using a lipid reagent comprising less than 5%, 4%, 3%, 2%, 1%, 0.9%, 0.8%, 0.7%, 0.6%, 0.5%, 0.4%, 0.3%, 0.2%, or 0.1% total reactive impurity (e.g., aldehyde) content. In some embodiments, a lipid nanoparticle formulation is produced using a lipid reagent comprising less than 5%, 4%, 3%, 2%, 1%, 0.9%, 0.8%, 0.7%, 0.6%, 0.5%, 0.4%, 0.3%, 0.2%, or 0.1% of any single reactive impurity (e.g., aldehyde) species. In some embodiments, a lipid nanoparticle formulation is produced using a lipid reagent comprising: (i) less than 5%, 4%, 3%, 2%, 1%, 0.9%, 0.8%, 0.7%, 0.6%, 0.5%, 0.4%, 0.3%, 0.2%, or 0.1% total reactive impurity (e.g., aldehyde) content; and (ii) less than 5%, 4%, 3%, 2%, 1%, 0.9%, 0.8%, 0.7%, 0.6%, 0.5%, 0.4%, 0.3%, 0.2%, or 0.1% of any single reactive impurity (e.g., aldehyde) species. In some embodiments, the lipid nanoparticle formulation is produced using a plurality of lipid reagents, and each lipid reagent of the plurality independently meets one or more criterion described in this paragraph. In some embodiments, each lipid reagent of the plurality meets the same criterion, e.g., a criterion of this paragraph.

[0995] In some embodiments, the lipid nanoparticle formulation comprises less than 5%, 4%, 3%, 2%, 1%, 0.9%, 0.8%, 0.7%, 0.6%, 0.5%, 0.4%, 0.3%, 0.2%, or 0.1% total reactive impurity (e.g., aldehyde) content. In some embodiments, the lipid nanoparticle formulation comprises less than 5%, 4%, 3%, 2%, 1%, 0.9%, 0.8%, 0.7%, 0.6%, 0.5%, 0.4%, 0.3%, 0.2%, or 0.1% of any single reactive impurity (e.g., aldehyde) species. In some embodiments, the lipid nanoparticle formulation comprises: (i) less than 5%, 4%, 3%, 2%, 1%, 0.9%, 0.8%, 0.7%, 0.6%, 0.5%, 0.4%, 0.3%, 0.2%, or 0.1% total reactive impurity (e.g., aldehyde) content; and (ii) less than 5%, 4%, 3%, 2%, 1%, 0.9%, 0.8%, 0.7%, 0.6%, 0.5%, 0.4%, 0.3%, 0.2%, or 0.1% of any single reactive impurity (e.g., aldehyde) species.

[0996] In some embodiments, one or more, or optionally all, of the lipid reagents used for a lipid nanoparticle as described herein or a formulation thereof comprise less than 5%, 4%, 3%, 2%, 1%, 0.9%, 0.8%, 0.7%, 0.6%, 0.5%, 0.4%, 0.3%, 0.2%, or 0.1% total reactive impurity (e.g., aldehyde) content. In some embodiments, one or more, or optionally all, of the lipid reagents used for a lipid nanoparticle as described herein or a formulation thereof comprise less than 5%, 4%, 3%, 2%, 1%, 0.9%, 0.8%, 0.7%, 0.6%, 0.5%, 0.4%, 0.3%, 0.2%, or 0.1% of any single reactive impurity (e.g., aldehyde) species. In some embodiments, one or more, or optionally all, of the lipid reagents used for a lipid nanoparticle as described herein or a formulation thereof comprise: (i) less than 5%, 4%, 3%, 2%, 1%, 0.9%, 0.8%, 0.7%, 0.6%, 0.5%, 0.4%, 0.3%, 0.2%, or 0.1% total reactive impurity (e.g., aldehyde) content; and (ii) less than 5%, 4%, 3%, 2%, 1%, 0.9%, 0.8%, 0.7%, 0.6%, 0.5%, 0.4%, 0.3%, 0.2%, or 0.1% of any single reactive impurity (e.g., aldehyde) species.

[0997] In some embodiments, total aldehyde content and/or quantity of any single reactive impurity (e.g., aldehyde) species is determined by liquid chromatography (LC), e.g., coupled with tandem mass spectrometry (MS/MS), e.g., according to the method described in Example 26. In some embodiments, reactive impurity (e.g., aldehyde) content and/or quantity of reactive impurity (e.g., aldehyde) species is determined by detecting one or more chemical modifications of a nucleic acid molecule (e.g., an RNA molecule, e.g., as described herein) associated with the presence of reactive impurities (e.g., aldehydes), e.g., in the lipid reagents. In some embodiments, reactive impurity (e.g., aldehyde) content and/or quantity of reactive impurity (e.g., aldehyde) species is determined by detecting one or more chemical modifications of a nucleotide or nucleoside (e.g., a ribonucleotide or ribonucleoside, e.g., comprised in or isolated from a template nucleic acid, e.g., as described herein) associated with the presence of reactive impurities (e.g., aldehydes), e.g., in the lipid reagents, e.g., as described in Example 27. In embodiments, chemical modifications of a nucleic acid molecule, nucleotide, or nucleoside are detected by determining the presence of one or more modified nucleotides or nucleosides, e.g., using LC-MS/MS analysis, e.g., as described in Example 27.

[0998] In some embodiments, a nucleic acid (e.g., RNA) described herein (e.g., a template nucleic acid or a nucleic acid encoding a GeneWriter) does not comprise an aldehyde modification, or comprises less than a preselected amount of aldehyde modifications. In some embodiments, on average, a nucleic acid has less than 50, 20, 10, 5, 2, or 1 aldehyde modifications per 1000 nucleotides, e.g., wherein a single cross-linking of two nucleotides is a single aldehyde modification. In some embodiments, the aldehyde modification is an RNA adduct (e.g., a lipid-RNA adduct). In some embodiments, the aldehyde-modified nucleotide is cross-linking between bases. In some embodiments, a nucleic acid (e.g., RNA) described herein comprises less than 50, 20, 10, 5, 2, or 1 cross-links between nucleotide.

### Retargeting

[0999] Retargeting (e.g., of a Gene Writer polypeptide or nucleic acid molecule, or of a system as described herein) may comprise directing the polypeptide to bind at the target site. In some embodiments, the recombinase domain of the polypeptide is also modified as described.

### Gene Writer Polypeptide Determinants

[1000] In some embodiments, a Gene Writer polypeptide comprises a modification to a DNA-binding domain, e.g., relative to the wild-type polypeptide. In some embodiments, the DNA-binding domain comprises an addition, deletion, replacement, or modification to the amino acid sequence of the original DNA-binding domain. In some embodiments, the DNA-binding domain is modified to include a heterologous functional domain that binds specifically to a target nucleic acid (e.g., DNA) sequence of interest. In some embodiments, the functional domain replaces at least a portion (e.g., the entirety of) the prior DNA-binding domain of the polypeptide. In some embodiments, the functional domain comprises a zinc finger (e.g., a zinc finger that specifically binds to the target nucleic acid (e.g., DNA) sequence of interest. In some embodiments, the functional domain comprises a Cas domain (e.g., a Cas domain that specifically binds to the target nucleic acid (e.g., DNA) sequence of interest. In embodiments, the Cas domain comprises a Cas9 or a mutant or variant thereof (e.g., as described herein). In embodiments, the Cas domain is associated with a guide RNA (gRNA), e.g., as described herein. In embodiments, the Cas domain is directed to a target nucleic acid (e.g., DNA) sequence of interest by the gRNA. In embodiments, the Cas domain is encoded in the same nucleic acid (e.g., RNA) molecule as the gRNA. In embodiments, the Cas domain is encoded in a different nucleic acid (e.g., RNA) molecule from the gRNA.

[1001] All publications, patent applications, patents, and other publications and references (e.g., sequence database reference numbers) cited herein are incorporated by reference in their entirety. For example, all GenBank, Unigene, and Entrez sequences referred to herein, e.g., in any Table herein, are incorporated by reference. Unless otherwise specified, the sequence accession numbers specified herein, including in any Table herein, refer to the database entries current as of May 26, 2021. When one gene or protein references a plurality of sequence accession numbers, all of the sequence variants are encompassed.

### EXAMPLES

[1002] The invention is further illustrated by the following examples. The examples are provided for illustrative purposes only and are not to be construed as limiting the scope or content of the invention in any way.

### Example 1: Delivery of a Gene Writer™ System to Mammalian Cells

[1003] This example describes a Gene Writer™ genome editing system delivered to a mammalian cell for site-specific insertion of exogenous DNA into a mammalian cell genome.

[1004] In this example, the polypeptide component of the Gene Writer™ system is a recombinase protein, e.g., a recombinase protein comprising an amino acid sequence of any of SEQ ID NOs: 1-12,677 (e.g., SEQ ID NOs: 1-11,432), and the template DNA component is a plasmid DNA that comprises a target recombination site, e.g., a recognition sequence occurring within a nucleotide sequence of the LeftRegion or RightRegion, e.g., a LeftRegion or RightRegion comprising a sequence of any of SEQ ID NOs: 13,001-25,677 (e.g., SEQ ID NOs: 13,001-24,432) or SEQ ID NOs: 26,001-38,677 (e.g., SEQ ID NOs: 26,001-37,432), respectively.

[1005] HEK293T cells are transfected with the following test agents:
[1006] 1. Scrambled DNA control
[1007] 2. DNA coding for the polypeptide described above
[1008] 3. Template DNA described above
[1009] 4. Combination of 2 and 3

[1010] After transfection, HEK293T cells are cultured for at least 4 days and then assayed for site-specific genome editing. Genomic DNA is isolated from each group of HEK293 cells. PCR is conducted with primers that flank the appropriate sequence or genomic locus. The PCR product is run on an agarose gel to measure the length of the amplified DNA.

[1011] A PCR product of the expected length, indicative of a successful Gene Writing™ genome editing event that inserts the DNA plasmid template into the target genome, is observed only in cells that were transfected with the complete Gene Writer™ system of group 4 above.

### Example 2: Targeted Delivery of a Gene Expression Unit into Mammalian Cells Using a Gene Writer™ System

[1012] This example describes the making and using of a Gene Writer genome editor to insert a heterologous gene expression unit into the mammalian genome.

[1013] In this example, a recombinase protein, e.g., a recombinase protein comprising an amino acid sequence of any of SEQ ID NOs: 1-12,677 (e.g., SEQ ID NOs: 1-11,432). The recombinase protein targets an appropriate genomic copy of a recognition sequence of the recombinase polypeptide for DNA integration. The template DNA component is a plasmid DNA that comprises a target recombination site (a recognition sequence occurring within a nucleotide sequence in the LeftRegion or RightRegion, e.g., a LeftRegion or RightRegion comprising a sequence of any of SEQ ID NOs: 13,001-25,677 (e.g., SEQ ID NOs: 13,001-24,432) or SEQ ID NOs: 26,001-38,677 (e.g., SEQ ID NOs: 26,001-37,432), respectively) and gene expression unit. A gene expression unit comprises at least one regulatory sequence operably linked to at least one coding sequence. In this example, the regulatory sequences include the CMV promoter and enhancer, an enhanced translation element, and a WPRE. The coding sequence is the GFP open reading frame.

[1014] HEK293 cells are transfected with the following test agents:
[1015] 1. Scrambled DNA control
[1016] 2. DNA coding for the polypeptide described above
[1017] 3. Template DNA described above
[1018] 4. Combination of 2 and 3

[1019] After transfection, HEK293 cells are cultured for at least 4 days and assayed for site-specific Gene Writing genome editing. Genomic DNA is isolated from the HEK293 cells and PCR is conducted with primers that flank the target integration site in the genome. The PCR product is run on an agarose gel to measure the length of DNA. A PCR product of the expected length, indicative of a successful Gene Writing™ genome editing event, is detected in cells transfected with the test agent of group 4 (complete Gene Writer™ system).

[1020] The transfected cells are cultured for a further 10 days, and after multiple cell culture passages are assayed for GFP expression via flow cytometry. The percent of cells that are GFP positive from each cell population are calculated. GFP positive cells are detected in the population of HEK293 cells that were transfected with group 4 test agent, demonstrating that a gene expression unit added into the mammalian cell genome via Gene Writing genome editing is expressed.

### Example 3: Targeted Delivery of a Splice Acceptor Unit into Mammalian Cells Using a Gene Writer™ System

[1021] This example describes the making and use of a Gene Writing genome editing system to add a heterologous sequence into an intronic region to act as a splice acceptor for an upstream exon. Splicing into the first intron a new exon containing a splice acceptor site at the 5′ end and a polyA tail at the 3′ end will result in a mature mRNA containing the first natural exon of the natural locus spliced to the new exon.

[1022] In this example, a recombinase protein, e.g., a recombinase protein comprising an amino acid sequence of any of SEQ ID NOs: 1-12,677 (e.g., SEQ ID NOs: 1-11,432). The recombinase protein targets a compatible recognition site in a genome, e.g., a HEK293 genome, for DNA integration. The template DNA codes for GFP with a splice acceptor site immediately 5′ to the first amino acid of mature GFP (the start codon is removed) and a 3′ polyA tail downstream of the stop codon.

[1023] HEK293 cells are transfected with the following test agents:
[1024] 1. Scrambled DNA control
[1025] 2. DNA coding for the polypeptide described above
[1026] 3. Template DNA described above
[1027] 4. Combination of 2 and 3

[1028] After transfection, HEK293 cells are cultured for at least 4 days and assayed for site-specific Gene Writing genome editing and appropriate mRNA processing. Genomic DNA is isolated from the HEK293 cells. Reverse transcription-PCR is conducted to measure the mature mRNA containing the first natural exon of the target locus and the new exon. The RT-PCR reaction is conducted with forward primers that bind to the target locus (e.g., the first natural exon of the target locus) and with reverse primers that bind to GFP. The RT-PCR product is run on an agarose gel to measure the length of DNA. A PCR product of the expected length is detected in cells transfected with the test agent of group 4, indicative of a successful Gene Writing genome editing event and a successful splice event. This result would demonstrate that a Gene Writing genome editing system can add a heterologous sequence encoding a gene into a target locus, e.g., intronic region, to act as a splice acceptor for the upstream exon.

[1029] The transfected cells are cultured for a further 10 days and, after multiple cell culture passages, are assayed for GFP expression via flow cytometry. The percent of cells that are GFP positive from each cell population are calculated. GFP positive cells are detected in the population of HEK293 cells that were transfected with group 4 test agent, demonstrating that a gene expression unit added into the mammalian cell genome via Gene Writing genome editing is expressed.

### Example 4: Specificity of Gene Writing in Mammalian Cells

[1030] This example describes a Gene Writer™ genome system delivered to a mammalian cell for site-specific insertion of exogenous DNA into a mammalian cell genome and a measurement of the specificity of the site-specific insertion.

[1031] In this example, Gene Writing is conducted in HEK293T cells as described in any of the preceding Examples. After transfection, HEK293T cells are cultured for at least 4 days and then assayed for site-specific genome editing. Linear amplification PCR is conducted as described in Schmidt et al. Nature Methods 4, 1051-1057 (2007) using a forward primer specific to the template DNA that will amplify adjacent genomic DNA. Amplified PCR products are then sequenced using next generation sequencing technology on a MiSeq instrument. The MiSeq reads are mapped to the HEK293T genome to identify integration sites in the genome.

[1032] The percent of LAM-PCR sequencing reads that map to the target genomic site is the specificity of the Gene Writer.

[1033] The number of total genomic sites that LAM-PCR sequencing reads map to is the number of total integration sites.

### Example 5: Efficiency of Gene Writing in Mammalian Cells

[1034] This example describes Gene Writer™ genome system delivered to a mammalian cell for site-specific insertion of exogenous DNA into a mammalian cell genome, and a measurement of the efficiency of Gene Writing.

[1035] In this example, Gene Writing is conducted in HEK293T cells as described in any of the preceding Examples. After transfection, HEK293T cells are cultured for at least 4 days and then assayed for site-specific genome editing. Digital droplet PCR is conducted as described in Lin et al., Human Gene Therapy Methods 27(5), 197-208, 2016. A forward primer binds to the template DNA and a reverse primer binds on one side of the appropriate genomic integration site, thus a PCR amplification is only expected upon integration of target DNA. A probe to the target site containing a FAM fluorophore and is used to measure the number of copies of the target DNA in the genome. Primers and HEX-fluorophore probe specific to a housekeeping gene (e.g. RPP30) are used to measure the copies of genomic DNA per droplet.

[1036] The copy number of target DNA per droplet normalized to the copy number of house keeping DNA per droplet is the efficiency of the Gene Writer.

### Example 6: Determination of Copy Number of a Recombinase in a Cell

[1037] The following example describes the absolute quantification of a recombinase on a per cell basis. This measurement is performed using the AQUA mass spectrometry based methods, e.g., as accessible at the following uniform resource locator (URL):https://www.sciencedirect.com/science/article/pii/S1046202304002087? via %3Dihub

[1038] Following delivery of the recombinase and DNA template to the cells, the recombination is allowed to proceed for 24 hours after which the cells are quantified and then quantified by this MS method. This method involves two stages.

[1039] In the first stage, the amino acid sequence of the recombinase is examined, and a representative tryptic peptide is selected for analysis. An AQUA peptide is then synthesized with an amino acid sequence that exactly mimics the corresponding native peptide produced during proteolysis. However, stable isotopes are incorporated at one residue to allow the mass spectrometer to differentiate between the analyte and internal standard. The synthetic peptide and the native peptide share the same physicochemical properties including chromatographic co-elution, ionization efficiency, and relative distributions of fragment ions, but are differentially detected in a mass spectrometer due to their mass difference. The synthetic peptide is next analyzed by LC-MS/MS techniques to confirm the retention time of the peptide, determine fragment ion intensities, and select an ion for SRM analysis. In such an SRM experiment, a triple quadrupole mass spectrometer is directed to select the expected precursor ion in the first scanning quadrupole, or Q1. Only ions with this one mass-to-charge (m/z) ratio are directed into the collision cell (Q2) to be fragmented. The resulting product ions are passed to the third quadrupole (Q3), where the m/z ratio for single fragment ion is monitored across a narrow m/z window.

[1040] The second stage involves quantification of the recombinase from cell or tissue lysates. A quantified number of cells or mass of tissue is used to initiate the reaction and is used to normalize the quantification to a per cell basis. Cell lysates are separated prior to proteolysis to increase the dynamic range of the assay via SDS-PAGE, followed by excision of the region of the gel where the recombinase migrates. In-gel digestion is performed to obtain native tryptic peptides. In-gel digestion is performed in the presence of the AQUA peptide, which is added to the gel pieces during the digestion process. Following proteolysis, the complex peptide mixture, containing both heavy and light peptides, is analyzed in an LC-SRM experiment using parameters determined during the first stage.

[1041] The results of the mass spectrometry-based quantification is converted to a number of proteins loaded to determine the number of recombinases per cell.

### Example 7: Copy Number of DNA Inside Cell

### Q-FISH

[1042] The following example describes the quantification of delivered DNA template on a per cell basis. In this example the DNA that the recombinase is integrating contains a DNA-probe binding site. Following delivery of the recombinase and DNA template to the cells, the recombination is allowed to proceed for 24 hours, after which the cells are quantified and are prepared for quantitative fluorescence in situ hybridization (Q-FISH). Q-FISH is conducted using FISH Tag DNA Orange Kit, with Alex Fluor 555 dye (ThermoFisher catalog number F32948). Briefly, a DNA probe that binds to the DNA-probe binding site on the DNA template is generated through a procedure of nick translation, dye labeling, and purification as described in the Kit manual. The cells are then labeled with the DNA probe as described in the Kit manual. The cells are imaged on a Zeiss LSM 710 confocal microscope with a 63× oil immersion objective while maintained at 37° C. and 5% CO2. The DNA probe is subjected to 555 nm laser excitation to stimulate Alexa Flour. A MATLAB script is written to measure the Alex Fluor intensity relative to a standard generated with known quantities of DNA. Using this method, the amount of template DNA delivered to a cell is determined.

qPCR

[1043] The following example describes the quantification of delivered DNA template on a per cell basis. In this example the DNA that the recombinase is integrating contains a DNA-probe binding site. Following delivery of the recombinase and DNA template to the cells, the recombination is allowed to proceed for 24 hours after which the cells are quantified, and cells are prepared for quantitative PCR (qPCR). qPCR is conducted using standard kits for this protocol, such as the ThermoFisher TaqMan product (https://www.thermofisher.com/us/en/home/life-science/pcr/real-time-pcr/real-time-pcr-assays-search.html). Briefly, primers are designed that specifically amplify a region of the delivered template DNA as well as probes for the specific amplicon. A standard curve is generated by using a serial dilution of quantified pure template DNA to correlate threshold Ct numbers to number of DNA templates. The DNA is then extracted from the cells being analyzed and input into the qPCR reaction along with all additional components per the manufacturer's directions. The samples are than analyzed on an appropriate qPCR machine to determine the Ct number, which is then mapped to the standard curve for absolute quantification. Using this method, the amount of template DNA delivered to a cell is determined.

### Example 8: Intracellular Ratio of DNA:Recombinase

[1044] The following example describes the determination of the ratio of recombinase protein to template DNA cell in the target cells. Following delivery of the recombinase and DNA template to the cells, the recombination is allowed to proceed for 24 hours after which the cells are quantified, and cells are prepared quantification of the recombinase and of the template DNA as outlined in the above examples. These two values (recombinase per cell and template DNA per cell) are then divided (recombinase per cell/template DNA per cell) to determine the bulk average ratio of these quantities. Using this method, the ratio of recombinase to template DNA delivered to a cell is determined.

### Example 9: Activity in Presence of DNA-Damage Response Inhibiting Agents—Activity in Presence of NHEJ Inhibitor

[1045] The following example describes the assaying of activity of the recombinase protein in the presence of inhibitors of non-homologous end joining to highlight the lack of dependence on the expression of the proteins involved in these pathways for activity of the recombinase. Briefly, the assay outlined to determine efficiency of recombinase activity outlined in the example above is performed. However, in this case two separate experiments are performed.

[1046] In experiment 1, 24 hours after delivery of the recombinase and Template DNA, 1 M of the NHEJ inhibitor Scr7 (https://www.sigmaaldrich.com/catalog/product/sigma/sml1546?lang=en&region=US) is added to the cell growth media to inhibit this pathway. All other elements of the protocol are identical.

[1047] In experiment 2, the cells are manipulated identically as in experiment 1 but no inhibitor is added to the media. Both experiments are analyzed for efficiency per the example above and the % inhibited activity relative to uninhibited activity is determined.

### Example 10: Activity in Presence of DNA-Damage Response Inhibiting Agents—Activity in Presence of HDR Inhibitor

[1048] The following example describes the assaying of activity of the recombinase protein in the presence of inhibitors of homologous recombination to highlight the lack of dependence on the expression of the proteins involved in these pathways for activity of the recombinase. Briefly, the assay outlined to determine efficiency of recombinase activity outlined in the example above is performed. However, in this case, two separate experiments are performed.

[1049] In experiment 1: 24 hours after delivery of the recombinase and Template DNA, 1 M of the HR inhibitor B02 (https://www.selleckchem.com/products/b02.html) is added to the cell growth media to inhibit this pathway. All other elements of the protocol are identical.

[1050] In experiment 2: the cells are manipulated identically as in experiment 1 but no inhibitor is added to the media. Both experiments are analyzed for efficiency per the example above and the % inhibited activity relative to uninhibited activity is determined.

### Example 11: Percentage of Nuclear Versus Cytoplasmic Recombinase

[1051] The following example describes the determination of the ratio of recombinase protein in the nucleus vs the cytoplasm of target cells. 12 hours following delivery of the recombinase and DNA template to the cells as described herein, the cells are quantified and prepared for analysis. The cells are split into nuclear and cytoplasmic fractions using the following standard kits, following manufacturer directions: NE-PER Nuclear and Cytoplasmic Extraction by ThermoFisher. Both the cytoplasmic and nuclear fractions are kept and then put through the mass spec based recombinase quantification assay outlined in the example above. Using this method, the ratio of nuclear recombinase to cytoplasmic recombinase in the cells is determined.

### Example 12: Delivery to Plant Cells

[1052] This example illustrates a method of delivering at least one recombinase to a plant cell wherein the plant cell is located in a plant or plant part. More specifically, this example describes delivery of a Gene Writing recombinase and its template DNA to a non-epidermal plant cell (i.e., a cell in a soybean embryo), in order to edit an endogenous plant gene (i.e., phytoene desaturase, PDS) in germline cells of excised soybean embryos. This example describes delivery of polynucleotides encoding the delivered transgene through multiple barriers (e.g., multiple cell layers, seed coat, cell walls, plasma membrane) directly into soybean germline cells, resulting in a heritable alteration of the target nucleotide sequence, PDS. The methods described do not employ the common techniques of bacterially mediated transformation (e.g., by Agrobacterium sp.) or biolistics.

[1053] Plasmids are designed for delivery of recombinase and a single template DNA targeting the endogenous phytoene desaturase (PDS) in soybean (Glycine max). It will be apparent to one skilled in the art that analogous plasmids are easily designed to encode other recombinases and template DNA sequences, optionally including different elements (e. g., different promoters, terminators, selectable or detectable markers, a cell-penetrating peptide, a nuclear localization signal, a chloroplast transit peptide, or a mitochondrial targeting peptide, etc.), and used in a similar manner.

[1054] In a first series of experiments, these vectors are delivered to non-epidermal plant cells in soybean embryos using combinations of delivery agents and electroporation. Mature, dry soybean seeds (cv. Williams 82) are surface-sterilized as follows. Dry soybean seeds are held for 4 hours in an enclosed chamber holding a beaker containing 100 milliliters 5% sodium hypochlorite solution to which 4 milliliters hydrochloric acid are freshly added. Seeds remain desiccated after this sterilization treatment. The sterilized seeds are split into 2 halves by manual application of a razor blade and the embryos are manually separated from the cotyledons. Each test or control treatment is carried out on 20 excised embryos. The following series of experiments is then performed.

Experiment 1: A delivery solution containing the vectors (100 nanograms per microliter of each plasmid) in 0.01% CTAB (cetyltrimethylammonium bromide, a quaternary ammonium surfactant) in sterile-filtered milliQ water is prepared. Each solution is chilled to 4 degrees Celsius and 500 microliters are added directly to the embryos, which are then immediately placed on ice in a vacuum chamber and subjected to a negative pressure (2×10″3 millibar) treatment for 15 minutes. Following the chilling/negative pressure treatments, the embryos are treated with electric current using a BTX-Harvard ECM-830 electroporation device set with the following parameters: 50V, 25 millisecond pulse length, 75 millisecond pulse interval for 99 pulses.
Experiment 2: conditions identical to Experiment 1, except that the initial contacting with delivery solution and negative pressure treatments are carried out at room temperature.
Experiment 3: conditions identical to Experiment 1, except that the delivery solution is prepared without CTAB but includes 0.1% Silwet L-77™ (CAS Number 27306-78-1, available from Momentive Performance Materials, Albany, N.Y). Half (10 of 20) of the embryos receiving each treatment undergo electroporation, and the other half of the embryos do not.
Experiment 4: conditions identical to Experiment 3, except that several delivery solutions are prepared, where each further includes 20 micrograms/milliliter of one single-walled carbon nanotube preparation selected from those with catalogue numbers 704113, 750530, 724777, and 805033, all obtainable from Sigma-Aldrich, St. Louis, MO. Half (10 of 20) of the embryos receiving each treatment undergo electroporation, and the other half of the embryos do not.
Experiment 5: conditions identical to Experiment 3, except that the delivery solution further includes 20 micrograms/milliliter of triethoxylpropylaminosilane-functionalized silica nanoparticles (catalogue number 791334, Sigma-Aldrich, St. Louis, MO. Half (10 of 20) of the embryos receiving each treatment undergo electroporation, and the other half of the embryos do not.
Experiment 6: conditions identical to Experiment 3, except that the delivery solution further includes 9 micrograms/milliliter branched polyethylenimine, molecular weight −25,000 (CAS Number 9002-98-6, catalogue number 408727, Sigma-Aldrich, St. Louis, MO) or 9 micro grams/milliliter branched polyethylenimine, molecular weight −800 (CAS Number 25987-06-8, catalogue number 408719, Sigma-Aldrich, St. Louis, MO). Half (10 of 20) of the embryos receiving each treatment undergo electroporation, and the other half of the embryos do not.
Experiment 7: conditions identical to Experiment 3, except that the delivery solution further includes 20% v/v dimethylsulf oxide (DMSO, catalogue number D4540, Sigma-Aldrich, St. Louis, MO). Half (10 of 20) of the embryos receiving each treatment undergo electroporation, and the other half of the embryos do not.
Experiment 8: conditions identical to Experiment 3, except that the delivery solution further contains 50 micromolar nono-arginine (RRRRRRRRR). Half (10 of 20) of the embryos receiving each treatment undergo electroporation, and the other half of the embryos do not.
Experiment 9: conditions identical to Experiment 3, except that following the vacuum treatment, the embryos and treatment solutions are transferred to microcentrifuge tubes and centrifuged 2, 5, 10, or 20 minutes at 4000×g. Half (10 of 20) of the embryos receiving each treatment undergo electroporation, and the other half of the embryos do not.
Experiment 10: conditions identical to Experiment 3, except that following the vacuum treatment, the embryos and treatment solutions are transferred to microcentrifuge tubes and centrifuged 2, 5, 10, or 20 minutes at 4000×g.
Experiment 11: conditions identical to Experiment 4, except that following the vacuum treatment, the embryos and treatment solutions are transferred to microcentrifuge tubes and centrifuged 2, 5, 10, or 20 minutes at 4000×g.
Experiment 12: conditions identical to Experiment 5, except that following the vacuum treatment, the embryos and treatment solutions are transferred to microcentrifuge tubes and centrifuged 2, 5, 10, or 20 minutes at 4000×g.

[1055] After the delivery treatment, each treatment group of embryos is washed 5 times with sterile water, transferred to a petri dish containing 12 MS solid medium (2.165 g Murashige and Skoog medium salts, catalogue number MSP0501, Caisson Laboratories, Smithfield, UT), 10 grams sucrose, and 8 grams Bacto agar, made up to 1.00 liter in distilled water), and placed in a tissue culture incubator set to 25 degrees Celsius. After the embryos have elongated, developed roots and true leaves have emerged, the seedlings are transferred to soil and grown out. Modification of all endogenous PDS alleles results in a plant unable to produce chlorophyll and having a visible bleached phenotype. Modification of a fraction of all endogenous PDS alleles results in plants still able to produce chlorophyll; plants that are heterozygous for an altered PDS gene will are grown out to seed and the efficiency of heritable genome modification is determined by molecular analysis of the progeny seeds.

### Example 13: Recombinase-Mediated Plasmid Integration in Human Cells

[1056] This example describes the use of a serine recombinase-based Gene Writer system for the targeted integration of a template DNA into the human genome. More specifically, this example describes the transfection of a two plasmid system into HEK293T cells for in vitro Gene Writing, e.g., as a means of evaluating a new Gene Writing polypeptide for integration activity in human cells.

[1057] Briefly, a two plasmid system was designed, comprising: 1) an integrase expression plasmid, e.g., a plasmid encoding a human codon optimized serine integrase, e.g., a serine integrase comprising an amino acid sequence of any of SEQ ID NOs: 1-12,677 (e.g., SEQ ID NOs: 1-11,432), driven by the mammalian CMV promoter, and 2) a template plasmid, e.g., a plasmid comprising (i) a sequence comprising the recognition site of a serine integrase, e.g., a ˜500 bp sequence from the endogenous flanking region of a serine integrase, e.g., a sequence of any of SEQ ID NOs: 13,001-25,677 (e.g., SEQ ID NOs: 13,001-24,432) or SEQ ID NOs: 26,001-38,677 (e.g., SEQ ID NOs: 26,001-37,432); (ii) a promoter for expression in mammalian cells, e.g., a CMV promoter; (iii) a reporter gene whose expression is controlled by (ii), e.g., an EGFP gene; (iv) a self-cleaving polypeptide, e.g., a T2A peptide; (v) a marker enabling selection in mammalian cells, e.g., a puromycin resistance gene; and (vi) a termination signal, e.g., a poly A tail. Without wishing to be bound by theory, some embodiments of the template plasmid may comprise elements occurring in the orientation (i), (ii), (iii), (iv), (v).

[1058] To deliver the Gene Writer system into HEK293T cells, ˜120,000 cells were transfected with either: (1) 50 ng template plasmid and 225 ng transfection balance plasmid (template only control); or (2) 50 ng template plasmid, 25 ng integrase expression plasmid, and 225 ng transfection balance plasmid, using TransIT-293 Reagent (Mirusbio) according to manufacturer's instructions. Three days post-transfection, the efficiency of delivery was measured using flow cytometry to determine the percentage of GFP positive cells. Cells were split between days 3 and 13 of the time course experiments. Between day 13 and day 27, transfected cells that had been split were maintained in one of two conditions: 1) a subset of the cells were maintained in normal cell culture medium and flow cytometry was performed every 3˜4 days to determine the GFP expression from successfully integrated template; 2) a subset of the cells were maintained in medium supplemented with 1 g/mL puromycin, where the puromycin resistant cells were harvested after ˜2 weeks of selection. In some instances, a Gene Writer system that demonstrated activity in human cells resulted in detectable reporter expression in at least 3% of cells at day 21, e.g., detectable expression of GFP in at least 3% of cells as determined by flow cytometry. In some instances, a Gene Writer system that demonstrated activity in human cells resulted in detectable reporter expression in a percentage of cells that was greater than demonstrated with a template only control, e.g., higher as compared to transfection condition (1), e.g., at least 2, 3, 4, 5, 6, 7, 8, 9, 10, 20, 30, 40, 50, 60, 70, 80, 90, 100, 200, 300, 400, 500, 600, 700, 800, 900, or 1000-fold higher compared to a template only control.

[1059] To determine the integration site used by an active Gene Writer, the parallel cultures being maintained under puromycin selection were harvested for genomic isolation and analyzed by a unidirectional sequencing assay, as described herein in Example 18.

[1060] As shown in Table 22 below, Gene Writer polypeptides, e.g., serine recombinases comprising an amino acid sequence of any of (e.g., SEQ ID NOs: 1-11,432), were assayed for integration of a template DNA comprising a GFP expression cassette and a recognition sequence, e.g., a recognition sequence of SEQ ID NOs: 13,001-25,677 (e.g., SEQ ID NOs: 13,001-24,432) or SEQ ID NOs: 26,001-38,677 (e.g., SEQ ID NOs: 26,001-37,432), in human cells (see Example 13).

TABLE 22
Screening data for recombinase-mediated integration in human cells

| Integrase | | | |
|---|---|---|---|
| A No. | FL58 Accession | Int ID | % GFP+ |
| 25 | NC_001978.3::NP_047974.1 | PhiC31 | 0.915333333 |
| 102 | KY030782.1::APD21144.1 | Int1 | 0 |
| 128 | KP296792.1::AJK27795.1 | Int2 | 3.35 |
| 1200 | YP_459991.1 | Int3 | 7.19 |
| 162 | MF595878.1::ATB52753.1 | Int4 | 0 |
| 1201 | AAB51419.1 | Int5 | 0 |
| 1202 | AAF35174.1 | Int6 | 0.18 |
| 1203 | YP_006082695.1 | Int7 | 0.048 |
| 118 | AY657002.1::AAT72400.1 | Int8 | 0 |
| 511 | MK448811.1::QBX21446.1 | Int9 | 0 |
| 5 | NC_029073.1::YP_009223763.1 | Int10 | 0 |
| 336 | KP836355.1::AJW76937.1 | Int11 | 0 |
| 161 | NC_030947.1::YP_009276898.1 | Int12 | 0 |
| 146 | MG711462.1::AUV56418.1 | Int13 | 0 |
| 330 | KU230356.1::ALY07619.1 | Int14 | 0.38 |
| 1204 | YP_005549228.1 | Int15 | 0 |
| 1205 | YP_189066.1 | Int16 | 0 |
| 1206 | YP_005679179.1 | Int17 | 0.123 |
| 103 | KC595514.1::AGR47239.1 | Int18 | 1.966755 |
| 186 | KM983329.1::AJA42614.1 | Int19 | 0 |
| 6 | NC_018836.1::YP_006906230.1 | Int20 | 0 |
| 4 | NC_028746.1::YP_009193857.1 | Int21 | 0.22 |
| 1207 | YP_002804732.1 | Int22 | 0.16 |
| 19 | NC_021325.1::YP_008058952.1 | Int23 | 0.04 |
| 320 | MH552499.1::AXF52129.1 | Int24 | 0.09 |
| 22 | MK448667.1::QBX13795.1 | Int25 | 0 |
| 1208 | YP_001089468.1 | Int26 | 0 |
| 1209 | YP_001886479.1 | Int27 | 0 |
| 35 | KX522565.1::AOA49517.1 | Int28 | 0 |
| 477 | NC_003216.1::NP_463492.1 | Int29 | 0.91 |
| 436 | NC_025453.1::YP_009103095.1 | Int30 | 10.07333333 |
| 386 | MK448715.1::QBX16366.1 | Int31 | 0 |
| 46 | KM983332.1::AJA42824.1 | Int32 | 0.31 |
| 1210 | BAA12435.1 | Int33 | 0 |
| 462 | JX507079.1::AFU62848.1 | Int34 | 0 |
| 1211 | YP_005759947.1 | Int35 | 0 |
| 458 | NC_019914.1::YP_007236569.1 | Int36 | 0.08 |
| 1212 | YP_004586821.1 | Int37 | 0 |
| 408 | NC_029069.1::YP_009223181.1 | Int38 | 6.3025 |
| 375 | MG969427.1::AVO22625.1 | Int39 | 0 |
| 1213 | YP_353073.2 | Int40 | 0 |
| 1214 | BAG46462.1 | Int41 | 0.05 |
| 434 | MK279899.1::AZS11727.1 | Int42 | 0.08 |
| 1215 | YP_006906969.1 | Int43 | 0.31 |
| 31 | KY676784.1::ARB11450.1 | Int44 | 0 |
| 43 | MG593803.1::AUG87323.1 | Int45 | 0.62 |
| 63 | MK937595.1::QDH92149.1 | Int46 | 0.61 |
| 147 | MH271298.1::AWY04899.1 | Int47 | 0 |
| 418 | MG593801.1::AUG87183.1 | Int48 | 0 |
| 142 | MK450421.1::QAX93309.1 | Int49 | 0 |
| 111 | NC_004682.2::NP_817623.1 | Int50 | 0 |
| 159 | KX641260.1::AOT24690.1 | Int51 | 2.005 |
| 1216 | YP_009031225.1 | Int52 | 0.111 |
| 202 | JF937108.1::AEK10337.2 | Int53 | 0 |
| 113 | MG944221.1::AVJ51390.1 | Int54 | 0.009 |
| 54 | KT124228.1::AKY03507.1 | Int55 | 0 |
| 96 | KC700556.1::AGM12072.1 | Int56 | 0.03 |
| 291 | NC_028960.2::YP_009214300.1 | Int57 | 0 |
| 295 | NC_022984.1::YP_008859055.1 | Int58 | 0 |
| 402 | MH834610.1::AYN57772.1 | Int59 | 0.04 |
| 27 | NC_004664.2::NP_813744.2 | Int60 | 0.17 |
| 23 | NC_018853.1::YP_006907228.1 | Int61 | 0 |
| 32 | MK686068.1::QBZ73369.1 | Int62 | 0.94 |
| 337 | MH155870.1::AWN05230.1 | Int63 | 0.11 |
| 67 | NC_031078.1::YP_009287835.1 | Int64 | 0 |
| 62 | NC_021560.1::YP_008130182.1 | Int65 | 0.29 |
| 491 | KT152029.1::AKY03358.1 | Int66 | 0.15 |
| 390 | MK392363.1::QAY15711.1 | Int67 | 0.24 |
| 304 | MH271308.1::AWY05745.1 | Int68 | 0 |
| 1217 | SGE40566.1 | Int69 | 0.05 |
| 335 | MF319184.1::ASR75970.1 | Int70 | 0.326 |
| 353 | JN243855.1::AEL19745.1 | Int71 | 0.61 |
| 28 | KT021004.1::ALA06428.1 | Int72 | 0 |
| 1218 | CBG73463.1 | Int73 | 0.038 |
| 435 | JN116825.1::AEV52018.1 | Int74 | 0.131 |
| 448 | MN096365.1::QDK02252.1 | Int75 | 0 |
| 331 | NC_007814.1::YP_512335.1 | Int76 | 2.53 |
| 332 | DQ221100.2::ABB55416.1 | Int77 | 1.71 |
| 37 | KY963371.1::ARW58518.1 | Int78 | 12.66 |
| 360 | KY963370.1::ARW58461.1 | Int79 | 9.36 |
| 338 | MK085976.1::AZF88373.1 | Int80 | 1.82 |
| 1219 | YP_001376196.1 | Int94 | 0.23 |
| 460 | JX887877.1::AFV15398.1 | Int95 | 4.89 |
| 474 | KF296717.1::AGV99364.1 | Int96 | 0.14 |
| 380 | MG727702.1::AUS03929.1 | Int97 | 0.93 |
| 1220 | AAD26564.1 | Int98 | 0 |
| 479 | KX190835.1::ANT40095.1 | Int99 | 0 |
| 461 | MF417928.1::ASN71601.1 | Int100 | 0.32 |
| 475 | MF417933.1::ASN71805.1 | Int101 | 21.03 |
| 478 | MH341451.1::AWN07855.1 | Int102 | 0.24 |
| 1221 | CAC97653.1 | Int103 | 0.22 |
| 1222 | CAD10281.2 | Int104 | 0.58 |
| 477 | NC_003216.1::NP_463492.1 | Int105 | 0.77 |
| 1223 | YP_004301563.1 | Int106 | 1.77 |
| 1224 | YP_006538656.1 | Int107 | 0 |
| 1225 | YP_006685721.1 | Int108 | 0 |
| 982 | NZ_CP030772.1::WP_138968117.1 | Int109 | 0.13 |
| 983 | NZ_CP011275.1::WP_082859072.1 | Int110 | 0.52 |
| 984 | NC_019309.1::YP_006962361.1 | Int111 | 0.17 |
| 985 | NZ_CP029174.1::WP_108943154.1 | Int112 | 0.57 |
| 986 | NZ_CP032696.1::WP_120708991.1 | Int113 | 0.2 |
| 987 | NC_011758.1::WP_012606065.1 | Int114 | 0.08 |
| 989 | NZ_CP014508.1::WP_082779173.1 | Int115 | 0.05 |
| 990 | NZ_AP018205.1::WP_017291662.1 | Int116 | 0.27 |
| 995 | NZ_CP024313.1::WP_104825745.1 | Int117 | 0.09 |
| 1005 | NC_013856.1::WP_012977106.1 | Int118 | 0.44 |
| 1012 | NZ_CP032692.1::WP_120663868.1 | Int119 | 0.17 |
| 1015 | NZ_AP014686.1::WP_049810452.1 | Int120 | 0 |
| 1037 | NZ_CP032687.1::WP_120667728.1 | Int121 | 0.12 |
| 1042 | NZ_CP019604.1::WP_066842370.1 | Int122 | 0.43 |
| 1072 | NC_021908.1::WP_020920456.1 | Int123 | 0 |
| 1081 | NC_015597.1::WP_013851017.1 | Int124 | 0 |
| 1085 | NC_014825.1::WP_013483873.1 | Int125 | 0.06 |
| 1091 | NZ_CP018901.1::WP_057039620.1 | Int126 | 0.26 |
| 1095 | NZ_CP009453.1::WP_053556490.1 | Int127 | 0.03 |
| 1097 | NZ_CP023038.1::WP_010511773.1 | Int128 | 0.06 |
| 1101 | NC_014824.1::WP_013483611.1 | Int129 | 0 |
| 1102 | NZ_CP014527.1::WP_066137218.1 | Int130 | 0 |
| 1105 | NZ_CP017949.1::WP_106721837.1 | Int131 | 0.13 |
| 1106 | NZ_CP015292.1::WP_011331383.1 | Int132 | 0.48 |
| 1109 | NC_013164.1::WP_012797137.1 | Int133 | 0.34 |
| 1112 | NZ_CM008899.1::WP_058686676.1 | Int134 | 0.05 |
| 1113 | LN997845.1::CUW33404.1 | Int135 | 0 |
| 1114 | NZ_CP017949.1::WP_106721836.1 | Int136 | 0 |
| 1115 | NZ_CP011583.1::WP_031623921.1 | Int137 | 0 |
| 1116 | NZ_CP035407.1::WP_129137749.1 | Int138 | 27.56 |
| 1120 | NZ_CP046245.1::WP_156276654.1 | Int139 | 0 |
| 1124 | NZ_AP018296.1::WP_096695372.1 | Int140 | 0.07 |
| 1127 | NC_014825.1::WP_013483758.1 | Int141 | 0.1 |
| 1128 | NZ_CP040905.1::WP_139896886.1 | Int142 | 0.07 |
| 1131 | NZ_CP021678.1::WP_080626804.1 | Int143 | 0.03 |
| 1132 | NZ_CP013238.1::WP_045144988.1 | Int144 | 0.5 |
| 1135 | NC_004954.1::NP_862380.1 | Int145 | 0 |
| 1138 | NZ_CP020539.1::WP_081570537.1 | Int146 | 0.3 |
| 1140 | NZ_CP014289.1::WP_061885392.1 | Int147 | 0.34 |
| 1141 | NC_018688.1::WP_148283638.1 | Int148 | 0.64 |
| 1147 | NZ_CP032704.1::WP_145892019.1 | Int149 | 0 |
| 1153 | NZ_CP042515.1::WP_151523155.1 | Int150 | 0.29 |
| 1156 | NC_007411.1::WP_011316659.1 | Int151 | 0 |
| 1160 | NZ_AP014816.1::WP_066349550.1 | Int152 | 0 |
| 1163 | NZ_CP028186.1::WP_007215987.1 | Int153 | 0 |
| 1164 | NZ_CP016078.1::WP_075740684.1 | Int154 | 0 |
| 1165 | NC_018688.1::WP_000398825.1 | Int155 | 0.18 |
| 1167 | NZ_LR134433.1::WP_084758891.1 | Int156 | 0.1 |
| 1171 | NC_017791.1::WP_014686872.1 | Int157 | 0 |
| 1174 | NZ_LR594663.1::WP_162590241.1 | Int158 | 0 |
| 1175 | NZ_CP015456.1::WP_072285883.1 | Int159 | 0.11 |
| 1179 | NC_008704.1::WP_011562846.1 | Int160 | 0.07 |
| 1180 | NC_006907.1::YP_220381.1 | Int161 | 0.08 |
| 1182 | NZ_CP045481.1::WP_153030621.1 | Int162 | 0 |
| 1183 | NZ_CP014850.1::WP_033698958.1 | Int163 | 2.7 |
| 1188 | NC_018696.1::WP_085963899.1 | Int164 | 0.03 |
| 1189 | NZ_CP021746.1::WP_103654430.1 | Int165 | 0.32 |
| 1193 | NC_006362.1::WP_011212228.1 | Int166 | 0.07 |
| 1196 | NC_005016.1::NP_863503.1 | Int167 | 0 |
| 1198 | NZ_CP007723.1::WP_040145024.1 | Int168 | 0.14 |
| 129 | NC_041909.1::YP_009598586.1 | Int169 | 1.45 |
| 321 | NC_004820.1::NP_852555.1 | Int170 | 0.07 |
| 450 | FM864213.1::CAR95427.1 | Int171 | 0.16 |
| 541 | AY657002.1::AAT72399.1 | Int172 | 0.23 |
| 529 | KT336320.1::ALA07058.1 | Int173 | 0.35 |
| 34 | MF172979.1::ASD51140.1 | Int174 | 0.34 |
| 132 | MF172979.1::ASD51126.1 | Int175 | 0.16 |
| 322 | KP836356.2::AMS33992.1 | Int176 | 2.43 |
| 26 | MG711467.1::AUV56803.1 | Int177 | 0 |
| 152 | MG711466.1::AUV56714.1 | Int178 | 0.06 |
| 1226 | YP_001384783.1 | Int179 | 0 |
| 148 | KU160495.1::ALY08054.1 | Int180 | 3.49 |
| 9 | MF766046.1::ATI18835.1 | Int181 | 0.14 |
| 1227 | YP_001392519.1 | Int182 | 0.22 |
| 472 | NC_013646.1::YP_003347458.1 | Int183 | 0 |
| 51 | HQ906662.1::ADW80128.1 | Int184 | 0.05 |
| 33 | JQ680357.1::AFB75709.1 | Int185 | 1.01 |
| 1228 | BAF67264.1 | Int186 | 0 |
| 1229 | NP_470568.1 | Int187 | 0.05 |
| 52 | NC_005262.3::NP_944235.2 | Int188 | 4.42 |
| 36 | KY092483.1::APD18725.1 | Int189 | 0.06 |
| 134 | MH271320.1::AWY06686.1 | Int190 | 0.17 |
| 50 | MK450426.1::QAX94052.1 | Int191 | 11.46 |
| 165 | NC_013694.1::YP_003358736.1 | Int192 | 0.57 |
| 1230 | YP_706485.1 | Int193 | 0 |
| 97 | NC_021304.1::YP_008051452.1 | Int194 | 0.19 |
| 326 | NC_041983.1::YP_009607592.1 | Int195 | 0.1 |
| 420 | MH834619.1::AYN58532.1 | Int196 | 0.01 |
| 42 | MG593800.1::AUG87127.1 | Int197 | 0.66 |
| 29 | MK450433.1::QAX95039.1 | Int198 | 0.35 |
| 82 | MH248947.1::AWY07618.1 | Int199 | 0.17 |
| 516 | JX262376.1::AFO10918.1 | Int200 | 0.11 |
| 548 | NC_042051.1::YP_009616474.1 | Int201 | 0.11 |
| 333 | NC_041971.1::YP_009605116.1 | Int202 | 0.38 |
| 441 | MF140416.1::ASR87211.1 | Int203 | 0.19 |
| 354 | NC_028947.1::YP_009212783.1 | Int204 | 0.37 |
| 988 | NZ_CP005961.1::WP_042933187.1 | Int206 | 0.18 |
| 991 | NZ_CP030772.1::WP_138968811.1 | Int207 | 0.14 |
| 992 | NC_011987.1::WP_012653163.1 | Int208 | 0.17 |
| 993 | NZ_CP036427.1::WP_145267375.1 | Int209 | 0.06 |
| 994 | NZ_CP018231.1::WP_065283598.1 | Int210 | 0.31 |
| 996 | NZ_CP020899.1::WP_010009933.1 | Int211 | 0.12 |
| 997 | NZ_CP016290.1::WP_065284390.1 | Int212 | 0.15 |
| 998 | NZ_CP050090.1::WP_166481266.1 | Int213 | 0.27 |
| 999 | NZ_CP016619.1::WP_099510182.1 | Int214 | 0.1 |
| 1000 | NZ_AP014659.1::WP_035679705.1 | Int215 | 0.04 |
| 1001 | NC_020061.1::WP_004112891.1 | Int216 | 0.14 |
| 1002 | NZ_CP032692.1::WP_120764347.1 | Int217 | 0.1 |
| 1003 | NZ_CP016457.1::WP_069067140.1 | Int218 | 0 |
| 1004 | NZ_AP014687.1::WP_063824339.1 | Int219 | 0 |
| 1006 | NC_016588.1::WP_014189963.1 | Int220 | 0.09 |
| 1007 | NC_013860.1::WP_012978683.1 | Int221 | 0 |
| 1008 | NC_013857.1::WP_012977507.1 | Int222 | 0.17 |
| 1009 | NC_021909.1::WP_020923455.1 | Int223 | 0.14 |
| 1010 | NZ_CP018231.1::WP_072642081.1 | Int224 | 0 |
| 1011 | NZ_CP031599.1::WP_057822058.1 | Int225 | 0.15 |
| 1013 | NZ_CP020447.2::WP_080620360.1 | Int226 | 0 |
| 1014 | NZ_CP013053.1::WP_037377708.1 | Int227 | 0.17 |
| 1016 | NZ_CP012899.1::WP_157097479.1 | Int228 | 0 |
| 1017 | NZ_CP016289.1::WP_065283428.1 | Int229 | 0 |
| 1018 | NZ_CP018231.1::WP_065283441.1 | Int230 | 0.21 |
| 1019 | NZ_CP053209.2::WP_027688391.1 | Int231 | 0.16 |
| 1020 | NZ_CP025615.1::WP_102115455.1 | Int232 | 0.1 |
| 1021 | NZ_CP049159.1::WP_165098388.1 | Int233 | 0.01 |
| 1022 | NC_006824.1::WP_011254970.1 | Int234 | 0.14 |
| 1023 | NZ_HG916854.1::WP_051509115.1 | Int235 | 0.05 |
| 1024 | NC_010627.1::WP_012404129.1 | Int236 | 0.24 |
| 1025 | NZ_CP023072.1::WP_037435892.1 | Int237 | 0.05 |
| 1026 | NC_000914.2::WP_010875070.1 | Int238 | 0 |
| 1027 | NZ_CP021815.1::WP_088198182.1 | Int239 | 0 |
| 1028 | NZ_CP026529.1::WP_088199679.1 | Int240 | 0.02 |
| 1029 | NC_019847.2::WP_015241694.1 | Int241 | 0 |
| 1030 | NC_019847.2::WP_049589666.1 | Int242 | 0.04 |
| 1031 | NZ_CP013419.1::WP_059581534.1 | Int243 | 0 |
| 1032 | NC_013193.1::WP_012806738.1 | Int244 | 0.12 |
| 1033 | NZ_CP013419.1::WP_059669918.1 | Int245 | 0.11 |
| 1034 | NZ_CP026685.1::WP_104902331.1 | Int246 | 0.18 |
| 1035 | NZ_CP024793.1::WP_100897719.1 | Int247 | 0.11 |
| 1036 | NZ_CP049701.1::WP_166349160.1 | Int248 | 0.22 |
| 1038 | NZ_CP023072.1::WP_037435909.1 | Int249 | 0 |
| 1039 | NZ_CP021216.1::WP_014531100.1 | Int250 | 0 |
| 1040 | NZ_CP014311.1::WP_062175057.1 | Int251 | 0 |
| 1041 | NC_009468.1::WP_043508908.1 | Int252 | 0.05 |
| 1043 | NZ_CP038639.1::WP_135707565.1 | Int253 | 0 |
| 1044 | NZ_CP017077.1::WP_069709769.1 | Int254 | 0.06 |
| 1045 | NZ_CP016620.1::WP_099515887.1 | Int255 | 0.28 |
| 1046 | NZ_CP016619.1::WP_099513340.1 | Int256 | 0.06 |
| 1047 | NC_008308.1::YP_718035.1 | Int257 | 0.03 |
| 1048 | NZ_CP015322.1::WP_006199992.1 | Int258 | 0.33 |
| 1049 | NZ_CP026528.1::WP_158528806.1 | Int259 | 0.07 |
| 1050 | NZ_LR594691.1::WP_102905083.1 | Int260 | 0 |
| 1051 | NC_020562.1::WP_015460498.1 | Int261 | 0 |
| 1052 | NZ_CP044544.1::WP_100951630.1 | Int262 | 0.22 |
| 1053 | NC_008760.1::WP_011798428.1 | Int263 | 0.05 |
| 1054 | NZ_CP013544.1::WP_011053437.1 | Int264 | 0 |
| 1055 | NZ_CP013572.1::WP_081278377.1 | Int265 | 0 |
| 1056 | NZ_CP018231.1::WP_081374274.1 | Int266 | 0.32 |
| 1057 | NZ_CP024313.1::WP_104825738.1 | Int267 | 0.44 |
| 1058 | NC_008378.1::WP_011649403.1 | Int268 | 0.03 |
| 1059 | NZ_CP017243.1::WP_004675975.1 | Int269 | 0.17 |
| 1060 | NZ_CP021214.1::WP_017273893.1 | Int270 | 0.1 |
| 1061 | NZ_CP023072.1::WP_095689837.1 | Int271 | 0.45 |
| 1062 | NC_009508.1::WP_011950828.1 | Int272 | 0.06 |
| 1063 | NZ_CP013535.1::WP_081279173.1 | Int273 | 0.01 |
| 1064 | NZ_CP017077.1::WP_069709873.1 | Int274 | 0.11 |
| 1065 | NZ_CP017077.1::WP_083274844.1 | Int275 | 0.4 |
| 1066 | NZ_CP016619.1::WP_099513354.1 | Int276 | 0 |
| 1067 | NZ_CP030355.1::WP_082057937.1 | Int277 | 0.19 |
| 1068 | NZ_CP015745.1::WP_064334697.1 | Int278 | 0.1 |
| 1069 | NZ_CP034911.1::WP_069456400.1 | Int279 | 0.26 |
| 1070 | NZ_CP030764.1::WP_112905663.1 | Int280 | 0 |
| 1071 | NC_007762.1::WP_011427411.1 | Int281 | 0.11 |
| 1073 | NZ_CP013633.1::WP_064842796.1 | Int282 | 0 |
| 1074 | NC_004041.2::WP_011053488.1 | Int283 | 0.5 |
| 1075 | NC_008381.1::WP_011654186.1 | Int284 | 0.14 |
| 1076 | NZ_CP020910.1::WP_086083774.1 | Int285 | 0 |
| 1077 | NZ_CP025015.1::WP_105009893.1 | Int286 | 0.17 |
| 1078 | NC_015579.1::WP_013831319.1 | Int287 | 0.06 |
| 1079 | NZ_CP039651.1::WP_109154411.1 | Int288 | 0.11 |
| 1080 | NZ_CP030762.1::WP_112907845.1 | Int289 | 0 |
| 1082 | NZ_CP016289.1::WP_065284176.1 | Int290 | 0.13 |
| 1083 | NZ_CP021819.1::WP_088201210.1 | Int291 | 0.14 |
| 1084 | NC_007960.1::WP_041359701.1 | Int292 | 0.04 |
| 1086 | NZ_CP026528.1::WP_158528808.1 | Int293 | 0.14 |
| 1087 | NZ_AP014686.1::WP_080587274.1 | Int294 | 0.11 |
| 1088 | NC_020061.1::WP_004112912.1 | Int295 | 0.07 |
| 1089 | NZ_CP017563.1::WP_154671697.1 | Int296 | 0.26 |
| 1090 | NZ_CP049735.1::WP_165586638.1 | Int297 | 0.2 |
| 1099 | NZ_CP016620.1::WP_099515711.1 | Int302 | 0 |
| 1100 | NZ_CP023549.1::WP_096787955.1 | Int303 | 0 |
| 1103 | NZ_CP014527.1::WP_066137015.1 | Int304 | 0 |
| 1104 | NZ_CP035512.1::WP_082731421.1 | Int305 | 0 |
| 1107 | NZ_CP021071.1::WP_084015878.1 | Int306 | 0 |
| 1108 | NZ_CP016453.1::WP_083217015.1 | Int307 | 0 |
| 1110 | NZ_CP016620.1::WP_099515874.1 | Int308 | 0 |
| 1111 | NZ_CP049701.1::WP_166354437.1 | Int309 | 0 |
| 1117 | NC_014825.1::WP_013483791.1 | Int310 | 0 |
| 1118 | NC_014825.1::WP_013483878.1 | Int311 | 0 |
| 1119 | NZ_CP044332.1::WP_016919146.1 | Int312 | 0 |
| 1121 | NZ_CP033248.1::WP_153738853.1 | Int313 | 0 |
| 1122 | NZ_CP013238.1::WP_071981582.1 | Int314 | 0 |
| 1123 | NZ_CM003332.1::WP_039285843.1 | Int315 | 0 |
| 1125 | NZ_CP015585.1::WP_083671481.1 | Int316 | 0 |
| 1126 | NZ_CP018336.1::WP_073541495.1 | Int317 | 0.55 |
| 1129 | NZ_CP033248.1::WP_153738854.1 | Int318 | 0 |
| 1130 | NC_014825.1::WP_013483874.1 | Int319 | 0 |
| 1133 | NZ_CP007453.1::WP_025436591.1 | Int320 | 0 |
| 1134 | NZ_CP017949.1::WP_106721914.1 | Int321 | 0 |
| 1137 | NZ_CP008945.1::WP_038606886.1 | Int322 | 0.17 |
| 1139 | NZ_CP046254.1::WP_140043508.1 | Int323 | 0 |
| 1142 | NC_002682.1::WP_044547337.1 | Int324 | 0.04 |
| 1143 | NC_008826.1::WP_011828792.1 | Int325 | 0.11 |
| 1144 | NZ_AP022320.1::WP_162071183.1 | Int326 | 0 |
| 1145 | NZ_LR135387.1::WP_000136908.1 | Int327 | 0 |
| 1146 | CP033508.1::QKC67623.1 | Int328 | 0 |
| 1148 | NZ_CP016080.1::WP_027047857.1 | Int329 | 0 |
| 1149 | NZ_CP032928.1::WP_162993116.1 | Int330 | 0 |
| 1150 | NZ_LR135483.1::WP_033652754.1 | Int331 | 0.09 |
| 1151 | NZ_LR594668.1::WP_162571537.1 | Int332 | 0 |
| 1152 | NZ_CP014289.1::WP_061885389.1 | Int333 | 0 |
| 1154 | NC_014825.1::WP_013483880.1 | Int334 | 0 |
| 1155 | NZ_CP014308.1::WP_062174163.1 | Int335 | 0 |
| 1157 | NZ_CP033248.1::WP_153738977.1 | Int336 | 0 |
| 1158 | NZ_LN907829.1::WP_067437236.1 | Int337 | 0 |
| 1159 | NZ_CM017044.1::WP_000709098.1 | Int338 | 0 |
| 1161 | NC_014825.1::WP_013483789.1 | Int339 | 0 |
| 1166 | NZ_CP031591.1::WP_111772986.1 | Int340 | 0 |
| 1168 | NC_003064.2::WP_162180340.1 | Int341 | 0 |
| 1169 | NZ_AFSD01000008.1::WP_035243797.1 | Int342 | 0 |
| 1170 | NZ_CP039905.1::WP_080843366.1 | Int343 | 0 |
| 1172 | NZ_LR594663.1::WP_162590298.1 | Int344 | 0 |
| 1173 | NC_009717.1::WP_157048325.1 | Int345 | 0 |
| 1176 | NZ_CP016593.1::WP_014538220.1 | Int346 | 0 |
| 1177 | NC_019761.1::WP_015211582.1 | Int347 | 0 |
| 1178 | NZ_CP014289.1::WP_061885391.1 | Int348 | 0 |
| 1181 | NC_007961.1::WP_011505253.1 | Int349 | 0 |
| 1184 | NZ_CP015439.1::WP_066328033.1 | Int350 | 0 |
| 1185 | AP022559.1::BBW99057.1 | Int351 | 0.52 |
| 1186 | NZ_LR134446.1::WP_068741343.1 | Int352 | 0.03 |
| 1187 | NC_019957.1::WP_015297851.1 | Int353 | 0 |
| 1190 | NZ_CP007453.1::WP_025436590.1 | Int354 | 0 |
| 1191 | NZ_CP017949.1::WP_106721912.1 | Int355 | 0 |
| 1195 | NZ_CP008945.1::WP_038606889.1 | Int356 | 0 |
| 507 | KY963369.1::ARW58402.1 | Int357 | 0 |
| 504 | KT336320.1::ALA07059.1 | Int358 | 0 |
| 530 | KT336321.1::ALA07121.1 | Int359 | 0 |
| 505 | KT336321.1::ALA07122.1 | Int360 | 0 |
| 531 | KX077896.1::ANM47644.1 | Int361 | 0 |
| 506 | KX077896.1::ANM47643.1 | Int362 | 0 |
| 532 | FN997652.1::CBR26922.1 | Int363 | 0 |
| 451 | FN997652.1::CBR26923.1 | Int364 | 0 |
| 133 | MF172979.1::ASD51128.1 | Int365 | 0 |
| 160 | MK448666.1::QBX13692.1 | Int366 | 0 |
| 552 | MK448666.1::QBX13693.1 | Int367 | 0 |
| 121 | MK448667.1::QBX13733.1 | Int368 | 0 |
| 106 | MK448667.1::QBX13731.1 | Int369 | 0 |
| 533 | MK448674.1::QBX14111.1 | Int370 | 0 |
| 508 | MK448674.1::QBX14110.1 | Int371 | 0 |
| 122 | MK448687.1::QBX14891.1 | Int372 | 0 |
| 542 | MK448687.1::QBX14890.1 | Int373 | 0 |
| 154 | MK448700.1::QBX15583.1 | Int374 | 0 |
| 107 | MK448700.1::QBX15585.1 | Int375 | 0 |
| 543 | MK448713.1::QBX16269.1 | Int376 | 0 |
| 550 | MK448719.1::QBX16517.1 | Int377 | 0 |
| 123 | MK448719.1::QBX16516.1 | Int378 | 0 |
| 144 | MK448720.1::QBX16591.1 | Int379 | 0 |
| 509 | MK448741.1::QBX17590.1 | Int380 | 0 |
| 534 | MK448741.1::QBX17591.1 | Int381 | 0 |
| 535 | MK448752.1::QBX18231.1 | Int382 | 0 |
| 510 | MK448752.1::QBX18232.1 | Int383 | 0 |
| 536 | MK448811.1::QBX21447.1 | Int384 | 0 |
| 124 | MK448819.1::QBX21895.1 | Int385 | 0 |
| 553 | MK448819.1::QBX21894.1 | Int386 | 0 |
| 125 | MK448825.1::QBX22171.1 | Int387 | 0 |
| 554 | MK448825.1::QBX22172.1 | Int388 | 0 |
| 126 | MK448835.1::QBX22708.1 | Int389 | 0 |
| 127 | MK448836.1::QBX22750.1 | Int390 | 0 |
| 518 | MK448838.1::QBX22844.1 | Int391 | 0 |
| 547 | MK448838.1::QBX22843.1 | Int392 | 0 |
| 135 | MK448846.1::QBX23238.1 | Int393 | 0.22 |
| 545 | MK448846.1::QBX23239.1 | Int394 | 0 |
| 546 | MK448847.1::QBX23319.1 | Int395 | 0 |
| 136 | MK448847.1::QBX23320.1 | Int396 | 0 |
| 155 | MK448934.1::QBX27918.1 | Int397 | 0 |
| 537 | MK448935.1::QBX27959.1 | Int398 | 0 |
| 519 | MK448935.1::QBX27960.1 | Int399 | 0 |
| 512 | MK448994.1::QBX31153.1 | Int400 | 0 |
| 538 | MK448994.1::QBX31154.1 | Int401 | 0 |
| 137 | MK448997.1::QBX31307.1 | Int402 | 0.1 |
| 138 | MK448997.1::QBX31309.1 | Int403 | 0 |
| 539 | MK448999.1::QBX31462.1 | Int404 | 0 |
| 540 | MK359990.1::QEM40854.1 | Int405 | 0 |
| 454 | MK359990.1::QEM40855.1 | Int406 | 0.19 |
| 1231 | YP_002336631.1 | Int407 | 0 |
| 1232 | YP_001646422.1 | Int408 | 0 |
| 183 | JQ660954.1::AFJ96082.1 | Int409 | 13.57 |
| 72 | NC_021865.1::YP_008320369.1 | Int410 | 1.65 |
| 184 | NC_030950.1::YP_009277275.1 | Int411 | 0 |
| 163 | NC_018264.1::YP_006546326.1 | Int412 | 0 |
| 185 | KM983327.1::AJA42491.1 | Int413 | 0 |
| 11 | MF766047.1::ATI18915.1 | Int414 | 0 |
| 10 | MF766048.1::ATI18993.1 | Int415 | 0 |
| 7 | MH590601.1::AXH70257.1 | Int416 | 0 |
| 17 | MH669004.1::AXQ61107.1 | Int417 | 0 |
| 8 | MK392364.1::QAY15794.1 | Int418 | 0 |
| 68 | KU517658.1::AMB17413.1 | Int419 | 0 |
| 1233 | NP_268897.1 | Int420 | 0 |
| 1234 | YP_005869510.1 | Int421 | 0 |
| 1235 | YP_002736920.1 | Int422 | 0.17 |
| 1236 | YP_003445547.1 | Int423 | 0.35 |
| 1237 | NP_112664.1 | Int424 | 0.33 |
| 1238 | YP_002747001.1 | Int425 | 0 |
| 480 | NC_027982.1::YP_009167795.1 | Int426 | 0 |
| 350 | NC_031929.1::YP_009323520.1 | Int427 | 5.2 |
| 157 | KX456210.1::ANS02547.1 | Int428 | 0 |
| 158 | DQ394810.1::ABD63849.1 | Int429 | 0.26 |
| 374 | KY349816.1::APZ81892.1 | Int430 | 0 |
| 345 | KJ608189.1::AIS74015.1 | Int431 | 12.97 |
| 372 | MF417874.1::ASN68226.1 | Int432 | 1.69 |
| 366 | MK448669.1::QBX13835.1 | Int433 | 0 |
| 410 | MK448672.1::QBX14038.1 | Int434 | 0 |
| 339 | MK448705.1::QBX15858.1 | Int435 | 0.1 |
| 340 | MK448708.1::QBX15966.1 | Int436 | 0 |
| 377 | MK448714.1::QBX16272.1 | Int437 | 0 |
| 341 | MK448742.1::QBX17688.1 | Int438 | 0 |
| 411 | MK448778.1::QBX19706.1 | Int439 | 0 |
| 404 | MK448826.1::QBX22213.1 | Int440 | 0 |
| 378 | MK448831.1::QBX22445.1 | Int441 | 0 |
| 342 | MK448834.1::QBX22610.1 | Int442 | 0 |
| 405 | MK448844.1::QBX23130.1 | Int443 | 0 |
| 412 | MK448849.1::QBX23375.1 | Int444 | 0 |
| 343 | MK448873.1::QBX24735.1 | Int445 | 0 |
| 381 | MK448874.1::QBX24736.1 | Int446 | 0 |
| 406 | MK448875.1::QBX24786.1 | Int447 | 0.16 |
| 346 | MK448878.1::QBX24961.1 | Int448 | 0 |
| 367 | MK448879.1::QBX25020.1 | Int449 | 0 |
| 407 | MK448898.1::QBX26003.1 | Int450 | 0 |
| 382 | MK448927.1::QBX27562.1 | Int451 | 0 |
| 344 | MK448940.1::QBX28214.1 | Int452 | 0 |
| 383 | MK448986.1::QBX30733.1 | Int453 | 0 |
| 421 | MK449012.1::QBX32092.1 | Int454 | 0 |
| 38 | MG711465.1::AUV56620.1 | Int455 | 0 |
| 49 | MF417875.1::ASN68324.1 | Int456 | 6.77 |
| 1239 | BAE05705.1 | Int457 | 0 |
| 1240 | YP_003472505.1 | Int458 | 0 |
| 1241 | BAF92844.1 | Int459 | 3.29 |
| 456 | NC_007064.1::YP_240778.1 | Int460 | 0 |
| 457 | NC_007065.1::YP_240852.1 | Int461 | 15.17 |
| 464 | NC_008722.1::YP_950630.1 | Int462 | 0 |
| 465 | NC_008723.1::YP_950693.1 | Int463 | 0 |
| 466 | NC_031241.1::YP_009302049.1 | Int464 | 0 |
| 459 | NC_020490.2::YP_009130680.1 | Int465 | 0 |
| 500 | NC_019915.1::YP_007236622.1 | Int466 | 0 |
| 438 | NC_024391.1::YP_009044994.1 | Int467 | 0 |
| 467 | MF417895.1::ASN69744.1 | Int468 | 0 |
| 468 | MF417901.1::ASN70113.1 | Int469 | 0 |
| 469 | MF417930.1::ASN71670.1 | Int470 | 0 |
| 470 | MF417982.1::ASN72884.1 | Int471 | 0 |
| 423 | MF417958.1::ASN72539.1 | Int472 | 0 |
| 1242 | YP_003251752.1 | Int473 | 0 |
| 370 | NC_019544.1::YP_007010946.1 | Int474 | 0 |
| 437 | DQ453159.1::ABI36844.1 | Int475 | 2.64 |
| 392 | HM072038.1::ADF59162.1 | Int476 | 3.07 |
| 433 | KX965989.1::APC46450.1 | Int477 | 0 |
| 444 | MF417925.1::ASN71428.1 | Int478 | 11.77 |
| 445 | MF417893.1::ASN69614.1 | Int479 | 6.84 |
| 393 | MF417886.1::ASN69149.1 | Int480 | 38.07 |
| 379 | MK560763.1::QBP06974.1 | Int481 | 0.36 |
| 37 | KY092479.1::APD18506.1 | Int482 | 0 |
| 41 | KY092482.1::APD18671.1 | Int483 | 0 |
| 39 | KY092481.1::APD18613.1 | Int484 | 0 |
| 57 | KY092480.1::APD18560.1 | Int485 | 0.21 |
| 44 | KY092484.1::APD18778.1 | Int486 | 0.09 |
| 45 | MH825699.1::AYD86220.1 | Int487 | 0.72 |
| 143 | MK450431.1::QAX94753.1 | Int488 | 0 |
| 145 | JQ809701.1::AFL47903.1 | Int489 | 0 |

Individual polypeptides and cognate recognition sequences are shown in Table 22 with their Integrase A No. in column 1 (with “Integrase A No.” corresponding to the respective Integrase No. in the sequence listing attached herewith) and were assigned an integrase identification name (“IntID”) in column 3. The integration efficiency is indicated in column 4 as the percent of cells expressing GFP (“GFP+”) as measured by flow cytometry at 21 days post-transfection in the absence of antibiotic selection.

[1061] In a further example, BTEK293T cells were transfected with an integrase expression plasmid and a template plasmid harboring a 520 bp attP containing region followed by an EGFP reporter driven by CMV promoter. The percentage of EGFP positive cells at day 21 post-transfection was analyzed by flow cytometry. As shown in FIG. 1A, 9 out of 9 integrases depicted achieved higher integration efficiency compared to the positive control integrase PhiC31 in 293T cells. Data for integrases shown comprised greater than 2 replicates.

### Example 14: Dual AAV Delivery of Serine Integrase and Template DNA to Mammalian Cells

[1062] This example demonstrates the use of a serine recombinase based Gene Writer system for the targeted integration of a template DNA into the human genome. More specifically, a recombinase, e.g., an integrase comprising an amino acid sequence of any of SEQ ID NOs: 1-12,677 (e.g., SEQ ID NOs: 1-11,432), e.g., the Bxb1 recombinase protein (e.g., comprising an amino acid sequence of SEQ ID NO: 11,636), and a template DNA comprising the associated attachment site, e.g., a sequence from a LeftRegion or RightRegion, e.g., comprising a sequence of any of SEQ ID NOs: 13,001-25,677 or SEQ ID NOs: 26,001-38,677, respectively (e.g., SEQ ID NOs: 24,636 or 37,636, respectively), are co-delivered to HEK293T cells as separate AAV viral vectors to insert DNA precisely and efficiently in a mammalian cell genome containing the corresponding Bxb1 attachment landing pad site.

[1063] Two transgene configurations are assessed to determine the integration, stability, and expression using different AAV donor formats (FIG. 1B): 1) template comprising attP* or attB* that utilizes formation of double-stranded circularized DNA following AAV transduction in the cell nucleus; or 2) template comprising double attachment sites, attP-attP* or attB-attB*, that can integrate into the mammalian genome independent of double-stranded circularization of the DNA following AAV transduction in the cell nucleus.

[1064] To prepare HEK293T cells for Bxb1-mediated genomic integration of a template, HEK293T landing pad cell lines were generated containing the Bxb1 attP-attP* or Bxb1 attB-attB* sites. HEK293T cells were seeded in 10 cm plates (5×10⁶ cells) prior to lentiviral transfection. Lentiviral transduction using the Lenti-X Packaging Single Shots (VSV-G, Takara Bio) was performed the following day with lentiviral vector plasmid DNA (containing attP-attP* or attB-attB*). Lentiviral titering was performed and the virus filtered using 0.22 m filter and 1 mL lentiviral aliquots were made and stored at −80° C. HEK293T cells were seeded at 1×10⁵ cells/well in 4×6-well plates. HEK293T cells were then transduced with attP-attP* or attB-attB* lentivirus and cultured for 48 hours before starting puromycin selection (1 g/mL). Cells were kept under puromycin selection for at least 7 days and then scaled up to 150 mm culture plates. The cells were then harvested for genomic DNA (gDNA) and assayed for lentivirus integration copy number by ddPCR.

[1065] Adeno-associated viral vectors containing Bxb1 integrase or the corresponding Bxb1 attP*/attP-attP* donor or Bxb1 attB*/attB-attB* donor were generated based on the pAAV-CMV-EGFP-WPRE-pA viral backbone (Sirion Biotech), but with replacement of the CMV promoter with the EF1a promoter. pAAV-Ef1a-BXB1-WPRE-pA was generated using a human codon optimized Bxb1 (GenScript). pAAV-Stuffer-attP*(Bxb1)-Ef1a-EGFP-WPRE-pA and pAAV-Stuffer-attB*(Bxb1)-Ef1a-EGFP-WPRE-pA template constructs contained a 500 bp stuffer sequence between the 5′ AAV2 ITR sequence and Ef1a promoter. pAAV-Stuffer-attP(Bxb1)-Ef1a-EGFP-WPRE-pA-attP*(Bxb1)-Stuffer and pAAV-Stuffer-attB(Bxb1)-Ef1a-EGFP-WPRE-pA-attB*(Bxb1)-Stuffer donor constructs contained a 500 bp stuffer sequence between the AAV2 ITR sequence and Ef1a promoter, as well as a 500 bp stuffer sequence between the 3′ attP*/attB* attachment site and 3′ AAV2 ITR sequence (FIG. 2). The above listed AAV vectors were packaged into AAV2 serotype (Sirion Biotech) at a 113 total vg scale: AAV2-Ef1a-BXB]-WPRE-pA, AAV2-Stuffer-attP*(BXB1)-Ef1a-EGFP-WPRE-pA, AAV2-Stuffer-attB*(BXB1)-Ef1a-EGFP-WPRE pA, AAV2-Stuffer-attP(BXB1)-Ef1a-EGFP-WPRE-pA-attP*(BXB1)-Stuffer, AAV2-Stuffer-attB(BXBI)-Ef1a-EGFP-WPRE-pA-attB*(BXB1)-Stuffer. HEK293T landing pad cells containing either attP-attP* or attB-attB* landing pad sites were seeded in a 48-well plate format at 40,000 cells/well. 24 h later, the following conditions were tested: dual AAV transduction with 1) AAV2-attP*-Ef1a-EGFP with or without AAV2-Ef1a-BXB1 integrase, 2) AAV2-attP-attP*-Ef1a-EGFP donor with or without AAV2-Ef1a-BXB1 integrase, 3) AAV2-attB*-Ef1a-EGFP with or without AAV2-Ef1a-BXB1 integrase, 4) AAV2-attB-attB*-Ef1a-EGFP with or without AAV2-Ef1a-BXB1 integrase (FIG. 3A). The AAV comprising the integrase was dosed at an MOI of about 25,000, and the AAV comprising the template was dosed at an MOI of about 75,000. To assess the efficiency of a dual AAV delivery of a serine integrase and a template comprising its recognition site to integrate into the human genome, ddPCR was performed to quantify integration events (% CNV/landing pad) on day 3 and day 7 post-transduction. ˜5% integration was detected using an attB* donor to attP-attP* landing pad cell line, and this integration was stable and consistent at both timepoints (FIG. 3B), indicative of successful DNA Gene Writing by a dual AAV delivery system.

### Example 15: In Vitro Combination mRNA and AAV Delivery of a Gene Writing Polypeptide and Template DNA for Site-Specific Integration in Human Cells

[1066] This example demonstrates use of a Gene Writer system for the site-specific insertion of exogenous DNA into the mammalian cell genome. More specifically, a recombinase, e.g., an integrase comprising an amino acid sequence of any of SEQ ID NOs: 1-12,677 (e.g., SEQ ID NOs: 1-11,432), e.g., the Bxb1 recombinase protein (e.g., comprising an amino acid sequence of SEQ ID NO: 11,636, and a template DNA comprising the associated attachment site, e.g., a sequence from a LeftRegion or RightRegion, a sequence of any of SEQ ID NOs: 13,001-25,677 (e.g., SEQ ID NOs: 13,001-24,432) or SEQ ID NOs: 26,001-38,677 (e.g., SEQ ID NOs: 26,001-37,432), respectively, e.g., the LeftRegion comprising a sequence of SEQ ID NO: 24,636, are introduced into a HEK293T landing pad cell line. In this example, the recombinase is delivered as mRNA encoding the recombinase, and the template DNA is delivered via AAV.

[1067] HEK293T landing pad cells containing either the attP-attP* or attB-attB* landing pad sites (see Example 14) were seeded in a 48-well plate format at 40,000 cells/well. 24 h later, the following conditions were tested: 1) AAV2-attP*-Ef1a-EGFP with or without mRNA encoding the BXB1 integrase; 2) AAV2-attP-attP*-Ef1a-EGFP donor with or without mRNA encoding the BXB1 integrase; 3) AAV2-attB*-Ef1a-EGFP with or without mRNA encoding the BXB1 integrase; and 4) AAV2-attB-attB*-Ef1a-EGFP with or without mRNA encoding the BXB1 integrase (FIG. 4A). The mRNA encoding the integrase was dosed at about 1 g and the AAV comprising the template was dosed at an MOI of about 75,000. The timing of delivery was also assessed by the following conditions: 1) mRNA delivery of BXB1 integrase and AAV delivery of template DNA on the same day, 2) mRNA delivery of BXB1 integrase 24 h prior to AAV delivery of template DNA, 3) AAV delivery of template DNA 24 h prior to mRNA delivery of BXB1 integrase. ddPCR was performed to assess the integration mediated through mRNA delivery of a serine integrase and AAV delivery of a template comprising its attachment, ddPCR was performed to assay for integration (% CNV/landing pad) on day 3 post-transfection of mRNA and post-transduction of AAV. ˜24% integration was detected using an attP* donor to attB-attB* landing pad 293T cell line (FIG. 4B). AAV delivery of attachment site donor 24 h prior to mRNA delivery of BXB1 integrase achieved the highest % CNV/landing pad of ˜4% (FIG. 3B). These results are indicative of successful DNA Gene Writing genome editing events that insert the AAV-delivered DNA fragment that is site-specific, mediated by mRNA delivery of serine integrase and AAV delivery of its respective site-specific attachment site.

### Example 16: Ex Vivo Combination mRNA and AAV Delivery of a Gene Writing Polypeptide and Template DNA to HSCs for the Treatment of Beta-Thalassemia and Sickle Cell Disease

[1068] This example describes delivery of mRNA encoding an integrase and AAV template DNA into C34+ cells (hematopoietic stem and progenitor cells) in order to write an actively expressed 7-globin gene cassette to treat genetic mutations that lead to beta-thalassemia and sickle cell disease.

[1069] In this example, AAV6 is used to deliver the template DNA. More specifically, the AAV6 template DNA includes, in order, 5′ ITR, an integrase attachment site, e.g., an attP or attB, e.g., a LeftRegion or RightRegion comprising a nucleic acid sequence of any of SEQ ID NOs: 13,001-25,677 (e.g., SEQ ID NOs: 13,001-24,432) or SEQ ID NOs: 26,001-38,677 (e.g., SEQ ID NOs: 26,001-37,432), respectively, a pol II promoter, e.g., the human β-globin promoter, a human fetal 7-globin coding sequence, a poly A tail and 3′ITR. Considering the maximum volume limit of electroporation reagents, integrase mRNA and the AAV6 template are co-delivered into CD34 cells via different conditions, e.g.: 1) AAV6 template and integrase mRNA are co-electroporated; 2) integrase mRNA is electroporated 15 mins prior to AAV6 donor transduction.

[1070] After electroporation/transduction, cells are incubated in CD34 maintenance media for 2 days. Then, ˜10% of the treated cells are harvested for genomic DNA isolation to determine integration efficiency. The rest of the cells are transferred to erythroid expansion and differentiation media. After ˜20 days differentiation, three assays will be performed to determine the integration of 7-globin after erythroid differentiation: 1) a subset of cells is stained with NucRed (Thermo Fisher Scientific) to determine the enucleation rate; 2) a subset of the cells is stained with fluorescein isothiocyanate (FITC)-conjugated anti-7-globin antibody (Santa Cruz) to determine the percentage of fetal hemoglobin positive cells; 3) a subset of the cells is harvested for HPLC to determine γ-globin chain expression.

### Example 17: Ex Vivo Delivery of a Gene Writer Polypeptide and Circular DNA Template for Generating CAR-T Cells

[1071] In this example, a Gene Writing system is delivered as a deoxyribonucleoprotein (DNP) to human primary T-cells ex vivo for the generation of CAR-T cells, e.g., CAR-T cells for treating B-cell lymphoma.

[1072] The Gene Writer polypeptide, e.g., integrase, e.g., integrase comprising an amino acid sequence of any of SEQ ID NOs: 1-12,677 (e.g., SEQ ID NOs: 1-11,432), is prepared and purified for use directly in its active protein form. For the template component, minicircle DNA plasmids that lack plasmid backbone and bacterial sequences are used in this example, e.g., prepared as according to a method of Chen et al. Mol Ther 8(3):495-500 (2003), wherein a recombination event is first used to excise these extraneous plasmid maintenance functions to minimize plasmid size and cellular response. Template DNA minicircles comprise, in order, an integrase attachment site (attP or attB), e.g., a LeftRegion or RightRegion comprising a nucleic acid sequence of any of SEQ ID NOs: 13,001-25,677 (e.g., SEQ ID NOs: 13,001-24,432) or SEQ ID NOs: 26,001-38,677 (e.g., SEQ ID NOs: 26,001-37,432), respectively, a pol II promoter, e.g., EF-1, a human codon optimized chimeric Antigen Receptor (including an extracellular ligand binding domain, a transmembrane domain, and intracellular signaling domains), e.g., the CD19-specific Hu19-CD828Z (Genbank MN698642; Brudno et al. Nat Med 26:270-280 (2020)) CAR molecule, and a poly A tail. The template DNA is first mixed with purified integrase protein and incubated at room temperature for 15˜30 mins to form DNP complexes. Then, the DNP complex is nucleofected into activated T cells. Integration by the Gene Writer system is assayed using ddPCR for molecular quantification, and CAR expression is measured by flow cytometry.

### Example 18: Unidirectional Sequencing Assay for Determination of Integration Site

[1073] In this example, unidirectional sequencing is performed to determine the sequence of an unknown integration site with an unbiased profile of genome wide specificity.

[1074] Integration experiments are performed as in previous examples by using a Gene Writing system comprising an integrase and a template DNA for insertion. The integrase and donor plasmids are transfected into 293T cells. Genomic DNA is extracted at 72 hours post transfection and subjected to unidirectional sequencing according to the following method. First, a next generation library is created by fragmentation of the genomic DNA, end repair, and adaptor ligation. Next, fragmented genomic DNA harboring template DNA integration events is amplified by two-step nested PCR using forward primers binding to template specific sequence and reverse primers binding to sequencing adaptors. PCR products are visualized on a capillary gel electrophoresis instrument, purified, and quantified by Qubit (ThermoFisher). Final libraries are sequenced on a Miseq using 300 bp paired end reads (Illumina). Data analysis is performed by detecting the DNA flanking the insertion and mapping that sequence back to the human genome sequence, e.g., hg38.

### Example 19: Production of mRNA Encoding a Gene Writer Polypeptide

[1075] In this example, an integrase is expressed by in vitro transcription from mRNA. The mRNA template plasmid included the T7 promoter followed by the 5′UTR, the integrase coding sequence, the 3′ UTR, and ˜100 nucleotide long poly(A) tail. The plasmid is linearized by enzymatic restriction resulting in blunt end or 5′ overhang downstream of poly(A) tail and used for in vitro transcription (IVT) using T7 polymerase (NEB). Following IVT, the RNA is treated with DNase I (NEB). After buffer exchange, enzymatic capping is performed using Vaccinia capping enzyme (NEB) and 2′-O-methyltransferase (NEB) in the presence of GTP and SAM (NEB). The capped RNA is purified and concentrated using silica columns (for example, Monarch® RNA Cleanup kit) and buffered by 2 mM sodium citrate pH 6.5.

### Example 20: Use of Dual AAV Vector for the Treatment of Cystic Fibrosis in CFTR Mouse Model

[1076] In this example, a Gene Writing system is delivered as a dual AAV vector system for the treatment of cystic fibrosis in a mouse model of disease. Cystic fibrosis is a lung disease that is caused by mutations in the CTFR gene, which can be treated by the insertion of the wild-type CTFR gene into the genome of lung cells, such as cells found in the respiratory bronchioles and columnar non-ciliated cells in the terminal bronchiole.

[1077] A Gene Writing polypeptide, e.g., comprising an amino acid sequence of any of SEQ ID NOs: 1-12,677 (e.g., SEQ ID NOs: 1-11,432), and a template DNA comprising a cognate attachment site, e.g., an attB or attP site, e.g., a LeftRegion or RightRegion sequence of any of SEQ ID NOs: 13,001-25,677 (e.g., SEQ ID NOs: 13,001-24,432) or SEQ ID NOs: 26,001-38,677 (e.g., SEQ ID NOs: 26,001-37,432), respectively, are packaged into AAV6 capsids with expression of the polypeptide driven by the CAG promoter, the combination of which has been shown to be effective for high level transduction and expression in murine respiratory epithelial cells according to the teachings of Halbert et al. Hum Gene Ther 18(4):344-354 (2007).

[1078] AAV preparations are co-delivered intranasally to CFTR gene knockout (Cftr^{tm1Unc}) mice (The Jackson Labs) using a modified intranasal administration, as described previously (Santry et al. BMC Biotechnol 17:43 (2017)). Briefly, AAVs are packaged, purified, and concentrated with either an integrase or template DNA, comprising the CFTR gene under the control of a pol II promoter, e.g., CAG promoter, and a cognate attachment site. In some embodiments, the CFTR expression cassette is flanked by the integrase attachment sites. Prepared AAVs are each delivered at a dose ranging from 1×10¹⁰-1×10¹² vg/mouse using a modified intranasal administration to the CFTR knockout mouse. After one week, lung tissue is harvested and used for genomic extraction and tissue analysis. To measure integration efficiency, CFTR gene integration is quantified using ddPCR to determine the fraction of cells and target sites containing or lacking the insertion. To assay expression from successfully integrated CFTR, tissue is analyzed by immunohistochemistry to determine expression and pathology.

### Example 21: Method of Treating Ornithine Transcarbamylase Deficiency Through the Introduction of Transiently Expressed Integrase

[1079] Ornithine transcarbamylase (OTC) deficiency is a rare genetic disorder that results in an accumulation of ammonia due to not having efficient breakdown of nitrogen. The accumulation of ammonia leads to hyperammonemia that can debilitating and in severe cases lethal. This example describes the treatment of OTC deficiency by the delivery and expression of an mRNA encoding a Gene Writer polypeptide, e.g., an integrase sequence of any of SEQ ID NOs: 1-12,677 (e.g., SEQ ID NOs: 1-11,432), along with the delivery of an AAV providing the template DNA for integration. The AAV template comprises a wild-type copy of the human OTC gene under the control of a pol II promoter, e.g., ApoE.hAAT, and a cognate attachment site, e.g., an attB or attP site, e.g., a LeftRegion or RightRegion sequence of any of SEQ ID NOs: 13,001-25,677 (e.g., SEQ ID NOs: 13,001-24,432) or SEQ ID NOs: 26,001-38,677 (e.g., SEQ ID NOs: 26,001-37,432), respectively. In some embodiments, the OTC expression cassette is flanked by the integrase attachment sites.

[1080] In this example, LNP formulation of integrase mRNA follows the formulation of LNP-INT-01 (methods taught by Finn et al. Cell Reports 22:2227-2235 (2018), incorporated herein by reference) and template DNA is formulated in AAV2/8 (methods taught by Ginn et al. JHEP Reports (2019), incorporated herein by reference). Briefly, OTC deficiency is restored by treating neonatal Spf^{ush} mice (The Jackson Lab) by injecting LNP formulations (1-3 mg/kg) containing the integrase mRNA and AAV (1×10¹⁰-1×10¹² vg/mouse) containing the template DNA via the superficial temporal facial vein (Lampe et al. J Vis Exp 93:e52037 (2014)). The Spf^{ush} mouse has some residual mouse OTC activity which, in some embodiments, is silenced by the administration of an AAV that expresses an shRNA against mouse OTC as previously described (Cunningham et al. Mol Ther 19(5):854-859 (2011), the methods of which are incorporated herein by reference). OTC enzyme activity, ammonia levels, and orotic acid are measured as previously described (Cunningham et al. Mol Ther 19(5):854-859 (2011)). After 1 week, mouse livers are harvested and used for gDNA extraction and tissue analysis. The integration efficiency of hOTC is measured by ddPCR on extracted gDNA. Mouse liver tissue is analyzed by immunohistochemistry to confirm hOTC expression.

### Example 22: Use of a Gene Writing to Integrate a Large Payload into Human Cells

[1081] This example describes the integrase-mediated integration of a large payload into human cells in vitro.

[1082] In this example, the Gene Writer polypeptide component comprises an mRNA encoding an integrase, e.g., an integrase sequence comprising an amino acid sequence of any of SEQ ID NOs: 1-12,677 (e.g., SEQ ID NOs: 1-11,432), and a template DNA comprising: a cognate attachment site, e.g., an attB or attP site, e.g., a LeftRegion or RightRegion comprising a sequence of any of SEQ ID NOs: 13,001-25,677 (e.g., SEQ ID NOs: 13,001-24,432) or SEQ ID NOs: 26,001-38,677 (e.g., SEQ ID NOs: 26,001-37,432), respectively; a GFP expression cassette, e.g., a CMV promoter operably linked to EGFP; and stuffer sequence to bring the total plasmid size to approximately 20 kb.

[1083] Briefly, HEK293T cells are co-electroporated with the integrase mRNA and large template DNA. After three days, integration efficiency and specificity are measured. In order to measure efficiency of integration, droplet digital PCR (ddPCR) is performed on genomic DNA e.g., as described by Lin et al. Hum Gene Ther Methods 27(5):197-208 (2016), using primer-probe sets that amplify across the junction of integration, e.g., with one primer annealing to the template DNA and the other to an appropriate flanking region of the genome, such that only integration events are quantified. Data are normalized to an internal reference gene, e.g., RPP30, and efficiency is expressed as the average integration events per genome across the population of cells. To measure specificity, integration events in genomic DNA are assessed by unidirectional sequencing to determine genome coordinates, as described in Example 18.

### Example 23: Use of a Gene Writing to Integrate a Bacterial Artificial Chromosome into Human Embryonic Stem Cells Ex Vivo

[1084] This example describes the integrase-mediated integration of a bacterial artificial chromosome (BAC) into human embryonic stem cells (hESCs).

[1085] BAC vectors are capable of maintaining extremely large (>100 kb) DNA payloads, and thus can carry many genes or complex gene circuits that may be useful in cellular engineering. Though there has been demonstration of their integration into hESCs (Rostovskaya et al. Nucleic Acids Res 40(19):e150 (2012)), this was accomplished using transposons that lack sequence specificity in their integration patterns. This Example describes sequence-specific integration of large constructs.

[1086] In this example, a BAC engineered to carry the desired payload further comprises an attachment site, e.g., an attB or attP site, e.g., a LeftRegion or RightRegion comprising a sequence of any of SEQ ID NOs: 13,001-25,677 (e.g., SEQ ID NOs: 13,001-24,432) or SEQ ID NOs: 26,001-38,677 (e.g., SEQ ID NOs: 26,001-37,432), respectively, that enables recognition by the Gene Writer polypeptide, e.g., an integrase, e.g., an integrase comprising an amino acid sequence of any of SEQ ID NOs: 1-12,677 (e.g., SEQ ID NOs: 1-11,432). An approximately 150 kb BAC is introduced into hESCs by electroporation or lipofection as per the teachings of Rostovskaya et al. Nucleic Acids Res 40(19):e150 (2012). After three days, integration efficiency and specificity are measured. In order to measure efficiency of integration, droplet digital PCR (ddPCR) is performed on genomic DNA e.g., as described by Lin et al. Hum Gene Ther Methods 27(5):197-208 (2016), using primer-probe sets that amplify across the junction of integration, e.g., with one primer annealing to the template DNA and the other to an appropriate flanking region of the genome, such that only integration events are quantified. Data are normalized to an internal reference gene, e.g., RPP30, and efficiency is expressed as the average integration events per genome across the population of cells. To measure specificity, integration events in genomic DNA are assessed by unidirectional sequencing to determine genome coordinates, as described in Example 18.

### Example 24: Use of Dual AAV Vector to Integrate a Transgene into a Mouse Model that Contains an Integrase Landing Pad Site

[1087] Integrase proteins are found naturally in bacteriophage and utilize a sequence of the phage genome (attP) to integrate the part of its genome into a bacteria's genome at a specific sequence (attB). Integrase proteins can be utilized as drivers to integrate DNA into a genome when supplied with a donor vector carrying an insert DNA that bears an appropriate recognition sequence (e.g. attP or attB) and the target or host genome bears a corresponding recognition sequence (e.g. attB or attP). This requirement for a specific sequence to be found in the host genome to have efficient integration can limit the use and/or efficacy of an integrase to insert a transgene into the genome of a mouse, making it challenging to create a mouse model or treat a disease found in the background of a mouse genetic disease model. In this example, a mouse engineered to have an attP recognition site (e.g., attP sequence for Bxb1 integrase) in its genome is used to demonstrate targeted integration by delivery of 1) an insert DNA that bears a sequence of interest and further comprises an attB recognition site (e.g., attB sequence for Bxb1 integrase) and 2) an integrase (e.g., Bxb1 integrase) that catalyzes the integration of the insert DNA into the genomic attP site. Further, in this example, the Bxb1-specific attP and attB recognition sequences used have the central dinucleotide changed from GT to GA. In some examples, the DNA sequence of interest is a heterologous object sequence comprising an RNA polymerase II promoter sequence (e.g., Human thyroxine binding globulin, TBG) and the DNA coding region of a therapeutic protein or a reporter gene (e.g., Renilla renformis luciferase).

[1088] Briefly, AAVs (e.g., AAV-DJ) are packaged, purified, and concentrated with either a construct comprising DNA encoding an integrase protein (e.g., Bxb1) or comprising the insert DNA (e.g., Renilla renformis luciferase under the control of TBG promoter and the described attB sequence). Mice with a stable integration of the attP recognition sequence are co-administered one or both of the two AAV viruses via intraperitoneal injection at doses ranging from 1×10¹⁰-1×10¹³ vg per virus per mouse. The integration is monitored over time by unidirectional sequencing of livers, among other organs, as previously described. In-life imaging of the luciferase expression is monitored as previously described (Bhaumik, S., & Gambhir, S. S., PNAS 2002, https://doi.org/10.1073/pnas.012611099).

### Example 25: Treatment of Multiple Diseases with a Single Composition Incorporating Multiple Genes

[1089] Ornithine transcarbamylase (OTC) deficiency and Citrullinemia type I are distinct diseases caused by mutations in different genes (OTC and ASS1, respectively) that both result in disruption of the urea cycle, ultimately leading to the accumulation of nitrogen (as ammonia) in the blood. The accumulation of ammonia leads to hyperammonemia, which can ultimately cause tissue and neurotoxicity with debilitating and potentially fatal consequences.

[1090] This example describes the design and use of a single Gene Writing system that can be provided for treatment of more than one disease. More specifically, this example describes the treatment of OTC deficiency or Citrullinemia type I by the delivery and expression of an mRNA encoding a Gene Writer polypeptide, e.g., an integrase sequence of any of SEQ ID NOs: 1-12,677 (e.g., SEQ ID NOs: 1-11,432), and an AAV comprising a template DNA for integration.

[1091] The template DNA in this example comprises functional copies of both the human OTC and ASS1 genes separated by a self-cleaving peptide (for example 2A) under the control of a pol II promoter, e.g., ApoE.hAAT, and a cognate attachment site, e.g., an attB or attP site, e.g., a LeftRegion or RightRegion sequence of any of SEQ ID NOs: 13,001-25,677 (e.g., SEQ ID NOs: 13,001-24,432) or SEQ ID NOs: 26,001-38,677 (e.g., SEQ ID NOs: 26,001-37,432). In some embodiments, the expression cassette comprising both OTC and ASS1 is flanked by integrase attachment sites. The composition described is used to treat either OTC deficiency or Citrullinemia type I.

[1092] In this example, LNP formulation of integrase mRNA follows the formulation of LNP-INT-01 (methods taught by Finn et al. Cell Reports 22:2227-2235 (2018), incorporated herein by reference) and template DNA is packaged in AAV2/8 (methods taught by Ginn et al. JHEP Reports (2019), incorporated herein by reference). Briefly, OTC deficiency is restored by treating neonatal Spf^{ush} mice (The Jackson Lab) by injecting LNP formulations (1-3 mg/kg) containing the integrase mRNA and AAV (1×10¹⁰-1×10¹² vg/mouse) containing the template DNA via the superficial temporal facial vein (Lampe et al. J Vis Exp 93:e52037 (2014)). The Spf^{ush} mouse has some residual mouse OTC activity which, in some embodiments, is silenced by the administration of an AAV that expresses an shRNA against mouse OTC as previously described (Cunningham et al. Mol Ther 19(5):854-859 (2011), the methods of which are incorporated herein by reference). OTC enzyme activity, ammonia levels, and orotic acid are measured as previously described (Cunningham et al. Mol Ther 19(5):854-859 (2011)). After 1 week, mouse livers are harvested and used for gDNA extraction and tissue analysis. The integration efficiency of hOTC is measured by ddPCR on extracted gDNA. Mouse liver tissue is analyzed by immunohistochemistry to confirm hOTC expression.

[1093] In some embodiments, the same composition described and used to treat a model of OTC deficiency above may also be used to treat Citrullinemia type I. Briefly, ASS1 deficiency is restored by treating a neonatal lethal argininosuccinate synthetase (ASS) knockout mouse model (Cindy Y Kok et al, Mol Ther. 21(10):1823-1831 (2013), the methods of which are incorporated herein by reference in their entirety) using the described LNP and AAV. Specifically, ASS knockout mice are injected with LNP formulations (1-3 mg/kg) containing the integrase mRNA and AAV (1×10¹⁰-1×10¹² vg/mouse) containing the template DNA via the superficial temporal facial vein (Lampe et al. J Vis Exp 93:e52037 (2014)). Ammonia levels, orotic acid and overall mice survival are measured as previously described (Cindy Y Kok et al, Mol Ther.

[1094] 21(10):1823-1831 (2013)). After 2-4-8 weeks, mouse livers are harvested and used for gDNA extraction and tissue analysis. The integration efficiency of hASS1 is measured by ddPCR on extracted gDNA. Mouse liver tissue is analyzed by immunohistochemistry to confirm hASS1 expression.

[1095] In some embodiments, the Gene Writing system integrates the OTC-ASS1 expression cassette into OTC deficiency and ASS1 knockout mouse models. This same system thus restores healthy urea cycles in both models. In some embodiments, blood ammonia levels are reduced from hyperammonemia to normal levels, e.g., OTC deficiency or ASS1 knockout mice treated with the Gene Writing system show at least a 2, 5, 10, 50, or at least a 100-fold reduction in blood ammonia levels relative to control mice. In some embodiments, orotic acid levels are reduced from elevated to normal levels, e.g., OTC deficiency or ASS1 knockout mice treated with the Gene Writing system show at least a 2, 5, 10, 50, or at least a 100-fold reduction in orotic acid levels relative to control mice.

### Example 26: Selection of Lipid Reagents with Reduced Aldehyde Content

[1096] In this example, lipids are selected for downstream use in lipid nanoparticle formulations containing Gene Writing component nucleic acid(s), and lipids are selected based at least in part on having an absence or low level of contaminating aldehydes. Reactive aldehyde groups in lipid reagents may cause chemical modifications to component nucleic acid(s), e.g., RNA, e.g., template RNA, during LNP formulation. Thus, in some embodiments, the aldehyde content of lipid reagents is minimized.

[1097] Liquid chromatography (LC) coupled with tandem mass spectrometry (MS/MS) can be used to separate, characterize, and quantify the aldehyde content of reagents, e.g., as described in Zurek et al. The Analyst 124(9):1291-1295 (1999), incorporated herein by reference. Here, each lipid reagent is subjected to LC-MS/MS analysis. The LC/MS-MS method first separates the lipid and one or more impurities with a C8 HPLC column and follows with the detection and structural determination of these molecules with the mass spectrometer. If an aldehyde is present in a lipid reagent, it is quantified using a staple-isotope labeled (SIL) standard that is structurally identical to the aldehyde, but is heavier due to C13 and N15 labeling. An appropriate amount of the SIL standard is spiked into the lipid reagent. The mixture is then subjected to LC-MS/MS analysis. The amount of contaminating aldehyde is determined by multiplying the amount of SIL standard and the peak ratio (unknown/SIL). Any identified aldehyde(s) in the lipid reagents is quantified as described. In some embodiments, lipid raw materials selected for LNP formulation are not found to contain any contaminating aldehyde content above a chosen level. In some embodiments, one or more, and optionally all, lipid reagents used for formulation comprise less than 3% total aldehyde content. In some embodiments, one or more, and optionally all, lipid reagents used for formulation comprise less than 0.3% of any single aldehyde species. In some embodiments, one or more, and optionally all, lipid reagents used in formulation comprise less than 0.3% of any single aldehyde species and less than 3% total aldehyde content.

### Example 27: Quantification of RNA Modification Caused by Aldehydes During Formulation

[1098] In this example, the RNA molecules are analyzed post-formulation to determine the extent of any modifications that may have happened during the formulation process, e.g., to detect chemical modifications caused by aldehyde contamination of the lipid reagents (see, e.g., Example 26).

[1099] RNA modifications can be detected by analysis of ribonucleosides, e.g., as according to the methods of Su et al. Nature Protocols 9:828-841 (2014), incorporated herein by reference in its entirety. In this process, RNA is digested to a mix of nucleosides, and then subjected to LC-MS/MS analysis. RNA post-formulation is contained in LNPs and must first be separated from lipids by coprecipitating with GlycoBlue in 80% isopropanol. After centrifugation, the pellets containing RNA are carefully transferred to a new Eppendorf tube, to which a cocktail of enzymes (benzonase, Phosphodiesterase type 1, phosphatase) is added to digest the RNA into nucleosides. The Eppendorf tube is placed on a preheated Thermomixer at 37° C. for 1 hour. The resulting nucleosides mix is directly analyzed by a LC-MS/MS method that first separates nucleosides and modified nucleosides with a C18 column and then detects them with mass spectrometry.

[1100] If aldehyde(s) in lipid reagents have caused chemical modification, data analysis will associate the modified nucleoside(s) with the aldehyde(s). A modified nucleoside can be quantified using a SIL standard which is structurally identical to the native nucleoside except heavier due to C13 and N15 labeling. An appropriate amount of the SIL standard is spiked into the nucleoside digest, which is then subjected to LC-MS/MS analysis. The amount of the modified nucleoside is obtained by multiplying the amount of SIL standard and the peak ratio (unknown/SIL). LC-MS/MS is capable of quantifying all the targeted molecules simultaneously.

[1101] In some embodiments, the use of lipid reagents with higher contaminating aldehyde content results in higher levels of RNA modification as compared to the use of higher purity lipid reagents as materials during the lipid nanoparticle formulation process. Thus, in preferred embodiments, higher purity lipid reagents are used that result in RNA modification below an acceptable level.

### Example 28: Gene Writers for Integration of a CAR in T-Cells In Vivo

[1102] This example describes a Gene Writer™ genome editing system delivered T-cells in vivo for integration and stable expression of a genetic payload. Specifically, targeted nanoparticles are used to deliver a Gene Writing system capable of integrating a chimeric antigen receptor (CAR) expression cassette into the genome of T-cells to generate CAR-T cells in a murine model.

[1103] In this example, a Gene Writing system comprises an mRNA encoding a Gene Writing polypeptide, e.g., a recombinase enzyme described herein, and an insert DNA comprising a recombinase recognition site and a transgene cassette, wherein the transgene cassette comprises the coding sequence for the CD19-specific m194-1BBz CAR driven by the EF1a promoter (Smith et al. Nat Nanotechnol 12(8):813-820 (2017)). In order to achieve delivery specifically to T-cells, targeted LNPs (tLNPs) are generated that carry a conjugated mAb against CD4. See, e.g., Ramishetti et al. ACS Nano 9(7):6706-6716 (2015). Alternatively, conjugating a mAb against CD3 can be used to target both CD4+ and CD8+ T-cells (Smith et al. Nat Nanotechnol 12(8):813-820 (2017)). In other embodiments, the nanoparticle used to deliver to T-cells in vivo is a constrained nanoparticle that lacks a targeting ligand, as taught by Lokugamage et al. Adv Mater 31(41):e1902251 (2019).

[1104] The tLNP can be made by first preparing the nucleic acid mix (e.g., polypeptide mRNA: template DNA molar ratio of 1:40) with a mixture of lipids (cholesterol, DSPC, PEG-DMG, Dlin-MC3-DMA, and DSPE-PEG-maleimide) and then chemically conjugating the desired DTT-reduced mAb (e.g., anti-CD4, e.g., clone YTS.177) to the maleimide functional group on the LNPs. See Ramishetti et al. ACS Nano 9(7):6706-6716 (2015).

[1105] Six to 8 week old C57BL6/J mice are injected intravenously with formulated LNP at a dose of 1 mg RNA/kg body weight. Blood is collected at one day and three days post-administration in heparin-coated collection tubes, and the leukocytes are isolated by density centrifugation using Ficoll-Paque PLUS (GE Healthcare). Five days post-administration, animals are euthanized and blood and organs (spleen, lymph nodes, bone marrow cells) are harvested for T-cell analysis. Expression of the anti-CD19 CAR is detected by FACS using specific immunological sorting. Positive cells are confirmed for integration by methods as described herein, e.g., molecular combing or Q-FISH.

### Example 29: Characterization of Integration Sites by Molecular Combing

[1106] AAV genomes are known to undergo multiple mechanisms of intra and intermolecular recombination after delivery to cells (McCarty et al Annu Rev Genet 38:819-45 (2004)). Since an insert DNA may be delivered via an AAV vector, it is possible that in this context, some of the molecules may occur as concatemers, and when used as a substrate for Gene Writing, these concatemeric insert DNA molecules may result in the integration of more than one copy of the original insert DNA. It may thus be useful to analyze the fraction of integration events that result in single vs concatemeric insertions of the template DNA, the average number of copies per integration site, and the orientation of concatemeric molecules, e.g., the frequency of head-to-head or head-to-tail conformations. This example describes the use of molecular combing technology to determine the configuration of integration sites after AAV-mediated delivery of a Gene Writing system in human cells.

[1107] The Bxb1 recombinase (e.g., SEQ ID NO: 11,636) is an enzyme that has been used to integrate DNA in human cells that have been modified to contain an appropriate recognition site in the genome, and is used here as a representative example of recombinase systems disclosed herein. In this example, HEK293T landing pad cell lines are generated by single copy infection with a lentiviral vector containing the BXB1 attP-attP* site. To perform the recombinase-mediated integration, single copy landing pad cells are first seeded in a 48-well plate at ˜40,000 cells/well. At ˜24 hr post-seeding, adeno-associated viral vectors containing the BXB1 attB* donor (cognate recognition site to the attP* site in the landing pad) are transduced with an AAV containing an insert DNA in the presence or absence of a second AAV comprising the coding sequence for Bxb1 integrase. 2 weeks post transduction, ˜10% of the AAV transduced cells are harvested and gDNA is analyzed using a ddPCR assay specific to the landing pad site to confirm integration (% CNV/landing pad). Methods for molecular combing follow the approach of Kaykov et al Sci Rep 6:19636 (2016), incorporated herein by reference in its entirety. Briefly, ˜300,000 transduced cells from each transduced sample are extracted for high molecular weight genomic DNA into an agarose plug. Genomic DNA molecules are then mechanically stretched and aligned in a controlled and consistent manner on the glass surface, enabling precise and direct measurements along the length of the DNA fiber. In-situ hybridization is performed using prelabeled DNA probes that enable visualization for integration site configuration analysis. Probes for the Bxb1 attP-attP* landing pad (target site), AAV Bxb1 attB*donor sequence (insert DNA), and reference gene RPP30 are labeled using three distinct colors for differentiating the signal from each probe. Post hybridization, fluorescence signals are acquired and quantified. By this method, the number and location of the distinct fluorescence signals relative to each other provide a view of the insert copy number and orientation within integrated DNA.

### Example 30: Determination of Integration Sites by Inverse PCR

[1108] This example describes the characterization of integration sites for a Gene Writer system. In some embodiments, a Gene Writer system may exhibit exquisite specificity for a single target site or target sequence. In other embodiments, a Gene Writer system may have a more relaxed specificity and catalyze integration of an insert DNA at a variety of locations in the genome. Thus, for any given Gene Writer, it is useful to determine the breadth of its integration profile.

[1109] In this example, a Gene Writing system is used to modify the genome of HEK293T cells as described in any of the preceding Examples. After transfection, HEK293T cells are cultured for at least 4 days and then assayed for site-specific genome editing. Genomic DNA is first digested with pairs of restriction enzymes that generate incompatible cohesive ends and that cut at least once in the insert DNA, and then self-ligated to generate circular DNA ideally comprising both insert DNA and flanking genomic DNA. Inverted PCR amplification is conducted as described in Olivares et al Nat Biotechnol 20:1124-1128 (2002), the methods of which are incorporated herein by reference in their entirety, using forward and reverse primers specific to the insert DNA that will result in amplification of adjacent genomic DNA. Amplified PCR products are then sequenced using next generation sequencing technology on a MiSeq instrument. For sequence analysis, MiSeq reads are mapped to the HEK293T genome to identify locations of integration. In some embodiments, a Gene Writer system described herein results in detectable integration at a single site. In some embodiments, a Gene Writer system described herein results in detectable integration at a limited number of sites, e.g., less than 100, 90, 80, 70, 60, 50, 45, 40, 35, 30, 25, 20, 15, 10, 9, 8, 7, 6, 5, 4, 3, or less than 2 sites. In other embodiments, a Gene Writer system described herein results in detectable integration at more than 100 sites.

### Example 31: Production of IDLV-Recombinase Viral Particles Using a Lentiviral Packaging System

[1110] This example describes methods used for producing IDLV vectors as described herein (e.g., as shown in FIGS. 6-7). In brief, a template plasmid comprising (1) IDLV elements, optionally including a recombinase coding sequence, as described herein, (2) a DNA recognition site, and (3) a heterologous object sequence, e.g., an expression element further comprising a promoter and transgene for producing a therapeutic protein, is packaged into lentiviral-based particles. Briefly, the IDLV-recombinase plasmid and the three packaging plasmids are co-transfected into HEK293T cells using the TransIT®-293 transfection reagent (Mirus Bio), as according to manufacturer's instructions. Medium is replaced at 4 hrs post-transfection. At 48 hours post-transfection, culture supernatants are collected and concentrated by ultracentrifugation. IDLV-recombinase viral titers are determined by droplet digital PCR (ddPCR), e.g., as performed in Example 5 or in Lin et al., Human Gene Therapy Methods 27(5):197-208 (2016), using primers and probes specific to the IDLV-recombinase sequence. To verify expression of the heterologous recombinase, HEK293T cells are transduced with the IDLV-recombinase particles as generated above and are harvested at 4, 24, and 48 hr post-transduction to monitor expression of the recombinase via Western blot with an antibody against the recombinase or against a peptide tag fused to the recombinase, e.g., a HiBit tag. In some embodiments, expression of recombinase comprising a HiBit tag fusion is instead detected by Western blot using a HiBit Blotting System (Promega) or in lysate using a HiBit Lytic Detection System (Promega), as according to manufacturer's instructions.

### Example 32. Modified IDLV Systems Further Comprising Heterologous Recombinase Functionality Yield Improved Stability of Expression

[1111] This example demonstrates the improved stability of transgene expression achieved in target cells using an IDLV-recombinase system as compared to a non-integrative IDLV system. This enhancement in stability is conceived to occur as the result of stable integration by the recombinase system, which leads to improved maintenance as part of normal genomic DNA replication, whereas non-integrative systems are not replicated and lost through cell division and dilution. In order to determine the stability properties of IDLV-recombinase systems, cells are treated with reporter cassettes comprised in IDLV-recombinase systems or non-integrative systems and reporter expression is measured over time to determine stability.

[1112] To assess transgene stability as introduced by IDLV-recombinase systems, HEK293T and HepG2 cells are transfected with the following vectors: (1) standard IDLV plasmid for expressing an LTR-flanked template encoding an EGFP reporter; (2) a recombinase expression plasmid and the IDLV plasmid that further comprises a DNA recognition sequence for the recombinase, as described herein; or (3) a recombinase expression plasmid and the IDLV plasmid lacking the DNA recognition sequence of (2). At 3 days post-transfection, transfection efficiency is determined as the frequency of GFP+ cells, as measured by flow cytometry. Fluorescence is subsequently monitored by flow cytometry on days 7, 10, 14, 21, 28, and 60 post-transfection. The integration frequency is approximated by determining stable expression of EGFP at day 21, e.g., the fraction of cells that are GFP+ by flow cytometry at day 21. Stability profiles of transgene expression for each system are determined by assaying the frequency (e.g., percent GFP+) and/or the expression level (e.g., median fluorescence) of cells at days 28 and 60 post-transduction, as measured by flow cytometry for EGFP fluorescence.

[1113] In some embodiments, cells treated with a complete IDLV-recombinase system (2) show a decrease in the loss of frequency of expression (e.g., percent GFP+) and/or loss of reporter expression (e.g., median fluorescence) at day 28 and/or day 60 post-transduction, e.g., at least 1.1, 1.2, 1.3, 1.4, 1.5, 1.6, 1.7, 1.8, 1.9, 2.0, 2.5, 3, 4, 5, 6, 7, 8, 9, or at least 10-fold lower than cells treated with (1) and/or (3). In some embodiments, cells treated with a complete IDLV-recombinase system (2) show a higher frequency of expression (e.g., percent GFP+) and/or a higher level of expression (e.g., median fluorescence) at day 28 and/or day 60 post-transduction, e.g., at least 1.1, 1.2, 1.3, 1.4, 1.5, 1.6, 1.7, 1.8, 1.9, 2.0, 2.5, 3, 4, 5, 6, 7, 8, 9, or at least 10-fold higher than cells treated with (1) and/or (3).

[1114] As described in this example, a recombinase may be encoded by a sequence of any of SEQ ID NOs: 1-12,677 (e.g., SEQ ID NOs: 1-11,432 and the DNA recognition sequence may be comprised in a LeftRegion or RightRegion of any of SEQ ID NOs: 13,001-25,677 (e.g., SEQ ID NOs: 13,001-24,432) or SEQ ID NOs: 26,001-38,677 (e.g., SEQ ID NOs: 26,001-37,432), respectively of a corresponding line number of the sequence encoding the recombinase. In some embodiments, the cells used comprise an endogenous target sequence that is also recognized by the recombinase, such that the recombinase is capable of catalyzing the recombination of the DNA recognition sequence with the endogenous target sequence. In some embodiments, a recombinase without an endogenous target site in the native genome is used for the purpose of experimentation by first integrating an appropriate target site into the genome, e.g., by creating a landing pad comprising the target site. As an example, a landing pad cell line may be generated by transducing HEK293T cells with a lentiviral vector comprising the attB site of the recombinase, e.g., a recombinase of SEQ ID NO: 11,636, comprising the attB sequence 5′-GGCTTGTCGACGACGGCGGTCTCCGTCGTCAGGATCAT-3′. Accordingly, the recombinase is encoded by a sequence comprising a sequence of SEQ ID NO: 11,636 and the DNA recognition sequence of the template plasmid comprises a sequence from the LeftRegion or RightRegion, (e.g., SEQ ID NOs: 24,636 and 37,636, respectively), e.g., comprises the sequence 5′-GGTTTGTCTGGTCAACCACCGCGGTCTCAGTGGTGTACGGTACAAACC-3′.

### Example 33: Determination of IDLV-Recombinase Integration Frequency Using Droplet Digital PCR

[1115] This example describes the molecular measurement of integration frequency of IDLV-recombinase systems. Depending on the recombinase and DNA recognition sequence used, as well as the cell type being transfected, an IDLV-recombinase system may integrate with differing levels of efficiency. Thus, it is desirable to determine the average number of integrations per cell in a population of cells as a metric for efficiency.

[1116] In this example, IDLV-recombinase viral particles are first transduced into cells, e.g., HEK293 or HepG2 cells, as in Example 32. Transfected cells are harvested for genomic DNA extraction at various timepoints, e.g., at days 1, 2, 3, 4, and 7 post-transduction. Droplet digital PCR (ddPCR) assays are developed to determine the integration frequency at the 5′ junction and 3′ junction of integration events. For the 5′ junction, the primer and probe sets include a forward primer binding to ˜150 bp upstream of the junction in the flanking genomic DNA, a FAM-labeled probe binding to ˜50 bp downstream of the junction in the IDLV-recombinase sequence, and a reverse primer binding to ˜150 bp downstream of the junction in the IDLV-recombinase sequence. For the 3′ junction, the primer and probe sets include a forward primer binding to ˜150 bp upstream of the junction in the IDLV-recombinase sequence, a FAM-labeled probe binding to ˜50 bp upstream of the junction in the IDLV-recombinase sequence, and a reverse primer binding to ˜150 bp downstream of the junction in the flanking genomic DNA. Optimized assays including the described 5′ junction assay and 3′ junction assay are performed to determine the frequency of IDLV-recombinase integration.

[1117] In some embodiments, an IDLV-recombinase system results in a frequency of integration of at least approximately 0.1, 0.2, 0.25, 0.5, 1.0, 1.5, 2.0, 2.5, 3, 4, 5, 6, 7, 8, 9, or at least 10 copies per genome. In some embodiments, an IDLV-recombinase system results in a frequency of integration of no more than 10, 9, 8, 7, 6, 5, 4, 3, 2, or no more than 1 copy per genome. In some embodiments, an IDLV-recombinase system results in a similar efficiency of integration as measure by comparing 5′ and 3′ junction assays, e.g., results in no more than 1.1, 1.2, 1.3, 1.4, 1.5, 1.6, 1.7, 1.8, 1.9, or 2.0-fold change in frequency of integration when comparing the results from 5′ and 3′ junction assays.

### Example 34. Assessing Sequence Specificity of IDLV-Recombinase Via Uniseq

[1118] This example describes determination of the integration specificity of an IDLV-recombinase system. Specifically, a unidirectional sequencing assay is employed in order to determine the sequences and locations of all IDLV-recombinase-mediated integration events occurring in the genome. This assay provides an unbiased profile of genome-wide specificity.

[1119] To conduct integration sequence profiling experiments, IDLV-recombinase systems, as described herein, or unmodified IDLV systems incapable of integration, are transfected into HEK293T cells as in Example 32. Genomic DNA is harvested at 14 days post-transduction and is subjected to unidirectional sequencing according to the protocol described. First, a next generation library is created by fragmentation of the genomic DNA followed by end repair and adaptor ligation. Next, genomic DNA fragments harboring IDLV-specific integrations are amplified by a two-step nested PCR approach using one of two sets of primers: 1) forward primers binding to the universal primer region U1 and reverse primers binding to the universal primer region U2 to detect integration mediated by the recombinase (see FIG. 8) or 2) forward primers binding to the 3′ LTR and reverse primers binding to the 5′ LTR to detect any IDLV integration events. PCR products are purified using AMPure XP beads (Beckman), visualized on a capillary gel electrophoresis instrument, and quantified by qPCR. Final libraries are sequenced on an Illumina MiSeq using 300 bp paired-end reads (Illumina), as according to manufacturer's instructions. Data are analyzed by mapping junction reads to a reference genome (e.g., hg38) and determining sites of integration.

[1120] In some embodiments, an IDLV-recombinase system is found to integrate into no more than 10000 unique genomic sites, e.g., nor more than 10000, 9000, 8000, 7000, 6000, 5000, 4000, 3000, 2000, 1000, 900, 800, 700, 600, 500, 400, 300, 200, or no more than 100 unique genomic sites. In some embodiments, an IDLV-recombinase system is found to integrate into no more than 100 unique genomic sites, e.g., nor more than 100, 90, 80, 70, 60, 50, 40, 30, 20, or no more than 10 unique genomic sites. In preferred embodiments, an IDLV-recombinase system is found to integrate into no more than 10 unique genomic sites, e.g., no more than 10, 9, 8, 7, 6, 5, 4, 3, 2, or no more than 1 unique genomic site. In some embodiments, an IDLV-recombinase system is found to integrate into at least 1 unique genomic site, e.g., at least 1, 2, 3, 4, 5, 6, 7, 8, 9, 10, 20, 30, 40, 50, 60, 70, 80, 90, 100, 200, 300, 400, 500, 600, 700, 800, 900, 1000, 2000, 3000, 4000, 5000, 6000, 7000, 8000, 9000, or at least 10000 unique genomic sites.

### Example 35: Selection of Lipid Reagents with Reduced Aldehyde Content

[1121] In this example, lipids are selected for downstream use in lipid nanoparticle formulations containing Gene Writing component nucleic acid(s), and lipids are selected based at least in part on having an absence or low level of contaminating aldehydes. Reactive aldehyde groups in lipid reagents may cause chemical modifications to component nucleic acid(s), e.g., RNA, e.g., template RNA, during LNP formulation. Thus, in some embodiments, the aldehyde content of lipid reagents is minimized.

[1122] Liquid chromatography (LC) coupled with tandem mass spectrometry (MS/MS) can be used to separate, characterize, and quantify the aldehyde content of reagents, e.g., as described in Zurek et al. The Analyst 124(9):1291-1295 (1999), incorporated herein by reference. Here, each lipid reagent is subjected to LC-MS/MS analysis. The LC/MS-MS method first separates the lipid and one or more impurities with a C8 HPLC column and follows with the detection and structural determination of these molecules with the mass spectrometer. If an aldehyde is present in a lipid reagent, it is quantified using a staple-isotope labeled (SIL) standard that is structurally identical to the aldehyde but is heavier due to C13 and N15 labeling. An appropriate amount of the SIL standard is spiked into the lipid reagent. The mixture is then subjected to LC-MS/MS analysis. The amount of contaminating aldehyde is determined by multiplying the amount of SIL standard and the peak ratio (unknown/SIL). Any identified aldehyde(s) in the lipid reagents is quantified as described. In some embodiments, lipid raw materials selected for LNP formulation are not found to contain any contaminating aldehyde content above a chosen level. In some embodiments, one or more, and optionally all, lipid reagents used for formulation comprise less than 3% total aldehyde content. In some embodiments, one or more, and optionally all, lipid reagents used for formulation comprise less than 0.3% of any single aldehyde species. In some embodiments, one or more, and optionally all, lipid reagents used in formulation comprise less than 0.3% of any single aldehyde species and less than 3% total aldehyde content.

### Example 36: Quantification of RNA Modification Caused by Aldehydes During Formulation

[1123] In this example, the RNA molecules are analyzed post-formulation to determine the extent of any modifications that may have happened during the formulation process, e.g., to detect chemical modifications caused by aldehyde contamination of the lipid reagents (see, e.g., Example 38).

[1124] RNA modifications can be detected by analysis of ribonucleosides, e.g., as according to the methods of Su et al. Nature Protocols 9:828-841 (2014), incorporated herein by reference in its entirety. In this process, RNA is digested to a mix of nucleosides, and then subjected to LC-MS/MS analysis. RNA post-formulation is contained in LNPs and must first be separated from lipids by coprecipitating with GlycoBlue in 80% isopropanol. After centrifugation, the pellets containing RNA are carefully transferred to a new Eppendorf tube, to which a cocktail of enzymes (benzonase, Phosphodiesterase type 1, phosphatase) is added to digest the RNA into nucleosides. The Eppendorf tube is placed on a preheated Thermomixer at 37° C. for 1 hour. The resulting nucleosides mix is directly analyzed by a LC-MS/MS method that first separates nucleosides and modified nucleosides with a C18 column and then detects them with mass spectrometry.

[1125] If aldehyde(s) in lipid reagents have caused chemical modification, data analysis will associate the modified nucleoside(s) with the aldehyde(s). A modified nucleoside can be quantified using a SIL standard which is structurally identical to the native nucleoside except heavier due to C13 and N15 labeling. An appropriate amount of the SIL standard is spiked into the nucleoside digest, which is then subjected to LC-MS/MS analysis. The amount of the modified nucleoside is obtained by multiplying the amount of SIL standard and the peak ratio (unknown/SIL). LC-MS/MS is capable of quantifying all the targeted molecules simultaneously.

[1126] In some embodiments, the use of lipid reagents with higher contaminating aldehyde content results in higher levels of RNA modification as compared to the use of higher purity lipid reagents as materials during the lipid nanoparticle formulation process. Thus, in preferred embodiments, higher purity lipid reagents are used that result in RNA modification below an acceptable level.

### Example 37: Formulation of Lipid Nanoparticles Encapsulating Firefly Luciferase mRNA

[1127] In this example, a reporter mRNA encoding firefly luciferase was formulated into lipid nanoparticles comprising different ionizable lipids. Lipid nanoparticle (LNP) components (ionizable lipid, helper lipid, sterol, PEG) were dissolved in 100% ethanol with the lipid component. These were then prepared at molar ratios of 50:10:38.5:1.5 using ionizable lipid LIPIDV004 or LIPIDVO05 (Table 23), DSPC, cholesterol, and DMG-PEG 2000, respectively. Firefly Luciferase mRNA-LNPs containing the ionizable lipid LIPIDVO03 (Table 23) were prepared at a molar ratio of 45:9:44:2 using LIPIDV003, DSPC, cholesterol, and DMG-PEG 2000, respectively. Firefly luciferase mRNA used in these formulations was produced by in vitro transcription and encoded the Firefly Luciferase protein, further comprising a 5′ cap, 5′ and 3′ UTRs, and a polyA tail. The mRNA was synthesized under standard conditions for T7 RNA polymerase in vitro transcription with co-transcriptional capping, but with the nucleotide triphosphate UTP 100% substituted with Ni-methyl-pseudouridine triphosphate in the reaction. Purified mRNA was dissolved in 25 mM sodium citrate, pH 4 to a concentration of 0.1 mg/mL.

[1128] Firefly Luciferase mRNA was formulated into LNPs with a lipid amine to RNA phosphate (N:P) molar ratio of 6. The LNPs were formed by microfluidic mixing of the lipid and RNA solutions using a Precision Nanosystems NanoAssemblr™ Benchtop Instrument, using the manufacturer's recommended settings. A 3:1 ratio of aqueous to organic solvent was maintained during mixing using differential flow rates. After mixing, the LNPs were collected and dialyzed in 15 mM Tris, 5% sucrose buffer at 4° C. overnight. The Firefly Luciferase mRNA-LNP formulation was concentrated by centrifugation with Amicon 10 kDa centrifugal filters (Millipore). The resulting mixture was then filtered using a 0.2 m sterile filter. The final LNP was stored at −80° C. until further use.

TABLE 23
Exemplary Ionizable Lipids

| | | Molecular | |
|---|---|---|---|
| LIPID ID | Chemical Name | Weight | Structure |
| LIPIDV003 | (9Z,12Z)-3-((4,4- bis(octyloxy)butanoyl) oxy)-2-((((3-(diethylamino) propoxy)carbonyl) oxy)methyl)propyl octadeca-9,12-dienoate | 852.29 | [chemical structure] |
| LIPIDV004 | Heptadecan-9-yl 8- ((2-hydroxy-ethyl)(8- (nonyloxy)-8- oxooctyl)amino) octanoate | 710.18 | [chemical structure] |
| LIPIDV005 | | 919.56 | [chemical structure] |

[1129] Prepared LNPs were analyzed for size, uniformity, and % RNA encapsulation. The size and uniformity measurements were performed by dynamic light scattering using a Malvern Zetasizer DLS instrument (Malvern Panalytical). LNPs were diluted in PBS prior to being measured by DLS to determine the average particle size (nanometers, nm) and polydispersity index (pdi). The particle sizes of the Firefly Luciferase mRNA-LNPs are shown in Table 24.

TABLE 24
LNP particle size and uniformity

| LNP ID | Ionizable Lipid | Particle Size (nm) | pdi |
|---|---|---|---|
| LNPV019-002 | LIPIDV005 | 77 | 0.04 |
| LNPV006-006 | LIPIDV004 | 71 | 0.08 |
| LNPV011-003 | LIPIDV003 | 87 | 0.08 |

[1130] The percent encapsulation of luciferase mRNA was measured by the fluorescence-based RNA quantification assay Ribogreen (ThermoFisher Scientific). LNP samples were diluted in 1×TE buffer and mixed with the Ribogreen reagent per manufacturer's recommendations and measured on a i3 SpectraMax spectrophotomer (Molecular Devices) using 644 nm excitation and 673 nm emission wavelengths. To determine the percent encapsulation, LNPs were measured using the Ribogreen assay with intact LNPs and disrupted LNPs, where the particles were incubated with 1×TE buffer containing 0.2% (w/w) Triton-X100 to disrupt particles to allow encapsulated RNA to interact with the Ribogreen reagent. The samples were again measured on the i3 SpectraMax spectrophotometer to determine the total amount of RNA present. Total RNA was subtracted from the amount of RNA detected when the LNPs were intact to determine the fraction encapsulated. Values were multiplied by 100 to determine the percent encapsulation. The Firefly Luciferase mRNA-LNPs that were measured by Ribogreen and the percent RNA encapsulation is reported in Table 25.

TABLE 25
RNA encapsulation after LNP formulation

| LNP ID | Ionizable Lipid | % mRNA encapsulation |
|---|---|---|
| LNPV019-002 | LIPIDV005 | 98 |
| LNPV006-006 | LIPIDV004 | 92 |
| LNPV011-003 | LIPIDV003 | 97 |

### Example 38: In Vitro Activity Testing of mRNA-LNPs in Primary Hepatocytes

[1131] In this example, LNPs comprising the luciferase reporter mRNA were used to deliver the RNA cargo into cells in culture. Primary mouse or primary human hepatocytes were thawed and plated in collagen-coated 96-well tissue culture plates at a density of 30,000 or 50,000 cells per well, respectively. The cells were plated in 1× William's Media E with no phenol red and incubated at 37° C. with 5% CO2. After 4 hours, the medium was replaced with maintenance medium (1× William's Media E with no phenol containing Hepatocyte Maintenance Supplement Pack (ThermoFisher Scientific)) and cells were grown overnight at 37° C. with 5% CO2. Firefly Luciferase mRNA-LNPs were thawed at 4° C. and gently mixed. The LNPs were diluted to the appropriate concentration in maintenance media containing 7.5% fetal bovine serum. The LNPs were incubated at 37° C. for 5 minutes prior to being added to the plated primary hepatocytes. To assess delivery of RNA cargo to cells, LNPs were incubated with primary hepatocytes for 24 hours and cells were then harvested and lysed for a Luciferase activity assay. Briefly, medium was aspirated from each well followed by a wash with 1×PBS. The PBS was aspirated from each well and 200 pL passive lysis buffer (PLB) (Promega) was added back to each well and then placed on a plate shaker for 10 minutes. The lysed cells in PLB were frozen and stored at −80° C. until luciferase activity assay was performed.

[1132] To perform the luciferase activity assay, cellular lysates in passive lysis buffer were thawed, transferred to a round bottom 96-well microtiter plate and spun down at 15,000 g at 4° C. for 3 min to remove cellular debris. The concentration of protein was measured for each sample using the Pierce™ BCA Protein Assay Kit (ThermoFisher Scientific) according to the manufacturer's instructions. Protein concentrations were used to normalize for cell numbers and determine appropriate dilutions of lysates for the luciferase assay. The luciferase activity assay was performed in white-walled 96-well microtiter plates using the luciferase assay reagent (Promega) according to manufacturer's instructions and luminescence was measured using an i3X SpectraMax plate reader (Molecular Devices). The results of the dose-response of Firefly luciferase activity mediated by the Firefly mRNA-LNPs are shown in FIG. 9A and indicate successful LNP-mediated delivery of RNA into primary cells in culture. As shown in FIG. 9A, LNPs were analyzed for delivery of cargo to primary human (FIG. 9A) and mouse (FIG. 9B) hepatocytes. The luciferase assay revealed dose-responsive luciferase activity from cell lysates, indicating successful delivery of RNA to the cells and expression of Firefly luciferase from the mRNA cargo.

### Example 39: LNP-Mediated Delivery of RNA to the Mouse Liver

[1133] To measure the effectiveness of LNP-mediated delivery of firefly luciferase containing particles to the liver, LNPs were formulated and characterized and tested in vitro prior to administration to mice. C57BL/6 male mice (Charles River Labs) at approximately 8 weeks of age were dosed with LNPs via intravenous (i.v.) route at 1 mg/kg. Vehicle control animals were dosed i.v. with 300 pL phosphate buffered saline. Mice were injected via intraperitoneal route with dexamethasone at 5 mg/kg 30 minutes prior to injection of LNPs. Tissues were collected at necropsy at or 6, 24, 48 hours after LNP administration with a group size of 5 mice per time point. Liver and other tissue samples were collected, snap-frozen in liquid nitrogen, and stored at −80° C. until analysis.

[1134] Frozen liver samples were pulverized on dry ice and transferred to homogenization tubes containing lysing matrix D beads (MP Biomedical). Ice-cold 1× luciferase cell culture lysis reagent (CCLR) (Promega) was added to each tube and the samples were homogenized in a Fast Prep-24 5G Homogenizer (MP Biomedical) at 6 m/s for 40 seconds. The samples were transferred to a clean microcentrifuge tube and clarified by centrifugation. Prior to luciferase activity assay, the protein concentration of liver homogenates was determined for each sample using the Pierce™ BCA Protein Assay Kit (ThermoFisher Scientific) according to the manufacturer's instructions. Luciferase activity was measured with 200 pg (total protein) of liver homogenate using the luciferase assay reagent (Promega) according to manufacturer's instructions using an i3X SpectraMax plate reader (Molecular Devices). Liver samples revealed successful delivery of mRNA by all lipid formulations, with reporter activity following the ranking LIPIDV005>LIPIDV004>LIPIDV003 (FIG. 10). As shown in FIG. 10, Firefly luciferase mRNA-containing LNPs were formulated and delivered to mice by iv, and liver samples were harvested and assayed for luciferase activity at 6, 24, and 48 hours post administration. Reporter activity by the various formulations followed the ranking LIPIDV005>LIPIDV004>LIPIDV003. RNA expression was transient and enzyme levels returned near vehicle background by 48 hours. Post-administration. This assay validated the use of these ionizable lipids and their respective formulations for RNA systems for delivery to the liver.

[1135] Without wishing to be limited by example, the lipids and formulations described in this example are support the efficacy for the in vivo delivery of other RNA molecules beyond a reporter mRNA. All-RNA Gene Writing systems can be delivered by the formulations described herein. For example, all-RNA systems employing a Gene Writer polypeptide mRNA, Template RNA, and an optional second-nick gRNA are described for editing the genome in vitro by nucleofection, by using modified nucleotides, by lipofection, and for editing cells, e.g., primary T cells. As described in this application, these all-RNA systems have many unique advantages in cellular immunogenicity and toxicity, which is of importance when dealing with more sensitive primary cells, especially immune cells, e.g., T cells, as opposed to immortalized cell culture cell lines. Further, it is contemplated that these all RNA systems could be targeted to alternate tissues and cell types using novel lipid delivery systems as referenced herein, e.g., for delivery to the liver, the lungs, muscle, immune cells, and others, given the function of Gene Writing systems has been validated in multiple cell types in vitro here, and the function of other RNA systems delivered with targeted LNPs is known in the art. The in vivo delivery of Gene Writing systems has potential for great impact in many therapeutic areas, e.g., correcting pathogenic mutations), instilling protective variants, and enhancing cells endogenous to the body, e.g., T cells. Given an appropriate formulation, all-RNA Gene Writing is conceived to enable the manufacture of cell-based therapies in situ in the patient.

### Example 40: Use of an Insulator Configuration Surrounding a DNA Recognition Sequence for Improving the Stability of Transgene Expression after Recombinase-Mediated Integration

[1136] In this example, the stability of expression of an integrated transgene is improved through the use of insulator configurations as described in this invention. A DNA recognition sequence comprised on a template nucleic acid will ultimately be split into two terminal recombinase transfer sequences after recombinase-mediated integration. Accordingly, this example describes a configuration in which insulator sequences are located upstream and downstream of the DNA recognition sequence, such that recombination places the insulators inside of the recombinase transfer sequences but at the termini of the inserted DNA. This configuration thus provides an approach by which entire payload of the template nucleic acid, less the DNA recognition sequence, is insulated from incoming chromosomal silencing effects and from outgoing transcriptional activity as described herein (see, e.g., FIGS. 11 and 12).

[1137] In order to determine the effect of the insulator configuration on transgene expression, a template nucleic acid either comprising or lacking insulators as described herein is integrated into cells. Briefly, HEK293T and HepG2 cells are nucleofected using varying concentrations of (1) an expression plasmid for producing a recombinase capable of catalyzing recombination using the DNA recognition sequence of (1), e.g., a recombinase comprising the sequence of any of SEQ ID NO: n (e.g., SEQ ID NOs: 1-12,677 (e.g., SEQ ID NOs: 1-11,432)), wherein n is a corresponding number of the DNA recognition sequence included on the template plasmid (e.g., wherein a recombinase of SEQ ID NO: 1 is chosen, a LeftRegion of SEQ ID NO: 13,001 or a right region of SEQ ID NO: 26,001 is chosen); and (2) a template plasmid comprising a reporter cassette, e.g., the constitutive CMV promoter driving EGFP expression, a DNA recognition sequence, e.g., a DNA recognition sequence comprised in a LeftRegion of SEQ ID NO: (n+13,000) or a RightRegion comprising a sequence of SEQ ID NO: (n+26,000), wherein n is chosen from any of 1-12,677 (e.g., any of 1-11,432) (e.g., a sequence of any of SEQ ID NOs: 13,001-25,677 (e.g., SEQ ID NOs: 13,001-24,432) or SEQ ID NOs: 26,001-38,677 (e.g., SEQ ID NOs: 26,001-37,432)), and optionally insulators placed immediately upstream and downstream of the DNA recognition sequence, e.g., the 5′-HS4 chicken β-globin insulator. In some embodiments, the cells used comprise an endogenous target sequence that is also recognized by the recombinase of (1), such that the recombinase is capable of catalyzing the recombination of the DNA recognition sequence of (2) with the endogenous target sequence. In some embodiments, a recombinase without an endogenous target site in the native genome is used for the purpose of experimentation by first integrating an appropriate target site into the genome, e.g., by creating a landing pad comprising the target site. As an example, a landing pad cell line may be generated by transducing HEK293T cells with a lentiviral vector comprising the attB site of the recombinase, e.g., comprising an amino acid sequence of SEQ ID NO: 11,636, comprising the attB sequence 5′-GGCTTGTCGACGACGGCGGTCTCCGTCGTCAGGATCAT-3′. Accordingly, the recombinase expression plasmid encodes the protein sequence of SEQ ID NO: 11,636 and the DNA recognition sequence of the template plasmid comprises a sequence from the LeftRegion or RightRegion comprising the sequence 5′-GGTTTGTCTGGTCAACCACCGCGGTCTCAGTGGTGTACGGTACAAACC-3′.

[1138] At three days post-transduction, nucleofection efficiency is determined by measuring EGFP expression by flow cytometry. Subsequently, EGFP expression is similarly assessed on days 7, 10, 14, 21, 28, and 60 post-transduction. At day 21, when plasmid DNA is expected to have been diluted out and GFP fluorescence corresponds to expression from the integrated reporter cassette, a baseline reading of integration frequency is determined by assessing the percent of cells found to be GFP+, while a baseline reading of reporter expression level is determined by assessing median fluorescence, as measured by flow cytometry. The stability of transgene expression is then determined by assessing both the percent of cells remaining GFP+ and the median fluorescence levels at days 28 and 60 post-transduction. Additionally, at days 28 and 60 post-transduction, a portion of cells is first treated with an inhibitor of histone deactylase (HDAC), e.g., trichostatin A (TSA), or an inhibitor of DNA methylation, e.g., 5-azacytidine (5-aza), prior to fluorescence measurements.

[1139] In some embodiments, cells treated with template nucleic acid comprising the described insulator configuration will show a decrease in the loss of frequency of expression (e.g., percent GFP+) and/or loss of reporter expression (e.g., median fluorescence) at day 28 and/or day 60 post-transduction, e.g., at least 1.1, 1.2, 1.3, 1.4, 1.5, 1.6, 1.7, 1.8, 1.9, 2.0, 2.5, 3, 4, 5, 6, 7, 8, 9, or at least 10-fold lower than cells treated with the template nucleic acid lacking the insulators.

[1140] In some embodiments, cells treated with template nucleic acid comprising the described insulator configuration will show a higher frequency of expression (e.g., percent GFP+) and/or a higher level of expression (e.g., median fluorescence) at day 28 and/or day 60 post-transduction, e.g., at least 1.1, 1.2, 1.3, 1.4, 1.5, 1.6, 1.7, 1.8, 1.9, 2.0, 2.5, 3, 4, 5, 6, 7, 8, 9, or at least 10-fold higher than cells treated with the template nucleic acid lacking the insulators. In some embodiments, cells treated with template nucleic acid comprising the described insulator configuration will demonstrate a smaller increase in frequency of expression (e.g., percent GFP+) and/or level of expression (e.g., median fluorescence) after further treatment with TSA or 5-aza relative to no treatment with TSA or 5-aza, e.g., at least at least 1.1, 1.2, 1.3, 1.4, 1.5, 1.6, 1.7, 1.8, 1.9, 2.0, 2.5, 3, 4, 5, 6, 7, 8, 9, or at least 10-fold smaller increase than cells treated with the template nucleic acid lacking the insulators. In some embodiments, cells treated with template nucleic acid comprising the described insulator configuration will demonstrate an increase in frequency of expression (e.g., percent GFP+) and/or level of expression (e.g., median fluorescence) after further treatment with TSA or 5-aza of less than 10, 9, 8, 7, 6, 5, 4, 3, 2.5, 2.0, 1.9, 1.8, 1.7, 1.6, 1.5, 1.4, 1.3, 1.2, or less than 1.1-fold increase as compared to no treatment with TSA or 5-aza.

### Example 41: Insulator Configurations for Recombinase-Mediated Transgene Integration Assayed in a 32D Cell-Based Genotoxicity Assay

[1141] In this example, the murine myeloblast-like cell line 32D is used as a sensor cell line for genotoxicity. In brief, 32D cells are treated with a genome engineering system, e.g., a recombinase system as described herein, and subsequently grown in vitro in the absence of IL-3 or implanted into mice for in vivo transformation assessment. Genotoxicity of a system is assessed by quantifying the number of colonies capable of IL-3-independent growth (in vitro) or by monitoring implanted mice for the rates of tumor formation and mortality (Li et al Mol Ther 17(4):716-724 (2009), the methods of which are incorporated by reference). Here, the 32D cell line is used to assess genotoxicity in cells treated with template nucleic acid comprising an insulator configuration as described herein, e.g., as described in Example 40.

[1142] In order to determine the effect of the insulator configuration on genotoxicity, a template nucleic acid either comprising or lacking insulators as described herein is integrated into cells. Briefly, 32D cells are nucleofected using varying concentrations of (1) a template plasmid and (2) a recombinase expression vector, as described in Example 40 Additionally, cells are nucleofected with (1) only as a negative control or transduced with gammaretrovirus at a target MOI (e.g., MGNP2 at MOI of 1-10) as a positive control. At 24 hr post-transduction, cells are washed and split into 5 independent pools for in vitro transformation assessment, 5 pools for in vivo transformation assessment, and one for transfection or transduction efficiency. First, one subculture is used to determine the transduction efficiency by measuring the fraction of GFP+ cells by flow cytometry at 48 hr post-transduction. The in vitro assessment pools are plated and grown in the absence of IL-3 for quantification of colonies capable of IL-3-independent growth. The remaining 5 subcultures are expanded for ˜2 weeks in the presence of IL-3 before collecting, washing with HBSS, enumerating, and injecting into female C3H/HeJ mice (one independent pool per mouse, 5 mice each). Treated mice are monitored weekly for up to 18 weeks post-transplantation for tumor formation, as previously described.

[1143] In some embodiments, the use of a template plasmid comprising an insulator configuration as described herein will result in the formation of fewer IL-3 independent colonies, e.g., at least 1.1, 1.2, 1.3, 1.4, 1.5, 1.6, 1.7, 1.8, 1.9, 2.0, 2.5, 3, 4, 5, 6, 7, 8, 9, or at least 10-fold fewer colonies as compared to a template plasmid lacking insulators. In some embodiments, the fraction of mice developing tumors when implanted with cells treated with template plasmid comprising an insulator configuration as described herein will be lower, e.g., at least 20%, 40%, 60%, 80%, or 100% lower than mice implanted with cells treated with a template plasmid lacking insulators. In some embodiments, the median latency of tumors derived from cells treated with a template plasmid comprising an insulator configuration as described herein will be longer, e.g., at least 1.1, 1.2, 1.3, 1.4, 1.5, 1.6, 1.7, 1.8, 1.9, or at least 2-fold longer than those derived from cells treated with a template plasmid lacking insulators. In some embodiments, the 18-week survival rate of mice implanted with cells treated with template plasmid comprising an insulator configuration as described herein will be higher, e.g., at least 1.1, 1.2, 1.3, 1.4, 1.5, 1.6, 1.7, 1.8, 1.9, or at least 2-fold higher than that of mice implanted with cells treated with template plasmid lacking insulators.

### Example 42: Recombinase System with Insulators is Designed to Reduce Interference of Payload on Surrounding Genome-RNA Seg for Transcriptome Analysis

[1144] This example describes methods for measuring a reduction in impact of an integrated transgene on the surrounding genome enabled through the use of insulator configurations as described in this invention. Given a genomic integration has the potential to impact expression of endogenous genes in the vicinity of the integration event, it is highly desirable for a therapeutic insertion to have components to minimize this change in local gene expression. Here, the inclusion of an insulator configuration as described herein, e.g., as described in Example 40, in a template nucleic acid is assessed for impact on the change in gene expression relative to a template nucleic acid lacking insulators.

[1145] In this example, human primary T cells are nucleofected with systems employing template plasmids comprising insulator configurations as described herein, e.g., Example 40, or template plasmids lacking insulators. Cells are harvested at days 14 and 28 post-nucleofection and RNA is extracted and purified. Briefly, first strand cDNA is generated using the SuperScript® VILO™ cDNA Synthesis Kit (ThermoFisher), as according to manufacturer's instructions, followed by second strand synthesis using DNA Polymerase I. cDNA is purified using Agencourt AMPure XP beads (Beckman Coulter), as according to manufacturer's instructions, and used to prepare DNA libraries by fragmentation, size selection, adaptor ligation, and qPCR quantification. Libraries are sequenced using an Illumina HiSeq 2000 and RNA-seq reads are aligned to reference transcripts to determine a global gene expression profile. Additionally, the expression of specific transcripts located closed to the recombinase-mediated integration site is quantified by qPCR or ddPCR using primers and probes specific to the transcripts.

[1146] In some embodiments, integration using a template plasmid comprising an insulator configuration as described herein will result in a change in expression that is lower, e.g., at least 1.1, 1.2, 1.3, 1.4, 1.5, 1.6, 1.7, 1.8, 1.9, 2.0, 2.5, 3, 4, 5, 6, 7, 8, 9, or at least 10-fold lower than the change in expression after integration using a template plasmid lacking insulators for at least one gene local to the site of integration. In some embodiments, integration using a template plasmid comprising an insulator configuration as described herein will result in a less than 10, 9, 8, 7, 6, 5, 4, 3, 2.5, 2.0, 1.9, 1.8, 1.7, 1.6, 1.5, 1.4, 1.3, 1.2, or a less than 1.1-fold change in gene expression for at least one gene local to the site of integration, compared to otherwise similar untreated cells. In some embodiments, integration using a template plasmid comprising an insulator configuration as described herein will result in a less than 10, 9, 8, 7, 6, 5, 4, 3, 2.5, 2.0, 1.9, 1.8, 1.7, 1.6, 1.5, 1.4, 1.3, 1.2, or a less than 1.1-fold change in expression for at least 90%, e.g., at least 90%, 95%, 96%, 97%, 97%, 99%, 99.5% or at least 99.9% of global transcripts, compared to otherwise similar untreated cells.

### Example 43: Identification of attB and attP Attachment Sites for Exemplary Serine Integrases

[1147] Putative attB and attP attachment sites were predicted by modeling the biology of phage/host recombinase driven integration. These two DNA sequences are recognized by the serine recombinase enzyme multimeric complex, where attB represents the target integration site on the host and attP represents the donor strand integration cleavage site. To predict these sequence, viral/phage genomes were mapped to their host prokaryote genomes through their respective serine recombinase protein sequences. In any case where a match was found between the serine recombinase in the virus and the host, the recombinase DNA sequence was then used as an anchor for an alignment. Starting with the aligned recombinases, the sequences 5′ and 3′ from the serine recombinase sequence in both virus and host DNA sequences were compared in the pre-integrated viral sequence relative to the post-integrated viral sequence in the prokaryotic host. This process was continued until the sequences ceased to match, thereby mapping the viral genome onto the prokaryotic host. The junctions between the virus and the host were then used to predict a putative host target sequence left and right half attachment sites, attB left (attBL) and attB right (attBR). Also predicted were the viral attachment sites, attP left (attPL) and attP right (attPR). This data is shown in Table 26 below.

TABLE 26

| | | SEQ | | SEQ | | SEQ | | SEQ |
|---|---|---|---|---|---|---|---|---|
| | | ID | | ID | | ID | | ID |
| FL58Accession | attBL | NO | attBR | NO | attPL | NO | attPR | NO |
| MF172979.1:: | TTACATCTTCA | | AAATGATGGG | | TGGAAGAAAT | | TGGAATTCAAG | |
| ASD51140.1 | AGCTCACTTGC | | ACGAAGCTATT | | GACGCGTCTG | | TTAAATATCCT | |
| | AAC | | ATGC | | TAAA | | ACA | |
| YP_006906969.1 | CGCGGTCGCG | | GGGGTCCGGC | | ACCCACGTCA | | GCGAGTCCTTT | |
| | CCGCGTGCGG | | AGGAACAGCC | | GTGGATCTAA | | AGAGACACTG | |
| | TCGTT | | GCCAG | | AGGA | | ACCC | |
| KU517658.1:: | GCTACATAGTC | | CTGCAGTGGCA | | AAATGCTCGG | | TCTTTAATGTA | |
| AMB17413.1 | GCCAGTACCTC | | GCAAAATCAAT | | TACATGAAAA | | GCGCCCAAATG | |
| | CCT | | GTT | | AGCG | | CT | |
| MK448719.1:: | TCAGGTAGTG | | TCCTCATCACTC | | TTAGTCTTTTT | | GTGGTCAGGA | |
| QBX16516.1 | AACCGTTTTTT | | TTTATTTTTTGA | | GGTAGAAGGA | | AATTATCATTT | |
| | GTTG | | A | | ACA | | GAT | |
| MK448825.1:: | AATTAGTAGTG | | AAGACAAGAT | | CTAGTCTTTCT | | AAAATGGTGTT | |
| QBX22171.1 | AACCGTTTTTT | | GTGTCAATTCG | | GATAGAATGA | | CGGATTGATTT | |
| | GTG | | GCAC | | GCA | | ATA | |
| MF172979.1:: | TTACATCTTCA | | AAATGATGGG | | TGGAAGAAAT | | TGGAATTCAAG | |
| ASD51126.1 | AGCTCACTTGC | | ACGAAGCTATT | | GACGCGTCTG | | TTAAATATCCT | |
| | AAC | | ATGC | | TAAA | | ACA | |
| MK448846.1:: | TCTCGTATTGA | | TTATGTGTGCG | | CTAGTCTTTTT | | TTTCGAAACTC | |
| QBX23238.1 | GGTGGCGATTT | | TTGCCTAAAAA | | GATAGAAAAA | | TTAGGTAGAGT | |
| | TTT | | ATG | | GCA | | GTA | |
| MK448720.1:: | AGAATTATATA | | TCTGGCTGTTT | | CTAGTTAATTT | | AAAACGGTCA | |
| QBX16591.1 | ATAATACCCAT | | TTTATGAATGG | | CAAAATATCTC | | GGTTATCGAAA | |
| | GGT | | AAT | | AA | | TATA | |
| MG711462.1:: | TATAAACAACA | | TGCTATATCTG | | TTGTGCATTGT | | AAAACTTACGT | |
| AUV56418.1 | TAGAGCGGTC | | CTATTCTGTTA | | ACACCTTGAT | | TTTTCAGGTGG | |
| | AATA | | CGC | | AAC | | CTT | |
| MG711466.1:: | GCTTTTTGAAA | | CCCCATTCAAG | | ATGATCTATAC | | AGAATCGAACT | |
| AUV56714.1 | AAACGGAGGT | | CGCGCTACCAA | | CGTAGGCGAA | | CACGGCCTCTT | |
| | TTCA | | AAC | | ATG | | GA | |
| MK448934.1:: | CAAATTTATCA | | ATGGCTTTTTT | | TTAATCCCCCT | | AACGAACAAGT | |
| QBX27918.1 | GATTTTTTTGA | | GTGATTAGCAA | | TAACAGTTTCC | | CATATCTATGT | |
| | CAT | | AAG | | AT | | GA | |
| MF595878.1:: | ATTCACAAATG | | GAGCGTTTTTG | | AATGGAATAT | | AAATCCTTTAT | |
| ATB52753.1 | ATCGGGAGGG | | TTTTGCAAAGG | | CATCTGAAAT | | AAATTCAAGGT | |
| | GAAG | | GTA | | CTCG | | TTA | |
| KM983329.1:: | TCTGTACCTAA | | CTATTCCTATT | | TATTTCATTAC | | TAGGGTATTTC | |
| AJA42614.1 | AACATCCATTA | | GGATCTTGAAG | | CTCTTACATGT | | ATTGCCTTCTTT | |
| | AAG | | ATA | | TA | | A | |
| MK448705.1:: | CTATGTCAACG | | AGGATTTTAGT | | TTATAAATTTT | | ATATCAAAATT | |
| QBX15858.1 | ACTTACTCAAA | | GTCATTGATTC | | TTTCACGTTCG | | ATTTTTGATTTT | |
| | CTT | | AAT | | GA | | TA | |
| MK448873.1:: | CGCCCTCTTTA | | AGGATTTTAGT | | TTATCGTTTCC | | ATATCAAAATT | |
| QBX24735.1 | CCAATTATTCA | | GCCATTGATTC | | TAGTCGGGTA | | ATTTTTGATTTT | |
| | GCG | | AAT | | TTT | | TA | |
| MK448940.1:: | TCTTATGAAAA | | AGAAATTTACT | | CTAAACTGGT | | ACATTGCTATC | |
| QBX28214.1 | AGGAGCTTGTC | | ATCCTACATTTC | | TTTTTAGAGAT | | AAGTGGAAGA | |
| | CTT | | AA | | TGT | | TATA | |
| KT337339.1:: | AAAAGCACGCT | | TTCGCTCACAA | | CACCAACATCT | | CTTACCGAATG | |
| ALA47468.1 | GATAATCAGCA | | TAAGAGAGAA | | CAATCAAGGA | | CAACACGAGAT | |
| | AGA | | CTT | | TAG | | CAC | |
| MK448714.1:: | TTTATCCGCAT | | GCGCAAAAAA | | TTATTTAAATG | | ATATCGAGATC | |
| QBX16272.1 | TTTCCGATGCG | | CAAACAAATTT | | TACCCCAAGC | | AAGTGGAGAA | |
| | TTT | | AGAT | | GTC | | TTTG | |
| MK448874.1:: | ATATAACAAAA | | CAAATTTAGTA | | AAATGAAAAA | | GTATCAAAATT | |
| QBX24736.1 | GCGAGCGAGG | | TCATTCATTTCC | | TCCTTTCAAAT | | TTATGGAAAAT | |
| | TAGT | | AC | | ACG | | TTA | |
| MK448927.1:: | AGATACTCTTT | | AGTGTTTAACT | | TTACATTTCCT | | ACATGGAAATT | |
| QBX27562.1 | CCAACCTATTT | | TACACTTATCTC | | CAGCATCAAT | | TTATTTAAAAA | |
| | GTT | | TA | | AAG | | ATA | |
| CP019719.1:: | AGTTCTTGGGG | | GGACATCCTTT | | CTCCTCATGCA | | TCGTATCAATG | |
| QHZ54073.1 | AATCAAATGAA | | GATCGCGTATA | | TATGATAAGT | | GATCCTCATGC | |
| | GAG | | CCG | | AAT | | AT | |
| MK448715.1:: | ATTTTATCAGA | | CCCTGTTTTGC | | TTATGATAGTT | | GCATTGATATT | |
| QBX16366.1 | GTTTCCGCTCT | | TACCGAGTATT | | CGCCCCAAAG | | TTTTTCAATTTT | |
| | GTT | | AAG | | GTC | | TA | |
| MK448826.1:: | GTATATTTAAA | | ATGTATCAAGT | | AATTATTCATA | | GAATTGATATA | |
| QBX22213.1 | GTCTATTTAAA | | GAACACTATTA | | TTTGCCATTTA | | TTTTTGAATTTT | |
| | CAG | | ATA | | AA | | TA | |
| MK448844.1:: | AACACCAGTCT | | CGGTATTGTAT | | TCAAAATGTA | | GCATAGATTTA | |
| QBX23130.1 | TTCGACTGGTG | | CAAGTTAATCA | | TCAAAGTCGT | | ATGCTAGATAT | |
| | CAA | | GAA | | CCGA | | ATA | |
| MK448875.1:: | TAATATCAACG | | AATTACAGTAT | | TTATAAATTTT | | AAATCAACGTT | |
| QBX24786.1 | ACTTACACAAA | | TTAGGAGCACC | | TTTCACGTTCG | | ATTTTTAAATT | |
| | CTT | | TAC | | GA | | GTA | |
| MK448898.1:: | AGACGGTCAA | | AATTACTGTAT | | TTAAGCTTGTA | | AAATCAACGTT | |
| QBX26003.1 | CAGACCGCCTT | | TTAGGAGCACC | | ATTTCATTTCA | | ATTTTTAAATT | |
| | TTAT | | GAC | | AG | | GTA | |
| MK448672.1:: | AAAGATAAAA | | AGCATTATTTA | | AAATGAAAAT | | ATCGATATTAT | |
| QBX14038.1 | CAAAAGAGGT | | GGTACTACAAC | | CAACGTAACA | | TTTTAAGTTTTA | |
| | AAAAC | | TAG | | AGCT | | A | |
| JX507079.1:: | CCCCAGAGAG | | AGGCGGCGGG | | TAAATGGTGG | | AAGGGTTGGC | |
| AFU62848.1 | ACGGGTTTGTC | | AATCGAACCCG | | CGGAACACGG | | CTTGGGTAAAT | |
| | TTTT | | CGTC | | AACC | | GGTG | |
| KX077896.1:: | AGTGGTCCAA | | CGCATATCTCC | | TATGTTAAAG | | GTTTGATAGGT | |
| ANM47644.1 | AAATAGAAAG | | TTAAAAATTTTT | | AAAAACGATA | | TTCTTGATAAG | |
| | TAGAA | | TC | | TTGT | | TCA | |
| MK448674.1:: | CTCAATTGTGA | | AGTAGACGAA | | CTAATCTTTCT | | TAGAGGGGAC | |
| QBX14111.1 | GGTGGCGATTT | | AGGCTGTAACA | | GATAGAATAA | | TGAGGTAGAA | |
| | TTT | | AAAG | | GCA | | TTATA | |
| MK448741.1:: | CTCAATTGTGA | | GTGACTGTGAC | | CTAATCTTTCT | | TAGAGGGGAC | |
| QBX17591.1 | GGTGGCGATTT | | TGAAAGGTTGC | | GATAGAATAT | | AGAGGTAGAC | |
| | TTT | | AGT | | GCA | | TTGTA | |
| MK448752.1:: | CCTTGAAGATG | | AAAAGACAAA | | ATGACAGATA | | AAAATTGAAAA | |
| QBX18231.1 | CGAAAGGACT | | GTCAGTATAGA | | AACAACACGC | | ACTAGTTCATT | |
| | CTAG | | CTTT | | TCTC | | AA | |
| MK448811.1:: | CCTCAATTGCG | | GCACTGATATT | | GCTAATCTTTC | | GAAGAATGGT | |
| QBX21447.1 | AGGTGGCGAT | | TTGGAAAGAAC | | TGATAGAATA | | GACCGGTCATA | |
| | TTTT | | TTA | | AGC | | ATTA | |
| MK448935.1:: | ATCTCAATTGA | | GAGACTGCGA | | TCAGTCTTTTT | | TCGAAGGAAC | |
| QBX27959.1 | GGTGGCGATTT | | CCGAAAGGTTG | | GATAGAAGAA | | AGAAGTTGACT | |
| | TTT | | CGTT | | ACA | | TATA | |
| MK448994.1:: | TCAATTTCTGA | | GGAATTATTCT | | CTAATCTTTCT | | ATGTCCTGGTC | |
| QBX31154.1 | GGTGGCGATTT | | CCTTTCGAATA | | GATAGAATAA | | ACTTAAATTCT | |
| | TTT | | AGA | | GCA | | TCA | |
| MK448999.1:: | CATCTCAATTG | | GATACTGCGAC | | GTCAGTCTTTT | | TGGAAGGAAC | |
| QBX31462.1 | AGGTGGCGAT | | CGAAAGGTTGC | | TGATAGAAGA | | AGAAGTCGAC | |
| | TTTT | | GGT | | GAC | | CTGTA | |
| MN270275.1:: | TTATCTTGGAC | | CGCATATCTCC | | ATATGAACCC | | GTTTGATAGGT | |
| QGJ86433.1 | TATTTTCTTAG | | TTAAAAATTTTT | | TTTCTAATGTG | | TTCTTGATAAG | |
| | CC | | TC | | AGT | | TCA | |
| MN270276.1:: | GTGGTCCCAAA | | TTTTGAGAAGT | | ATGTTAAAGA | | GTGTGAGAAG | |
| QGJ86497.1 | ATAGAAAGTA | | CATCAAAGTAG | | AAAACGATAT | | TGAAGTTGGG | |
| | GAAT | | TAA | | TGTC | | GAATG | |
| MK448713.1:: | CTCAATTACGA | | TAAGTTAAGAA | | CTAGTCTTTTT | | ATTGTGAGTTA | |
| QBX16269.1 | GGTGGCGATTT | | AAAAATGAAAC | | GATAGAAAAA | | GTGGGTACGG | |
| | TTT | | TCA | | GCA | | ATTA | |
| MK448846.1:: | TCTCGTATTGA | | TTATGTGTGCG | | CTAGTCTTTTT | | TTTCGAAACTC | |
| QBX23239.1 | GGTGGCGATTT | | TTGCCTAAAAA | | GATAGAAAAA | | TTAGGTAGAGT | |
| | TTT | | ATG | | GCA | | GTA | |
| MK448719.1:: | TCAGGTAGTG | | TCCTCATCACTC | | TTAGTCTTTTT | | GTGGTCAGGA | |
| QBX16517.1 | AACCGTTTTTT | | TTTATTTTTTGA | | GGTAGAAGGA | | AATTATCATTT | |
| | GTTG | | A | | ACA | | GAT | |
| MK448666.1:: | ATTGGGTAGT | | CTTTAAAAATG | | CTAGTCCTTCT | | AAGAAGATAA | |
| QBX13693.1 | GAACCGTTTTT | | GCTTACGGATT | | GATAGAAGAG | | GAAAATCAGCC | |
| | TGTG | | GAT | | GCA | | TAA | |
| MK448825.1:: | AATTAGTAGTG | | AAGACAAGAT | | CTAGTCTTTCT | | AAAATGGTGTT | |
| QBX22172.1 | AACCGTTTTTT | | GTGTCAATTCG | | GATAGAATGA | | CGGATTGATTT | |
| | GTG | | GCAC | | GCA | | ATA | |

1-2. (canceled)

3. A system for modifying DNA comprising:
a) a template RNA comprising a DNA recognition sequence or a DNA molecule encoding the template RNA;
b) a retroviral structural polypeptide domain;
c) a retroviral reverse transcriptase polypeptide domain capable of reverse transcribing the template RNA, thereby producing a template DNA;
wherein b) and c) are substantially unable to integrate the template DNA into a target DNA;
d) a serine recombinase polypeptide domain, wherein the serine recombinase polypeptide domain binds the DNA recognition sequence and is capable of integrating the template DNA into the target DNA; or a nucleic acid molecule encoding the serine recombinase polypeptide domain; and
e) a retroviral envelope polypeptide domain, or a nucleic acid molecule encoding the retroviral envelope polypeptide domain;
wherein b), c), d), and e) are optionally part of the same polypeptide;
wherein:
(i) the template RNA further comprises a heterologous object sequence encoding a therapeutic effector;
(ii) the DNA recognition sequence of the template DNA is capable of being recombined by the serine recombinase polypeptide domain with a cognate DNA recognition sequence in a naturally occurring human genome and/or in Genome Reference Consortium Human Build 38 (GRCh38), and wherein the target DNA comprises the cognate DNA recognition sequence;
(iii) the serine recombinase polypeptide domain is capable of recombining the DNA recognition sequence of the template DNA with a cognate DNA recognition sequence in a naturally occurring human genome, and wherein the target DNA comprises the cognate DNA recognition sequence; and/or
(iv) the retroviral reverse transcriptase polypeptide domain does not comprise a D64V mutation, or wherein the retroviral reverse transcriptase polypeptide domain comprises a D116 or E152 mutation.

4-7. (canceled)

8. A fusion protein comprising:
one or both of a) a retroviral structural polypeptide domain, and b) a retroviral reverse transcriptase polypeptide domain; and
c) serine recombinase polypeptide domain.

9. A template RNA comprising:
a) a region comprising a DNA recognition sequence that is recognized by a serine recombinase polypeptide domain;
b) a retroviral attachment site;
wherein:
(i) the template RNA further comprises a heterologous object sequence encoding a therapeutic effector; or
(ii) the serine recombinase polypeptide domain comprises an amino acid sequence of any of SEQ ID NOs: 1-12,677, or an amino acid sequence having at least 70%, 75%, 80%, 85%, 90%, 95%, 96%, 97%, 98%, or 99% identity thereto.

10. (canceled)

11. The system of claim 3, wherein the therapeutic effector comprises a polypeptide or functional nucleic acid molecule.

12. The system of claim 11, wherein the functional nucleic acid molecule is an siRNA, lncRNA, asRNA, or miRNA.

13. The system of claim 3, wherein the target DNA is comprised in a human genome.

14. The system of claim 13, wherein the target DNA is present at least once in the human genome.

15. The system of claim 13, wherein the target DNA is present no more than 2 times in the human genome.

16. The system of claim 3, wherein:
(i) the retroviral structural polypeptide domain is a lentiviral structural polypeptide domain;
(ii) the retroviral reverse transcriptase polypeptide domain is a lentiviral reverse transcriptase polypeptide domain; and/or
(iii) the retroviral envelope polypeptide domain is a lentiviral envelope polypeptide domain.

17. The system of claim 3, wherein the system comprises a mutated retroviral integrase.

18. The system of claim 17, wherein the mutated retroviral integrase is a mutated lentiviral integrase.

19. The system of claim 3, wherein the retroviral structural polypeptide domain is a gag domain.

20. The system of claim 3, wherein the retroviral reverse transcriptase polypeptide domain is a pol domain.

21. The system of claim 3, wherein the retroviral envelope polypeptide domain is an env domain.

22. A method of modifying the genome of a cell comprising contacting the cell with the system of claim 3, thereby modifying the genome of the cell.

23. A method of modifying the genome of a cell comprising contacting the cell with the fusion protein of claim 8, thereby modifying the genome of the cell.

24. A method of modifying the genome of a cell comprising contacting the cell with the template RNA of claim 9, thereby modifying the genome of the cell.

25. A lipid nanoparticle (LNP), which comprises the system of claim 3.

26. A system for modifying DNA comprising:
a) a template RNA comprising a DNA recognition sequence, or a DNA molecule encoding the template RNA;
b) a retroviral structural polypeptide domain, or a nucleic acid molecule encoding the retroviral structural polypeptide domain;
c) a retroviral reverse transcriptase polypeptide domain capable of reverse transcribing the template RNA, thereby producing a template DNA, or a nucleic acid molecule encoding the retroviral reverse transcriptase polypeptide domain;
d) a retroviral envelope polypeptide domain, or a nucleic acid molecule encoding the retroviral envelope polypeptide domain;
wherein b) and c) together are integration-deficient or substantially unable to integrate the template DNA into a target DNA;
wherein b), c), and d) are optionally part of the same polypeptide;
wherein:
(i) the DNA recognition sequence is recognized by a serine recombinase polypeptide domain that comprises an amino acid sequence of any of SEQ ID NOs: 1-12,677, or an amino acid sequence having at least 70%, 75%, 80%, 85%, 90%, 95%, 96%, 97%, 98%, or 99% identity thereto; or
(ii) the system further comprises a serine recombinase polypeptide domain comprising an amino acid sequence of any of SEQ ID NOs: 1-12,677, or an amino acid sequence having at least 70%, 75%, 80%, 85%, 90%, 95%, 96%, 97%, 98%, or 99% identity thereto, wherein the serine recombinase polypeptide domain binds the DNA recognition sequence and is capable of integrating the template DNA into the target DNA; or a nucleic acid molecule encoding the serine recombinase polypeptide domain.

27. A method of modifying the genome of a cell comprising contacting the cell with the system of claim 26,
thereby modifying the genome of the cell.

The application's sequence listing, which the Patent Office published only in electronic form, follows.

SEQUENCE LISTING (39302 sequences)

SEQ ID NO: 1 - protein, 2445 aa, Unknown
  Description of Unknown: Integrase B2 sequence
  G3DSA:1.20.120.20,IPR036162,PS51737,IPR011109,TIGR01760,PF00239, G3DSA:1.10.10.2600,IPR006119,IPR016024,IPR010090,PF10145, SSF53041,cd00338,SSF48371,SM00857,IPR038109,PTHR37813, mobidb-lite,G3DSA:3.40.50.1390,PF07508,Coil
MASRIQGITVEIGGDTTKLSKALESVNKSIKGTQSGLKDVNKLLKLDPSNTELVVQKQKMLKDAIEATKEKLATLKTAAQQANEQLANGEITQQQYDALQREIVETEQNLRSLQDQAATTNATLAKIDEAGEKLQNIGSSVENVGKKFLPVTAAVTGLGTAAVKTAADFDSEMSKVSAISGATGDDFDQLRAKAREMGAKTKFSASEAASAMEYMAMAGWKTSDMLNGIEGVMNLAAASGEDLATTSDIVTDALTAFGLSAADSGHFADILAAASSNANTNVSMMGETFKYCAPIAGALGFSAEDTAEAIGLMANSGIKASQAGTSLRTIMNNLSGEVTFAGKNIGEVTIATSNADGSMRSLNDILADCRVAFSGLTESEKASNAEALVGKNAMSGFLALMNSSETDINKLRGAIENCDGASESMAETMQDNLNGQLTILKSQLEELAISFGDILMPTIRKIVSAVQQFVDKLNSMDEGTRETIIKIGLLAASIGPLLIVLGKTISTVGTAMRGFSSLAKGVRLLITHVGSASGVFSKLGVVLGGLSGPVVAVVAVIGTLVAAFMNLWNTNEEFRTAITGIWNDIVSKVKGFCDQLTQRINGLGFDFKDVTEVLKAVWDGLCQVLAPLFEGAFQNISTILGVVLDTLLGLFDVFSNVFSGNWSGAWEAVKGIFSSIWDGVKSVFSTTLTALKSALDVFLGLFGTDWQTVWGSIKSFFETVWSGISSFFSNTVSAIQSVATTVFTAVSSFFTTVLTSIQTTFSTIWTAISTAVSSVLNTIHTTVTTVWTAISTAISTVMNTISTTITSVWNGIYNTMKPLLDAFKYLFETIWQAIQILIGAALTAIQTKITSIWNAIVAFVTPILTGLQTTFSTVWSAIQTAISTVLTAIQTAVTTVWNAIVSFLSPLLTGIQTRMSTAWNAIKTVISTVLSAIQSTVSSIWSAISSKISGVVNGIKSVVSSGWNAMKSTVSSLSNSIKSAATTAFNSMKSGISSTISGIKSTITNGFNSAVSFIKGLAGQAFSWGSDMIGNIVSGIQSRIQDVASAVSGVADRIRSFLHFSVPDEGPLADMESWMPDFMQGLANGITTNTSLVTAAAENLSTTLSTSITNSMRGVEQAYSKSWAAISQTVKTGTAGVSAAMRSAWSSITTSTTSTWNSIKTTIQTSFAAVKSNVTSATAAVKSSMTSAWSAVKSLTTTSWNGIKSVITTAWNGIKSLTTSATASVKSSMTSAWNAVKTLTNTSWNGIKTVITTAWNSIKSLTTSSVSAVRSTATSGWNTLKSTTTSAFNSIKSTVSSAMSSLRSTVSSGVASIRSSFNSLGSIASSAYRWGADICSQMAAGVRAAAGSVIAAAENVASRVRSLLHFSVPDEGPLSDADTYMPDFMKLLATGIKKNVKSVVKAVQGLAGSMSNNLTTPVDSLGDWMDSVVGSFATTIKKSQSGIGSAARDVGSGIQSQLMSGLSGVKTQFQQLWTDLQGITKAAVGNMSDEVKQGFADMKTSIGELSSQTSSLGNAIRSLGDTFNSDFLKSLGNGISKVGDTVNTVTGLVDKLGSMKNTIGNLGSTMQNLGNVLGTENGGGLLSNIGSFLSKIGSADGGQIVSNFGNLISGLTSKMGGLGEGITGIISKLGSLSSSGGGILSNLGGLLSGVVTKIGGLGGSLSGLLSGVGSTLGGIAGSAGSAIAGLFGSVGTAVSGLAAGAGTALAGVASSAGGFLASAGTALAGLAGPAGIAVAAVGGIGLGLTALWKNCDGFREGVTNIWNKVTSVFSNGVNGKLDYIVTKSISRFARNTIDSLTCTRELRQLKPPVGIYFEKENIDTLDAKGELILTILSALAQDESRSISDNIRWSIQKKFQSGVPHINLKRMLGYELGANKQWVIVPEQAEIIRYIFDRFVKGQTANKIALELNQMEKFTVNGKKWSASSILIVLRNEKYVGDIEMQKTITKDFLTHRSSINKGEAPRYYVKNHHVGIIDRVTWDKVQTMLFEKPRADMTKGPGKKKVKSIKGSPFGNLRCGAILENGPDAGKPCGEGFFRTTYTGVANGYSDERSLKATGEDTGEYLEKYTYSYPVWRCKRKVGERDGEPPKNGSPDQKAYCRSKKGCMSDEEKEAANKRCPSERYHECALEQSFMELLYSMKRDFEQHGDASMIVAMFDNAYEQAVRLANNNSISVQRMATVENQIKEMEERLQDAISHQVAALREAALEQNVELNEALSNGEVTIDDIDLDIRSGLTPGSIGVSFYGTETEEGSEAQIYTELVNDLQERLKTLQQERQTIEEEQGVLAIMKKNFEYFLACLKELPDTNAGGMPLRVNGLDVQGTLLRDVDGNAIEGRKRAITSGKLKLTPERIAEAPDMLHFEKGIYCAFVESGVLQGDVATYKTNFGVTLTSKGNRRTLDSFMGYKRSDMDGNVVYVDAPYKVYGFSIQYRRYLTTAAKREREEAV

SEQ ID NO: 2 - protein, 1198 aa, Unknown
  Description of Unknown: Integrase B3 sequence
  PTHR30461:SF3,SM00857,G3DSA:1.10.10.2600,IPR036162,PF13408, PS51737,IPR025827,G3DSA:3.40.50.1390,IPR006119,IPR038109, PF07508,IPR011109,SSF53041,PF00239,PTHR30461, PS51736,Coil,cd00338
MRVSVNLNAQKPDTTTNAVIYARYSSHGQTEQSIEGQLAKGHEYAAAQGYTVVHEYIDRAMTGRNDNREAFQKMLSDTGKHQFQVVIVWKVDRFGRNREEIAFNKHTCKKNGVRVEYVAESLPNSPEAVILESVLEGMAEYYSIQLSQNIRRGQLESAKKCQCVGGSVPLGYTLDSDKHFVIDPQTAPVVKKIFDLYAEGATISEITGQLNEQGIRTARKQLFTKNSLTKLLKNEKYIGVYTYKDIVRVEGGVPAIVDESTFDRVQELLKINRRAPSHTWTKVEYLLTDKLFCGHCGSPMVGESGFSHTGAKYSYYGCIKRRREKACDKKPVRQDWIEALVLDETVKLLHDDELMEYIIDRTWEYYQVTDKVQEEKAVLEAQLAEVDKAINNLVRAIEAGIFNAATKSRMDELDAQKAALTASLADLELTSGIRITRDHIEYFLLRLRDLDVKDRECQKRLVQTFVNAVFIYDDGRVKITYNYSGQSSTITLNQIASAEKGKGFVCCLPCSTSSPRFPRGVAAFFVFWEKRLRINYQFQLFCAIMEAKTAEGERKMKKLLAVCLMALVCWVCAGYAEETRVGDTVIFGQYEQDGNLDNGSEPIAWLVLDVQGGKALLMSRYALDCLPFHDEKTDAAWNQSALNAWLQADFHAAFTDAEWAAIAPVTLADTAADGNPEWQNTDAEPAETHVFLFSYAQVMQYLPEQEQRKVSGTEYARSRGAKFLGFTTIGIGETDWWLRSPGKASYDACFLDVRGAVGTKCVTEKLGVRPALWMDLSADRNAFPYEQQVQAKQFAEQGDYAEATALLDTLGDYAGSVALAKEYRYQQAQAEAASGNYDAAIALYTELAGYADSDALCRASRYEKAVAAQEAGDYAGAMALLADAGQYADSMARLRECCKQQGISIYYFSEDAVNAGVDTGYAKQDTISGDDKHFGWRLGRFFLTGFTRVTADENQQPVFIKTLGDSVTLWFDLEQNIDALNGNAQLSLAADANGYDQQFGIPKTNFGRGTLIVRHTDYQNAKNEPAVYTDYLLAKGTTGANTRIVLHEEGDYEVALDYEVQDGELTHITSKFGNYRIFLRFSIRNGNCMVYPFDLLTGAELQNTSVAEAGFSLDLARSRYLDINVRRAVLVETANGVIEDERFNRPAKDGDRYTQEGIYTISVSNRYTGESTTKTIFVGSQELLETYVRNGFSLERLK

SEQ ID NO: 3 - protein, 1198 aa, Unknown
  Description of Unknown: Integrase B4 sequence
  PTHR30461:SF3,IPR036162,PS51737,IPR011109,PTHR30461, PF00239,G3DSA:1.10.10.2600,IPR006119,SSF48452,SSF53041, cd00338,SM00857,IPR011990,IPR025827,IPR038109, PS51736,PF13408,G3DSA:3.40.50.1390,PF07508,Coil
MRVSVNLNAQKPDTTTNAVIYARYSSHGQTEQSIEGQLAKGHEYAAAQGYTVVHEYIDRAMTGRNDNREAFQKMLSDTGKHQFQVVIVWKVDRFGRNREEIAFNKHTCKKNGVRVEYVAESLPNSPEAVILESVLEGMAEYYSIQLSQNIRRGQLESAKKCQCVGGSVPLGYTLDSDKHFVIDPQTAPVVKKIFDLYAEGATISEITGQLNEQGIRTARKQLFTKNSLTKLLKNEKYIGVYTYKDIVRVEGGVPAIVDESTFDRVQELLKINRRAPSHTWTKVEYLLTDKLFCGHCGSPMVGESGFSHTGAKYSYYGCIKRRREKACDKKPVRQDWIEALVLDETVKLLHDDELMEYIIDRTWEYYQVTDKVQEEKAVLEAQLAEVDKAINNLVRAIEAGIFNAATKSRMDELDAQKAALTASLADLELTSGIRITRDHIEYFLLRLRDLDVKDRECQKRLVQTFVNAVFIYDDGRVKITYNYSGQSSTITLNQIASAEKGKGFVCCLPCSTLTAISGRKSRHFLFFGENRTQIYYQFQLYCAIMEAKTAEGERKMKKLLAVCLTALVCWVCAGYAEETQVGDTVMFGQYEQDGNLDNGSEPIAWQVLDVQGGKALLMSRYALDCLPFHDEKTDAVWNQSALNAWLQADFHAAFTDAEWAAIAPVTLADTAADGNPEWKNTDAEPAETHVFLLSYAQVMQYLPEQEQRKVSGTEYARSRGAKFLGFTTIGIGETDWWLRSPGKESYDACFLDVRGAVGTKCVTEKLGVRPALWMDLSADRNAFPYEQQVQAKQLAEQGDYAKATALLDTLGDYAGSAALAKEYRYQQAQAEAASGNYDAAIALYTELAGYADSDALCRASRYEKAVAAQEAGDYAGAMALFADAGQYADSMARLRECCKQQGISIYYFSQDAVNAGVDTGYAKQDTISGDDKHFGWRLGRFFLTGFTRVTADENQQPVFIKTLGDSVTLWFDLEQNIDALNGNAQLSLAADANGYDQQFGIPKTNFGRGTLIVRHTDYQNAKNEPAVYTDYLLAKGTTGANTRIVLHEEGDYEVALDYEVQDGELTHITSKFGNYRIFLRFSIRNGNCMVYPFDLLTGAELQNTSVAEAGFSLDLARSRYLDINVRRAVLVETANGVIEDERFNRPAKDGDRYTQEGIYTISVSNRYTGESTTKTIFVGSQELLETYVRNGFSLERLK

SEQ ID NO: 4 - protein, 1097 aa, Unknown
  Description of Unknown: Integrase B5 sequence
  PTHR30461:SF3,IPR036162,PS51737,IPR011109,PTHR30461, PF00239,G3DSA:1.10.10.2600,IPR006119,SSF48452,SSF53041, cd00338,SM00857,IPR011990,IPR025827,IPR038109, PS51736,PF13408,G3DSA:3.40.50.1390,PF07508,Coil
MRVSVNLNAQKPDTTTNAVIYARYSSHGQTEQSIEGQLAKGHEYAAAQGYTVVHEYIDRAMTGRNDNREAFQKMLSDTGKHQFQVVIVWKVDRFGRNREEIAFNKHTCKKNGVRVEYVAESLPNSPEAVILESVLEGMAEYYSIQLSQNIRRGQLESAKKCQCVGGSVPLGYTLDSDKHFVIDPQTAPVVKKIFDLYAEGATISEITGQLNEQGIRTARKQLFTKNSLTKLLKNEKYIGVYTYKDIVRVEGGVPAIVDESTFDKVQELLKINRRAPSHTWTKVEYLLTDKLFCGHCGSPMVGESGFSHTGAKYSYYGCIKRRREKACDKKPVRQDWIEALVLDETVKLLHDDELMEYIIDRTWEYYQVTDKVQEEKAVLEAQLAEVDKAINNLVRAIEAGIFNAATKSRMDELDAQKAALTASLADLELTSGIRITRDHIEYFLLRLRDLDVKDRECQKRLVQTFVNAVFIYDDGRVKITYNYSGQSSTITLNQIASAEKGKGFVCCLPCSTSSPRFPRGVAALFLFWGKSGVNRLPISAVLCNNGSEPLRGWCWMCRAAIAPVTLADTAADGNPEWQNTDAEPAETHVFLLSYAQVMQYLPEQEQRKVSGTEYARSRGAKFLGFTTIGIGETDWWLRSPGKESYDACFLDVRGAVGTKCVTEKLGVRPALWMNLSADRSAFPYEQQVQAKQFAEQGDYAEATALLDTLGDYAGSAALAKEYRYQRAQAEAASGNYDAAIALYTELAGYADSDALCRASRYEKAVAAQEAGNYAGAMALFADAGQYADSMARLRECCKQQGISIYYFSADAVNAGVDTGYAKQDTISGDDKHFGWRLGRFFLTGFTRVTADENQQPVFIKTLGDSVTLWFDLEQDIDALNGNAQLSLAADANGYDQQFGIPKTNFGRGTLIVRHTDYQNAKNEPAVYTDYLLAKGTTGANTRIVLHEEGDYEVALDYEVQDSELTHITSKFGNYRIFLRFSIRNGNCMVYPFDLLTGAELQNTSVAEAGFSLDLARSRYLDINVRRAVLVETANGVIEDERFNRPAKDGDRYTQEGIYTISVSNRYTGESTTKTIFVGSQELLETYVRNGFSLERLK

SEQ ID NO: 5 - protein, 1097 aa, Unknown
  Description of Unknown: Integrase B6 sequence
  PTHR30461:SF3,SM00857,G3DSA:1.10.10.2600,IPR036162,PF13408, PS51737,G3DSA:3.40.50.1390,IPR025827,IPR006119,IPR038109, PF07508,IPR011109,SSF53041,PF00239,PTHR30461, PS51736,Coil,cd00338
MRVSVNLNAQKPDTTTNAVIYARYSSHGQTEQSIEGQLAKGHEYAAAQGYTVVHEYIDRAMTGRNDNREAFQKMLSDTGKHQFQVVIVWKVDRFGRNREEIAFNKHTCKKNGVRVEYVAESLPNSPEAVILESVLEGMAEYYSIQLSQNIRRGQLESAKKCQCVGGSVPLGYTLDSDKHFVIDPQTAPVVKKIFDLYAEGATISEITGQLNEQGIRTIRKQLFTKNSLTKLLKNEKYIGVYTYKDIVRVEGGVPAIVDKSTFDRVQELLKINRRAPSHTWTKVEYLLTDKLFCGHCGSPMVGESGFSHTGAKYSYYGCIKRRREKACDKKPVRQDWIEALVLDETVKLLHDDELMEYIIDRTWEYYQVTDKVQEEKAVLEAQLAEVDKAINNLVRAIEAGIFNAATKSRMDELDAQKAALTTSLADLELTSGIRITRDHIEYFLLRLRDLDVKDRECQKRLVQTFVNAVFVYDDGRVKITYNYSGQSSTITLNQIASAEKGKGFVCCLPCSTFSPRFPRGVAALFCFLGKTAANQLPISAVLCNNGSEPLRGWCWMCRAAIAPVTLADTAADGNPEWQNTDAEPAETHVFLLSYAQVMQYLPEQEQRKVSGTEYARSRGAKFLGFTTIGIGETDWWLRSPGKESYDACFLDVRGAVGTKCVTEKLGVRPALWMDLSADRNAFPYEQQVQAKQFAEQGDYAEATALLDTLGDYAGSAALAKEYRYQQAQAEAASGNYDAAIARYTELAGYADSDALCRASRYEKAVAAQEAGDYAGAMALFADAGQYADSMARLRECCKQQGISIYYFSADAVNAGVDTGYAKQDTISGDDKHFGWRLGRFFLTGFTRVTADENQQPVFIKTLGDSVTLWFDLEQDIDALNGNAQLSLAADANGYDQQFGIPKTNFGRGTLIVRHTDYQNAKNEPAVYTDYLLAKGTTGANTRIVLHEEGDYEVALDYEVQDGELTHITSKFGNYRIFLRFSIRNGNCMVYPFDLLTGAELQNTAVAEAGFSLDLARSRYLDINVRRAVLVETANGVIEDERFNRPAKDGDRYTQEGIYTISVSNRYTGESTTKTIFVGSQELLETYVRNGFSLERLK

SEQ ID NO: 6 - protein, 1097 aa, Unknown
  Description of Unknown: Integrase B7 sequence
  PTHR30461:SF3,IPR036162,PS51737,IPR011109,PTHR30461, PF00239,G3DSA:1.10.10.2600,IPR006119,SSF48452,SSF53041, cd00338,SM00857,IPR011990,IPR025827,IPR038109, PS51736,PF13408,G3DSA:3.40.50.1390,PF07508,Coil
MRVSVNLNAQKPDTTTNAVIYARYSSHGQTEQSIEGQLAKGHEYAAAQGYTVVHEYIDRAMTGRNDNREAFQKMLSDTGKHQFQVIIVWKVDRFGRNREEIAFNKHTCKKNGVRVEYVAESLPNSPEAVILESVLEGMAEYYSIQLSQNIRRGQLESAKKCQCVGGSVPLGYTLDSDKHFVIDPQTAPVVKKIFDLYAEGATISEITGQLNEQGIRTIRKQLFTKNSLTKLLKNEKYIGVYTYKDIVRVEGGVPAIVDKSTFDRVQELLKINRRAPSHTWTKVEYLLTDKLFCGHCGSPMVGESGFSHTGAKYSYYGCIKRRREKACDKKPVRQDWIEALVLDETVKLLHDDELMEYIIDRTWEYYQVTDKVQEEKAVLEAQLAEVDKAINNLVRAIEAGIFNAATKSRMDELDAQKAALTASLADLELTSGIRITRDHIEYFLLRLRDLDIKDRECQKRLVQTFVNAVFVYDDGRVKITYNYSGKSSTITLNQIDGAEKGKGFVCCLPCSTSSPRFPRGVAALFCFLGKTAANQLPISAVLCNNSSEPLRGWCWMCRAAIAPVTLADTAADGNPEWQNTDAEPVEARVFLLSYAEAVRYFPEQEQRKVSGTEYARSRGAKFLGFTTIGIGETDWWLRSPGKESYDACFLDVRGAVGTKCVTEKLGVRPALWMDLSADRNAFPYEQQVQAKQFAEQGDYAEATALLDTLGDYAGSAALAKEYRYQQAQAEAASGNYDAAIALYTELAGYADSDALCRASRYEKAVAAQEAGDYAGAMALFADAGQYADSMARLRECCKQQGISIYYFSADAVNAGVDTGYANQDTISGDDKHFGWRLGRFFLTGFTRVTADENQQPVFIKTLGDSVTLWFDLEQDIDALNGNAQLSLAADANGYDQQFGIPKTNFGRGTLIVRHTDYQNAKNEPAVYTDYLLAKGTTGANTRIVLHEEGDYEVALDYEVQDSELTHITSKFGNYRIFLRFSIRNGNCMVYPFDLLTGAELQNTAVAEAGFSLDLARSRYLDINVRRAVLVETANGVIEDERFNRPAKDGDRYTQEGIYTISVSNRYTGESTTKTIFVGSQELLETYVRNGFSLERLK

SEQ ID NO: 7 - protein, 1097 aa, Unknown
  Description of Unknown: Integrase B8 sequence
  PTHR30461:SF3,IPR036162,PS51737,IPR011109,PTHR30461, PF00239,G3DSA:1.10.10.2600,IPR006119,SSF48452,SSF53041, cd00338,SM00857,IPR011990,IPR025827,IPR038109, PS51736,PF13408,G3DSA:3.40.50.1390,PF07508,Coil
MRVSVNLNAQKPDTTTNAVIYARYSSHGQTEQSIEGQLAKGHEYAAAQGYTVVHEYIDRAMTGRNDNREAFQKMLSDTGKHQFQVIIVWKVDRFGRNREEIAFNKHTCKKNGVRVEYVAESLPNSPEAVILESVLEGMAEYYSIQLSQNIRRGQLESAKKCQCVGGSVPLGYTLDSDKHFVIDPQTAPVVKKIFDLYAEGATISEITGQLNEQGIRTIRKQLFTKNSLTKLLKNEKYIGVYTYKDIVRVEGGVPAIVDKSTFDRVQELLKINRRAPSHTWTKVEYLLTDKLFCGHCGSPMVGESGFSHTGAKYSYYGCIKRRREKACDKKPVRQDWIEALVLDETVKLLHDDELMEYIIDRTWEYYQVTDKVQEEKAVLEAQLAEVDKAINNLVRAIEAGIFNAATKSRMDELDAQKAALTASLADLELTSGIRITRDHIEYFLLRLRDLDVKDRECQKRLVQTFVNAVFIYDDGRVKITYNYSGQSSTITLNQIASAEKGKGFVCCLPCSTSSPRFPRGVAALFCFLGKTAANQLPISAVLCNNSSEPLRGWCWMCRAAIAPVTLADTAADGNPEWQNTDAEPAETHVFLLSYAQVMQYLPEQEQRKVSGTEYARSRGAKFLGFTTIGIGETDWWLRSPGKESYDACFLDVRGVVGTKCVTEKLGVRPALWMDLYADRNAFPYEQQVQAKQFAEQGDYAEATALLDTLGDYAGSAALAKEYRYQQAQAEAASGNYDAAIALYTELAGYADSDALCRASRYEKAVAAQEAGDYAGAMALFADAGQYADSMARLRECCKQQGISIYYFSQDAVNAGVDTGYAKQDTISGDDKHFGWRLGRFFLTGFTRVTADENQQPVFIKTLGDSVTLWFDLEQDIDALNGNAQLSLAADANGYDQQFGIPKTNFGRGTLIVRHTDYQNAKNEPAVYTDYLLAKGTTGANTRIVLHEEGDYEVALDYEVQDGELTHITSKFGNYRIFLRFSIRNGNCMVYPFDLLTGAELQNTAVAEAGFSLDLARSRYLDINVRRAVLVETANGVIEDERFNRPAKDGDRYTQEGIYTISVSNRYTGESTTKTIFVGSQELLETYVRNGFSLERLK

SEQ ID NO: 8 - protein, 1035 aa, Unknown
  Description of Unknown: Integrase B9 sequence
  PTHR30461:SF3,IPR036162,PF01095,PS51737,IPR011109, IPR013830,PTHR30461,PF00239,IPR033131,PS00503, G3DSA:1.10.10.2600,IPR011050,IPR006119,SSF53041,IPR012334, cd00338,SM00857,G3DSA:3.40.50.1110,IPR025827,IPR038109,IPR036514,
  CONT. FROM ABOVE: SSF51126,IPR000070,PS51736,PF13472,cd01821, PF13408,IPR037459,G3DSA:3.40.50.1390,SSF52266,PF07508,G3DSA: 2.160.20.10,Coil
MRVSVNLNAQKPDTTTNAVIYARYSSHGQTEQSIEGQLAKGHEYAAAQGYTVVHEYIDRAMTGRNDNREAFQKMLSDTGKHQFQVVIVWKVDRFGRNREEIAFNKHTCKKNGVRVEYVAESLPNSPEAVILESVLEGMAEYYSIQLSQNIRRGQLESAKKCQCVGGSVPLGYTLDSDKHFVIDPQTAPVVKKIFDLYAEGATISEITGQLNEQGIRTARKQLFTKNSLTKLLKNEKYIGVYTYKDIVRVEGGVPAIVDESTFDRVQELLKINRRAPSHTWTKVEYLLTDKLFCGHCGSPMVGESGFSHTGAKYSYYGCIKRRREKACDKKPVRQDWIEALVLDETVKLLHDDELMEYIIDRTWEYYQVTDKVQEEKAVLEAQLAEVDKAINNLVRAIEAGIFNAATKSRMDELDAQKAALTASLADLELTSGIRITRDHIEYFLLRLRDLDVKDRECQKRLVQTFVNAVFIYDDGRVKITYNYSGQSSTITLNQIASAEKGKGFVCCLPCSLQAAIDAVPMSSRMPTILLLRMDEYHEKVIVNKDNIRIIGEARDRTVITNSGCAKDLDADGKEKGTFLSYTFLVTGNNVEVENLTIRNDAGDGSLVGQAVAVYAAGDRGVWRNVRMIAHQDTLFCGPTMPKVARDALPRLIPEGVTSVGDCPLTLNRQYFEDCYIQGDVDFIFGPYRCWFERCTLFMNKRGGLYTAANTPEQSPYGLVFHNCKLTGECAPGQAYLGRPWRAFARTVFLHCEMDEHVSPQGFQDWQGGAPVTERYAEYGTTGARADQSTRHPKQKRMTEADAAAYTIREVIGGYDNWHPQHRTPTWFLCGDSTMADYPANAAPMTGWGQALKRLVPENVFVENCAVCGRSSKSFVAEKRLNFVELCLRKGDKLFIQFGHNDEKPDVDRATDAHVTYPEYLGMYIDAARRQGAEPILLTPIARRRFDENGKLQHTHGEYPAVMRDLADYRGVRLLDMERASEKLLTALGSEGSKVLFNWQEHHLNYPDGVQDNTHLSDTGAVRMAQIALTLLEEAQ

SEQ ID NO: 9 - protein, 1034 aa, Unknown
  Description of Unknown: Integrase B10 sequence
  PTHR30461:SF3,IPR036162,PS51737,IPR011109,PTHR30461, IPR027417,PF00239,IPR002611,PF00665,G3DSA:1.10.10.2600, IPR006119,SSF53041,PF01695,cd00009,SSF52540, cd00338,PS50994,SM00857,IPR025827,IPR038109,PF13408,G3DSA:3.
  CONT. FROM ABOVE: 40.50.1390,IPR001584,G3DSA:3.40.50.300,PF07508, Coil
MYEEIKTACLYLRYSSSNQTEQSIEGQMHVCQDFCKRHNIRIVEMYIDRATSASKDIEKRVEFLKMIKDSEKGNFNAVIVYKLDRFARSRYDSATYKYRLKRNGVQLISATENITQDPEGIILESVLEGMAEFYSAELSQKINRGMRESAMKHNSIGGAIPLGYKTVDKKLVIDETTAPIVREAFQMYADGESVAEICRTFNNRGYKTSKGTRFGKSSFTKIFRNEKYIGVYKYHDYRAEDVIPPIIDKDLWDRVQVRVGKIKKAPARNKARHTYLLTGKLFCGHCGSAMNADGNSQGYLYYRCYGKKNLDKQCNKRNMEKNLIERLVAQDAMSFLTDEYIEKIATIACDRNKQEIESDSPIPVIRDRIRQVDVSLNNLLKAIETGSAPDMLVKRMGELETEKKDMEVQLKKEMAHQVYIDKEQVIFWLEKFREGDINDEEFCQTVIDLFVNSVTVWDEPDDKFKITIAYNLTSIPQKTYRLSKDGRLSDYASNTPGSSTQVTLQPQLRLSKVSYDTVQKRYRIGRSGITLIMKRYNESGLSLDDLRQMPASKVVDLIYPKANLRHKDIPLPDFGKIHEQMVQMGKHADLSFLWIDYKKEHPNGYQLAQFYKLYRDFMVDTYGTSKTSMPVERIPGEKMYIDWVGDQPELLLDTTTGELRKVHIFTTTLGFSSLVYAEIFLDEKLPHFIAGTVHALSYYGAVPKYLVPDNLRTAVTRHSKDELVLQSAFSDLETFYDTIILPPPPRKPKGKPTVENHVRFLETHLVEELKKDTYTSLEALNAAVKKIVADINQRPFQKKSDIRKSRMNGFEKYDKPRMNQLPGESYTLCDYKYFLKVPDNYHLEYDAHYYSVLYLRYPAADLDETIYRPERQLDTQTIERLSTCHWIEEGKNLIVTGSSASGKTYLINAFCVTAMKQSKSVKYIKANTLMSEMEQARIKSTNLDYLNKLTKLDLLVIDDFGLMDLALDKCRDLFEVLDTRDGRKSTVVISQFPVSTWFDMFADNTYADACLTRITDKHHTYRLEMNGINMRETE

SEQ ID NO: 10 - protein, 973 aa, Unknown
  Description of Unknown: Integrase B11 sequence
  PTHR30461:SF3,SM00857,G3DSA:1.10.10.2600,IPR036162,PF13408, PS51737,G3DSA:3.40.50.1390,IPR025827,PS51736,IPR006119, IPR038109,PF07508,IPR011109,SSF53041,PTHR30461, mobidb-lite,cd00338,PF00239
MAKYKQVVQEQIGVIYARYSSSGQRDESIEGQLRDCHAFAERYNIRIIEEYCDRAMTGTSDRRPEFQRMIRDSSKGQFNVVITWKNDRFARSRYDSAVYKAKLKQNGVRLLYAKESIPDGPEGIVLESVMEGFAEYYSANLSQNVRRGNYDSALKRQTLGQTVFGLRKGADKRFEIDPATGPVVQRIFKEYAAGQSAVSIYTALNEEGFRTLRGNPFNKNSIRKILQNEKYVGVYEYADIRDEHGIPAIVSRETFDRVQIMLEKHHRSPAAKKDAGGFLLTTKLFCGVCGEPMTGDCGTGKSGTVYSYYICNGRRAKKCKQERVSKEWIEDVVVAALAEVVNNDEMINAFADHFIAWQATQQKGSAVADLEQRIKQIDTAIRNTMSVIDSGLITESLKTHLLELEAEKTALADALAKKRLDTIELDRETVIWFLERFRTADQSDPGWRIYIVETFLQAVYLYDDGRLLLRLNYGGKNNEVSLKAVEETVAEGEQLSSMFEFRVPRRAISGSGGLTIHSSARLLFMPKKTRMMRLYFLLSPVFRYNHSRGIPQIRTRRKKIMRKCIRTAAALLLALALAAGLFGCSKLTPIVSGGDKPHTTEPAATGSQTDTEDTQNMENAEDTGEQDWAGEEESSDPAPVETDPPVWEGPETVVYLAPYDALAVEYGGYFYYVDRDDNLCRTTTDMTDYTLFCEAQIRGDVRIIGITDAGRMYLSSGGQSCYVDLAEGRDGMAADYGMVESQTFTGAALSIGIRALRGGWMYYTKSGENGLFRAKIGAVPEEENCIVFDKDIREAAVTGDYLIYTYNRGSRADLQVTLADDPDSLLLTIEGNGTYPTTMLAGTDDRSGTPLLLVSRYELIDRGAEYSVYDLSTLELATDSMLDSAKLQRLGYCFGKNGDEIVCFNNCLRFDPFGTFSDGSSQYYPNAYYTDDYLVSFFSITYAGNGWYFFADADQGGATHAIEEGGTELIPLV

SEQ ID NO: 11 - protein, 973 aa, Unknown
  Description of Unknown: Integrase B12 sequence
  PTHR30461:SF3,SM00857,G3DSA:1.10.10.2600,IPR036162,PF13408, IPR025827,PS51737,G3DSA:3.40.50.1390,PS51736,IPR006119, IPR038109,PF07508,IPR011109,SSF53041,PTHR30461, mobidb-lite,cd00338,PF00239
MQKSSNHLGSQVGVIYARYSSSGQRDESIEGQLRDCHAFAERYNIHIIEEYCDRAMTGTSDRRPEFQRMIRDSSKGQFNVVITWKNDRFARSRYDSAVYKAKLKQNGVRLLYAKESIPDGPEGIVLESVMEGFAEYYSANLSQNVKRGNYDSALKRQTLGQTVFGLRKGADKRFEVDPATGPVVQRIFREYAAGQSAVSIYTALNEEGFRTLRGNPFNKNSLRKILQNEKYVGVYEYADIRDEHGIPALVSRETFDRVQIMLEKHHRSPAAKKDAGGFLLTTKLFCGACGEPMTGDCGTGKSGTVYSYYICNGRRARKCKKERVSKEWIEDVVVAALAEVVNNDEMITSFADHFVAWQATQQTGSAVADLEQRIKQIDMAIKNTMSVIDSGLITESLKTHLLELEAEKTALADALAKKRLDTVELDRDTVIWFLERFRTADLSDPGWRIYIVETFLQAVYLYDDGRLLLRLNYGGKNNEVSLKAVEETVADGEQLSSMFEFRVPRRAISGSGGLTIHSSARLLFMPEKARMMRLYFLLSPVFRYNHSRGIPQIRTRRKKIMRKCIRTAAALLLALALAAGLFGCSIPAPIVSGGDKPHTTEPAATEPGTDTEDMQNTENAEGTGEQDWAGEEESSDPAPVETDPPVWEGPETVVYLAPYDALAVEYGGYFYYVDRDDNLCRTTTDMTDYTLFCEAQIRGDVRIIGITDAGRMYLSSGGQSCYVDLAEGRDGMAADYGMVESQTFTGAALSIGIRALRGGWMYYTKSGENGLFRAKIGAVPEEENCIVFDKDIREAAVTGDYLIYTYNRGSRADLQVTLADDPDSLLLTIEGNGTYPTTMLAGTDDRSGTPLLLVSRYELIDRGAEYSVYDLSTLELATDSMLDSAKLQRLGYCFGKNGDEIVCFNNCLRFDPIGTFSDGSYKYYPDAYYTDDYLVSFFSITYAGNGWYFFADADQGGATHAIEEGGTELIPLV

SEQ ID NO: 12 - protein, 882 aa, Unknown
  Description of Unknown: Integrase B13 sequence
  PTHR30461:SF3,cd00338,SM00857,G3DSA:1.10.10.2600,IPR036162, PF13408,PS51737,IPR025827,G3DSA:3.40.50.1390,IPR006119, IPR038109,PF07508,IPR011109,SSF53041,PTHR30461, PS51736,Coil,PF00239
MARKKNIAAGLDAVIYARYSSHNQREVSIEQQIAECTKHAAALGLRIVGTYEDRAISGKTDNRPRFQQMMRDAEKGKFQAVVAWKSNRIGRNMLQAMVNEAKLDDYGVKVFYAEEDFDDTAAGRFALRNMMNVNQFYSENMAEDITRGLYDNANKCMANGRQPLGYKRGADGKVMLDEPAAAVVREIFTRVAAGDLFVDIARDLNAKGIKTSKGAAWNKGSFQSICQNERYKGIYIYGDVRIVDGIPRIVSDELWYRVQEAMRMKKNPVGTRHRVGAEDYLLTGKLRCGHCGSYMTGVSGTSRNGELHYYYTCQKRRTEHACNKKNVRRDVIEPAIAQAIKMYCLTDDVIEWMADQTVQYWEKHDNDLQIEALEQQLAENKKATSNMLKAIEMGIITEATRSRMVELETENSKLTAQLSAAKRDVVKINREDLIDELHVLRSKDIQDREVQAELFKDFLVAAYIYDDNRLKLVFSFMGKDNSVEIPLETGEDPPDGEDSPDAKMFVLTPDCSTKKALYFVGSMVLFFFSAAKNGGLHCLACIVFRCFAGGSVQPPGHWCFGRSEGAGSADDLQHLIEHLFHLPHQRELGAGAVKVVVGSGGVEIVVALQIVGQKADAALQRHQLGTPGKALFLRRAHGSPGGGEIPLGEHLVQVQVKVDLALVGLVLGAVVGTGADGVAEIVGRQARHHGVKVNDTDTLSGGGIDQDVVDLGVVVGNTQRDLTGCQQIQQGVAILFPRMDEGDLRCNVLGTAQRIGGKGFFKVCIAVGRVVEACNGFVEGRGRIICQLILEFAQGLGNSAEVGLAAHLLQADGVLYKVVGTPRAALGIQMAGRTGQGGDHVQGLPCRVAACGKDLLPQMPGHAADILHQAHRVGKGVGVDAL

SEQ ID NO: 13 - protein, 875 aa, Unknown
  Description of Unknown: Integrase B14 sequence
  PTHR30461:SF3,cd00338,SM00857,G3DSA:1.10.10.2600,IPR036162, PF13408,IPR025827,PS51737,G3DSA:3.40.50.1390,IPR006119, IPR038109,PF07508,SSF53041,IPR011109,PTHR30461, PS51736,Coil,PF00239
MKKFPIDLSCLTEEEISQFQEDPYTLYNGDQNVAIYLRYSSTGQSDQSIEGQLRDCRTFCKANHYRIVAIYVDRATTARKDVEKRVHLMEMISDSAKQNWEYVIVWKLDRFARNRNDSAIMKMRLRKNGVKVLSATEHLTDSPESIILESVLEGMAEFFSAELSQKVTRGMRESALKCHSVGGHIPLGYKVENHKLVVDPDTAHIVQEAFSLYANGESVADICRKFNSAGYKTAKNTEFNRSSFKAMFRNTRYIGTYTYKDIIIENGIPAIIDKELFETVQRRLSKTATAPARGKAKVDYLLSGKLFCGHCGASMNGESGAGRHGKVYHYYSCYTKKRKLGCDKRPLKKDYIEGIVARDALNLLTNQLIDEIADMAIRQSEQDLINDTHIPQLTAQLSEVEKSITNITAAIEKGIASETLMNRLVQLEHEKKTINKEIKAEEKFVYRIDRDQIVFWLSQFKYGNIEDEDFRRRLIDLLVNSVTVWDEPDGYKITTAYNLTSCKTKTFRVEKNPAAEEATGFDFGESECNNRTNCHGKYKTVSNLSNKGREQDYNCHQDPNVSTAEQRAENLNQPLTDTKICVGGDLAQHDQRTDQRDHCPHGCFREAFINRNNGLLAVLAADQGADCTHKYPNPGVAHESKEITSGRFLRINGSDKNINYRNDNHGKAYNLITVEMIRGIAHGLYFIKIQRLQWLHVDPIHCLHQNRVNNQIDHGDGEHAKHPGAFIKRAAEGLHCRVDQSDGHNLRGLECKEEDTGGSNVNTKQSPLYKGIVFIVAANITNGFYQSEEQNVDGRATNKGCSDIGGKEQHYHRHNRTTMAKLAAQQLFSQNIHCTRIPQSQTQGTAEYQLNSKDGAQPFAQQTGNVIIPMEQSGK

SEQ ID NO: 14 - protein, 823 aa, Unknown
  Description of Unknown: Integrase B15 sequence
  PTHR30461:SF3,SM00857,G3DSA:1.10.10.2600,IPR036162,PF13408, IPR025827,G3DSA:3.40.50.1390,PS51737,IPR006119,IPR038109, PF07508,IPR011109,SSF53041,PTHR30461,Coil, PS51736,cd00338,PF00239
MKAAIYARFSSHNQREESIEGQVRACKRFAKEHGMTIVEIYADRSLSGLHADNRPEFQRMIQDSDHHRFEALIMWNLDRFSRDKYDTAVYKTRLKKNGVSLYYSDQSIPDTPEGIILESLLEGFAQYYSANLARNAKRGLQENARKCLWNGGCVPLGYLIDEHQRFVLEPIGAACVRMIFELYASGQSIKSIVCTLNEKGYKTVKGNRFRLGSIQGILRNRKYIGEYHASGITVPNGIPAIVDVQLFNDVQARLGVVASAKAHNKADIPYLLTTKVFCGHCRSPMIGESGTGKGGATYRYYKCSCRKNRKGTCDKKTEPKDWLEENVVRQTVKNVLRPEVIKEISENCAAALKADASDESLVQALKAQLAETDKALRNLLKAIEAGIISSTTRERMAELESQKSELEAQIAREQLRKPEITAEQISFWLESFLAGDIHDPKYQERIINALVRRVDVYDDGPEKQKLTIFYNITKNNRSFSKISISKCSDIECIALAIRLAAGERKERRDCLKDGTAAALAYVAYALYRAANGIASNYQPETGSRLADWLSGRLAKPFSDVPGLFVSVFFSRKFPQAGVYSCYALGVSAAVLFAALTLICAWIVLLSVDRKKTARLFGALYAGQALYLLMLMATYMFFFAEDEAQWLAEFDRYVSLPALLIALTACMALTWNESRMRTRSGAAMLAMTAALIPLDHPELMRETFITREAVVKTLWENSGTDSVVAFLRENMELSTMRRLYLMGDCRYIFLYEQLMPQAMVEEQRADSMEAMQKRLDEGRYDYAFVGNLEPDGFLAQGGLQANTLYAVVYDETGRATLERAASME

SEQ ID NO: 15 - protein, 820 aa, Unknown
  Description of Unknown: Integrase B16 sequence
  PTHR30461:SF3,IPR036162,PS51737,IPR003675,IPR011109, PTHR30461,PF02517,PF00239,G3DSA:1.10.10.2600,IPR006119, SSF53041,cd00338,SM00857,IPR025827,IPR038109, PF13408,G3DSA:3.40.50.1390,PF07508,Coil
MKKFKFPIDLSMLTEEEINQFREDPSTLFQGDTDVCLYLRFSSERQKEQSIEGQLRDCMAYCKRKNYRIVAIYVDRATTARKDVEKRVHFQEMITASVHQTWKLVIVWKLDRFARNREDSAVFKMRLRKNGVKVESATEGISKNPEGIILEAVLEGIAEYYSADLSQKITRGMRESALKCHSIGGHVPLGYKIEDHKLVINPDTAHIVQEAFELYANGETVADICRMFNAKGYRTAKGAEFNRNSFKSMFRNRRYIGVYRYKDFEKEGGVPAIIDKDLFETVQKRLSANAEAPARGKAKVDYLLAGKLFCGHCGGSMNGESGTSKTGAVHNYYTCYTRKRQHSCDKKPLRKEWIEQIVAQDAMELLTDDAIQEMADMAISQTEKDLQENTRIPELSERMKETESGIANITKAVEKGIASDALMSRLVELEKEKKNLLRLIAEEEKYVCKIDRDQIVYWLTKFKDGNIEDENFKRIIIDLMVNSVTVWDEPDGFRITTAYNLTSCKNKTFRIPSSSDKGFGFEGLESTISLAVILVKLRRAFCVDTLMFELDREVYCMKKVLSVSIKTIIFFVGWAICVSVIPIPDTASAVIWRFWAELIPLLSVIAITLIFWLADQKKIRLHLTGKPVYNIILGGVTGTIWLGASVGILSILGVVQIEGKNQIAMLWLWLLAAFLNTVMQEMLVRGYLYQMIKSNGSIAAAIIVSTGLFTFAHGGAFEAGILPVLNVITMSLFMTAVLEYTGSLIAPIVIHFLWNGVGAIILGGVSLAEDYPHLFDMTIHGNPILSGGSCKIEGSIIVLFMNLAFLIGFVAAKKRKDRNR

SEQ ID NO: 16 - protein, 819 aa, Unknown
  Description of Unknown: Integrase B17 sequence
  PTHR30461:SF3,IPR036162,cd06174,PS51737,IPR003675, IPR011109,PTHR30461,PF02517,PF00239,G3DSA:1.10.10.2600, IPR006119,SSF53041,cd00338,SM00857,IPR025827, IPR038109,PS51736,PF13408,G3DSA:3.40.50.1390,PF07508,Coil
MARKKKFAPNDNNLAIAYYRFSSHSQNDASIDQQRELAHDWADAHGFKIVQEYEDAAISGTTDARPGFQQMLSEVAKIRPHTLIMWKTDRLGRDKYVLAMAKKKIRDAGCEIHLLAEHIPTEGPEGVLIEGLMEAMAEYYSRQLSQNIQRGMDYNAQHALYNGHKLFGYDVDRSTKKYIPDPSTAPFVQWAFKEYASGRPLKAIAEEMNAQGLRTPRNAKFSVNMLNKMLKNRAYIGEYHHGDITVAGGMPVLVDEATFDRAQRRFAENKRKGSQRAHGMDDADAPRYWLTGKLYCGECGSTMQGVSGTSKTGRTYYYYYCSAQRRKECHLHKARKRDLEDMVLFALHNIVDDEENVTALALDAAEYYERNHNDAAYLEALEAKRREVEKSLANLVKVIERGVVSDTVTQRLAQLEEQKSALNDAIGTENVRVSLCEDRHSIQAYFDKFLHADVNDPEIRDQVFEYFVDKVYLYDDKLVVSMWFSEDDKQEITWRDWFSLDEYWTDESPFVKGGGVEFDCFPLGSTISLAVILVKLRRAFCVDTLMFELDREVYCMKKVLSVSIKTIIFFVGWAICVSVIPIPDTASAVIWRFWAELIPLLSVIAITLIFWLADQKKIRLHLTGKPVYNIILGGVTGTIWLGASVGILSILGVVQIEGKNQIAMLWLWLFAAFLNTVMQEMLVRGYLYQMIKSNSNIAAAIIVSTGLFTFAHGGAFEAGILPVLNVITMSLFMTAVLEYTGSLIAPIVIHFLWNGVGAIILGGVSLAEDYPHLFDMTIHGNPILSGGSCKIEGSIIVLFMNLAFLIGFVAAKKRKDRNR

SEQ ID NO: 17 - protein, 818 aa, Unknown
  Description of Unknown: Integrase B18 sequence
  PTHR30461:SF3,IPR007492,PF04397,IPR036162,PS50930, PS51737,IPR011109,PF00072,PTHR30461,PF00239, G3DSA:1.10.10.2600,PS50110,G3DSA:3.40.50.2300,IPR006119,SSF53041, SM00448,IPR011006,cd00338,SM00857,SSF52172,IPR001789,IPR025827,
  CONT. FROM ABOVE: cd00156,IPR038109,PS51736,PF13408, G3DSA:3.40.50.1390,PF07508,G3DSA:2.40.50.1020,SM00850,Coil
MARKKNIAAGLDAVIYARYSSHNQREVSIEQQIAECTKHAAALGLRIVGTYEDRAISGKTDNRPRFQQMMRDAEKGKFQAVVAWKSNRIGRNMLQAMVNEAKLDDYGVKVFYAEEDFDDTAAGRFALRNMMNVNQFYSENMAEDITRGLYDNANKCMANGRQPLGYKRGADGKVMLDEPAAAVVREIFTRVAAGDLFVDIARDLNAKGIKTSKGAAWNKGSFQSICQNERYKGIYIYGNVRIVDGIPRIVSDELWYRVQEAMRMKKNPVGTRHRVGAEDYLLTGKLRCGHCGSYMTGVSGTSRNGELHYYYTCQKRRTEHACNKKNVRRDVIEPAIAQAIKMYCLTDDVIEWMADQTVQYWEKHDNDLQIEALEQQLAENKKATSNMLKAIEMGIITEATRSRMVELETENSKLTAQLSAAKRDVVKINREDLIDELHILRSKDIHDREVQAELFKDFLVTAYIYDDNRLKLVFSFMGKDNSVEIPLETGEDPPDGEDPPDAKMFVLTPDCSTRSERHHTLCGAFFVLHCSRKTQKNFCPLPQPARNGLFCARMADHGRRNLCYNIKNREAEGTGGAAMNLQTAIVEDSKPDAERLKQLLKKAFENENISCSCFASGDEFLRAGWREGYQVVFLDICMEGTNGIETAQRLRAADPDLLIVFVTSSPEYVWDAFPVHPFDYLLKPYKEEKFEQLAGELRRVLCRQQPELEVRIARQIVRLPLTKIYYATAQNHYVRVVTDDGECRATANFAQVQEQLQTQPEFLVCNRGVIINMSKVLRFEGDCIEMLDGTHLPVRQKDKNSLLAQFTQYQFRGMQREF

SEQ ID NO: 18 - protein, 818 aa, Unknown
  Description of Unknown: Integrase B19 sequence
  PTHR30461:SF3,IPR007492,PF04397,IPR036162,PS50930, PS51737,IPR011109,PF00072,PTHR30461,PF00239, G3DSA:1.10.10.2600,PS50110,G3DSA:3.40.50.2300,IPR006119,SSF53041, SM00448,IPR011006,cd00338,SM00857,SSF52172,IPR001789,IPR025827
  CONT. FROM ABOVE: ,cd00156,IPR038109,PS51736,PF13408, G3DSA:3.40.50.1390,PF07508,G3DSA:2.40.50.1020,SM00850,Coil
MARKKNIAAGQNAVIYARYSSHNQREVSIEQQVRECMKHAAELGLHVVGTYEDRAISGKTDKRPNFQRMMRDAEKGKFQAVVAWKSNRIGRNMLQAMVNEAKLEDCGVKVFYAEEDFDDTAAGRFALRNMMNVNQFYSENMAEDITRGLYDNASKCMANGRQPLGYKRGEDGRVVLDEANAAVVREIFTRVAAGDLFVDIARDLNAQGIKTSKGANWNKGSFQSICQNERYRGIYIYGDVRVVDGIPRIVSDDLWYRVQEAMRMKKNPVGTRHRVGAEDYLLTGKLRCGHCGSYMTGVSGTSRNGELHYYYTCQKRRTEHACDKKNIRRDVIEPAVAQAIKMYCLTDDVIEWMADRTVEYWEKHDNDLQIEALEQQLAENKKATSNMLKAIEMGIITEATRTRMVELETEQSRLSVQLNAAKEDVVKIDREQIISYLELLQQGEIHDRDFQMELFKNFLVAVYVYDDNRMKLVFSCMGDQNSVEIPLETGEDPPDGGLSPDAKMFVLTPDSSTRSERHHTLCGAFFVLHCSRKTQKNFCPLPQPARNGLFCARMADHGRRNLCYNIKNREAEGTGGAAMNLQTAIVEDSKPDAERLKQLLKKAFENENISCSCFASGDEFLRAGWREGYQVVFLDICMEGTNGIETAQRLRAADPDLLIVFVTSSPEYVWDAFPVHPFDYLLKPYKEEKFEQLAGELRRVLCRQQPELEVRIARQIVRLPLTKIYYATAQNHYVRVVTDDGECRATANFAQVQEQLQTQPEFLVCNRGVIINMSKVLRFEGDCIEMLDGTHLPVRQKDKNSLLAQFTQYQFRGMQREF

SEQ ID NO: 19 - protein, 805 aa, Unknown
  Description of Unknown: Integrase B20 sequence
  TIGR00010,IPR036162,PS51737,IPR011109,IPR032466, PF00239,PTHR46124,G3DSA:1.10.10.2600,PF01026,IPR015991, IPR006119,SSF53041,cd00338,SM00857,IPR025827, G3DSA:3.20.20.140,IPR038109,IPR001130,SSF51556,cd01310,PF13408,
  CONT. FROM ABOVE: G3DSA:3.40.50.1390,PF07508
MPTSKNTARKYAAGGSSDNSCGVEPLRAVIYARYSSSGQREESIEGQLRDCYEFAKKHGIIVIGEYIDKAMTGRVDRRPDFQRMMKDSEKGRFNCVLLWKMDRFARNRYDSAMYKYKLKKNGIRIFYAKETIPDGPEGIILESVMEGYAEYYSENLAQNVKRGNYDSALELKTLGKTCLGLKTGPDGRYMIDQAEAAIVRRIFEEYAEGERAKDIYERLNSEGYRTSRGGKFNKNSLRRILSNKKYIGVYEYEDIYVENGIPAIITDWDLFERVQKMLKINHDAPARGKAQNFLLTTKLFCGLCGSPMIGDGGTSHTGKAYAYYSCTKRKRGRSCKKESVPKDWIEDLVVGELVKIVHNDELIEQIADRVMEYQKREKDQSGLHALEIRQKENEKAISNMLAAIEAGIITPSTKTRLMELEADRADIEKGIAHELLAEPEFERDQIIYFLERFRSGDINDEAYRIMLVDTFLNSVYLYDDDHLVLVMNYSGENCKVDLKLVEGAVSGDGCKGSAFAPSSALKRTVFGDIGAPGTVLFLHRYAVRRFYMTAIFDTHAHYDDDAFNDDREQLLAALPGQGIARVVDVGASLASCRKVLELMEQYDYIYGAIGVHPSETAELTEESYSWLKEQCRKKKCLAVGEIGLDYYWPEPDHETQKKWFLRQLDLAREIKKPVIIHSRDAAKDTVDLMTEAHAEEIGGVIHCYSYTKETAKIFLDMGFYFGIGGVLTFKNAKKLKEAVEYIPMDRIALETDCPYLAPEPNRGKRNSSLNIPYVIAAMAQIKGITEEEVRKAAWDNSLKLYRMDK

SEQ ID NO: 20 - protein, 793 aa, Unknown
  Description of Unknown: Integrase B21 sequence
  PTHR30461:SF3,IPR036162,PS51737,IPR003675,IPR011109, PTHR30461,PF02517,PF00239,G3DSA:1.10.10.2600,IPR006119, SSF53041,cd00338,SM00857,IPR025827,IPR038109, PS51736,PF13408,G3DSA:3.40.50.1390,PF07508,Coil
MQRAVIYARYSPGPNQTEQSIEGQVRECTKYAELHDLRIVGTYIDRKISGKTDNRREFQRMIDDSEKHIFDIIILYHTDRFARNRYDSAIYKHKLKENGVELRYATTDIPKGPEGIILESIMEGWAEYYSAELSRKIKRGMRESALKCHSTGAGRCLGYRTAEDKSLVIEPEGAKAVQTVFDMYIKGKSHADICRYLNDCGFRTAQGKLFNKNSVTHIIRNKRYIGVYTYDDITIEDGIPAIISKDTFHLAQLEAARRKTAKRPKEPKAEYLLSGKAFCGHCQKPLVGVSGTGKSGNKWYYYYCQESRAKRGCTKKPVKRDWLEREVVKRTVAEVLQPEVIQHIAKKCYDLQMEYRQDNSDVLFYELKLKDVRKAIKNTMHAIESGVKTKTLPARLQELENEEEALEAELAIAKASDFVITADQIEFLLTQFAEPWECESEEEYHRRIIKCFVHKVFLFDDKLLIYYNVSRDGKTREQSEAELLEEALGEGFDKRSSGSTISLAVILVKLRRAFCVDTLMFELDREVYCMKKVLSVSIKTIIFFVGWAICVSVIPIPDTASAVIWRFWAELIPLLSVIAITLIFWLADQKKIRLHLTGKPVYNIILGGVTGTIWLGASVGILSILGVVQIEGKNQIAMLWLWLLAAFLNTVMQEMLVRGYLYQMIKSNGSIAAAIIVSTGLFTFAHGGAFEAGILPVLNVITMSLFMTAVLEYTGSLIAPIVIHFLWNGVGAIILGGVSLAEDYPHLFDMTIHGNPILSGGSCKIEGSIIVLFMNLAFLIGFVAAKKRKDRNR

SEQ ID NO: 21 - protein, 787 aa, Unknown
  Description of Unknown: Integrase B22 sequence
  SM00857,G3DSA:1.10.10.2600,IPR036162,PF13408,IPR025827, PS51737,G3DSA:3.40.50.1390,PS51736,IPR006119,IPR038109, PF07508,SSF53041,IPR011109,PTHR30461,Coil, mobidb-lite,cd00338,PF00239
MYGCLRKGNDMDEFAARPVADILARYSTDNQNPVTIDVQVEKCREWCERNGYQVGKIFSDEAVSGMKETRAGYEACMMHLGMGGAQLVVVYDQSRMFREFTEWFQFRKDVDMLGARVASVTQPMVGGDLKDPAVFINEAATAMLNHAQVLITRQKTIDALKHNAREGKSSGGKPPLGYDLDKDKKYVVNEHEAEAVRLVFQLFARGFSYGEIIDELNSRGYLTKRGQPFGKNSIFDLLKNEKYIGRLVYGATKAQADGRWNSHAKSKEDAIVVENGVPAIIEQELWEQVQSRIRTRKGAGGRYSAKREYLLTGRVFCGDCGASMVVMGSKASGYQYYECNNKRRTHTCKMKNVRTEWLEQTVAASIKQMLTEPANIEMLVDVARDQERQITTEYDTRRAELASRYTRVCRQLENGVNALLEGVVSSELKEKVRRLEEEKAEIEAETAELNQYKGYVGLDDATIRRCVENVAKVDINTSEGLKLILAVVSRVNIHTDTIEIKTLISMDGTDPDPTKSRPQHLELFPSESASGEKYHTTPENGSGHQMKTALYSQKRLYSAVFYAFKMLRQRNGNIFYALFVSVPAKQTRMAGRKGMLLFFTSIIFRLDFGIALGMPAYRANFRRACGIRYVSAYHAHPHGGAPLTKNLAVLNVGSQLVVTLFMRFFNVPHAGEQFRQLLKAFTAGGTGKFGIHLGPFIVFPGCRVPQVFQRAGHFAAGKMLKPDLGMFLFIAGCFIKDVPHLLVAVFTRTQRIDLIFCTSVQLARKCGLQIFPRLTVLQFHGQCLPLY

SEQ ID NO: 22 - protein, 786 aa, Unknown
  Description of Unknown: Integrase B23 sequence
  PTHR30461:SF3,IPR036162,PS51737,IPR011109,PTHR30461, PF00239,G3DSA:1.10.10.2600,IPR006119,PF14287,SSF53041, IPR025378,SM00857,IPR025827,cd03770,IPR038109, PS51736,mobidb-lite,PF13408,G3DSA:3.40.50.1390,PF07508,Coil
MKKQPDKGKITALYERLSHDDERAGESVSIENQKRILEDYAQKNGFTNIRHFTDDGVRGTTFKRPGLDAMLEEIRAGNVATVIIKDQSRIGRDVVEVGLLKRTFDEYHVRFIAANDNLDTANGFDIMSIFRDVINEWYVADTSRKIKTVFKSRMEKGLRCSGSVSYGYLASKENKGEWVIDEEAAAVVRRIFHSVVAGESIASIARALRAEKIPIPSEHWKRIGAPVRSAKYTDPYAWSTTTISYILKRPEYTGRKVLGKTVCENYKTKSTRKTAPEEQYIFDGEIPAIVDEETWNTVQRLMGTKRRAPKRQNTPNRLTGLLYCADCGAKLTHRSSLVQGKYLDDAFVCSSYRQLTRDCTMHYIPTAKMEAAILAAIQRVSWYVRHNEAEFIERVRKATDQHQENAVKEYRQKVSKAQRRYKELDGLVKKLYEGNATGKIPDKHFTRLLAEYDEEQTGLEAAIAQWQEAIESWNADRLKTDKFIELVSRYTDFSELTTPMLNEFIEKVVVHEGEGRGNSRRQRIDIYLNFIGAFEVPAHIVTPMEAEEQRRQQEEQAAKEARSQELAKAREEKRKAEKREFTARKKAGLLTPEEQAADEARLAHNRAWQKEWRKKRKAAEPPKPPKPKSLKELAALQKAGADLTPEEAERLAAYRERKNRQHKAWYERQKAAQPPKPRTLKELAAAQVAGQPLTPEETERLEASRSRKKNAYQELKAQAETDPAAAAELARRRAYHSEATKKSRQKMYEEAAAGNPAAQARYENFLAARRENYHRKKHDEKGEQIA

SEQ ID NO: 23 - protein, 779 aa, Unknown
  Description of Unknown: Integrase B24 sequence
  IPR036162,PS51737,IPR011109,PF00072,G3DSA:1.10.10.10, cd00383,PF00239,IPR036388,G3DSA:1.10.10.2600,PTHR26402:SF519, G3DSA:3.40.50.2300,PS50110,IPR006119,PTHR26402,IPR016032, SSF53041,SM00448,IPR011006,cd00338,SM00857,SSF52172,IPR001789,
  CONT. FROM ABOVE: IPR025827,cd00156,IPR001867,IPR038109,PF00486, SSF46894,PS51736,PS51755,IPR039420,PF13408,G3DSA:3.40.50.1390 ,SM00862,PF07508,Coil
MSLALELAQTQIARAKPAEDQVPKTARAAIYARYSSHKQQELSIEGQLREIQEYCQKKDLKVVRAYIDRAKSGRTSTKRTEFRRMLEDAKRGEFDTIVVYKFNRFFRNLTEQVITMEDLRKVSVTMQSVHDVVPEGSGGVYMRAIYGADAEVYSLGVSEDTKRGMRDAAADYRTPGSLPMWLMADTNKKIVLNEPAARVMRQAAVMYDEGATLRQCCEYINAAGYKTRQGHKWNPTTLSASFRNVRLMGVFRFKDEILKEGIFPAAVEPDLWRRINAKLDGKHMPQRARALEEYYLTPRLFCGLCGAPMYGAIAYGAMSHGVKNVYRYYRCDNRLKNHSCKQKLVRKEIVEDAVFRAVIGTLTDENIARIALQAEKLSAETATTGAEKLRLLDELAAVNTEINNISRAIAAGIITDTTRDMLIDAERRRTGIQQRIEDAEAKEKETVRAEDVAAWLYCFREGAKKDEELKAQILQRLVARAELFEDGPHDGHVVVWCKLADAETAITEFFERTPAGGAKEGRPSGLPFSVSFPPPEESGGRRAFIGIGGDVVMYRIMVVEDDDAIAGVLQRTLEKWGYEVRRTEDFENVIEEFLHFEPHLVMMDISLPFFDGYHWCAEIRKISKVPVLFLSAAGENLNIVMALSMGADDFITKPFDLSVAVAKVEALLRRTYSFGAQSGAALAVGGAMLDLKSACLHYEGKKLELTKNEFRILQMLFEHKGEIVTRDTLISALWGQDAFLDDNTLTVNVARLRSHLEEIGLGGLVRTQKGVGYLVEEQT

SEQ ID NO: 24 - protein, 766 aa, Unknown
  Description of Unknown: Integrase B25 sequence
  cd00338,SM00857,G3DSA:1.10.10.2600,IPR036162,PS51737, G3DSA:3.40.50.1390,mobidb-lite,IPR006119,IPR038109,PF07508, SSF53041,IPR011109,PTHR30461,PS51736,Coil, PF00239
MTRQKVEVIPASVRSVQNGGQLKAQTNIRVAAYCRVSTGDESQQTSYTTQKAFYTDLITKKPGWIFAGIYADEAKSGTNREHREEFNRMMKDAMDGKLDYIVTKSISRFARNTIDSLTCTRELRQLKPPVGIYFEKENIDTLDAKGELILTILSALAQDESRSISDNIRWSIQKNFQAGIPHINLKRMLGYELGENKEWVIVPEQAEIVRYIFDRYAKGQTANKIARELNQMSKTTVNGRKWTASAVLIVLRNEKYVGDVEMQKTITKDFLTHRSSINKGEAPRYYVKNHHVGIIDRVTWDKVQAMLYEKPRSDTTKGPGRKKAKSMKGSPFGNLRCGAILENGSNAGKPCGEGFFRVTYTGVANGYTDERSLKAMGEDTGEYLEKYSYSYPIWRCKRKMGEREDEPPKNGTPDQKMYSRSKKGCMSNAEKEAADKRCPSEIYHECALEQSFMELLYSMKRDYEQNGEASMIMAMFNNVYEQMLRQAKNNSISVQRVAAVNRQIEDLEERLQDVIKHQVEALREAALEQSAKLSECLSNGEITLDDIDTDIRSGLTPGSIGTSFYDFEVEEGSEAQIYTELVKDLQERLRALRQERQAIEEEQGDLATVKKNFEFFLACLKELPDTNSAGMPLKVNGLDVQGTLMRDAEGNPIEGRARAITSGKLKVTPERIAEAPDMLHFEKGIYCAFIKGGVLQGDAAIYKTNFGVTLTTKGNRRTLNSFMGYKRCDLNGTVVYVDAPYKVYGFSIQYRRYLTTAAKRERGIAV

SEQ ID NO: 25 - protein, 766 aa, Unknown
  Description of Unknown: Integrase B26 sequence
  cd00338,SM00857,G3DSA:1.10.10.2600,IPR036162,PS51736, PS51737,G3DSA:3.40.50.1390,IPR006119,IPR038109,PF07508, SSF53041,IPR011109,PTHR30461,mobidb-lite,Coil, PF00239
MTRQKVEVIPASVRSVQNGGQLKAQTNIRVAAYCRVSTGDESQQTSYTTQKAFYTDLITKKPGWIFAGIYADEAKSGTNREHREEFNRMMKDAMDGKLDYIVTKSISRFARNTIDSLTCTRELRQLKPPVGIYFEKENIDTLDAKGELILTILSALAQDESRSISDNIRWSIQKNFQAGIPHINLKRMLGYELGENKEWVIVPEQAEIVRYIFDRYAKGQTANKIARELNQMSKTTVNGRKWTASAVLIVLRNEKYVGDVEMQKTITKDFLTHRSSINKGEAPRYYVKNHHVGIIDRVTWDKVQAMLYEKPRSDTTKGPGRKKAKSMKGSPFGNLRCGAILENGSNAGKPCGEGFFRVTYTGVANGYTDERSLKAMGEDTGEYLEKYSYSYPIWRCKRKMGEREDEPPKNGTPDQKMYSRSKKDCMSNAEKEAADKRCPSEIYHECALEQSFMELLYSMKRDYEQNGEASMIMAMFNNVYEQMLRQAKNNSISVQRVAAVNRQIEDLEERLQDVIKHQVEALREAALEQSAKLSECLSNGEITLDDIDTDIRSGLTPGSIGTSFYDFEVEEGSEAQIYTELVKDLQERLRALRQERQAIEEEQGDLATVKKNFEFFLACLKELPDTNSAGMPLKVNGLDVQGTLMRDAEGNPIEGRARAITSGKLKVTPERIAEAPDMLHFEKGIYCAFIKGGVLQGDAAIYKTNFGVTLTTKGNRRTLNSFMGYKRCDLNGTVVYVDAPYKVYGFSIQYRRYLTTAAKRERGIAV

SEQ ID NO: 26 - protein, 765 aa, Unknown
  Description of Unknown: Integrase B27 sequence
  IPR036162,PS51737,IPR011109,PF00072,G3DSA:1.10.10.10, cd00383,PF00239,IPR036388,G3DSA:1.10.10.2600,G3DSA:3.40.50.2300, PS50110,IPR006119,PTHR26402,SSF53041,SM00448, IPR011006,cd00338,SM00857,SSF52172,IPR001789,PTHR26402:SF661,
  CONT. FROM ABOVE: IPR025827,cd00156,IPR038109,IPR001867,PF00486, PS51736,IPR039420,PS51755,PF13408,G3DSA:3.40.50.1390,SM00862, PF07508,Coil
MTNAVIYARYSPGPNQTDQSIEGQIHECTRFCEDNDLRIVGTYIDRKQTGRNDNRADFQKMLRDSSRHGFSTVVVWKIDRFGRNREEIAKNKAVLRMNGVRVLSAKEHIPDGPEGIILESVLEGLAEYYSANLSQNIKRGMRESALKCQFNGSGLSTGYTVDADHKYRIDPDGAAVVRTIFEMYDSGKKIADIQRYLQQSNIKTMRGKEYTHYGISRILRNRVYIGEYHWHDIVVPGGVPKIIDNDLFDRVQKRLEANKHAPAARRGDVDFLLTSKLICGNCKSTMIGDCGTGKNGARWYYYTCRAKKTKSSKCRKKSVPKEALEREVTALTAAYVLRDDVIDYIADKVVEIQKSEHDDKSMLRYFESQLKDTNKAIANIMRAIEAGIITETTRSRLEELEDTKRDLETEIIKEKVARPTIEREQVIFFLEKFRGGNVDDKEYQRKIIDTFVHKVILYDDKITITYNYSTDSTKNAENTVESIESAASAAECKCSDKSSSSPPMTRILLLQCSCYFYTHARFPNLRLIFTRYDKICIIIPEGDPMRILLAEDEKSLNRIITKQLKAAGYSVDSCFDGGEAYDLITSTDYDAAVFDVMMPIMNGFELVKKIRAHGIDTPVLFLTARDSIEDRVTGLDIGADDYLIKPFSFDELSARLRVMTRKKYGEKTGIISVGDLTVDTAARRVERAGREISLSAKEYELLQYLVMNKGVVLSREKIEDHIWNYDYEGGTNVVDVYIRYLRKKIDEGEDIKLIHTVRGAGYVIK

SEQ ID NO: 27 - protein, 765 aa, Unknown
  Description of Unknown: Integrase B28 sequence
  IPR036162,PS51737,IPR011109,PF00072,G3DSA:1.10.10.10, cd00383,PF00239,IPR036388,G3DSA:1.10.10.2600,G3DSA:3.40.50.2300, PS50110,IPR006119,PTHR26402,SSF53041,SM00448, IPR011006,cd00338,SM00857,SSF52172,IPR001789,PTHR26402:SF661,
  CONT. FROM ABOVE: IPR025827,cd00156,IPR001867,IPR038109,PF00486 ,PS51736,IPR039420,PS51755,PF13408,G3DSA:3.40.50.1390,SM00862, PF07508,Coil
MTNAVIYARYSPGPNQTDQSIEGQIHECTRFCEDNDLRIVGTYIDRKQTGRNDNRADFQKMLRDSSRHGFSTVVVWKIDRFGRNREEIAKNKAVLRMNGVRVLSAKEHIPDGPEGIILESVLEGLAEYYSANLSQNIKRGMRESALKCQFNGSGLSTGYTVDADHKYRIDPDGAAVVRTIFEMYDGGKKIADILRYLQQSNIKTMRGKEYTHYGISRILRNRVYIGEYHWHDIVVPGGVPQIIDNDLFDRVQKRLEVNKHGPAARRGDVDFLLTSKLICGNCKSTMIGDCGTGKNGARWYYYTCRAKKTKSSKCRKKSVPKEALEREVTALTAAYVLRDDVIDYIANKVVEIQKSEHDDKSMLRYFESQLKDTNKAIANIMRAIEAGIITETTRSRLEELEDTKRDLETEIIKEKVARPTIEREQVIFFLEKFRGGNVDDKEYQRKIIDTFVHKVILYDDKITITYNYSTDSTKNAENTVESIESAASAAECKCSNKPSSSPPITRILLLRCSCYFYTHARFPNLRLIFTRYDKICIIIPEGDPMRILLAEDEKSLNRIITKQLKAAGYSVDSCFDGGEAYDLITSTDYDAAVFDVMMPIMNGFELVKKIRAHGIDTPVLFLTARDSIEDRVTGLDIGADDYLIKPFSFDELSARLRVMTRKKYGEKTGIISVGDLTVDTAARRVERAGREISLSAKEYELLQYLVMNKGVVLSREKIEDHIWNYDYEGGTNVVDVYIRYLRKKIDEGEDIKLIHTVRGAGYVIK

SEQ ID NO: 28 - protein, 765 aa, Unknown
  Description of Unknown: Integrase B29 sequence
  IPR036162,PS51737,IPR011109,PF00072,G3DSA:1.10.10.10, cd00383,PF00239,IPR036388,G3DSA:1.10.10.2600,G3DSA:3.40.50.2300, PS50110,IPR006119,PTHR26402,SSF53041,SM00448, IPR011006,cd00338,SM00857,SSF52172,IPR001789,PTHR26402:SF661,
  CONT. FROM ABOVE: IPR025827,cd00156,IPR038109,IPR001867,PF00486, PS51736,IPR039420,PS51755,PF13408,G3DSA:3.40.50.1390,SM00862 ,PF07508,Coil
MTNAVIYARYSPGPNQTDQSIEGQIHECTRFCEDNDLRIVGTYIDRKQTGRNDNRADFQKMLRDSSRHGFSTVVVWKIDRFGRNREEIAKNKAVLRMNGVRVLSAKEHIPDGPEGIILESVLEGLAEYYSANLSQNIKRGMRESALKCQFNGSGLSTGYTVDADHKYRIDPDGAAVVRTIFEMYDGGKKIADILRYLQQSNIKTMRGKEYTHYGISRILRNRVYIGEYHWHDIVVPGGVPQIIDNDLFDRVQKRLEANKHAPAARRGDVDFLLTSKLICGNCKSTMIGDCGTGKNGARWYYYTCRAKKTKSSKCRKKSVPKEALEREVTALTAAYVLRDDVIDYIANKVVEIQKSEHDDKSMLRYFESQLKDTNKAIANIMRAIEAGIITETTRSRLEELEDTKRDLETEIIKEKVARPTIEREQVIFFLEKFRGGNVDDKEYQRKIIDTFVHKVILYDDKITITYNYSTDSTKNAENTVESIESAASAAECKCSNKFSSSPPVTRILLLQCSCYFYTHARFPNLRLIFTRYDKICIIIPEGDPMRILLAEDEKSLNRIITKQLKAAGYSVDSCFDGGEAYDLITSTDYDAAVFDVMMPIMNGFELVKKIRAHGIDTPVLFLTARDSIEDRVTGLDIGADDYLIKPFSFDELSARLRVMTRKKYGEKTGIISVGDLTVDTAARRVERAGREISLSAKEYELLQYLVMNKGVVLSREKIEDHIWNYDYEGGTNVVDVYIRYLRKKIDEGEDIKLIHTVRGAGYVIK

SEQ ID NO: 29 - protein, 749 aa, Unknown
  Description of Unknown: Integrase B30 sequence
  PTHR30461:SF3,cd00338,SM00857,G3DSA:1.10.10.2600,IPR036162, PF13408,PS51737,IPR025827,G3DSA:3.40.50.1390,IPR006119, IPR038109,PF07508,IPR011109,SSF53041,PTHR30461, PS51736,Coil,PF00239
MRAKKKPAMLEPDMQDAVIYTRYSSHNQRDCSIEQQVADCEIFARQNNLRVVKVYADRHLSGTTDNRPQFQQMLKDAAHGHWAYVICWKIDRFARNRYDSATYKFRLKKAGVRVLYAKESIPDGPEGILLESVLEGSAEYYSAALAQNIRRGMKYNAEQCKVNSGSIPFGYCKGPDGRFAIHEANAEVVREIFRKAAAGMPFVDIANDLNSRGLKTSRGGRWNKGSFRLLMNEAYIGVYHFSDTRIEGGMPALIDQGTFWAANERLKANSSVRGRHQDGGDYLLTGKLKCAHCGSYMIGFSGTGKSGELHYYYGCQKRRRERACKKANVPREWIERVVVKAALDYVLRPDVMEWIADAVMEYQEREAASAQLAALTAELEENQKATDNVMKAIEAGIITSTTKQRLLDLEAKAQDLKRAIELEKLSHVRLERDQVLFWLDRFRGGSLQSQEFRRKVIDAFVSVVYLSDDHLRIAFNYSGGSNAEADFDLVMDAEAAAGELSKKFAQGHVTSTSKKSHLKTYVFQVAFAISAILLRQIRQDVRPQSLLLPQSIEAAVQIHFIDCRKNGAAQQQTLVVERSLRLGGLAAEHHRKTSLQLLAEDIVGCPGGAVLPLHFEQRVDIFDREHRFGDCNVHQGCNLIPGIFFADGVIHHPFFDIVAHHRRGQLHPAETTEVAVDKLHRLIQIQPYRGEIVVPGQGKARSTRRNAEFGFSFHSILFRSCSCTFYKQERCFCAKAGETLSVKALLPVK

SEQ ID NO: 30 - protein, 748 aa, Unknown
  Description of Unknown: Integrase B31 sequence
  PTHR30461:SF3,IPR036162,PS51737,IPR011109,PTHR30461, PF00239,G3DSA:1.10.10.2600,IPR006119,SSF53041,cd00338, SM00857,IPR025827,IPR038109,PS51736,mobidb-lite, PF13408,G3DSA:3.40.50.1390,PF07508,Coil
MCAKKKPAMLEPDMQDAVIYTRYSSHNQRDCSIEQQVADCEIFARQNNLRVVKVYADRHLSGTTDNRPQFQQMLKDAAHGHWAYVICWKIDRFARNRYDSATYKFRLKKAGVRVLYAKESIPDGPEGILLESVLEGSAEYYSAALAQNIRRGMKYNAEQCKVNSGSIPFGYRKGPDGRFAIHEANAEVVREIFRKAAAGMPFVDIANDLNGRGLKTSRGGRWNKGSFRLLMNEAYIGVYHFSDTRIEGGMPALIDQGTFWAANERLKANSSVRGRHQDGGDYLLTGKLKCAHCGSYMIGFSGTGKSGELHYYYGCQKRRRDRACKKANVPREWIERVVVKAALDYVLRPDVMEWIADAVMEYQEREAASAQLAALTAELEENQKATDNVMKAIEAGIITSTTKQRLLDLEAKAQDLKRAIELEKLSHVRLERDQVLFWLDCFRGGSLQSQEFRRKVIDAFVSVVYLSDDHLRIAFNYSGGSNAEADFDLVMDAEAAAGELSKKFAQGHVASTTCEPDELSVLHQREEPHRFAVRLFPFHLIASLSHEIKQHVDVLTDGAEIVSSAAPASIVPGAAAHLRQELFLPHQNGVSDPLVFLYKGFQLLIFFYDTDVGQVLREGTGIEPVRLRVKVQRRQRVQRLIGVPHIGMPVIFFWRLLEASYPILGLADRLIVVEQRLSIVTIELVGVRIAVCIVLVLERLDAFRPRGKVKPDAHRLRMGGQSCHDRQGQNPRCDRRNKFSSHDKTSFL

SEQ ID NO: 31 - protein, 731 aa, Unknown
  Description of Unknown: Integrase B32 sequence
  PTHR30461:SF3,IPR036162,PS51737,IPR029016,PF15714,IPR039472 ,IPR011109,PTHR30461,PF00239,G3DSA:3.30.450.40, G3DSA:1.10.10.2600,IPR006119,SSF53041,cd00338,SM00857,IPR025827 ,IPR038109,PS51736,PF13408,G3DSA:3.40.50.1390,PF07508,Coil
MKKSKPPQRIAGYLRISDEDKLQRLADENTSIENQRQIVKMYCDENFPNAELTFFEDRAISGYSFDKRPGYLAMRQGLFDGKYDTLIIKDLSRFSRRNGHGLAELEDLRDANVRIISISDNVDTVDDDDWLKVRMFFFVNEMPVADASKKVTAVIRAKQKSGEWICNAPYGYTKDGRTQNYKIVQETVPVIKLIFEKYLEGWGYGKIRDYLNENKVPTPRMTEKIVAERKEKTYKRNVSNGWSAVSIQKILTNDAYIGTYRGHKVARKGINGKMEDVPEDEHIVIEHHHEAIIDDATFQSVQLMMKQRTRNNYRGVRKYPTPYTGILFCGDCGARMFSISRPDLRAAYKCSNYQKAGIKSCTGHKVVVEDLDRAAKSYLMLIRSQCKDLEAELKKSIENEKEVTGRQAGSIEELEKLLARKENALEMSIQSRIEDIAENPENAAQIKKTYKSVEENLNREIESIKSNIEILNNERNSTIKANRTAKTVFEVFDNIIKKPALDENDVRFIFERINVFEDGHIDFYLRSDIDELLRIGGIPEPVKEKPINFRQDTVDIALEGRIVQPSGNGLYDVYSVNVVRSGDALEIFTAADGQVVFKKYSPLVELGELAGVYAEVLAKNLGRPVLVCDRESIVAATGTGKGQLLGRQISDAAARLLAMRGPYTAPETAARRITAFDKGETVLLCVCPIVVQGDVEGGVLLTGRPQDAAPDTETARAVNIAAAFLAKWMEE

SEQ ID NO: 32 - protein, 731 aa, Unknown
  Description of Unknown: Integrase B33 sequence
  PTHR30461:SF3,SM00857,G3DSA:1.10.10.2600,IPR036162,PF13408, PS51737,IPR025827,G3DSA:3.40.50.1390,IPR006119,IPR038109, PF07508,IPR011109,SSF53041,PF00239,PTHR30461, mobidb-lite,Coil,cd00338
MPRKPAKHPAKPKRGKKLEVEEPGVLYGRYSSHNQKDISVEQQFEKGYELAAEYGIRIIDTYADRAVSGRTDKRRDFQRMMTDAAKGKFRYVIAWKSNRMGRNMLEALINEARLQDLGVRVLYVEEDFDDTAAGRFAARSMMNVNQFYSENMAEDIKRGLYDNAANCMVANGHLPYGYKADETLHYAIDEPKAAVIREIFTRVSCGEAFVDIMASLNARGIKTSYGRPWGRSSFQKILSNERYRGIYIYGDVRKEGGIPRIISDELYFKVQEVITTKKNPQGRHRVNGDYLLTGKLFCGHCKSPMTGISGTSRSGNLHYYYVCQKRRTEKTCEKKNLRRDDIELQVAKAIKRRTLDDDTINWIADSVVEYSQHQESASGIGLLEDQLKDTQRSIKNLMAAIEQGIITPTTKARLMELEKEQSDIDRKITMAKADVIPVNRDQLVGWLKKLQAGDVHDKKYQAELFDTFLIAVYVYDNPDGQDYMKVVFNYAGSKNTVEIPLDPSVIDNVENIETGAVRLSSAQVHQKYRLPVWVVGIFLCMEDGVEVYPRQGKSIFPHQKYRLPVWVVGIFYAFSRRERSGRALPSPRGEGAERSEADEVERSRPPPVPPVVPPNPTTLHPSRRTAAPPSPQGEGLQAPLWLHRCSDALGEAVYTPPHTPGAPSRAASSRRDRPLTSVSKQSAHTVSPPRTHGHRYASAHDGSGAKHTSHRRIRVPPFFRKIIMHLDNFRP

SEQ ID NO: 33 - protein, 726 aa, Unknown
  Description of Unknown: Integrase B34 sequence
  PTHR30461:SF3,IPR036162,PS51737,IPR011109,PTHR30461,PF00239 ,G3DSA:1.10.10.2600,IPR006119,SSF53041,cd00338,SM00857,IPR025827 ,IPR007214,IPR038109,cd04335,mobidb-lite,G3DSA:3.90.960.10, PF13408,G3DSA:3.40.50.1390,PF07508,PF04073,IPR036754,Coil
  CONT. FROM ABOVE: ,SSF55826
MPRKPAKHPAKPKRGKKLEVEEPGVLYGRYSSHNQKDISVEQQFEKGYELAAEYGIRIIDTYADRAVSGRTDKRRDFQRMMTDAAKGKFRYVIAWKSNRMGRNMLEALINEARLQDLGVRVLYVEEDFDDTAAGRFAARSMMNVNQFYSENMAEDIKRGLYDNAANCMVANGHLPYGYKADETLHYAIDEPKAAVIREIFTRVSCGEAFVDIMASLNARGIKTSYGRPWGRSSFQKILSNERYRGIYIYGDVRKEGGIPRIISDELYFKVQEVITTKKNPQGRHRVNGDYLLTGKLFCGHCKSPMTGISGTSRSGNLHYYYVCQKRRTEKTCEKKNLRRDDIELQVAKAIKRRTLDDDTINWIADSVVEYSQHQESASGIGLLEDQLKDTQRSIKNLMAAIEQGIITPTTKARLMELEKEQSDIDRKITMAKADVIPVNRDQLVGWLKKLQAGDVHDKKYQAELFDTFLIAVYVYDNPDGQDYMKVVFNYAGSKNTVEIPLDPSVIDNVENIETGAVRLSSAQVHQPENPAARRGCWIFRFQGTLSWHENSAIFGKTVHTGGYSMNKAEIYDLLRTRGIWHEITEHKAVYNMAELTDVALPYPEADAKNLFVRDDKKRNYYLITVRGDKRVDLKEFRHRYGTRALSFASENDLMQVLGLIPGAVTPLGLLNDAECKVQLYLDEAFFAAPGLIGVHPNDNTATVWLRADDLAALIREHGNPVHIAEL

SEQ ID NO: 34 - protein, 722 aa, Unknown
  Description of Unknown: Integrase B35 sequence
  cd00338,SM00857,IPR036162,IPR036779,G3DSA:3.40.50.1390, IPR006119,PF07508,cd00118,IPR011109,IPR018392, SSF53041,PTHR30461,G3DSA:3.10.350.10,PF01476,PS51736, Coil,PF00239
MNLETFLRILHIPSNLSIDEILDMLIIYLRKSRKDMDYFKDESIEKTLQRHEKDLQDFIIGIFGKPIPEHNIYREVASGDTIENRPVMQEVLSVIENDDKKGVICIEIERLARGNTIDQGIIAQTFKYTGTKIVTPMKIYDLDNEDDLSYFEDGLYQSRKYLKYTKRILSRGRVRSVKEGNYVGSVLPYGSNKIKIPNEKGFMLVENESEAKVVKLMADLFLNGLNTTYTVKENDTVSTIAKTFGTHKKVIITHNLDLKINYSIKLIVDSKSIDYTIQENDTLESISATYHIKVDHIHIPNDIFKPGETIKIIIDDMRPTNIAHYFNYLKITPRKAKEWTANMIRNILQSPTIYGYLTWDRRKTVTTLVNGKIVRKNPNNNDYLFVKGKHYENSILNEEYRSRIQEKFLSNRVKTVPDEKELKNPLVGLVVCGYCGNNMTRRPYYIRKDAKPTVKRVYEVDKTKLRLLLREHKGDYSLNDIARALKVSKCCVDHWFASNDDKFTMPYANKWEDLKKLLNIETTEFDKAVTTLEESITPAHADTLMCSRPRCKCVSSDLELVETKILQTLKIIKEDYKKYVDNYEEEVKKEIRDNKEIIQVIDNEIDKVNSQIEKACELVEAGAYTKDLFKKRIDVLNSQLEALINQKQELPNANNLTQEFNNKKKAIPILEDVLSKYAPEMTAEEKNELLSTIIKKIIYKKDRGGRYLKENFNIDIILLPFD

SEQ ID NO: 35 - protein, 719 aa, Unknown
  Description of Unknown: Integrase B36 sequence
  PTHR30461:SF3,IPR036162,IPR036779,IPR011109,PTHR30461, PF01476,PF00239,IPR006119,SSF53041,cd00338, SM00857,SM00257,cd00118,PS51736,G3DSA:3.40.50.1390, PF07508,IPR018392,G3DSA:3.10.350.10,Coil
MNLDTFLQIMNVSRDLTVDEILDMFIIYLRKSRKDMDYYKDESIEKTLQRHEKELQDFIISIFGKPIPEHNIYREVASGDTIEDRPVIQEVLSLIEEDRVKGVVCIEIERLARGNTMDQGIIAQAFQYSNTKIITPMKIYNLDNEDDLSYFEDGLYQARKYLKYTKRILARGRLRSVKDGKYVGSVLPYGYNKQKIPNEKGYVLVENESESKVVKLLADLFLNGLNTTYTVKENEIISDIAKLFGAHKKDIITCNLDLKVDQEIRLTVNSKSLPYKIKENDTLESIAANYNIDINNIHIPHNFFKPGENIKIILNDMRATNIAHYLNYLKIKPRKSKEWTANMVRNILQGYTIYGYLTWDRRKTTKTLVNGHIVKKNPNNDDFTLVRGKHEAILGEDIKQQIEAKFLSNRLKTVPDNKEMKNPLLGLVVCGYCGNNMTRRPYYLRKDAKPTAKRIYDIDKPKLRLLLREHKGNYSLNDIARALHVSKNSVDHWFSSNDEKFCIPHADKWEDLKKLLNIETNEFDKAITTIEESITPPHTDTLMCSRPRCKCVSSELELVEDKILKSLKIIMSEYKNYVNNYEEAVKKEICTNKEMIEAIDHEIDKIKSQIEKACELVETGAYTQDLFIKRTNTLNEQLETLLNQKTELSKSKDRTKDLYSKKKAIPILEDVISKYSKDMTAEEKNALLSTIIKQVIYKKEKGGRYLKENFSLKIILLSF

SEQ ID NO: 36 - protein, 719 aa, Unknown
  Description of Unknown: Integrase B37 sequence
  cd00338,SM00857,IPR036162,IPR036779,G3DSA:3.40.50.1390, SM00257,IPR006119,PF07508,IPR018392,IPR011109, SSF53041,cd00118,G3DSA:3.10.350.10,PTHR30461,PF01476, PS51736,Coil,PF00239
MNLDTFLQIMNVSRDLTVDEILDMFIIYLRKSRKDMDYYKDESIEKTLQRHEKELQDFIVSIFGKPIPEHNIYREVASGDTIEDRPVIQEVLSLIEEDRVKGVVCIEIERLARGNTMDQGIIAQAFQYSNTKIITPMKIYNLDNEDDLSYFEDGLYQARKYLKYTKRILARGRLRSVKDGKYVGSVLPYGYNKQKIPNEKGYVLVENESESKVVKLLADLFLNGLNTTYTVKENEIISDIAKLFGAHKKDIITCNLDLKVDQEIRLTVNSKSLPYKIKENDTLESIAASYNIDINNIHIPHNFFKPGENIKIILNDMRATNIAHYINYLKIKPRKSKEWTANMVRNILQGYTIYGYLTWDRRKTTKTLVNGHIVKKNPNNDDFTLVRGKHEAILSEDIKQQIEAKFLSNRLKTVPDNKEMKNPLLGLVVCGYCGNNMTRRPYYLRKDAKPTAKRIYDIDKPKLRLLLRKHKGNYSLNDIARTLHVSKNSVDHWFSSNDEKFCIPHADKWEDLKKLLNIETNEFDKAITTIEESITPPHTDTLMCSRPRCKCVSSELELVEDKILKSLKIIMSEYKNYVNNYEEAVKKEICTNKEMIEAIDHEIDKIKSQIEKACELVETGAYTQDLFIKRTNTLNEQLETLLNQKTELSKSKDRTKDLYSKKKAIPILEDVISKYSKDMTAEEKNALLSTIIKQVIYKKEKGGRYLKENFSLKIILLSF

SEQ ID NO: 37 - protein, 719 aa, Unknown
  Description of Unknown: Integrase B38 sequence
  PTHR30461:SF3,IPR036162,IPR036779,IPR011109,PTHR30461, PF01476,PF00239,IPR006119,SSF53041,cd00338, SM00857,SM00257,cd00118,PS51736,G3DSA:3.40.50.1390, PF07508,IPR018392,G3DSA:3.10.350.10,Coil
MNLDTFLQIMNVSRDLTVDEILDMFIIYLRKSRKDMDYYKDESIEKTLQRHEKELQDFIVSIFGKPIPEHNIYREVASGDTIEDRPVIQEVLSLIEEDRVKGVVCIEIERLARGNTMDQGIIAQAFQYSNTKIITPMKIYNLDNEDDLSYFEDGLYQARKYLKYTKRILARGRLRSVKDGKYVGSVLPYGYNKQKIPNEKGYVLVENESESKVVKLLADLFLNGLNTTYTVKENEIISDIAKLFGAHKKDIITCNLDLKVDQEIRLTVNSKSLPYKIKENDTLESIAANYNIDINNIHIPHNFFKPGENIKIILNDMRATNIAHYLNYLKIKPRKSKEWTANMVRNILQGYTIYGYLTWDRRKTTKTLVNGHIVKKNPNNDDFTLVRGKHEAILGEDIKQQIEAKFLSNRLKTVPDNKEMKNPLLGLVVCGYCGNNMTRRPYYLRKDAKPTAKRIYDIDKPKLRLLLREHKGNYSLNDIARALHVSKNSVDHWFSSNDEKFCIPHADKWEDLKKLLNIETNEFDKAITTIEESITPPHTDTLMCSRPRCKCVSSELELVEDKILKSLKIIMSEYKNYVNNYEEAVKKEICTNKEMIEAIDHEIDKIKSQIEKACELVETGAYTQDLFIKRTNTLNEQLETLLNQKTELSKSKDRTKDLYSKKKAIPILEDVISKYSKDMTAEEKNALLSTIIKQVIYKKEKGGRYLKENFSLKIILLSF

SEQ ID NO: 38 - protein, 719 aa, Unknown
  Description of Unknown: Integrase B39 sequence
  PTHR30461:SF3,cd00338,SM00857,IPR036162,G3DSA:3.40.50.1390, SM00257,IPR006119,PF07508,IPR018392,IPR011109, SSF53041,cd00118,PTHR30461,PF01476,PS51736, Coil,PF00239
MNLDTFLQIMNVSRDLTVDEILDMFIIYLRKSRKDMDYYKDESIEKTLQRHEKELQDFIVSIFGKPIPEHNIYREVASGDTIEDRPVIQEVLSLIEEDRVKGVVCIEIERLARGNTMDQGIIAQAFQYSNTKIITPMKIYNLDNEDDLSYFEDGLYQARKYLKYTKRILARGRLRSVKDGKYVGSVLPYGYNKQKIPNEKGYVLVENESESKVVKLLADLFLNGLNTTYTVKENEIISDIAKLFGTHKKDIITCNLDLKVDQEIRLTVNSKSLPYRIKENDTLESIAANYNIDINNIHIPHNFFKPGENIKIILNDMRATNIAHYLNYLKIKPRKSKEWTANMVRNILQGYTIYGYLTWDRRKTTKTLVNGHIVKKNPNNDDFTLVRGKHEAILSEDIKQQIEAKFLSNRLKTVPDNKEMKNPLLGLVVCGYCGNNMTRRPYYLRKDAKPTAKRIYDIDKPKLRLLLRKHKGNYSLNDIARALHVSKNSVDHWFSSNDEKFCIPHADKWEDLKKLLNIETNEFDKAITTIEESITPPHTDTLMCSRPRCKCVSSELELVENKILKSLKIIMSEYKNYVNNYEEAVKKEICTNKEMIEAIDHEIDKIKSQIEKACELVETGAYTQDLFIKRTNTLNEQLETLLNQKTELSKSKDRTKDLYSKKKAIPILEDVISKYSKDMTAEEKNALLSTIIKQVIYKKEKGGRYLKENFSLKIILLSF

SEQ ID NO: 39 - protein, 719 aa, Unknown
  Description of Unknown: Integrase B40 sequence
  cd00338,SM00857,IPR036162,G3DSA:3.40.50.1390,SM00257, IPR006119,PF07508,IPR018392,IPR011109,SSF53041, cd00118,PTHR30461,PF01476,PS51736,Coil, PF00239
MNLDTFLQIMNVSRELTVDEILDMFIIYLRKSRKDMDYYKDESIEKTLQRHEKELQDFIVSIFGKPIPEHNIYREVASGDTIEDRPVIQEVLSLIEEDRVKGVVCIEIERLARGNTMDQGIIAQAFQYSNTKIITPMKIYNLDNEDDLSYFEDGLYQARKYLKYTKRILARGRLRSVKDGKYVGSVLPYGYNKQKIPNEKGYVLVENESESKVVKLLADLFLNGLNTTYTVKENEIISDIAKLFGTHKKDIITCNLDLKVDQEIRLTVNSKSLPYKIKENDTLESIAANYNIDINNIHIPHNFFKPGENIKIILNDMRATNIAHYLNYLKIKPRKSKEWTANMVRNILQSYTIYGYLTWDRRKTTKTLVNGHIVKKNPNNDDFTLVRGKHEAILSEDIKQQIEAKFLSNRLKTVPDNKEMKNPLLGLVVCGYCGNNMTRRPYYLRKNAKPTAKRIYDIDKPKLRLLLREHKGNYSLNNIARALHVSKNSVDHWFSSNDEKFCIPHADKWDDLKKLLNIETNEFDKAITTIEESITSPHTDTLMCSRPRCKCVSSELELVEDKILKSLKIIISEYKNYVNNYEEAVKKEICTNKEMIEAIDHEIDKIKSQIEKACELVETGAYSQDLFIKRTNTLNEQLETLLNQKKELSKSKDRTKDLYSKRKAIPILEDVISKYSKDMTAEEKNALLSAIIKQVIYKKEKGGRYLKENFSLKIILLSF

SEQ ID NO: 40 - protein, 719 aa, Unknown
  Description of Unknown: Integrase B41 sequence
  PTHR30461:SF3,IPR036162,IPR036779,IPR011109,PTHR30461, PF01476,PF00239,IPR006119,SSF53041,cd00338, SM00857,SM00257,cd00118,PS51736,G3DSA:3.40.50.1390, PF07508,IPR018392,G3DSA:3.10.350.10,Coil
MNLDTFLQIMNVSRDLTVDEILDMFIIYLRKSRKDMDYYKDESIEKTLQRHEKELQDFIVSIFGKPIPEHNIYREVASGDTIEDRPVIQEVLSLIEEDRVKGVVCIEIERLARGNTMDQGIIAQAFQYSNTKIITPMKIYNLDNEDDLSYFEDGLYQARKYLKYTKRILARGRLRSVKDGKYVGSVLPYGYNKQKIPNEKGYVLVENESESKVVKLLADLFLNGLNTTYTVKENEIISDIAKLFGAHKKDIITCNLDLKVDQEIRLTVNSKSLPYKIKENDTLESIAANYNIDINNIHIPHNFFKPGENIKIILNDMRAANIAHYLNYLKIKPRKSKEWTANMVRNILQGYTIYGYLTWDRRKTTKTLVNGHIVKKNPNNDDFTLVRGKHEAILSEDIKQQIEAKFLSNRLKTVPDNKEMKNPLLGLVVCGYCGNNMTRRPYYLRKDAKPTAKRIYDIDKPKLRLLLREHKGNYSLNDIARALHVSKNSVDHWFSSNDEKFCIPHADKWEDLKKLLNIETNEFDKAITTIEESITPPHTDTLMCSRPRCKCVSSELELVEDKILKSLKIIMSEYKNYVNNYEEAVKKEICTNKEMIEAIDHEIDKIKSQIEKACELVETGAYTQDLFIKRTNTLNEQLETLLNQKTELSKSKDRTKDLYSKKKAIPILEDVISKYSKDMTAEEKNALLSTIIKQVIYKKEKGGRYLKENFSLKIILLSF

SEQ ID NO: 41 - protein, 719 aa, Unknown
  Description of Unknown: Integrase B42 sequence
  PTHR30461:SF3,IPR036162,IPR036779,IPR011109,PTHR30461, PF01476,PF00239,IPR006119,SSF53041,cd00338, SM00857,SM00257,cd00118,PS51736,G3DSA:3.40.50.1390, PF07508,IPR018392,G3DSA:3.10.350.10,Coil
MNLDTFLQIMNVSRDLTVDEILDMFIIYLRKSRKDMDYYKDESIEKTLQRHEKELQDFIVSIFGKPIPEHNIYREVASGDTIEDRPVIQEVLSLIEEDRVKGVVCIEIERLARGNTMDQGIIAQAFQYSNTKIITPMKIYNLDNEDDLSYFEDGLYQARKYLKYTKRILARGRLRSVKDGKYVGSVLPYGYNKQKIPNEKGYVLVENESESKVVKLLADLFLNGLNTTYTVKENEIISDIAKLFGAHKKDIITCNLDLKVDQEIRLTVNSKSLPYKIKENDTLESIAASYNIDINNIHIPHNFFKPGENIKIILNDMRATNIAHYLNYLKIKPRKSKEWTANMVRNILQGYTIYGYLTWDRRKTTKTLVNGHIVKKNPNNDDFTLVRGKHEAILSEDIKQQIEAKFLSNRLKTVPDNKEMKNPLLGLVVCGYCGNNMTRRPYYLRKDAKPTAKRIYDIDKPKLRLLLREHKGNYSLNDIARALHVSKNSVDHWFSSNDEKFCIPHADKWEDLKKLLNIETNEFDKAITTIEESITPPHTDTLMCSRPRCKCVSSELELVEDKILKSLKIIMSEYKNYVNNYEEAVKKEICTNKEMIEAIDHEIDKIKSQIEKACELVETGAYTQDLFIKRTNTLNEQLETLLNQKTELSKSKDRTKDLYSKKKAIPILEDVISKYSKDMTAEEKNALLSTIIKQVIYKKEKGGRYLKENFSLKIILLSF

SEQ ID NO: 42 - protein, 719 aa, Unknown
  Description of Unknown: Integrase B43 sequence
  PTHR30461:SF3,IPR036162,IPR036779,IPR011109,PTHR30461, PF01476,PF00239,IPR006119,SSF53041,cd00338, SM00857,SM00257,cd00118,PS51736,G3DSA:3.40.50.1390, PF07508,IPR018392,G3DSA:3.10.350.10,Coil
MNLDTFLQIMNVSRDLTVDEILDMFIIYLRKSRKDMDYYKDESIEKTLQRHEKELQDFIVSIFGKPIPEHNIYREVASGDTIEDRPVIQEVLSLIEEDRVKGVVCIEIERLARGNTMDQGIIAQAFQYSNTKIITPMKIYNLDNEDDLSYFEDGLYQARKYLKYTKRILARGRLRSVKDGKYVGSVLPYGYNKQKIPNEKGYVLVENESESKVVKLLADLFLNGLNTTYTVKENEIISDIAKLFGAHKKDIITCNLDLKVDQEIRLTVNSKSLPYKIKENDTLESIAANYNIDINNIHIPHNFFKPGENIKIILNDMRATNIAHYLNYLKIKPRKSKEWTANMVRNILQGYTIYGYLTWDRRKTTKTLVNGHIVKKNPNNDDFTLVRGKHEAILGEDIKQQIEAKFLSNRLKTVPDNKEMKNPLLGLVVCGYCGNNMTRRPYYLRKDAKPTAKRIYDIDKPKLRLLLREHKGNYSLNDIARALHVSKNSVDHWFSSNDDKFCIPHADKWEDLKKLLNIETNEFDKAITTIEESITPPHTDTLMCSRPRCKCVSSELELVENKILKSLKIIMSEYKNYVNNYEEAVKKEICTNKEMIEAIDHEIDKIKSQIEKACELVETGAYTQDLFIKRTNTLNEQLETLLNQKTELSKSKDRTKDLYSKKKAIPILEDVISKYSKDMTAEEKNDLLSTIIKQVIYKKEKGGRYLKENFSLKIILLSF

SEQ ID NO: 43 - protein, 719 aa, Unknown
  Description of Unknown: Integrase B44 sequence
  PTHR30461:SF3,IPR036162,IPR036779,IPR011109,PTHR30461, PF01476,PF00239,IPR006119,SSF53041,cd00338, SM00857,SM00257,cd00118,PS51736,G3DSA:3.40.50.1390, PF07508,IPR018392,G3DSA:3.10.350.10,Coil
MNLDTFLQIMNVSRDLTVDEILDMFIIYLRKSRKDMDYYKDESIEKTLQRHEKELQDFIVSIFGKPIPEHNIYREVASGDTIEDRPVIQEVLSLIEEDRVKGVVCIEIERLARGNTMDQGIIAQAFQYSNTKIITPMKIYNLDNEDDLSYFEDGLYQARKYLKYTKRILARGRLRSVKDGKYVGSVLPYGYNKQKIPNEKGYILVENESESKVVKLLADLFLNGLNTTYTVKENEIISDIAKLFGTHKKDIITCNLDLKVDQEIRLTVNSKSLPYRIKENDTLESIAANYNIDINNIHIPHNFFKPGENIKIILNDMRATNIAHYLNYLKIKPRKSKEWTANMVRNILQGYTIYGYLTWDRRKTTKTLVNGHIVKKNPNNDDFTLVRGKHEAILSEDIKQQIEAKFLSNRLKTVPDNKEMKNPLLGLVVCGYCGNNMTRRPYYLRKDAKPTAKRIYDIDKPKLRLLLREHKGNYSLNDIARALHVSKNSVDHWFSSNDDKFCIPHADKWKDLKKLLNIETNEFDKAITTIEESITPPHTDTLMCSRPRCKCVSSELELVENKILKSLKIIMSEYKNYVNNYEEAVKKEICTNKEMIEAIDHEIDKIKSQIEKACELVETGAYTQDLFIKRTNTLNEQLETLLNQKTELSKSKDRTKDLYSKKKAIPILEDVISKYSKDMTAEEKNALLSAIIKQVIYKKEKGGRYLKENFSLKIILLSF

SEQ ID NO: 44 - protein, 719 aa, Unknown
  Description of Unknown: Integrase B45 sequence
  PTHR30461:SF3,SM00857,IPR036162,G3DSA:3.40.50.1390,SM00257, IPR006119,PF07508,IPR018392,cd00118,SSF53041, IPR011109,PF00239,PTHR30461,PF01476,PS51736, Coil,cd00338
MNLDTFLQIMNVSRDLTVDEILDMFIIYLRKSRKDMDYYKDESIEKTLQRHEKELQDFIVSIFGKPIPEHNIYREVASGDTIEDRPVIQEVLSLIEEDRVKGVVCIEIERLARGNTMDQGIIAQAFQYSNTKIITPMKIYNLDNEDDLSYFEDGLYQARKYLKYTKRILARGRLRSVKDGKYVGSVLPYGYNKQKIPNEKGYVLVENESESKVVKLLADLFLNGLNTTYTVKENEIISDIAKLFGAHKKDIITCNLDLKVDQEIRLTVNSKSLPYKIKENDTLESIAASYNIDINNIHIPHNFFKPGENIKIILNDMRATNIAHYLNYLKIKPRKSKEWTANMVRNILQGYTIYGYLTWDRRKTTKTLVNGHIVKKNPNNDDFTLVRGKHEAILNEDIKQQIEAKFLSNRLKTVPDNKEMKNPLLGLVVCGYCGNNMTRRPYYLRKDAKPTAKRIYDIDKPKLRLLLREHKGNYSLNDIARALHVSKNSVDHWFSSNDDKFCIPHADKWEDLKKLLNIETNEFDKAITTIEESITPPHTDTLMCSRPRCKCVSSELELVENKILKSLKIIMSEYKNYVNNYEEAVKKEICTNKEMIEAIDHEIDKIKSQIEKACELVETGAYTQDLFIKRTNTLNEQLETLLNQKTELSKSKDRTKDLYSKKKAIPILEDVISKYSKDMTAEEKNALLSTIIKQVIYKKEKGGRYLKENFSLKIILLSF

SEQ ID NO: 45 - protein, 719 aa, Unknown
  Description of Unknown: Integrase B46 sequence
  PTHR30461:SF3,IPR036162,IPR036779,IPR011109,PTHR30461, PF01476,PF00239,IPR006119,SSF53041,cd00338, SM00857,SM00257,cd00118,PS51736,G3DSA:3.40.50.1390, PF07508,IPR018392,G3DSA:3.10.350.10,Coil
MNLDTFLQIMNVSRDLTVDEILDMFIIYLRKSRKDMDYYKDESIEKTLQRHEKELQDFIVSIFGKPIPEHNIYREVASGDTIEDRPVIQEVLSLIEEDRVKGVVCIEIERLARGNTMDQGIIAQAFQYSNTKIITPMKIYNLDNEDDLSYFEDGLYQARKYLKYTKRILARGRLRSVKDGKYVGSVLPYGYNKQKIPNEKGYVLVENESESKVVKLLADLFLNGLNTTYTVKENEIISDIAKLFGAHKKDIITCNLDLKVDQEIRLTVNSKSLPYKIKENDTLESIAANYNIDINNIHIPHNFFKPGENIKIILNDMRATNIAHYLNYLKIKPRKSKEWTANMVRNILQGYTIYGYLTWDRRKTTKTLVNGHIVKKNPNNDDFTLVRGKHEAILGEDIKQQIEAKFLSNRLKTVPDNKEMKNPLLGLVVCGYCGNNMTRRPYYLRKDAKPTAKRIYDIDKPKLRLLLREHKGNYSLNDIARALHVSKNSVDHWFSSTDDKFCVPHADKWEDLKKLLNIETNEFDKAITTIEESITPPHTDTLMCSRPRCKCVSSELELVEDKILKSLKIIMSEYKNYVNNYEEAVKKEICTNKEMIEAIDHEIDKIKSQIEKACELVETGAYTQDLFIKRTNTLNEQLETLLNQKTELSKSKDRTKDLYSKKKAIPILEDVISKYSKDMTAEEKNALLSTIIKQIIYKKEKGGRYLKENFSLKIILLSF

SEQ ID NO: 46 - protein, 719 aa, Unknown
  Description of Unknown: Integrase B47 sequence
  cd00338,SM00857,IPR036162,IPR036779,G3DSA:3.40.50.1390, SM00257,IPR006119,PF07508,cd00118,IPR011109, SSF53041,IPR018392,G3DSA:3.10.350.10,PTHR30461,PF01476, PS51736,Coil,PF00239
MNLDTFLQIMNVSRDLTVDEILDMFIIYLRKSRKDMDYYKDESIEKTLQRHEKELQDFIVSIFGKPIPEHNIYREVASGDTIEDRPVIQEVLSLIEEDRVKGVVCIEIERLARGNTMDQGIIAQAFQYSNTKIITPMKIYNLDNEDDLSYFEDGLYQARKYLKYTKRILARGRLRSVKDGKYVGSVLPYGYNKQKIPNEKGYVLVENESESKVVKLLADLFLNGLNTTYTVKENEIISDIAKLFGAHKKDIITCNLDLKVDQEIRLTVNSKSLPYKIKENDTLESIAANYNIDINNIHIPHNFFKPGENIKIILNDMRATNIAHYLNYLKIKPRKSKEWTANMVRNILQGYTIYGYLTWDRRKTTKTLVNGHIVKKNPNNDDFTLVRGKHEAILGEDIKQQIEAKFLSNRLKTVPDNKEMKNPLLGLVVCGYCGNNMTRRPYYLRKDAKPTAKRIYDIDKPKLRLLLREHKGNYSLNDIARALHVSKNSVDHWFSSNDEKFCIPHADKWEDLKKLLNIETNEFDKAITTIEESITPPHTDILMCSRPRCKCVSSELELVEDKILKSLKIIMSEYKNYVNNYEEAVKKEICTNKEMIEAIDHEIDKIKSQIEKACELVETGAYTQDLFIKRTNTLNEQLETLLNQKTELSKSKDRTKDLYSKKKAIPILEDVISKYSKDMTAEEKNALLSTIIKQVIYKKEKGGRYLKENFSLKIILLSF

SEQ ID NO: 47 - protein, 719 aa, Unknown
  Description of Unknown: Integrase B48 sequence
  PTHR30461:SF3,IPR036162,IPR036779,IPR011109,PTHR30461, PF01476,PF00239,IPR006119,SSF53041,cd00338, SM00857,SM00257,cd00118,PS51736,G3DSA:3.40.50.1390, PF07508,IPR018392,G3DSA:3.10.350.10,Coil
MNLDTFLQIMNVSRDLTVDEILDMFIIYLRKSRKDMDYYKDESIEKTLQRHEKELQDFIVSIFGKPIPEHNIYREVASGDTIEDRPVIQEVLSLIEEDRVKGVVCIEIERLARGNTMDQGIIAQAFQYSNTKIITPMKIYNLDNEDDLSYFEDGLYQARKYLKYTKRILARGRLRSVKDGKYVGSVLPYGYNKQKIPNEKGYVLVENESESKVVKLLADLFLNGLNTTYTVKENEIISDIAKLFGTHKKDIITCNLDLKVDQEIRLTVNSKSLPYKIKENDTLESIAASYNIDINNIHIPHNFFKPGENIKIILNDMRATNIAHYLNYLKIKPRKSKEWTANMVRNILQGYTIYGYLTWDRRKTTKTLVNGHIVKKNPNNDDFTLVRGKHEAILGEDIKQQIEAKFLSNRLKTVPDNKEMKNPLLGLVVCGYCGNNMTRRPYYLRKDAKPTAKRIYDIDKPKLRLLLREHKGNYSLNDIARALHVSKNSVDHWFSSNDEKFCIPHADKWEDLKKLLNIETNEFDKAITTIKESITPPHTDTLMCSRPRCKCVSSELELVEDKILKSLKIIMSEYKNYVNNYEEAVKKEICTNKEMIEAIDHEIDKIKSQIEKACELVETGAYTQDLFIKRTNTLNEQLETLLNQKTELSKSKDRTKDLYSKKKAIPILEDVISKYSKDMTAEEKNDLLSTIIKQVIYKKEKGGRYLKENFSLKIILLSF

SEQ ID NO: 48 - protein, 719 aa, Unknown
  Description of Unknown: Integrase B49 sequence
  PTHR30461:SF3,IPR036162,IPR036779,IPR011109,PTHR30461, PF01476,PF00239,IPR006119,SSF53041,cd00338, SM00857,SM00257,cd00118,PS51736,G3DSA:3.40.50.1390, PF07508,IPR018392,G3DSA:3.10.350.10,Coil
MNLDTFLQIMNVSRDLTVDEILDMFIIYLRKSRKDMDYYKDESIEKTLQRHEKELQDFIVSIFGKPIPEHNIYREVASGDTIEDRPVIQEVLSLIEEDRVKGVVCIEIERLARGNTMDQGIIAQAFQYSNTKIITPMKIYNLDNEDDLSYFEDGLYQARKYLKYTKRILARGRLRSVKDGKYVGSVLPYGYNKQKIPNEKGYVLVENESESKVVKLLADLFLNGLNTTYTVKENEIISDIAKLFGTHKKDIITCNLDLKVDQEIRLTVNSKSLPYKIKENDTLESIAANYNIDINNIHIPHNFFKPGENIKIILNDMRATNIAHYLNYLKIKPRKSKEWTANMVRNILQGYTIYGYLTWDRRKTTKTLVNGHIVKKNPNNDDFTLVRGKHEAILGEDIKQQIEAKFLSNRLKTVPDNKEMKNPLLGLVVCGYCGNNMTRRPYYLRKDAKPTAKRIYDIDKPKLRLLLREHKGNYSLNDIARALHVSKNSVDHWFSSNDEKFCIPHADKWEDLKKLLNIETNEFDKAITTIEESITPPHTDTLMCSRPRCKCVSSELELVEDKILKSLKIIMSEYKNYVNNYEEAVKKEICTNKEMIEAIDHEIDKIKSQIEKACELVETGAYTQDLFIKRTNTLNEQLETLLNQKTELSKSKDRTKDLYSKKKAIPILEDVISKYSKDMTAEEKNALLSTIIKQVIYKKEKGGRYLKENFSLKIILLSF

SEQ ID NO: 49 - protein, 719 aa, Unknown
  Description of Unknown: Integrase B50 sequence
  PTHR30461:SF3,SM00857,IPR036162,G3DSA:3.40.50.1390,SM00257, IPR006119,PF07508,IPR018392,SSF53041,cd00118, IPR011109,PF00239,PTHR30461,PF01476,PS51736, Coil,cd00338
MNLDTFLQIMNVSRDLTVDEILDMFIIYLRKSRKDMDYYKDESIEKTLQRHEKELQDFIVSIFGKPIPEHNIYREVASGDTIEDRPVIQEVLSLIEEDRVKGVVCIEIERLARGNTMDQGIIAQAFQYSNTKIITPMKIYNLDNEDDLSYFEDGLYQARKYLKYTKRILARGRLRSVKDGKYVGSVLPYGYNKQKIPNEKGYVLVENESESKVVKLLADLFLNGLNTTYTVKENEIISDIAKLFGAHKKDIITCNLDLKVDQEIKLTVNSKSLPYKIKENDTLESIAANYNIDINNVHIPHNFFKPGENIKIILNDMRATNIAHYLNYLKIKPRKSKEWTANMVRNILQGYTIYGYLTWDRRKTTKTLVNGHIVKKNPNNDDFTLVRGKHEAILGEDIKHQIEAKFLSNRLKTVPDNKEMKNPLLGLVVCGYCGNNMTRRPYYLRKDAKPTAKRIYDIDKPKLRLLLREHKGNYSLNDIARALHVSKNSVDHWFSSNDEKFCIPHADKWEDLKKLLNIETNEFDKAITTIEESITPPHTDTLMCSRPRCKCVSSELELVENKILKSLKIIMSEYKNYVNNYEEAVKKEICTNKEMIEAIDHEIDKIKSQIEKACELVETGAYTQDLFIKRTNTLNEQLEILLNQKTELSKSKDRTKDLYSKKKAIPILEDVISKYSKDMTAEEKNALLSTIIKQVIYKKEKGGRYLKENFSLKIILLSF

SEQ ID NO: 50 - protein, 719 aa, Unknown
  Description of Unknown: Integrase B51 sequence
  PTHR30461:SF3,cd00338,SM00857,IPR036162,G3DSA:3.40.50.1390, SM00257,IPR006119,PF07508,cd00118,SSF53041, IPR018392,IPR011109,PTHR30461,PF01476,PS51736, Coil,PF00239
MNLDTFLQIMNVSRDLTVDEILDMFIIYLRKSRKDMDYYKDESIEKTLQRHEKELQDFIVSIFGKPIPEHNIYREVASGDTIEDRPVIQEVLSLIEEDRVKGVVCIEIERLARGNTMDQGIIAQAFQYSNTKIITPMKIYNLDNEDDLSYFEDGLYQARKYLKYTKRILARGRLRSVKDGKYVGSVLPYGYNKQKIPNEKGYVLVENESESKVVKLLADLFLNGLNTTYTVKENEIISDIAKLFGTHKKDIITCNLDLKVDQEIRLTVNSKSLPYKIKENDTLESIAANYNIDINNIHIPHNFFKPGENIKIILNDMRATNIAHYLNYLKIKPRKSKEWTANMVRNILQGYTIYGYLTWDRRKTTKTLVNGHIVKKNPNNDDFTLVRGKHEAILGEDIKQQIEAKFLSNRLKTVPDNKEMKNPLLGLVVCGYCGNNMTRRPYYLRKDAKPTAKRIYDIDKPKLRLLLREHKGNYSLNDIARALHVSKNSVDHWFSSNDDKFCIPHADKWEDLKKLLNIETNEFDKAITTIKESITPPHTDTLMCSRPRCKCVSSELELVEDKILKSLKIIMSEYKNYVNNYEEAVKKEICTNKEMIEAIDHEIDKIKSQIEKACELVETGAYTQDLFIKRTNTLNEQLETLLNQKTELSKSKDRTKDLYSKKKAIPILEDVISKYSKDMTAEEKNALLSTIIKQVIYKKEKGGRYLKENFSLKIILLSF

SEQ ID NO: 51 - protein, 719 aa, Unknown
  Description of Unknown: Integrase B52 sequence
  PTHR30461:SF3,IPR036162,IPR036779,IPR011109,PTHR30461, PF01476,PF00239,IPR006119,SSF53041,cd00338, SM00857,SM00257,cd00118,PS51736,G3DSA:3.40.50.1390, PF07508,IPR018392,G3DSA:3.10.350.10,Coil
MNLDTFLQIMNVSRDLTVDEILDMFIIYLRKSRKDMDYYKDESIEKTLQRHEKELQDFIVSIFGKPIPEHNIYREVASGDTIEDRPVIQEVLSLIEEDRVKGVVCIEIERLARGNTMDQGIIAQAFQYSNTKIITPMKIYNLDNEDDLSYFEDGLYQARKYLKYTKRILARGRLRSVKDGKYVGSVLPYGYNKQKIPNEKGYVLVENESESKVVKLLADLFLNGLNTTYTVKENEIISDIAKLFGTHKKDIITCNLDLKVDQEIRLTVNSKSLPYRIKENDTLESIAANYNIDINNIHIPHNFFKPGENIKIILNDMRATNIAHYLNYLKIKPRKSKEWTANMVRNILQGYTIYGYLTWDRRKTTKTLVNGHIVKKNPNNDDFTLVRGKHEAILSEDIKQQIEAKFLSNRLKTVPDNKEMKNPLLGLVVCGYCGNNMTRRPYYLRKDAKPTAKRIYDIDKPKLRLLLREHKGNYSLNDIARALHVSKNSVDHWFSSNDDKFCIPHADKWKDLKKLLNIETNEFDKAITTIEESITPPHTDTLMCSRPRCKCVSSELELVENKILKSLKIIMSEYKNYVNNYEEAVKKEICTNKEMIEAIDHEIDKIKSQIEKACELVETGAYTQDLFIKRTNTLNEQLETLLNQKTELSKSKDRTKDLYSKKKAIPILEDVISKYSKDMTAEEKNALLSTIIKQVIYKKEKGGRYLKENFSLKIILLSF

SEQ ID NO: 52 - protein, 719 aa, Unknown
  Description of Unknown: Integrase B53 sequence
  PTHR30461:SF3,IPR036162,IPR036779,IPR011109,PTHR30461, PF01476,PF00239,IPR006119,SSF53041,cd00338, SM00857,SM00257,cd00118,PS51736,G3DSA:3.40.50.1390, PF07508,IPR018392,G3DSA:3.10.350.10,Coil
MNLDTFLQIMNVSRDLTVDEILDMFIIYLRKSRKDMDYYKDESIEKTLQRHEKELQDFIVSIFGKPIPEHNIYREVASGDTIEDRPVIQEVLSLIEEDRVKGVVCIEIERLARGNTMDQGIIAQAFQYSNTKIITPMKIYNLDNEDDLSYFEDGLYQARKYLKYTKRILARGRLRSVKDGKYVGSVLPYGYNKQKIPNEKGYVLVENESESKVVKLLADLFLNGLNTTYTVKENEIISDIAKLFGAHKKDIITCNLDLKVDQEIRLTVNSKSLPYKIKENDTLESIAANYNIDINNIHIPHNFFKPGENIKIILNDMRATNIAHYLNYLKIKPRKSKEWTANMVRNILQGYTIYGYLTWDRRKTTKTLVNGHIVKKNPNNDDFTLVRGKHEAILSEDIKQQIEAKFLSNRIKTVPDNKEMKNPLLGLVVCGYCGNNMTRRPYYLRKDAKPTAKRIYDIDKPKLRLLLREHKGNYSLNDIARALHVSKNSVDHWFSSNDEKFCIPHADKWEDLKKLLNIETNEFDKAITTIEESITPPHTDTLMCSRPRCKCVSSELELVEDKILKSLKIIMSEYKNYVNNYEEAVKKEICTNKEMIEAIDHEIDKIKSQIEKACELVETGAYTQDLFIKRTNTLNEQLETLLNQKTELSKSKDRTKDLYSKKKAIPILEDVISKYSKDMTAEEKNALLSTIIKQVIYKKEKGGRYLKENFSLKIILLSF

SEQ ID NO: 53 - protein, 719 aa, Unknown
  Description of Unknown: Integrase B54 sequence
  PTHR30461:SF3,IPR036162,IPR036779,IPR011109,PTHR30461, PF01476,PF00239,IPR006119,SSF53041,cd00338, SM00857,SM00257,cd00118,PS51736,G3DSA:3.40.50.1390, PF07508,IPR018392,G3DSA:3.10.350.10,Coil
MNLDTFLQMMNVSRDLTVDEILDMFIIYLRKSRKDMDYYKDESIEKTLQRHEKELQDFIVSIFGKPIPEHNIYREVASGDTIEDRPVIQEVLSLIEEDRVKGVVCIEIERLARGNTMDQGIIAQAFQYSNTKIITPMKIYNLDNEDDLSYFEDGLYQARKYLKYTKRILARGRLRSVKDGKYVGSVLPYGYNKQKIPNEKGYVLVENESESKVVKLLADLFLNGLNTTYTVKENEIISDIAKLFGAHKKDIITCNLDLKVDQEIRLTVNSKSLPYKIKENDTLESIAASYNIDINNIHIPHNFFKPGENIKIILNDMRATNIAHYLNYLKIKPRKSKEWTANMVRNILQGYTIYGYLTWDRRKTTKTLVNGHIVKKNPNNDDFTLVRGKHEAILSEDIKQQIEAKFLSNRLKTVPDNKEMKNPLLGLVVCGYCGNNMTRRPYYLRKDAKPTAKRIYDIDKPKLRLLLREHKGNYSLNDIARALHVSKNSVDHWFSSNDEKFCIPHADKWEDLKKLLNIETNEFDKAITTIEESITPPHTDTLMCSRPRCKCVSSELELVEDKILKSLKIIMSEYKNYVNNYEEAVKKEICTNKEMIEAIDHEIDKIKSQIEKACELVETGAYTQDLFIKRTNTLNEQLETLLNQKTELSKSKDRTKDLYSKKKAIPILEDVISKYSKDMTAEEKNALLSTIIKQVIYKKEKGGRYLKENFSLKIILLSF

SEQ ID NO: 54 - protein, 719 aa, Unknown
  Description of Unknown: Integrase B55 sequence
  PTHR30461:SF3,IPR036162,IPR036779,IPR011109,PTHR30461, PF01476,PF00239,IPR006119,SSF53041,cd00338, SM00857,SM00257,cd00118,PS51736,G3DSA:3.40.50.1390, PF07508,IPR018392,G3DSA:3.10.350.10,Coil
MNLDTFLQIMNVSRDLTVDEILDMFIIYLRKSRKDMDYYKDESIEKTLQRHEKELQDFIVSIFGKPIPEHNIYREVASGDTIEDRPVIQEVLSLIEEDRVKGVVCIEIERLARGNTMDQGIIAQAFQYSNTKIITPMKIYNLDNEDDLSYFEDGLYQARKYLKYTKRILARGRLRSVKDGKYVGSVLPYGYNKQKIPNEKGYVLVENESESKVVKLLADLFLNGLNTTYTVKENEIISDIAKLFGAHKKDIITCNLDLKVDQEIRLTVNSKSLPYKIKENDTLESIAASYNIDINNIHIPHNFFKPGENIKIILNDMRATNIAHYLNYLKIKPRKSKEWTANMVRNILQGYTIYGYLTWDRRKTTKTLVNGHIVKKNPNNDDFTLVRGKHEAILSEDIKQQIEAKFLSNRLKTVPDNKEMKNPLLGLVVCGYCGNNMTRRPYYLRKDAKPTAKRIYDIDKPKLRLLLRKHKGNYSLNDIARALHVSKNSVDHWFSSNDEKFCIPHADKWEDLKKLLNIETNEFDKAITTIEESITPPHTDTLMCSRPRCKCVSSELELVEDKILKSLKIIMSEYKNYVNNYEEAVKKEICTNKEMIEAIDHEIDKIKSQIEKACELVETGAYTQDLFIKRTNTLNEQLETLLNQKTELSKSKDRTKDLYSKKKAIPILEDVISKYSKDMTAEEKNALLSTIIKQVIYKKEKGGRYLKENFSLKIILLSF

SEQ ID NO: 55 - protein, 719 aa, Unknown
  Description of Unknown: Integrase B56 sequence
  PTHR30461:SF3,cd00338,SM00857,IPR036162,G3DSA:3.40.50.1390, SM00257,IPR006119,PF07508,IPR018392,SSF53041, cd00118,IPR011109,PTHR30461,PF01476,PS51736, Coil,PF00239
MNLDTFLQIMNVSRDLTVDEILDMFIIYLRKSRKDMDYYKDESIEKTLQRHEKELQDFIVSIFGKPIPEHNIYREVASGDTIEDRPVIQEVLSLIEEDRVKGVVCIEIERLARGNTMDQGIIAQAFQYSNTKIITPMKIYNLDNEDDLSYFEDGLYQARKYLKYTKRILARGRLRSVKDGKYVGSVLPYGYNKQKIPNEKGYVLVENESESKIVKLLADLFLNGLNTTYTVKENEIISDIAKLFGTHKKDIITCNLDLKVDQEIRLTVNSKSLPYRIKENDTLESIAANYNIDINNIHIPHNFFKPGENIKIILNDMRATNIAHYLNYLKIKPRKSKEWTANMVRNILQGYTIYGYLTWDRRKTTKTLVNGHIVKKNPNNDDFTLVRGKHEAILSEDIKQQIEAKFLSNRLKTVPDNKEMKNPLLGLVVCGYCGNNMTRRPYYLRKDAKPTAKRIYDIDKPKLRLLLREHKGNYSLNDIARALHVSKNSVDHWFSSNDEKFCIPHADKWEDLKKLLNIETNEFDKAITTIEESITPPHTDTLMCSRPRCKCVSSELELVENKILKSLKIIMSEYKNYVNNYEEAVKKEICTNKEMIEAIEHEIDKIKSQIEKACELVETGAYTQDLFIKRTNTLNEQLETLLNQKTELSKSKDRTKDLYSKKKAIPILEDVISKYSKDMTAEEKNALLSTIIKQVIYKKEKGGRYLKENFSLKIILLSF

SEQ ID NO: 56 - protein, 719 aa, Unknown
  Description of Unknown: Integrase B57 sequence
  PTHR30461:SF3,IPR036162,IPR036779,IPR011109,PTHR30461, PF01476,PF00239,IPR006119,SSF53041,cd00338, SM00857,SM00257,cd00118,PS51736,G3DSA:3.40.50.1390, PF07508,IPR018392,G3DSA:3.10.350.10,Coil
MNLDTFLQIMNVSRDLTVDEILDMFIIYLRKSRKDMDYYKDESIEKTLQRHEKELQDFIVSIFGKPIPEHNIYREVASGDTIEDRPVIQEVLSLIEEDRVKGVVCIEIERLARGNTMDQGIIAQAFQYSNTKIITPMKIYNLDNEDDLSYFEDGLYQARKYLKYTKRILARGRLRSIKDGKYVGSVLPYGYNKQKIPNEKGYVLVENESESKVVKLLADLFLNGLNTTYTVKENEIISDIAKLFGTHKKDIITCNLDLKVDQEIRLTVNSKSLPYKIKENDTLESIAANYNIDINNIHIPHNFFKPGENIKIILNDMRATNIAHYLNYLKIKPRKSKEWTANMVRNILQGYTIYGYLTWDRRKTTKTLVNGHIVKKNPNNNDFTLVRGKHEAILSEDIKQQIEAKFLSNRLKTVPDNKEMKNPLLGLVICGYCGNNMTRRPYYLRKDAKPTAKRIYDIDKPKLRLLLREHKGNYSLNDIARALHVSKNSVDHWFSSNDEKFCIPHADKWEDLKKLLNIETNEFDKAITTIEESITPPHTDTLMCSRPRCKCVSSELELVEDKILKSLKIIMSEYKNYVNNYEEAVKKEICTNKEMIEAIDHEIDKIKSQIEKACELVETGAYTQDLFIKRTNTLNEQLETLLNQKTELSKSKDRTKDLYSKKKAIPILEDVISKYSKDMTAEEKNALLSTIIKQVIYKKEKGGRYLKENFSLKIILLSF

SEQ ID NO: 57 - protein, 719 aa, Unknown
  Description of Unknown: Integrase B58 sequence
  PTHR30461:SF3,IPR036162,IPR036779,IPR011109,PTHR30461, PF01476,PF00239,IPR006119,SSF53041,cd00338, SM00857,SM00257,cd00118,PS51736,G3DSA:3.40.50.1390, PF07508,IPR018392,G3DSA:3.10.350.10,Coil
MNLDTFLQIMNVSRDLTVDEILDMFIIYLRKSRKDMDYYKDESIEKTLQRHEKELQDFIVSIFGKPIPEHNIYREVASGDTIEDRPVIQEVLSLIEEDRVKGVVCIEIERLARGNTMDQGIIAQAFQYSNTKIITPMKIYNLDNEDDLSYFEDGLYQARKYLKYTKRILARGRLRSVKDGKYVGSVLPYGYNKQKIPNEKGYVLVENESESKVVKLLADLFLNGLNTTYTVKENEIISDIAKLFGAHKKDIITCNLDLKVDQEIRLTVNSKSLPYKIKENDTLESIAASYNIDINNIHIPHNFFKPGENIKIILNDMRATNIAHYLNYLKIKPRKSKEWTANMVRNILQGYTIYGYLTWDRRKTTKTLVNGHIVKKNPNNDDFTLVRGKHEAILGEDIKQQIEAKFLSNRLKTVPDNKEMKNPLLGLVVCGYCGNNMTRRPYYLRKDAKPTAKRIYDIDKPKLRLLLREHKGNYSLNDIARALHVSKNSVDHWFSSNDEKFCIPHADKWEDLKKLLNIETNEFDKAITTIKESITPPHTDTLMCSRPRCKCVSSELELVEDKILKSLKIIMSEYKNYVNNYEEAVKKEICTNKEMIEAIDHEIDKIKSQIEKACELVETGAYTQDLFIKRTNTLNEQLETLLNQKTELSKSKDRTKDLYSKKKAIPILEDVISKYSKDMTAEEKNALLSTIIKQVIYKKEKGGRYLKENFSLKIILLSF

SEQ ID NO: 58 - protein, 719 aa, Unknown
  Description of Unknown: Integrase B59 sequence
  cd00338,SM00857,IPR036162,G3DSA:3.40.50.1390,SM00257, IPR006119,PF07508,cd00118,IPR018392,IPR011109, SSF53041,PTHR30461,PF01476,PS51736,Coil, PF00239
MNLDTFLQIMNVSRELTVDEILDMFIIYLRKSRKDMDYYKDESIEKTLQRHEKELQDFIVSIFGKPIPEHNIYREVASGDTIEDRPVIQEVLSLIEEDRVKGVVCIEIERLARGNTMDQGIIAQAFQYSNTKIITPMKIYNLDNEDDLSYFEDGLYQARKYLKYTKRILTRGRLRSVKDGKYVGSVLPYGYNKQKIPNEKGYVLVENESESKVVKLLADLFLNGLNTTYTVKENEIISDIAKLFGTHKKDIITCNLDLKVDQEIRLTVNSKSLPYKIKENDTLESIAANYNIDINNIHIPHNFFKPGENIKIILNDMRATNIAHYLNYLKIKPRNSKEWTANMVRNILQSYTIYGYLTWDRRKTTKTLVNGHIVKKNPNNDDFTLVRGKHKAILSEDIKQQIEAKFLSNRLKTVPDNKEMKNPLLGLVVCGYCGNNMTRRPYYLRKDAKPTAKRIYDIDKPKLRLLLREHKGNYSLNDIARALHVSKNSVDHWFSSNDEKFCIPHADKWDDLKKLLNIETNEFDKAITTIEESITSPHTDTLMCSRPRCKCVSSELELVEDKILKSLKIIMSEYKNYVNNYEEAVKKEICTNKEMIEAIDHEIDKIKSQIEKACELVETGAYSQDLFIKRTNTLNEQLETLLNQKKELSKSKDRTKDLYSKKKAIPILEDVISKYSKDMTAEEKNALLSAIIKQVIYKKEKGGRYLKENFSLKIILLSF

SEQ ID NO: 59 - protein, 719 aa, Unknown
  Description of Unknown: Integrase B60 sequence
  PTHR30461:SF3,IPR036162,IPR036779,IPR011109,PTHR30461, PF01476,PF00239,IPR006119,SSF53041,cd00338, SM00857,SM00257,cd00118,PS51736,G3DSA:3.40.50.1390, PF07508,IPR018392,G3DSA:3.10.350.10,Coil
MNLDTFLQIMNVSRDLTVDEILDMFIIYLRKSRKDMDYYKDESIEKTLQRHEKELQDFIVSIFGKPIPEHNIYREVASGDTIEDRPVIQEVLSLIEEDRVKGVVCIEIERLARGNTMDQGIIAQAFQYSNTKIITPMKIYNLDNEDDLSYFEDGLYQARKYLKYTKRILARGRLRSVKDGKYVGSVLPYGYNKQKIPNEKGYVLVENESESKVVKLLADLFLNGLNTTYTVKENEIISDIAKLFGTHKKDIITCNLDLKVDQEIRLTVNSKSLPYKIKENDTLESIAASYNIDINNIHIPHNFFKPGENIKIILNDMRATNIAHYLNYLKIKPRKSKEWTANMVRNILQGYTIYGYLTWDRRKTTKTLVNGHIVKKNPNNDDFTLVRGKHEAILSEDIKQQIEAKFLSNRLKTVPDNKEMKNPLLGLVVCGYCGNNMTRRPYYLRKDAKPTAKRIYDIDKPKLRLLLREHKGNYSLNDIARALHVSKNSVDHWFSSNDEKFCIPHADKWEDLKKLLNIETNEFDKAITTIEESITPPHTDTLMCSRPRCKCVSSELELVEDKILKSLKIIMSEYKNYVNNYEEAVKKEICTNKEMIEAIDHEIDKIKSQIEKACELVETGAYTQDLFIKRTNTLNEQLETLLNQKTELSKSKDRTKDLYSKKKAIPILEDVISKYSKDMTAEEKNALLSTIIKQVIYKKEKGGRYLKENFSLKIILLSF

SEQ ID NO: 60 - protein, 719 aa, Unknown
  Description of Unknown: Integrase B61 sequence
  PTHR30461:SF3,IPR036162,IPR036779,IPR011109,PTHR30461, PF01476,PF00239,IPR006119,SSF53041,cd00338, SM00857,SM00257,cd00118,PS51736,G3DSA:3.40.50.1390, PF07508,IPR018392,G3DSA:3.10.350.10,Coil
MNLDTFLQIMNVSRDLTVDEILDMFIIYLRKSRKDMDYYKDESIEKTLQRHEKELQDFIVSIFGKPIPEYNIYREVASGDTIEDRPVIQEVLSLIEEDRVKGVVCIEIERLARGNTMDQGIIAQAFQYSNTKIITPMKIYNLDNEDDLSYFEDGLYQARKYLKYTKRILARGRLRSVKDGKYVGSILPYGYNKQKIPNEKGYVLVENESESKVVKLLADLFLNGLNTTYTVKENEIISDIAKLFGTHKKDIITCNLDLKVDQEIRLTVNSKSLPYKIKENDTLESIAANYNIDINNIHIPHNFFKPGENIKIILNDMRATNIAHYLNYLKIKPRKSKEWTANMVRNILQGYTIYGYLTWDRRKTTKTLVNGHIVKKNPNNDDFTLVRGKHEAILGEDIKQQIEAKFLSNRLKTVPDNKEMKNPLLGLVVCGYCGNNMTRRPYYLRKDAKPTAKRIYDIDKPKLRLLLREHKGNYSLNDIARALHVSKNSVDHWFSSNDEKFCIPHADKWEDLKKLLNIETNEFDKAITTIEESITPPHTDTLMCSRPRCKCVSSELELVEDKILKSLKIIMSEYKNYVNNYEEAVKKEICTNKEMIEAIDHEIDKIKSQIEKACELVETGAYTQDLFIKRTNTLNEQLETLLNQKTELSKSKDRTKDLYSKKKAIPILEDVISKYSKDMTAEEKNALLSTIIKQVIYKKEKGGRYLKENFSLKIILLSF

SEQ ID NO: 61 - protein, 719 aa, Unknown
  Description of Unknown: Integrase B62 sequence
  PTHR30461:SF3,IPR036162,IPR036779,IPR011109,PTHR30461, PF01476,PF00239,IPR006119,SSF53041,cd00338, SM00857,SM00257,cd00118,PS51736,G3DSA:3.40.50.1390, PF07508,IPR018392,G3DSA:3.10.350.10,Coil
MNLDTFLQIMNVSRDLTVDEILDMFIIYLRKSRKDMDYYKDESIEKTLQRHEKELQDFIVSIFGKPIPEHNIYREVASGDTIEDRPVIQEVLSLIEEDRVKGVVCIEIERLARGNTMDQGIIAQAFQYSNTKIITPMKIYNLDNEDDLSYFEDGLYQARKYLKYTKRILARGRLRSVKDGKYVGSVLPYGYNKQKIPNEKGYVLVENESESKVVKLLADLFLNGLNTTYTVKENEIISDIAKLFGTHKKDIITCNLDLKVDQEIRLTVNSKSLPYKIKENDTLESIAASYNIDINNIHIPHNFFKPGENIKIILNDMRATNIAHYLNYLKIKPRKSKEWTANMVRNILQGYTIYGYLTWDRRKTTKTLVNGHIVKKNPNNDDFTLVKGKHEAILSEDIKQQIEAKFLSNRLKTVPDNKEMKNPLLGLVVCGYCGNNMTRRPYYLRKDAKPTAKRIYDIDKPKLRLLLREHKGNYSLNDIARALHVSKNSVDHWFSSNDEKFCIPHADKWEDLKKLLNIETNEFDKAITTIEESITPPHTDTLMCSRPRCKCVSSELELVEDKILKSLKIIMSEYKNYVNNYEEAVKKEICTNKEMIEAIDHEIDKIKSQIEKACELVETGAYTQDLFIKRTNTLNEQLETLLNQKTELSKSKDRTKDLYSKKKAIPILEDVISKYSKDMTAEEKNALLSTIIKQVIYKKEKGGRYLKENFSLKIILLSF

SEQ ID NO: 62 - protein, 719 aa, Unknown
  Description of Unknown: Integrase B63 sequence
  cd00338,SM00857,IPR036162,IPR036779,G3DSA:3.40.50.1390, SM00257,IPR006119,PF07508,cd00118,SSF53041, IPR018392,IPR011109,PTHR30461,G3DSA:3.10.350.10,PF01476, PS51736,Coil,PF00239
MNLDTFLQIMNVSRDLTVDEILDMFIIYLRKSRKDMDYYKDESIEKTLQRHEKELQDFIVSIFGKPIPEHNIYREVASGDTIEDRPVIQEVLSLIEEDRVKGVVCIEIERLARGNTMDQGIIAQAFQYSNTKIITPMKIYNLDNEDDLSYFEDGLYQARKYLKYTKRILARGRLRSVKDGKYVGSVLPYGYNKQKIPNEKGYVLVENESESKVVKLLADLFLNGLNTTYTVKENEIISDIAKLFGAHKKDIITCNLDLKVDQEIRLTVNSKSLPYKIKENDTLESIAANYNIDINNIHIPHNFFKPGENIKIILNDMRATNIAHYLNYLKIKPRKSKEWTANMVRNILQGYTIYGYLTWDRRKTTKTLVNGHIVKKNPNNDDFTLVRGKHEAILSEDIKQQIEAKFLSNRLKTVPDNKEMKNPLLGLVVCGYCGNNMTRRPYYLRKDAKPTAKRIYDIDKPKLRLLLREHKGNYSLNDIARALHVSKNYVDHWFSSNDEKFCIPHADKWDDLKKLLNIETNEFDKAITTIEESITSPHTDTLMCSRPRCKCVSSELELVEDKILKSLKIIISEYKNYVNNYEEAVKKEICTNKEMIEAIDHEIDKIKSQIEKACELVETGAYSQDLFIKRTNTLNEQLETLLNQKKELSKSKDRTKDLYSKKKAIPILEDVISKYSKDMTAEEKNALLLAIIKQVIYKKEKGGRYLKENFSLKIILLSF

SEQ ID NO: 63 - protein, 719 aa, Unknown
  Description of Unknown: Integrase B64 sequence
  PTHR30461:SF3,cd00338,SM00857,IPR036162,IPR036779, G3DSA:3.40.50.1390,IPR006119,PF07508,IPR018392,IPR011109, SSF53041,cd00118,PTHR30461,G3DSA:3.10.350.10,PF01476, PS51736,Coil,PF00239
MNLDTFLQIMNVSRDLTVDEILDMFIIYLRKSRKDMDYYKDESIEKTLQRHEKELQDFIISIFGKPIPEHNIYREVASGDTIEDRPVIQEVLSLIEEDRVKGVVCIEIERLARGNTMDQGIIAQAFQYSNTKIITPMKIYNLDNEDDLSYFEDGLYQARKYLKYTKRILARGRLRSVKDGKYVGSVLPYGYNKQKIPNEKGYVLVENESESKVVKLLADLFLNGLNTTYTVKENEIILDIAKLFGAHKKDIITCNLDLKVDQEIRLTVNSKSLPYKIKENDTLESIAANYNIDINNIHIPHNFFKPGENIKIILNDMRATNIAHYLNYLKIKPRKSKEWTANMVRNILQGYTIYGYLTWDRRKTTKTLVNGHIVKKNPNNDDFTLVRGKHEAILGEDIKQQIEAKFLSNRLKTVPDNKEMKNPLLGLVVCGYCGNNMTRRPYYLRKDAKPTAKRIYDIDKPKLRLLLRKHKGNYSLNDIARALHVSKNSVDHWFSSNDEKFCIPHADKWEDLKKLLNIETNEFDKAITTIEESITPPHTDTLMCSRPRCKCVSSELELVEDKILKSLKIIMSEYKNYVNNYEEAVKKEICTNKEMIEAIDHEIDKIKSQIEKACELVETGAYTQDLFIKRTNTLNEQLETLLNQKTELSKSKDRTKDLYSKKKAIPILEDVISKYSKDMTAEEKNALLSTIIKQVIYKKEKGGRYLKENFSLKIILLSF

SEQ ID NO: 64 - protein, 719 aa, Unknown
  Description of Unknown: Integrase B65 sequence
  PTHR30461:SF3,IPR036162,IPR036779,IPR011109,PTHR30461, PF01476,PF00239,IPR006119,SSF53041,cd00338, SM00857,SM00257,cd00118,PS51736,G3DSA:3.40.50.1390, PF07508,IPR018392,G3DSA:3.10.350.10,Coil
MNLDTFLQIMNVSRDLTVDEILDMFIIYLRKSRKDMDYYKDESIEKTLQRHEKELQDFIVSIFGKPIPEHNIYREVASGDTIEDRPVIQEVLSLIEEDRVKGVVCIEIERLARGNTMDQGIIAQAFQYSNTKIITPMKIYNLDNEDDLSYFEDGLYQARKYLKYTKRILARGRLRSVKDGKYVGSVLPYGYNKQKIPNEKGYVLVENESESKVVKLLADLFLNGLNTTYTVKENEIISDIAKLFGAHKKDIITCNLDLKVDQEIRLTVNSKSLPYKIKENDTLESIAANYNIDINNIHIPHNFFKPGENIKIILNDMRATNIAHYLNYLKIKPRKSKEWTANMVRNILQGYTIYGYLTWDRRKTTKTLVNGHIVKKNPNNDDFTLVRGKHEAILGEDIKQQIEAKFLSNRLKTVPDNKEMKNPLLGLVVCGYCGNNMTRRPYYLRKDAKPTAKRIYDIDKPKLRLLLREHKGNYSLNDIARALHVSKNSVDHWFSSNDDKFCIPHADKWEDLKKLLNIETNEFDKAITTIEESITPPHTDTLMCSRPRCKCVSSELELVENKILKSLKIIMSEYKNYVNNYEEAVKKEICTNKEMIEAIDHEIDKIKSQIEKACELVETGAYTQDLFIKRTNTLNEQLETLLNQKTELSKSKDRTKDLYSKKKAIPILEDVISKYSKDMTAEEKNALLSTIIKQVIYKKEKGGRYLKENFSLKIILLSF

SEQ ID NO: 65 - protein, 719 aa, Unknown
  Description of Unknown: Integrase B66 sequence
  PTHR30461:SF3,IPR036162,IPR036779,IPR011109,PTHR30461, PF01476,PF00239,IPR006119,SSF53041,cd00338, SM00857,SM00257,cd00118,PS51736,G3DSA:3.40.50.1390, PF07508,IPR018392,G3DSA:3.10.350.10,Coil
MNLDTFLQIMNVSRDLTVDEILDMFIIYLRKSRKDMDYYKDESIEKTLQRHEKELQDFIVSIFGKPIPEHNIYREVASGDTIEDRPVIQEVLSLIEEDRVKGVVCIEIERLARGNTMDQGIIAQAFQYSNTKIITPMKIYNLDNEDDLSYFEDGLYQARKYLKYTKRILARGRLRSVKDGKYVGSVLPYGYNKQKIPNEKGYVLVENESESKVVKLLADLFLNGLNTTYTVKENEIISDIAKLFGAHKKDIITCNLDLKVDQEIRLTVNSKSLPYKIKENDTLESIAANYNIDINNIHIPHNFFKPGENIKIILNDMRATNIAHYLNYLKIKPRKSKEWTANMVRNILQGYTIYGYLTWDRRKTTKTLVNGHIVKKNPNNDDFTLVRGKHEAILGEDIKQQIEAKFLSNRLKTVPDNKEMKNPLLGLVVCGYCGNNMTRRPYYLRKDAKPTAKRIYDIDKPKLRLLLREHKGNYSLNDIARALHVSKNSVDHWFSSNDEKFCIPHADKWEDLKKLLNIETNEFDKAITTIEESITPPHTDTLMCSRPRCKCISSELELVEDKILKSLKIIMSEYKNYVNNYEEAVKKEICTNKEMIEAIDHEIDKIKSQIEKACELVETGAYTQDLFIKRTNTLNEQLETLLNQKTELSKSKDRTKDLYSKKKAIPILEDVISKYSKDMTAEEKNALLSTIIKQVIYKKEKGGRYLKENFSLKIILLSF

SEQ ID NO: 66 - protein, 719 aa, Unknown
  Description of Unknown: Integrase B67 sequence
  PTHR30461:SF3,IPR036162,IPR036779,IPR011109,PTHR30461, PF01476,PF00239,IPR006119,SSF53041,cd00338, SM00857,SM00257,cd00118,PS51736,G3DSA:3.40.50.1390, PF07508,IPR018392,G3DSA:3.10.350.10,Coil
MNLDTFLQIMNVSRDLTVDEILDMFIIYLRKSRKDMDYYKDESIEKTLQRHEKELQDFIVSIFGKPIPEHNIYREVASGDTIEDRPVIQEVLSLIEEDRVKGVVCIEIERLARGNTMDQGIIAQAFQYSNTKIITPMKIYNLDNEDDLSYFEDGLYQARKYLKYTKRILARGRLRSVKDGKYVGSVLPYGYNKQKIPNEKGYVLVENESESKVVKLLADLFLNGLNTTYTVKENEIISDIAKLFGAHKKDIITCNLDLKVDQEIRLTVNSKSLPYKIKENDTLESIAANYNIDINNIHIPHNFFKPGENIKIILNDMRATNIAHYLNYLKIKPRKSKEWTANMVRNILQGYTIYGYLTWDRRKTTKTLVNGHIVKKNPNNDDFTLVRGKHEAILGEDIKQQIEAKFLSNRLKTVPDNKEMKNPLLGLVVCGYCGNNMTRRPYYLRKDAKPTAKRIYDIDKPKLRLLLREHKGNYSLNDIARALHVSKNSVDHWFSSNDEKFCIPHADKWEDLKKLLNIETNEFDKAITTIEESITPPHTDTLMCSRPRCKCVSSELELVEDKILKSLKIIMSEYKNYVDNYEEAVKKEICTNKEMIEAIDHEIDKIKSQIEKACELVETGAYTQDLFIKRTNTLNEQLETLLNQKTELSKSKDRTKDLYSKKKAIPILEDVISKYSKDMTAEEKNALLSTIIKQVIYKKEKGGRYLKENFSLKIILLSF

SEQ ID NO: 67 - protein, 719 aa, Unknown
  Description of Unknown: Integrase B68 sequence
  PTHR30461:SF3,IPR036162,IPR036779,IPR011109,PTHR30461, PF01476,PF00239,IPR006119,SSF53041,cd00338, SM00857,SM00257,cd00118,PS51736,G3DSA:3.40.50.1390, PF07508,IPR018392,G3DSA:3.10.350.10,Coil
MNLDTFLQIMNVSRDLTVDEILDMFIIYLRKSRKDMDYYKDESIEKTLQRHEKELQDFIVSIFGKPIPEHNIYREVASGDTIEDRPVIQEVLSLIEEDRVKGVVCIEIERLARGNTMDQGIIAQAFQYSNTKIITPMKIYNLDNEDDLSYFEDGLYQARKYLKYTKRILARGRLRSVKDGKYVGSVLPYGYNKQKIPNEKGYVLVENESESKVVKLLADLFLNGLNTTYTVKENEIISDIAKLFGAHKKDIITCNLDLKVDQKIRLTVNSKSLPYKIKENDTLESIAASYNIDINNIHIPHNFFKPGENIKIILNDMRATNIAHYLNYLKIKPRKSKEWTANMVRNILQGYTIYGYLTWDRRKTTKTLVNGHIVKKNPNNDDFTLVRGKHEAILSEDIKQQIEAKFLSNRLKTVPDNKEMKNPLLGLVVCGYCGNNMTRRPYYLRKDAKPTAKRIYDIDKPKLRLLLRKHKGNYSLNDIARALHVSKNSVDHWFSSNDDKFCIPHADKWEDLKKLLNIETNEFDKAITTIEESITPPHTDTLMCSRPRCKCVSSELELVENKILKSLKIIMSEYKNYVNNYEEAVKKEICTNKEMIEAIDHEIDKIKSQIEKACELVETGAYTQDLFIKRTNTLNEQLETLLNQKTELSKSKDRTKDLYSKKKAIPILEDVISKYSKDMTAEEKNALLSTIIKQVIYKKEKGGRYLKENFSLKIILLSF

SEQ ID NO: 68 - protein, 718 aa, Unknown
  Description of Unknown: Integrase B69 sequence
  PTHR30461:SF3,IPR036162,PS51737,G3DSA:1.10.260.40,IPR011109, PTHR30461,PF00239,PF01381,G3DSA:1.10.10.2600,PS50943, IPR006119,SSF53041,IPR010982,SSF47413,SM00857, IPR025827,IPR038109,PS51736,cd00093,cd03768,SM00530,PF13408,
  CONT. FROM ABOVE: G3DSA:3.40.50.1390,PF07508,IPR001387,Coil
MKAAIYSRKSKFTGKGDSIENQIQLCMDYSKSIGIKEFLVYEDEGFSGGNIDRPQFKKMMQDAKDKKFDCLVCYRLDRISRNVSDFSTLIEKLNKLEISFISIKEQFDTSTPMGRAMMFISSVFAQLERETIAERIKDNMYELARSGRWLGGKTPHGFTSKKISFLDENLKERSMYQLEVNDEQMEIVKLIFNKYLELRSLSQLYKYVYHNGIKGPRGGKFDPSSLSGILRNPAYVKANEDILDYLRSLGMEVVGVPDGQCGILTYAKNTSNSIAAIAKHHGVIEPDVWLEVQSILNENKDKIPRISTGKTALLSGLLKCGKCGSNMRIMYKGKRNDEDLKYYYVCGTKRSLGVEGCNCKNLNGPLVENLVIDKIKNCNIESVINAFNSNNAKVDTVFSDVRSKINLLKNSISEKEKLISNLVMELAKNTGSVASEYIISQIEGLNGEIDSLKSKVSELESSSVDINSASLNLDIIVSNLKKFNYEVDDASLDDKRLLLSTIVDSIVWDDASGNLSIVYMGAKMDDLVSLSDGSHFCSDGRCTIYKSATSENDIINSPKQNIDSSSELKDVDSVDINYTDLTTPELKKNTFGQRLRKSRLELGLSVKDVADICKITPSVVNGYELERFYPSKEILDLLSSTFNVNYLCSDGYTNLILNYDIFIENLKIWISDNNFTTQIAADKLGVSRSLLRFWFNGGTMRISLYNKIKGNLAHYNLI

SEQ ID NO: 69 - protein, 709 aa, Unknown
  Description of Unknown: Integrase B70 sequence
  PTHR30461:SF3,SM00857,G3DSA:1.10.10.2600,IPR036162,PF13408, PS51737,G3DSA:3.40.50.1390,IPR025827,IPR006119,IPR038109, PF07508,SSF53041,IPR011109,PTHR30461,Coil, PS51736,cd00338,PF00239
MREVEILKKKQLKCYLYTRVSTSMQVDGYSLDAQRDKLRKYAAYEDMIVAGEYSDEGFSGKNIQGRQDFQRMLNDIQDGKDDVSYVLVFKLSRFGRNAADVLNSLQLMQDFGVNLICVEDGIDSSKDAGKLMISVLSAVAEIERENIRTQTMAGREQKAREGKWNGGFAPYGYKLEDGNLVIAEDEVEVIRVIYDRYIHTNEGVAGVAKYLNRNGYVKKLRQNNTIPGFSRDFVKNVLYNPVYMGKIAYGRRRTEKKQGTRNEMHVVEQSEFPVYEGQHEAIISEEDWHLAQEKRKINSFKREKVNNPDHAHILSGILKCPCCGKSMYGNIAKAHSKDKKTRYYYYCKNTVTPTGHECSFRLNIEQTEINKFVAKIISAMVNNPRFVEAIQAKIGTAVDTEDMEKQIAVLQGQLKQAFGTKSRLERQMDTLDINDVHYDRKILDLQRRYDEQYDTIEEIEVQIGELQSQIRNIQQEKISGDNIYRLLLAFDEVYHSATEAEQKEFMKAFIERIEMFPEKRKDGSWIKKIVFNFPVPVDGEEVKELPLETETTVETFQYKDYADRYSDAYELYGYDAEALFNHYETVGKAENRVGRFKKTPEEDDRHPYVWDADEPLDPLPPLDFHAQPDWFDARTLPENLSNVRIIKEYEKLEAFIEKDEWIGDPVLVRKEELLNEMSSRARNYRGRRGGADYLRAISQDIDVLLDFMG

SEQ ID NO: 70 - protein, 709 aa, Unknown
  Description of Unknown: Integrase B71 sequence
  PTHR30461:SF3,SM00857,G3DSA:1.10.10.2600,IPR036162,PF13408, IPR025827,G3DSA:3.40.50.1390,PS51737,IPR006119,IPR038109, PF07508,SSF53041,IPR011109,PTHR30461,Coil, PS51736,cd00338,PF00239
MREVEILKKKQLKCYLYTRVSTSMQVDGYSLDAQRDKLRKYAAYEDMIVAGEYSDEGFSGKNIQGRQDFQRMLNDIQDGKDDVSYVLVFKLSRFGRNAADVLNSLQLMQDFGVNLICVEDGIDSSKDAGKLMISVLSAVAEIERENIRTQTMAGREQKAREGKWNGGFAPYGYKLENGNLVIAEDEVEVIRVIYDRYIHTNEGVAGVAKYLNRNGYVKKLRQNNTIPGFSRDFVKNVLYNPVYMGKIAYGRRRTEKKQGTRNEMHVVEQSEFPVYEGQHEAIISEEDWYLAQEKRKINSFKREKVNNPDHAHILSGILKCPCCGKSMYGNIAKAHSKDKKTRYYYYCKNTVTPTGHECSFRLNIEQTEINKFVAKIISAMVNNPRFVEAIQAKIGTAVDTEDMEKQIAVLQGQLKQAFGTKSRLERQMDTLDINDAHYDRKILDLQRRYDEQYDTIEEIEVQIGELQSQIRSIQQEKISGDNIYRLLLAFDEVYHSATEAEQKEFMKAFIERIEMFPEKRKDGSWIKKIVFNFPVPIDGEEVKELPLETETTVETFQYKDYADRYSDAYELYGYDAEALFNHYETVGKAENRVGRFKKTPEEDDRHPYVWDADEPLDPLPPLDFHAQPDWFDARTLPENLSNVRIIKEYEQLEAFIEKDEWIGDPVLVRKEELLTEMSSRVRNYDGRRGGADYLRAISQDIDVLLDFMG

SEQ ID NO: 71 - protein, 706 aa, Unknown
  Description of Unknown: Integrase B72 sequence
  IPR036162,PS51737,cd00065,IPR011109,PTHR30461, PF00239,G3DSA:1.10.10.2600,IPR006119,PF14287,SSF53041, IPR025378,SM00857,IPR025827,cd03770,IPR038109, PS51736,PF13408,G3DSA:3.40.50.1390,PF07508,Coil
MSRTSKITALYERLSRDDDLNGESNSITNQKKYLEDYARRNGFENIRHFTDDGFSGVNFNRPGFQSLIKEVEAGNVGTLIVKDMSRLGRNYLQVGFYTEILFPQKDVRFLAINNSIDSNNASDNDFAPFLNIMNEFYAKDTSNKIKAVFDARMKDGKRCSGSIPYGYNRLPSDKQTLVVDPVASEVVKRIFLLANEGKSPRAIAEILTEEKVLIPAAYAKEYHPEQYNGIKFADPYIWGISAIRTILSRQEYLGHTVLRKSVSTNFKLHKRKTTDEDEQYVFYNTHEPIISQELWDSVQKRKKRVNRAAARGTHTNRLSGYLYCADCGRRMTLQTHYSKKDGSVQYSYRCGGYASRVNSCTSHTISADNVEALILSAVKRFSRFVLNDEKAFALELQSLWKDKQEEKPKHNQSELKRCQKRYDELSTLIRGLYENLISGLLPERQYKQLMKQYDDEQAELEAKMETMKKELSEEKDSTMDIQHFISLIRKYKNPTEVSDLMFTELIDKIVVYEAEGVGKAKTQKVDIYFNYVGQVDIAYTEEELAEIKEQEEQEEKKRLEKQRQREKAYREKRKAKKLAENGGEIVKTKVCPHCGKEFTPTSNRQIFCSKDCCYQARQDKTKADREAEKGSHYYRQRVCAVCGSTYWPTHSQQKFCSEECKKVNHNKKTLEFYYKKQKEKELCKDLLQTKEQVSDTNSSEITIIPA

SEQ ID NO: 72 - protein, 706 aa, Unknown
  Description of Unknown: Integrase B73 sequence
  PTHR30461:SF3,IPR036162,PS51737,IPR011109,PTHR30461, PF00239,G3DSA:1.10.10.2600,IPR006119,PF14287,SSF53041, IPR025378,SM00857,IPR025827,cd03770,IPR038109, PS51736,mobidb-lite,PF13408,G3DSA:3.40.50.1390,PF07508,Coil
MSRSSKITALYERLSRDDDLNGESNSITNQKQYLEDYARRNGFTNIRHFTDDGFSGVNFNRPSFQELIKEVEAGNVATIIVKDMSRLGRNYLQVGFYTEVLFQQKDVRFLAINNSIDSNNASDNDFAPFLNIMNEWYAKDTSNKIKAVFDARMKDGKRCSGSIPYGYNRLATDKQTLVVDPVASAVVKRIFLLANEGKSPRAIAELLTEEKVLIPAAHAKEYHPEQYNGTKFSDPYLWGMSTIRAILSRQEYLGHTVLRKSVSTNFKLHKRKNTDEDEQYVFYNTHEPIISQELWDSVQKRKKRANRTAARGTHSNRLSGYLYCADCGRRMTLQTHYSKKDRSVQYSYRCGGYASKVNSCSAHSISADNVEALILSAVKRLSRFVLNDEEAFAKELQALWNEKQTEKPKHNKSELHRFQKRYDELSKLIRGLYENLVSGLLPERQYKQLMKQYDDEQAELETKIEEMEKELTEEKVNAVDIKHFISLIRKCKEPTEISDLMFAELIDKIVVYEAEGVGKARTQKVDIYFNYVGQVDIAYTEEELAEIKAQEEQEEKKRMDKQREREKAYREKRKAKKIAENGGEIVKTKVCPHCQKEFVPTSNRQIFCSRDCCYQARQDRKKADREAEKGNHYYRQRVCAVCGSTYWPTHSQQKLCSEECQKQNHNEKSLEFYHKKQKEKSECNDLLQTKELVSSTNSSEIITIPA

SEQ ID NO: 73 - protein, 696 aa, Unknown
  Description of Unknown: Integrase B74 sequence
  PTHR30461:SF3,cd00338,SM00857,G3DSA:1.10.10.2600,IPR036162, PF13408,IPR025827,PS51737,G3DSA:3.40.50.1390,IPR006119, IPR038109,PF07508,SSF53041,IPR011109,PTHR30461, PS51736,Coil,PF00239
MKKKQPNTRHGRAAIYARYSSHNQREASIEQQVKACRELAVRLGLDVVETYEDKAISGKSDRRPSFQRLLRDAEKGYFDCVLAWKSNRMGRNMLQAMTNEARLKDWGVRTFYAEEDFDDTAAGRFALRNMMNVNQFYSENMAEDITRGMMDNASKCLSNGALPLGYKAGENGRIVLDKAQAAVVQEIYTRVACREPFVDIAADLNRRGIKTKRGGPWTKSSFYTICRNERYRGIYIYDDVRVEGGVPRIVSDGLFYRVQEVLKVKKTPQSARHHTGAEDYLLTGKLFCGKCGRPMTGVSGTSRSGEMHYYYTCQKRRREHACDKKNVIREQIEKSVAQAIKQYMLTDEMIQHMADATMAYNARQEKDLHLQDLQGQLAAVKTSAANLLKAIEMGVITETTKARMVELEQEQGRLNAQIENARAELVPITRDNFVSLLHIYRDGDINDSKYLASLFETFLVRVDLYDDHFLIWFNPLGQKTPADIPITSIENGNVDEFFDECRSENVFDWGGKWSTKIKAPAVPRRVFLFWCFVSCRGVEQSGGTAVPARWPMRNADAVRSSSSVESLSLYQWFAQCLNALRTACLPLIQGRHKKHGACASCFQQMLVRPLRRNFHAGQNVHVKTQPVLARADVIHLELFRAGHCGQHGQHQNKQLLYFLHCVFLKMGMKKPRCVCIVVEVLVGYSGNSPKSFRIEV

SEQ ID NO: 74 - protein, 693 aa, Unknown
  Description of Unknown: Integrase B75 sequence
  IPR036162,PS51737,IPR011109,PTHR30461,PF00239, G3DSA:1.10.10.2600,PF14287,IPR006119,SSF53041,IPR025378, SM00857,IPR025827,cd03770,IPR038109,mobidb-lite, PF13408,G3DSA:3.40.50.1390,PF07508,Coil
MSVKQTEGKITALYERLSRDDDQTGDSNSIVNQKKYLESYAHQKGYTNCQHYTDDGWSGGNFERPAWKQLIADIEAGKVAHVIVKDMSRAGRDYLQTGFYTEVFFRQHHVHFVAIANSVDSDDQNSNEFAPFLNIMNEWYLRDLSRKQKTAIRVKGESGKPTTNCAIYGYKKMPGDKYSWYIDEEAAAVVRRIFRLTIEGNGPYDIARILYDDKVETPAVYAAKQGRGVWKSKEEFPNPYNWSGYIVGQILSKPEYMGHTVNFRSHKQSYKDKNPVMNPQEDWLIFENTHEAIVDKEMWELAQKLRKTPRRHDTLGEANPLTGLLFCADCGAKMTNHRSKGGTKSNPYPSDFYDCSAYTLAHQKRTHACSGHYIRTKAVRELVLETIRTASAFAIANQDEFMKKVRSASQIRQAEVAKDTKRKLNKDRRRIAELDTIIKKLYESFAIGRITDERFDTLLAEYEAEQKALVTSVSDAESHLSSFEEDTDRAEQFLSLAKKYTDFSELTTPMINEFIEKIIVHAPEKIDGDRVQEVEIYLKFIGRFELPEPDLTPEEIKRQEQLRRHRIKSRERYQKIKAGEHAVGQPFQLICKCCGEEFESKRSNTLFCSPKCRTKFYRQEAAENRKRECVCENCGKTFTATRRDVKYCCDDCRTEANRRMQKERNVAKQIKKNEPVLLDAPPIKENGQKQKTA

SEQ ID NO: 75 - protein, 690 aa, Unknown
  Description of Unknown: Integrase B76 sequence
  PTHR30461:SF3,IPR036162,PS51737,IPR011109,PTHR30461, PS00397,PF00239,G3DSA:1.10.10.2600,IPR006119,SSF53041, cd00338,SM00857,IPR025827,IPR038109,PS51736, IPR006118,PF13408,G3DSA:3.40.50.1390,PF07508,Coil
MQSAFFFIPFFGSWRKGLFMAYVRNKKKILKFWSKKKAALYVRVSTRYQVDKDSLPFQRKKLKEYCKFLGIEDFVIFEDDGYSAKNTDRPHFQEMMSRVRDGEFSHLIVWKVDRVSRNLLDFAAMYQELKDHKVTFISMNEQFDTSTAIGEAMLKIILIFAELERNMTSERVTGIMLDRAEQGLWNGARMPVGYRWNPEIKFPEPDPEETKIVQFIFDEYERVRSTTKIARYLNHNQIASKRGGQWTSKLIRDIIRSPFYIGTYRYNLRESGRGPLKPESEWIVRENNHPAIITKEQFDRCNAIMDENGTSRDTSELRVRKYVHTFSGRLVCGKCGANMIASKDRARANGWRPSMYRCAQRSRMMDCDNSKTVNESYIGPFIFNYAANLARIQKNFKNIKTLEQLEKELLKGPEFENMKVSKESLRRTFDALAFQEVGKGAYLPDINLSDGDDDYTAAEQLSILKRELDKCKTAIDRLTDLYLYDPDSMTKEEFAKKKRDLVNKIAGYEKQIEVSQATGDKDDLADLADLEFIRKASAFLVAQRIVSKKHVDYIQMALDLDNEILKDFVDQVIDRIEILEGRVRSIRFVNGLVHEFTYSTPADLPVCQKCGGRIGSTCGCRTRAFDFAGKPYRRIKVGDPGDKFHGVTGAVCPECSAQAGRWHHWKCGIERCPICGEQLIACEHGPNGKD

SEQ ID NO: 76 - protein, 689 aa, Unknown
  Description of Unknown: Integrase B77 sequence
  PTHR30461:SF3,IPR036162,PS51737,IPR011109,PTHR30461, PS00397,PF00239,G3DSA:1.10.10.2600,IPR006119,SSF53041, cd00338,SM00857,IPR025827,IPR038109,PS51736, IPR006118,PF13408,G3DSA:3.40.50.1390,PF07508,Coil
MARKNPKIPDATHPLSCVLYIRVSTKLQVEKGESIDAQRFELTRYAENHDMRVLGEYVDAGFSGKNVQGRPQFRQMMDDIIKAQPSKRPAYVLVFKLSRFGRNAADTWNSLQTLQDYGVELCCVKDGIDSGTSMGKAMLSIAAVFAEMERDNIRTQTMSGREEKARKGYWNGGQAPFGYRLVDKGNKFKELEVDEDEAKVVRRIFEMYAYENKGSMAIATWLNNHGIKKKPRGNACMDTFSSGTVQRMITNPVYIGKIAYGRRRTETIEGTRGETHVVKSDGYEMHDGQHDAIIDDATWAAAQALVGTRKPNMKTHDDGHVNMLNGLLVCPVCGRKMSSKPNRGKLKKDGTRGKTTWAYYCPHTSKARGASCTFKSQYPQECVDAEVVQLVSLASRSDAFVDALRRRIDDATDIEQLKEDIERIEGEKAANDKRMRMLMTQIDSLDPADRSYERKFNDLQRRLDDLYDRDAGLSDALEEAQAKMTTAEKRMDGERRLLEELDRIPELLEGADEQTRFDLIHEAVSEVHILPDKNPRKERVVANVTFKCPVRFFWEEIPGVANGYTPMTPDSLGENNFRDDEAHVETVAVLSRKSASKSFIPVSISPKDMGLSEEKEQPTYANICDYVQKTHGMKVSSLYVAQMKAECGLETQADRSGDKKQPKCPPEKREAILDAFRHFGLIGEDGTEK

SEQ ID NO: 77 - protein, 688 aa, Unknown
  Description of Unknown: Integrase B78 sequence
  PTHR30461:SF3,IPR036162,PS51737,G3DSA:1.10.260.40,IPR011109, PTHR30461,PF00239,PF01381,G3DSA:1.10.10.2600,PS50943, IPR006119,SSF53041,IPR010982,SSF47413,SM00857, IPR025827,IPR038109,PS51736,cd00093,cd03768,SM00530,PF13408,
  CONT. FROM ABOVE: G3DSA:3.40.50.1390,PF07508,IPR001387,Coil
MNTIAIYTRKSKFTGKGESIENQIEKCKKFIEFKFNIDSENVNIFIDEGFSGKNENRPQYQLMMEKIKKKEIDSIVIYQLNRLGRNARDIHNTMQLCDDLGVIIYSATEGFDSSTSFGRAVIGILASLAQLEREQLAERVKDNMYTLAKMGRWLGGQSPLGFDGSREYYIDETGKERSITKLKKNEEELKLVKLLYDKYLEEKSLSQVGKWALINHLTGKNGGNLNKNAINVILQNPVYVKSSKEVFEYLSNEGYEVCGEPNGNGLLRYGKDDEPIVATAKHKGVIPSDQWIEVQKILKDNAYKAPRMGKTNTALLTGLLRCKCGSTMRISYGQKRKDGTKPFYYICNMKINSGGARCNLKNLNGNLFEKNFIQFLKNYSKETLFTELQKLLNNSKDLESTISSNKIDVEIEKSNKAIKQILNKLKLTDDDELSKILLQEIKVENNKLKALSKQKEELLNDQSEVVITQSEVLAILDDLDNFQKTFDDLNLEDKQKALKSLIESITLTDDKFIVDFNIKKKLDNAIKKLSSLFAKYKSSQLRHPCRSSSFQIAMNINNLLYDDMPIDTLSNRIKKAKLVAGITQKELVKLTGLSRSTINELEAGYRDNITRETLLKLISVLDKDIICDDYLSYILNQERNINLLIDTYGIEKLSSILECHHSAIYRWKVFKYQLPKNKYILIKKLDQK

SEQ ID NO: 78 - protein, 687 aa, Unknown
  Description of Unknown: Integrase B79 sequence
  PTHR30461:SF3,IPR036162,PS51737,IPR011109,PTHR30461, PS00397,PF00239,G3DSA:1.10.10.2600,IPR006119,SSF53041, cd00338,SM00857,IPR025827,IPR038109,PS51736, IPR006118,PF13408,G3DSA:3.40.50.1390,PF07508,Coil
MQSAFFFIPFFGSWRKGLFMAYVRNKKKILKFWSKKKAALYVRVSTRYQVDKDSLPFQRKKLKEYCKFLGIEDFVIFEDDGYSAKNTDRPHFQEMMSRVRDGEFSHLIVWKVDRVSRNLLDFAAMYQELKDHKVTFISMNEQFDTSTAIGEAMLKIILIFAELERNMTSERVTGIMLDRAEQGLWNGARMPVGYRWNPEIKFPEPDPEETKIVQFIFDEYERVRSTTKIARYLNHNQIASKRGGQWTSKLIRDIIRSPFYIGTYRYNLRESGRGPLKPESEWIVRENNHPAIITKEQFDRCNAIMDENGTSRDTSELRARKYVHTFSGRLVCGKCGANMIASKDRARANGWRPSMYRCAQRSRMMDCDNSKTVNESYIGPFIFNYAANLARIQKNFKNIKTLEQLEKELLKGPEFENMKVSKESLRRTFDALAFQEVGKGAYLPDINLSDGDDDYTAAEQLSILKRELDKCKTAIDRLTDLYLYDPDSMTKEEFAKKKRDLVNKIAGYEKQIEASQATGDKDDLADLEFIRKASAFLVAQRIVSKKHVDYIQMALDLDNEILKDFVDQVIDRIEILEGRVQSIRFVNGLVHEFTYSTPADLPVCQKCGGRIGSTCGCRTRTFDFAGKSYRRIKVGDPGDKFHGVAGAVCPECSAQVGRWHHWKCGIERCPICGEQLIACEHGPNGKD

SEQ ID NO: 79 - protein, 687 aa, Unknown
  Description of Unknown: Integrase B80 sequence
  PTHR30461:SF3,IPR036162,PS51737,IPR011109,PTHR30461, PS00397,PF00239,G3DSA:1.10.10.2600,IPR006119,SSF53041, cd00338,SM00857,IPR025827,IPR038109,PS51736, IPR006118,PF13408,G3DSA:3.40.50.1390,PF07508,Coil
MQSAFFFIPFFGSWRKGLFMAYVRNKKKILKFWSKKKAALYVRVSTRYQVDKDSLPFQRKKLKEYCKFLGIEDFVIFEDDGYSAKNTDRPHFQEMMSRVRDGEFSHLIVWKVDRVSRNLLDFAAMYQELKDHKVTFISMNEQFDTSTAIGEAMLKIILIFAELERNMTSERVTGIMLDRAEQGLWNGARMPVGYRWNPEIKFPEPDPEETKIVQFIFDEYERVRSTTKIARYLNHNQIASKRGGQWTSKLIRDIIRSPFYIGTYRYNLRESGRGPLKPESEWIVRENNHPAIITKEQFDRCNAIMDENGTSRDTSELRARKYVHTFSGRLVCGKCGANMIASKDRARANGWRPSMYRCAQRSRMMDCDNSKTVNESYIGPFIFNYAANLARIQKNFKNIKTLEQLEKELLKGPEFENMKVSKESLRRTFDALAFQEVGKGAYLPDINLSDGDDDYTAAEQLSILKRELDKCKTAIDRLTDLYLYDPDSMTKEEFAKKKRDLVNKIAGYEKQIEASQATGDKDDLADLEFIRKASAFLVAQRIVSKKHVDYIQMALDLDNEILKDFVDQVIDRIEILEGRVQSIRFVNGLVHEFTYSTPADLPVCQKCGGRIGSTCGCRTRTFDFSGKPYRRIKVGDPGDKFHGVAGAVCPECSAQAGRWHHWKCGIERCPICGEQLIACEHGLNGKD

SEQ ID NO: 80 - protein, 687 aa, Unknown
  Description of Unknown: Integrase B81 sequence
  PTHR30461:SF3,IPR036162,PS51737,IPR011109,PTHR30461, PS00397,PF00239,G3DSA:1.10.10.2600,IPR006119,SSF53041, cd00338,SM00857,IPR025827,IPR038109,PS51736, IPR006118,PF13408,G3DSA:3.40.50.1390,PF07508,Coil
MQSAFFFIPFFGSWRKGLFMAYVRNKKKILKFWSKKKAALYVRVSTRYQVDKDSLPFQRKKLKEYCKFLGIEDFVIFEDDGYSAKNTDRPHFQEMMSRVRDGEFSHLIVWKVDRVSRNLLDFAAMYQELKDHKVTFISMNEQFDTSTAIGEAMLKIILIFAELERNMTSERVTGIMLDRAEQGLWNGARMPVGYRWNPEIKFPEPDPEEAKIVQFIFDEYERVRSTTKIARYLNHNQIASKRGGQWTSKLIRDIVRSPFYIGTYRYNLRESGRGPLKPESEWIVRENNHPAIITKEQFDRCNAIMDENGTSRDTSELRARKYVHTFSGRLVCGKCGANMIASKDRARANGWRPSMYRCAQRSRMMDCDNSKTVNESYIGPFIFNYAANLARIQKNFKNIKTLEQLEKELLKGPEFENMKVSKESLRRTFDALAFQEVGKGAYLPDIDLSDGDDDYTAAEQLSILKRELDKCKTAIDRLTDLYLYDPDSMTKEEFAKKKRDLVNKIAGYEKQIEASQATGDKDDLADLEFIRKASAFLVAQRIVSKKHVDYIQMALDLDNEILKDFVDQVIDRIEILEGRVQSIRFVNGLVHEFTYSTPADLPVCQKCGGRIGSTCGCRTRTFDFAGKSYRRIKVGDPGDKFQGVSGAVCPECSAQAGRWHHWKCGIERCPICGEQLIACEHGPNGKN

SEQ ID NO: 81 - protein, 687 aa, Unknown
  Description of Unknown: Integrase B82 sequence
  PTHR30461:SF3,IPR036162,PS51737,IPR011109,PTHR30461, PS00397,PF00239,G3DSA:1.10.10.2600,IPR006119,SSF53041, cd00338,SM00857,IPR025827,IPR038109,PS51736, IPR006118,PF13408,G3DSA:3.40.50.1390,PF07508,Coil
MQSAFFFIPFFDSWGKGFFMAYVRNKKKILKFWSKKKAALYVRVSTRYQVDKDSLPFQRKKLKEYCKFLGIEDFVIFEDDGYSAKNTDRPHFQEMMSRVRDGEFSHLIVWKVDRVSRNLLDFAAMYQELKDHKVTFISMNEQFDTSTAIGEAMLKIILIFAELERNMTSERVTGIMLDRAEQGLWNGARMPVGYRWNPEIKFPEPDPEETKIVQFIFDEYERVRSTTKIARYLNHNQIASKRGGQWTSKLIRDIIRSPFYIGTYRYNLRESGRGPLKPESEWIVRENNHPAIITKEQFDRCNAIMDENGTSRDTSELRARKYVHTFSGRLVCGKCGANMIASKDRARANGWRPSMYRCAQRSRMMDCDNSKTVNESYIGPFIFNYVANLARIQKNFKNIKTLEQLEKELLKGPEFENMKVSKESLRRTFDALAFQEVGKGAYLPDIDLSDGDDDYTAAEQLSILKRELDKCKTAIDRLTDLYLYDPDSMTKEEFAKKKRDLVNKIAGYEKQIEASQATGDKDDLADLEFIRKASAFLVAQRIVSKKHVDYIQMALDLDNEILKDFVDQVIDRIEILEGRVRSIRFVNGLVHEFTYSTPADLPVCQKCGGRIGSTCGCRTRTFDFAGKPYRRIKVGDPGDKFHGVTGAVCPECSAQAGRWHHWKCGIERCPICGEQLIACEHGPNGKD

SEQ ID NO: 82 - protein, 687 aa, Unknown
  Description of Unknown: Integrase B83 sequence
  PTHR30461:SF3,IPR036162,PS51737,IPR011109,PTHR30461, PS00397,PF00239,G3DSA:1.10.10.2600,IPR006119,SSF53041, cd00338,SM00857,IPR025827,IPR038109,PS51736, IPR006118,PF13408,G3DSA:3.40.50.1390,PF07508,Coil
MQSAFFFIPFFDSWGKGLFMAYVRNKKKILKFWSKKKAALYVRVSTRYQVDKDSLPFQRKKLKEYCKFLGIEDFVIFEDDGYSAKNTDRPHFQEMMSRVRDGEFSHLIVWKVDRVSRNLLDFAAMYQELKDHKVTFISMNEQFDTSTAIGEAMLKIILIFAELERNMTSERVTGIMLDRAEQGLWNGARMPVGYRWNPEIKFPEPDPEETKIVQFIFDEYERVRSTTKIARYLNHNQIASKRGGQWTSKLIRDIIRNPFYIGTYRYNLRESGRGPLKPESEWIIRENNHPAIITKEQFDRCNAIMDENGTSRDTSELRARKYVHTFSGRLVCGKCGANMIASKDRARANGWRPSMYRCAQRSRMMDCDNSKTVNESYIGPFIFNYVANLARIQKNFKNIKTLEQLEKELLKGPEFENMKVSKESLRRTFDALAFHEVGKGAYLPDIDLSDSDDDYTAAEQLSILKRELDKCKTAIDRLTDLYLYDPDSMTKEEFAKKKRDLVNKIAGYEKQIEASQATGDKDDLADLEFIRKASAFLVAQRIVSKKHVDYIQMALDLDNEILKDFVDQVIDRIEILEGRVRSIRFVNGLVHEFTYSTPADLPVCQKCGGRIGSTCGCRTRTFDFAGKPYRRIRVGNPGDKFHGVAGAVCPECSAQAGRWHHWKCGIERCPICGEQLIACEHGPNGKD

SEQ ID NO: 83 - protein, 687 aa, Unknown
  Description of Unknown: Integrase B84 sequence
  PTHR30461:SF3,IPR036162,PS51737,IPR011109,PTHR30461, PS00397,PF00239,G3DSA:1.10.10.2600,IPR006119,SSF53041, cd00338,SM00857,IPR025827,IPR038109,PS51736, IPR006118,PF13408,G3DSA:3.40.50.1390,PF07508,Coil
MQSAFFFIPFFGSWRKGLFMAYVRNKKKILKFWSKKKAALYVRVSTRYQVDKDSLPFQRKKLKEYCKFLGIEGFVIFEDDGYSAKNTDRPHFQEMMSRVRDGEFSHLIVWKVDRVSRNLLDFAAMYQELKDHKVTFISMNEQFDTSTAIGEAMLKIILIFAELERNMTSERVTGIMLDRAEQGLWNGARMPVGYRWNPEIKFPEPDPEETKIVQFIFDEYERVRSTTKIARYLNHNQIASKRGGQWTSKLIRDIIRNPFYIGTYRYNLRESGRGPLKPESEWIVRENNHPAIITKEQFDRCNAIMDENGTSRDTSDLRARKYVHTFSGRLVCGKCGANMIASKDRARANGWRPSMYRCAQRSRMMDCDNSKTVNESYIGPFIFNYVANLARIQKNFKNIKTLEQLEKELLKGPEFENMKVSKESLRRTFDALAFQEVGKGAYLPDIDLSDGDDDYTAAEQLSILKRELDKCKTAIDRLTDLYLYDPDSMTKEEFAKKKRDLVNKIAGYEKQIEASQAAGDKDDLADLEFIRKASAFLVAQRIVSKKHVDYIQMALDLDNEILKDFVDQVIDRIEILEGRVQSIRFVNGLVHEFTYSTPADLPVCQKCGGRIGSTCGCRTRTFDFAGKPYRRIKVGDPGDKFHGVTGAVCPECSAQAGRWHHWKCGIERCPICGEQLIACEHGPNGKD

SEQ ID NO: 84 - protein, 687 aa, Unknown
  Description of Unknown: Integrase B85 sequence
  PTHR30461:SF3,IPR036162,PS51737,IPR011109,PTHR30461, PS00397,PF00239,G3DSA:1.10.10.2600,IPR006119,SSF53041, cd00338,SM00857,IPR025827,IPR038109,PS51736, IPR006118,PF13408,G3DSA:3.40.50.1390,PF07508,Coil
MQSAFFFIPFFGSWRKGLFMAYVRNKKKILKFWSKKKAALYVRVSTRYQVDKDSLPFQRKKLKEYCKFLGIEDFVIFEDDGYSAKNTDRPHFQEMMSRVRDGEFSHLIVWKVDRVSRNLLDFAAMYQELKDHKVTFISMNEQFDTSTAIGEAMLKIILIFAELERNMTSERVTGIMLDRAEQGLWNGARMPVGYRWNPEIKFPEPDPEETKIVQFIFDEYERVRSTTKIARYLNHNQIASKRGGQWTSKLIRDIIRNPFYIGTYRYNLRESGRGPLKPESEWIVRENNHPAIITKEQFDRCNAIMDENGTSRDTSELRARKYVHTFSGRLVCGKCGANMIASKDRARANGWRPSMYRCAQRSRMMDCDNSKTVNESYIGPFIFNYAANLARIQKNFKNIKTLEQLEKELLKGPEFENMKVSKESLRRTFDALAFQEVGKGAYLPDIDLSDGDDDYTAAEQLSILKRELDKCKTAIDRLTDLYLYDPDSMTKEEFAKKKRDLVNKIAGYEKQIEASQATGDKDDLADLEFIRKASAFLVAQRIVSKKHVDYIQMALDLDNEILKDFVDQVIDRIEILEGRVQSIRFVNGLVHEFTYSTPADLPVCQKCGGRIGSTCGCRTRTFDFAGKPYRRIKVGDPGDKFHGVAGAVCPECSAQAGRWHHWKCGIERCPICGEQLIACEHGPNGKD

SEQ ID NO: 85 - protein, 687 aa, Unknown
  Description of Unknown: Integrase B86 sequence
  PTHR30461:SF3,IPR036162,PS51737,IPR011109,PTHR30461, PS00397,PF00239,G3DSA:1.10.10.2600,IPR006119,SSF53041, cd00338,SM00857,IPR025827,IPR038109,PS51736, IPR006118,PF13408,G3DSA:3.40.50.1390,PF07508,Coil
MQSAFFFIPFFGSWRKGLFMAYVRNKKKILKFWSKKKAALYVRVSTRYQVDKDSLPFQRKKLKEYCKFLGIEDFVIFEDDGYSAKNTDRPHFQEMMSRVRDGEFSHLIVWKVDRVSRNLLDFAAMYQELKDHKVTFISMNEQFDTSTAIGEAMLKIILIFAELERNMTSERVTGIMLDRAEQGLWNGARMPVGYRWNPEIKFPEPDPEETKIVQFIFDEYERVRSTTKIARYLNHNQIASKRGGQWTSKLIRDIIRNPFYIGTYRYNLRESGRGPLKPESEWIVRENNHPAIITKEQFDRCNAIMDENGTSRDTSELRARKYVHTFSGRLMCGKCGANMIASKDRARANGWRPSMYRCAQRSRMMDCDNSKTVNESYIGPFVFNYVANLARIQKNFKNIKTLEQLEKELLKGPEFENMKVSKESLRRTFDALAFQEVGKGAYLPDIDISDGDDDYTAAEQLSILKRELDKCKTAIDRLTDLYLYDPDSMTKEEFAKKKRDLVNKIAGYEKQIEANQATGGKDDLADLEFIRKASAFLVAQRIVSKKHVDYIQMALDLDNEILKDFVDQVIDRIEILEGRVQSIRFVNGLVHEFTYSTPADLPVCQKCGGRIGSTCGCRTRTFDFSGKPYRRIKVGDPGDKFQGVSGAVCPECSAQAGRWHHWKCGIERCPICGEQLIACEHGPNGKK

SEQ ID NO: 86 - protein, 687 aa, Unknown
  Description of Unknown: Integrase B87 sequence
  PTHR30461:SF3,IPR036162,PS51737,IPR011109,PTHR30461, PS00397,PF00239,G3DSA:1.10.10.2600,IPR006119,SSF53041, cd00338,SM00857,IPR025827,IPR038109,PS51736, IPR006118,PF13408,G3DSA:3.40.50.1390,PF07508,Coil
MQSAFFFIPFFGSWRKGLFMAYVRNKKKILKFWSKKKAALYVRVSTRYQVDKDSLPFQRKKLKEYCKFLGIEDFVIFEDDGYSAKNTDRPHFQEMMSRVRDGEFSHLIVWKVDRVSRNLLDFAAMYQELKDHKVTFISMNEQFDTSTAIGEAMLKIILIFAELERNMTSERVTGIMLDRAEQGLWNGARMPVGYRWNPEIKFPEPDPEETKIVQFIFDEYERVRSTTKIARYLNDNQIASKRGGQWTSKLIRDIIRSPFYIGTYRYNLRESGRGPLKPESEWIVRENNHPAIITKEQFDRCNAIMDENGTSRDTSELRARKYVHTFSGRLVCGKCGANMIASKDRARANGWRPSMYRCAQRSRMMDCDNSKTVNESYIGPFIFNYAANLARIQKNFKNIKTLEQLEKELLKGPEFENMKVSKESLRRTFDALAFQEVGKGAYLPDINLSDGDDDYTAAEQLSILKRELDKCKTAIDRLTDLYLYDPDSMTKEEFAKKKRDLVNKIAGYEKQIEVSQATGDKDDLADLEFIRKASAFLVAQRIVSKKHVDYIQMALDLDNEILKDFVDQVIDRIEILEGRVQSIRFVNGLVHEFTYSTPADLPVCQKCGGRIGSTCGCRTRTFDFAGKPYRRIKVGDPGDKFHGVTGAVCPECSAQAGRWHHWKCGIERCPICGEQLIACEHGPNGKD

SEQ ID NO: 87 - protein, 687 aa, Unknown
  Description of Unknown: Integrase B88 sequence
  PTHR30461:SF3,IPR036162,PS51737,IPR011109,PTHR30461, PS00397,PF00239,G3DSA:1.10.10.2600,IPR006119,SSF53041, cd00338,SM00857,IPR025827,IPR038109,PS51736, IPR006118,PF13408,G3DSA:3.40.50.1390,PF07508,Coil
MQSAFFFIPFFGSWRKGLFMAYVRNKKKILKFWSKKKAALYVRVSTRYQVDKDSLPFQRKKLKEYCKFLGIEDFVIFEDDGYSAKNTDRPHFQEMMSRVRDGEFSHLIVWKVDRVSRNLLDFAAMYQELKDHKVTFISMNEQFDTSTAIGEAMLKIILIFAELERNMTSERVTGIMLDRAEQGLWNGARMPVGYRWNPEIKFPEPDPEETKIVQFIFDEYERVRSTTKIARYLNHNQIASKRGGQWTSKLIRDIIRSPFYIGTYRYNLRESGRGPLKPESEWIVRENNHPAIITKEQFDRCNAIMDENGTSRDTSELRARKYVHTFSGRLVCGKCGANMIASKDRARANGWRPSMYRCAQRSRMMDCDNSKTVNESYIGPFIFNYAANLARIQKNFKNIKTLEQLEKELLKGPEFENMKVSKESLRRTFDALAFQEVGKGAYLPDINLSDGDDDYTAAEQLSILKRELDKCKTAIDRLTDLYLYDPDSMTKEEFAKKKRDLVNKIAGYEKQIEVSQATGDKDDLADLEFIRKASAFLVAQRIVSKKHVDYIQMAIDLDNEILKDFVDQVIDRIEILEGRVRSIRFVNGLVHEFTYSTPADLPVCQKCGGRIGSTCGCRTRTFDFAGKPYRRIKVGDPGDKFHGVTGAVCPECSAQAGRWHHWKCGIERCPICGEQLIACEHGPNGKD

SEQ ID NO: 88 - protein, 687 aa, Unknown
  Description of Unknown: Integrase B89 sequence
  PTHR30461:SF3,IPR036162,PS51737,IPR011109,PTHR30461, PS00397,PF00239,G3DSA:1.10.10.2600,IPR006119,SSF53041, cd00338,SM00857,IPR025827,IPR038109,PS51736, IPR006118,PF13408,G3DSA:3.40.50.1390,PF07508,Coil
MQSAFFFIPFFGSWRKGLFMAYVRNKKKILKFWSKKKAALYVRVSTRYQVDKDSLPFQRKKLKEYCKFLGIEDFVIFEDDGYSAKNTDRPHFQEMMSRVRDGEFSHLIVWKVDRVSRNLLDFAAMYQELKDHKVTFISMNEQFDTSTAIGEAMLKIILIFAELERNMTSERVTGIMLDRAEQGLWNGARMPVGYRWNPEIKFPEPDPEETKIVQFIFDEYERVRSTTKIARYLNHNQIASKRGGQWTSKLIRDIIRSPFYIGTYRYNLRESGRGPLKPESEWIVRENNHPAIIAKEQFDRCNAIMDENGTSRDTSELRARKYVHTFSGRLVCGKCGANMIASKDRARANGWRPSMYRCAQRSRMMDCDNSKTVNESYIGPFIFNYAANLARIQKNFKNIKTLEQLEKELLKGPEFENMKVSKESLRRTFDALAFQEVGKGAYLPDINLSDGDDDYTAAEQLSILKRELDKCKTAIDRLTDLYLYDPDSMTKEEFAKKKRDLVNKIAGYEKQIEVSQATGDKDDLADLEFIRKASAFLVAQRIVSKKHVDYIQMALDLDNEILKDFVDQVIDRIEILEGRVRSIRFVNGLVHEFTYSTPADLPVCQKCGGRIGSTCGCRTRTFDFAGKPYRRIKVGDPGDKFHGVTGAVCPECSAQAGRWHHWKCGIERCPICGEQLIACEHEPNGKD

SEQ ID NO: 89 - protein, 687 aa, Unknown
  Description of Unknown: Integrase B90 sequence
  PTHR30461:SF3,IPR036162,PS51737,IPR011109,PTHR30461, PS00397,PF00239,G3DSA:1.10.10.2600,IPR006119,SSF53041, cd00338,SM00857,IPR025827,IPR038109,PS51736, IPR006118,PF13408,G3DSA:3.40.50.1390,PF07508,Coil
MQSAFFFIPFFGSWRKGLFMAYVRNKKKILKFWSKKKAALYVRVSTRYQVDKDSLPFQRKKLKEYCKFLGIEDFVIFEDDGYSAKNTDRPHFQEMMSRVRDGEFSHLIVWKVDRVSRNLLDFAAMYQELKDHKVTFISMNEQFDTSTAIGEAMLKIILIFAELERNMTSERVTGIMLDRAEQGLWNGARMPVGYRWNPEIKFPEPDPEETKIVQFIFDEYERVRSTTKIARYLNHNQIASKRGGQWTSKLIRDIIRSPFYIGTYRYNLRESGRGPLKPESEWIVRENNHPAIITKEQFDRCNAIMDENGTSRDTSELRARKYVHTFSGRLVCGKCGANMIASKDRARANGWRPSMYRCAQRSRMMDCDNSKTVNESYIGPFIFNYAANLARIQKNFKNIKTLEQLEKELLKGSEFENMKVSKESLRRTFDALAFQEVGKGAYLPDINLSDGDDDYTAAEQLSILKRELDKCKTAVDRLTDLYLYDPDSMTKEEFAKKKRDLVNKIAGYEKQIEASQATGDKDDLADLEFIRKASAFLVAQRIVSKKHVDYIQMALDLDNEILKDFVDQIIDRIEILEGRVQSIRFVNGLVHEFTYSTPADLPVCQKCGGRIGSTCGCRTRTFDFAGKPYRRIKVGDPGDKFHGVAGAVCPECSSQVGRWHHWKCGIERCPICGEQLIACEHGPNGKD

SEQ ID NO: 90 - protein, 687 aa, Unknown
  Description of Unknown: Integrase B91 sequence
  PTHR30461:SF3,IPR036162,PS51737,IPR011109,PTHR30461, PS00397,PF00239,G3DSA:1.10.10.2600,IPR006119,SSF53041, cd00338,SM00857,IPR025827,IPR038109,PS51736, IPR006118,PF13408,G3DSA:3.40.50.1390,PF07508,Coil
MQSAFFFIPFFGSWGKGLFMAYVRNKKKILKFWSKKKAALYVRVSTRYQVDKDSLPFQRKKLKEYCKFLGIEDFVIFEDDGYSAKNTDRPHFQEMMSRVRDGEFSHLIVWKVDRVSRNLLDFAAMYQELKDHKVTFISMNEQFDTSTAIGEAMLKIILIFAELERNMTSERVTGIMLDRAEQGLWNGARMPVGYRWNPEIKFPEPDPEETKIVQFIFDEYERVRSTTKIARYLNHNQIASKRGGQWTSKLIRDIIRNPFYIGTYRYNLRESGRGPLKPESEWIVRENNHPAIIAKEQFDCCNAIMDENGTSRDTSDLRARKYVHTFSGRLVCGKCGANMIASKDRARANGWRPSMYRCAQRSRMMDCDNSKTVNESYIGPFIFNYVANLARIQKNFKNIKTLEQLEKELLKGPEFENMKVSKESLRRTFDALAFQEVGKGAYLPDIDLSGGDDDYTAAEQLSILKRELDKCKTAIDRLTDLYLYDPDSMTKEEFAKKKRDLVNKIAGYEKQIEASQATGDKDDLADLEFIRKASAFLVAQRIVSKKHVDYIQMALDLDNEILKDFVDQVIDRIEILEGRVQSIRFVNGLVHEFTYSTPADLPVCQKCGGRIGSTCGCRTRTFDFAGKPYRRIKVGDPGDKFHGVAGAVCPECSAQAGRWHHWKCGIERCPICGEQLITCEHGPNGKD

SEQ ID NO: 91 - protein, 686 aa, Unknown
  Description of Unknown: Integrase B92 sequence
  PTHR30461:SF3,SM00857,IPR006118,G3DSA:1.10.10.2600,IPR036162, PS51737,G3DSA:3.40.50.1390,IPR006119,IPR038109,PF07508, IPR011109,SSF53041,PF00239,PTHR30461,PS00397, PS51736,Coil,cd00338
MPFLLKDNGVTDTMAKRELMKNLMSDTFRRVAIYIRVSTNHQVDKDSLPLQREELINYCKYVLGIEDFEIFEDAGFSAKNTDRPGYQKMMKLVRAGLFTHVLVWKLDRISRNLLDFAYMYEELKKLDVAFISKNEQFDTSTAMGEAMLKIILVFAELERKTTSERVAATMISRAINGKWNGGRVPYGYSYDYEQKEFSVNPEEQKVALLMCDLYEASNSLLFVSRKLNEMGYRSRAGNLWSPVQVRKVLVNPFNTGKYVYNQTSLSTGTQLPNKEEDFIVIEDHHPALIPQERQDRLIARLNRNARSRSNANNTTNRKNIHVFSGLIYCENCGNMLTSSVGKKLAGDGWRPSIYLCPSKRKHVSDGCHDTTDSSVGEFVLNFIMNMLNAQRNFQLVRSAADLQRLLLYGKVFDDVDHLDQDSLNDMFTVLSSNLPQNVKAGMKKKMRKPPSNPEVTKLNKEKQRLERAMERLKRLYMYSDDSMTEQEYITEKNRIADAYSEAEARIVEITNYERMERSISDEDFVRQATAFILSKKLSGSSYINYRKLAVSTDPLMLKEFFNSILDSITINTDGKIGSIVFKNGLRHQFIYTSNKKEDKTMLAKCNYCGQVMLEADGCTKTYFTLNGKQYPRIRVGDKYDFEPGTTSRCHDCAAKPGEYHHSGCDAERCPVCHEQLIGCECDFSDL

SEQ ID NO: 92 - protein, 686 aa, Unknown
  Description of Unknown: Integrase B93 sequence
  PTHR30461:SF3,SM00857,G3DSA:1.10.10.2600,IPR036162,PS51737, G3DSA:3.40.50.1390,IPR006119,IPR038109,PF07508,SSF53041, IPR011109,PTHR30461,Coil,cd00338,PF00239
MAILNNEMQVILSTDAEEMSVEMENKVKDLINNDVVVDKETLDKKMDKIAKTVGLANLKRCLFYGRVSTVKKEQTSSILSQHSIASEFEEQYIDKGFIIVREVFERKSAVSAVKRPKFMNIVEQCKNPEYEIDYLVVKTVDRMFRNVTDTINIMESLAKCGVGLLFYWDDLSSLDPADRNKIIDKANAAESYSNNLSTNVKRGKARNVKNGKGRVPGYCFGYDKIKCGDSSKSIINPAEAELVKELFNRFNSGETLGSIVLDWRARGIKTKLGSEPATPALRRMLQNKIYLGLILNDRQTRASIRDEYIQLPESEWKVIVRPDLRIIDDETFEKAQRIFELNAAKHGKMLSMPKEYIFKSMIQCPVCGKNFKQIKNGKNNGKDTKFYVCTTHKLGTKYGRVCDCSNSSAFRKDEMLSAIKVYFLEMLRNRSDIEELVYKATANILEKLNKETEQKDYSEEIKKITKKYERELDLYREGLVNSTSEIKKLKKELEDLKVKQYLADQGSNVKYDVKQYVDKMFTSIEELVDKGVNEETLDPIKFNGLFESIIGLPNNRLVFNLKLSTELSSALSSRKKDLGNLEMYPSSSSSNISPFISPVETDVKEVLMNIDPNEVGIKTSIQTYADIILKEKYCLVNIEQTFNKDRMLKEMQAVKKSIPNGNMIYRYSRRVNGLGAIILDSINIIL

SEQ ID NO: 93 - protein, 678 aa, Unknown
  Description of Unknown: Integrase B94 sequence
  PTHR30461:SF3,IPR036162,PS51737,IPR011109,PTHR30461,PF00239, G3DSA:1.10.10.2600,IPR006119,SSF53041,cd00338,SM00857, IPR025827,IPR038109,mobidb-lite,PS51736,PF13408, G3DSA:3.40.50.1390,PF07508,Coil
MRKKSNLNAATRAVIYARYSSANQRDCSIEQQVAKCRELAARLGLTVIDVYEDRAISGKTDRRPNFQRMMKDADLRQFDVVLAWKSNRMGRNMLQAMTNEERLRDNGIRTVYAEEDFDDTAAGRFALRNMMNVNQFYSENMAEDITRGLMDNAAKCLSNGSLPLGYKPGDDRHVVLDEAEAAIVQEIFTRVSCYEPFIDIARDLNRRGIKTKKGSEWGRSSFHTICRNERYRGIYIYRDVRIEGGMPRIVSDELFYKVQEVLKVKKNPQGRRKRSGYEEYLLTGKLFCGHCGSPMTGIAGTSKTGAMHYYYTCQKRRTDHSCDKKAVRRDQIERAVGVAIQQQLLTDENIQMMADKLMEYNARTETKYRLQGLQDQLNANKTATANILKAIEMGIITDATKARLLELEKEQGQLLVKIDEAKAEMVPISRNDFVKLLYIYKEGEPTDKKYLAALFDNFLVRVDLYDDHLKITFDPTGGRQPIDMPIGAEESPESPGDSSESSDFEASSQDAEKFVLALHNCTKASNLGSRLFCWCVGYGTTRIIKSGKRSFLLDSKEVPWPNEGVGATIGRPPTWRNHALSGKAFFADKRVGASNARPYKSFLTACGEHGLPASLIRYRPPGKAIHIYCGCVQTLHPYKDMLERDGEIYPVRLLHYNIAKLPVTAIIQKASQTKKETT

SEQ ID NO: 94 - protein, 676 aa, Unknown
  Description of Unknown: Integrase B95 sequence
  PTHR30461:SF3,cd00338,SM00857,G3DSA:1.10.10.2600,IPR036162, PF13408,IPR025827,G3DSA:3.40.50.1390,PS51737,IPR006119, IPR038109,PF07508,SSF53041,IPR011109,PTHR30461, PS51736,Coil,PF00239
MSSVDKIAVVYARYSSHGQTEQSIEGQIAAAQKYAEQHGYTIIHIYADRAMTGRNDDREEFQKMLSDTATRQFGVILLWKIDRFGRNREEIAFNRYRCKKNGVRVERVAEDVPDGPEGVILDSVLEGMAEYYSLQLAQNVRRGQRESAKKSQTVGGCKIIGYNVNPDTKRYEVDPKTAPFVTEVFKRYANGETISEIVAWLNAQGVRTTRGGEFTVNSLHRLLKNEKYTGVYIFHDIRNEGGMPALIDRATFDKAQEMLKVNRRAPARVWSKTEYLLTDKLFCGHCGTMMVGESGHGRNGTKHNYYTCWNRKKKKTCDKKPIRQDVIEPLVLRAIGKLLENPATLENIADQVWAAYERSDTSGDTIKALDKQIADVDRALSNVMKAIEMGIINEMTKARMDELTDQKQALSAARAEAGLAGGFKLTRDMILFFLQDMAALDRSNRDSQKRLIKTFVNAIYLYDDHFDIAFNYTDNGNVVVRMREINDAARGEMFGRCAQCPTKKRRASVKFARLFSSFGSFSLVERLAHLAADGILPLVVNLRINCQCRAGLGMTRLSRHCSDTDVRVGEQDTDKGVAKHMRVDFADARFLGHAVNNFAIVVGADGPAEIIDNDKIFPAQLLQGFPVRFPLSVHAGLPSTAHTVLLCKPLVTVGFQIFHKFGCYIYVTDVVLFRGR

SEQ ID NO: 95 - protein, 674 aa, Unknown
  Description of Unknown: Integrase B96 sequence
  SM00857,G3DSA:1.10.10.2600,IPR036162,PF13408,IPR025827, G3DSA:3.40.50.1390,PS51737,mobidb-lite,IPR006119,IPR038109, PF07508,SSF53041,IPR011109,PF00239,PTHR30461, PS51736,Coil,cd00338
MAHKTAVLYARYSSDKQREASIDDQLRVCRDYCEAEDIEVVAEYKDYALSGKTDHRPEFRRMIANAPESDYVVVYMFDRFSRDRYDSATYKKMLRECGVRVLSASEKVEDTPEGGLQEGMLELLSEYYVKDLARKVRRGMEGNALKARDNGYRIFGYSTDPETRCYVINEAEANAVREMFSMHISGNSVNSIAREMASRGWTTTTGKPVDYNWAWRVLNRKAYTGLYSWGGIEVPGGMPQIIDEVTFARSQAVVPRKRRKDENWDVYRLTGKLYCGLCGKPMHGTAGTGKKGKRYHYYACRESDGCRRPWVRRELLEDSIADAVLETCSDERRMRMLARRIVEAYVEPGEEEAEMASIEAQIVSLEREQHNMTQAAMKGFVTDEMVARNDEIKAQLKNLHNRHGVLASQMCEITEDDIVGYMMHGFSRDDEDFIFGSIVREAYLFDDCVLLVFNFRDEVGDLTEIRVALQAQKKCEPGGGFALCSRDRVKSFPNPSAYPAGSASSSRYAAPPKPPGSAETILPRLDDELLTRVDEVRVADAVLGRDGLIGCAELGGDAGKRVAALHGVGGLLALAVDDVLRLLVLSAARLDDGLANRVVAVLSGLDPLGERGRGGVVGVVDEALHLVVAAAAVVPACIAVDVVRDDVVHEVERGAGWRHAPRAMSGRRTGAAAV

SEQ ID NO: 96 - protein, 669 aa, Unknown
  Description of Unknown: Integrase B97 sequence
  PTHR30461:SF3,IPR036162,PS51737,IPR011109,PTHR30461, PF00239,G3DSA:1.10.10.2600,IPR006119,SSF53041,cd00338, SM00857,IPR025827,IPR038109,PS51736,mobidb-lite, PF13408,G3DSA:3.40.50.1390,PF07508,Coil
MPEALNAVIYARYSSDRQTEQSIEGQLRECYAFAKANDIAVIDTYIDRAISGKTDNRPAFQKMIEDSAKRQFQAVIVYRLDRFTRNRYDSAIYKARLKKNGVKVLSAMENLNGSPESIIMESLLEGMAEYYSVELSQKITRGMRENALKGKALGGQRVLGYKVNSDCYFEIDETTAPVVVDIFKLYSSGKTVKEICDILNARGVKTARGGAFNKNSLHTILTNKKYIGIYKTKYGEIVGGIPAIIDKELFEMVALRMEQNKKAPARAKAEINYLLSTKLFCGKCRSAMVGESGTSKTGKKYYYYACVKKKREKACDKSNVKKDWIEDLVIQRTVTDILKDDVIEKIAERLVELQKAEAAESGTMLYLQNSLAEIQVSIKNIMTAIEKGIITESTKTRLTELEDEKRNVEIEIAKESIARRIISREQIIYWISSFKDGDITSEKYRQQLIDTFVHAVFVYDDKIVITYNYSGENNTATISDLDLSSPPNFRNPPRDRWVMGGDFLLFKEKEQDHASADGRNSHESTDHRSAAFSGSGHRVLSDPHQPGEQAVTPAAQKVTPALVAMTSVGVFACASGRVIVGISVKARERRHFFSLSPRSKRNFALFSGTSTGYSPVKQPVQKPSPHSASFVTLSVLRYPRESTPMICAISGIVWLHAMRFSRESTSVPK

SEQ ID NO: 97 - protein, 668 aa, Unknown
  Description of Unknown: Integrase B98 sequence
  PTHR30461:SF3,IPR036162,PS51737,IPR011109,PTHR30461, PS00397,PF00239,G3DSA:1.10.10.2600,IPR006119,SSF53041, cd00338,SM00857,IPR025827,IPR038109,PS51736, IPR006118,PF13408,G3DSA:3.40.50.1390,PF07508,Coil
MAYAKKKKILNFWTKKKAALYVRVSTRYQVDKDSLPFQRKKLKEYCKFLGLEDYVIFEDDGYSAKNTERPHFQEMMSRVRSGEFSHLIVWKVDRVSRNLLDFAAMYQELKDHKVTFISMNEQFDTSTAIGEAMLKIILIFAELERNMTSERVTGIMLDRAEQGLWNGARMPVGYRWNNETKFPEPDPEEVKIVQLIFDKYEEWKSSIKIARYLNNNNFKSKRGGQWTSKLIHDIIRNPFYIGTYRYNLRESGRGPLKPESEWIVRENNHPAIIDKAQFDRCNKIMDQNGSSRDTSDLRARKYVHTFSGHLVCGKCGANMIASKDRARANGWRPSMYRCAQRSRMLDCDNSRTINESYIGPFIFNYIANLARVQKNFKNITTVEKLERELLKGETFDGVAGILPEGLNLTFQALSFRQVGNGTYIPDVDFLGDSDGASDRDQIELLKSEIEKSKNAVTRLTDVYLFDPDSMTKEEFATKKKELAKKIEGMERQLADLLDDSGNDDLADMSFIKKASAFLVAQRIVSKSFVDYVGMAQELDNEILKDFIDQIVDQIVVLDGRVQSITFINGLKHEFRYATPAELPVCQKCGGRIGSTCGCRTRTFDFSGKRYQRIKVGDPRDTLHGKKNPVCPECLVREGRWHHWNCKIETCPICGGRLAECEHGPNGKK

SEQ ID NO: 98 - protein, 668 aa, Unknown
  Description of Unknown: Integrase B99 sequence
  PTHR30461:SF3,IPR036162,PS51737,IPR011109,PTHR30461, PS00397,PF00239,G3DSA:1.10.10.2600,IPR006119,SSF53041, cd00338,SM00857,IPR025827,IPR038109,PS51736, IPR006118,PF13408,G3DSA:3.40.50.1390,PF07508,Coil
MAYAKAKKHLKIWTKKKAALYVRVSTRYQVDKDSLPFQRKKLKEYCKFLGLEDYVIFEDDGYSAKNTERPHFQEMMSRVRSGEFSHLIVWKVDRVSRNLLDFAAMYQELKDHKVTFISMNEQFDTSTAIGEAMLKIILIFAELERNMTSERVTGIMLDRAEQGLWNGARMPVGYRWNNETKFPEPDPEEVKIVQLIFDKYEEWKSSIKMARYLNNNNFKSKRGGQWTSKLIHDIIRNPFYIGTYRYNLRESGRGPLKPESEWIVRENNHPAIIDKAQFDRCNKIMDQNGSSRDTSDLRARKYVHTFSGHLVCGKCGANMIASKDRARANGWRPSMYRCAQRSRMLDCDNSRTINESYIGPFIFNYIANLARVQKNFKNIATPEKLERELLKGETFDGVAGILPEGLNLTFQALSFRQVGNGTYIPDIDFLGDSDGASDRDQIELLKSEIEKSKNAVTRLTDVYLFDPDSMTKEEFATKKKELAKKIEGMERQLADLLDDSGNDDLADMSFIKKASAFLVAQRIVSKSFVDYVGMAQELDNEILKDFIDQIVDQIVVLDGRVQSITFINGLKHEFRYTAPAELPVCKKCGGRIGSTCGCRTRTFDFSGKRYKRIKVGDPRDMLHGKKNPVCPECFAQEGRWHHWNCKIETCPICGERLAECEHGPNGKN

SEQ ID NO: 99 - protein, 668 aa, Unknown
  Description of Unknown: Integrase B100 sequence
  PTHR30461:SF3,IPR036162,PS51737,IPR011109,PTHR30461, PS00397,PF00239,G3DSA:1.10.10.2600,IPR006119,SSF53041, cd00338,SM00857,IPR025827,IPR038109,PS51736, IPR006118,PF13408,G3DSA:3.40.50.1390,PF07508,Coil
MAYVRNKKKILKFWSKKKAALYVRVSTRYQVDKDSLPFQRKKLKEYCKFLGIEDFVIFEDDGYSAKNTDRPHFQEMMSRVRDGEFSHLIVWKVDRVSRNLLDFAAMYQELKDHKVTFVSMNEQFDTSTAIGEAMLKIILIFAELERNMTSERVTGIMLDRAEQGLWNGARMPVGYRWNPEIKFPEPDPEETKIVQFIFDEYERVRSTTKIARYLNHNQIASKRGGQWTSKLIRDIIRSPFYIGTYRYNLRESGRGPLKPESEWIVRENNHPAIITKEQFDRCNAIMDENGTSRDTSELRARKYVHTFSGRLVCGKCGANMIASKDRARANGWRPSMYRCAQRSRMMDCDNSKTVNESYIGPFIFNYAANLARIQKNFKNIKTLEQLEKELLKGPEFENMKVSKESLRRTFDALAFQEVGKGAYLPDINLSDGDDDYTAAEQLSILKRELDKCKTAIDRLTDLYLYDPDSMTKEEFAKKKRDLVNKIAGYEKQIEASQATGDKDDLADLEFIRKASAFLVAQRIVSKKHVDYIQMALDLDNEILKDFVDQVIDRIEILEGRVQSIRFVNGLVHEFTYSTPADLPVCQKCGGRIGSTCGCRTRTFDFSGKPYRRIKVGDPGDKFHGVAGAVCPECSAQAGRWHHWKCGIERCPICGEQLIACEHGPNKKD

SEQ ID NO: 100 - protein, 668 aa, Unknown
  Description of Unknown: Integrase B101 sequence
  PTHR30461:SF3,IPR036162,PS51737,IPR011109,PTHR30461, PS00397,PF00239,G3DSA:1.10.10.2600,IPR006119,SSF53041, cd00338,SM00857,IPR025827,IPR038109,PS51736, IPR006118,PF13408,G3DSA:3.40.50.1390,PF07508,Coil
MAYAKAKKHLKIWTKKKAALYVRVSTRYQVDKDSLPFQRKKLKEYCKFLGLEDHVIFEDDGYSAKNTERPHFQEMMSRVRSGEFSHLIVWKVDRVSRNLLDFAAMYQELKDHKVTFISMNEQFDTSTAIGEAMLKIILIFAELERNMTSERVTGIMLDRAEQGLWNGARMPVGYRWNSETKFPEPDPEEVKIVQLIFDKYEEWKSSIKIARYLNNNNFKSKRGGQWTSKLIHDIIRNPFYIGTYRYNLRESGRGPLKPESEWIVRENNHPAIIDKAQFDRCNKIMDQNGSSRDTSDLRARKYVHTFSGHLVCGKCGANMIASKDRARANGWRPSMYRCAQRSRMLDCDNSRTINESYIGPFIFNYIANLARVQKNFKNIATPEKLERELLKGETFDGVAGILSEGLNLTFQALSFRQVGNGTYIPDIDFLGDSDGASDRDQIELLKSEIEKSKNAVTRLTDVYLFDPDSMTKEEFATKKKELAKKIEGMERQLADLLDNSGNDDLADMSFIKKASAFLVAQRIVSKSFVDYVGMAQELDNEILKDFIDQIVDQIVVLDGRVQSITFINGLKHEFRYTAPAELPVCKKCGGRIGSTCGCRTRTFDFSGKRYQRIKVSDPRDMLHGKKNPVCPECFAQEGRWHHWNCKIETCPICGGRLAECEHGPNSKN

SEQ ID NO: 101 - protein, 668 aa, Unknown
  Description of Unknown: Integrase B102 sequence
  PTHR30461:SF3,IPR036162,PS51737,IPR011109,PTHR30461, PS00397,PF00239,G3DSA:1.10.10.2600,IPR006119,SSF53041, cd00338,SM00857,IPR025827,IPR038109,PS51736, IPR006118,PF13408,G3DSA:3.40.50.1390,PF07508,Coil
MAYAKTKKHLKIWTKKKAALYVRVSTRYQVDKDSLPFQRKKLKEYCKFLGLEDYVIFEDDGYSAKNTERPHFQEMMSRVRSGEFSHLIVWKVDRVSRNLLDFAAMYQELKDHKVTFISMNEQFDTSTAIGEAMLKIILIFAELERNMTSERVTGIMLDRAEQGLWNGARMPVGYRWNDETKFPEPDPEEVKIVQLIFDKYEEWKSSIKIARYLNNNNFKSKRGGQWTSKLIHDIIRNPFYIGTYRYNLRESGRGPLKPESEWIVRENNHPAIIDKAQFDRCNKIMDQNGSSRDTSDLRARKYVHTFSGHLVCGKCGANMIASKDRARANGWRPSMYRCAQRSRMLDCDNSRTINESYIGPFIFNYIANLARVQKNFKNITTVEKLERELLKGETFDGVAGILPEGLNLTFQALSFRQVGNGTYIPDIDFLGDSDGASDRDQIELLKSEIEKSKNAVTRLTDVYLFDPDSMTKEEFATKKKELAKKIEGMERQLADLLDDSGNDDLADMSFIKKASAFLVAQRIVSKSFVDYVGMAQELDNEILKDFIDQIVDQIVVLDGRVQSITFINGLKHEFRYTAPAELPVCKKCGGRIGSTCGCRTRTFDFSGKRYQRIKVGDPRDMLHGKKNPVCPECFAQEGRWHHWNCKIEACPICGERLAECEHGPNGKN

SEQ ID NO: 102 - protein, 668 aa, Unknown
  Description of Unknown: Integrase B103 sequence
  PTHR30461:SF3,IPR036162,PS51737,IPR011109,PTHR30461, PS00397,PF00239,G3DSA:1.10.10.2600,IPR006119,SSF53041, cd00338,SM00857,IPR025827,IPR038109,PS51736, IPR006118,PF13408,G3DSA:3.40.50.1390,PF07508,Coil
MAYAKTKKHLKIWTKKKAALYVRVSTRYQVDKDSLPFQRKKLKEYCKFLGLEDYVIFEDDGYSAKNTERPHFQEMMSRVRSGEFSHLIVWKVDRVSRNLLDFAAMYQELKDHKVTFISMNEQFDTSTAIGEAMLKIILIFAELERNMTSERVTGIMLDRAEQGLWNGARMPVGYRWNNETKFPEPDPEEVKIVQLIFDKYEEWKSSIKIARYLNNNNFKSKRGGQWTSKLIHDIIRNPFYIGTYRYNLRESGRGPLKPESEWIVRENNHPTIIDKAQFDRCNKIMDQNGSGRDTSDLRARKYVHTFSGHLVCGKCGANMIASKDRARANGWRPSMYRCAQRSRMLDCDNSRTINESYIGPFIFNYIANLARVQKNFKNIATPEKLERELLKGETFDGVAGILPEGLNLTFQALSFRQVGNGTYIPDIDFLGDSDGVSDRDQIELLKSEIEKSKNAVTRLTDVYLFDPDSMTKEEFATKKKELAKKIEGMERQLADLLDDSGNDDLADMSFIKKASAFLVAQRIVSKSFVDYVGMAQELDNEILKDFIDQIVDQIVVLDGRVQSITFINGLKHEFRYTAPAELPVCKKCGGRIGSTCGCRTRTFDFSGKRYQRIKVGDPRDMLHGKKNPVCPECFAQEGRWHHWNCKIEACPICGERLAECEHGPNGKN

SEQ ID NO: 103 - protein, 668 aa, Unknown
  Description of Unknown: Integrase B104 sequence
  PTHR30461:SF3,IPR036162,PS51737,IPR011109,PTHR30461, PS00397,PF00239,G3DSA:1.10.10.2600,IPR006119,SSF53041, cd00338,SM00857,IPR025827,IPR038109,PS51736, IPR006118,PF13408,G3DSA:3.40.50.1390,PF07508,Coil
MAYVRNKKKILKFWSKKKAALYVRVSTRYQVDKDSLPFQRKKLKEYCKFLGIEDFVIFEDDGYSAKNTDRPHFQEMMSRVRDGEFSHLIVWKVDRVSRNLLDFAAMYQELKDHKVTFISMNEQFDTSTAIGEAMLKIILIFAELERNMTSERVTGIMLDRAEQGLWNGARMPVGYRWNPEIKFPEPDPEETKIVQFIFDEYERVRSTTKIARYLNHNQIASKRGGQWTSKLIRDIIRNPFYIGTYRYNLRESGRGPLKPESEWIVRENNHPAIITKEQFDRCNAIMDENGTSRDTSELRARKYVHTFSGRLVCGKCGANMIASKDRARANGWRPSMYRCAQRSRMMDCDNSKTVNESYIGPFIFNYAANLARIQKNFKNIKTLEQLEKELLKGPEFENMKVSKESLRRTFDALAFQEVGKGAYLPDINLSDGDDDYTAAEQLSILKRELDKCKTAIDRLTDLYLYDPDSMTKEEFAKKKRDLVNKIAGYEKQIEASQATGDKDDLADLEFIRKASAFLVAQRIVSKKHVDYIQMALDLDNEILKDFVDQVIDRIEILEGRVQSIRFVNGLVHEFTYSTPADLPVCQKCGGRIGSTCGCRTRTFDFSGKPYRRIKVGDPGDKFHGVAGAVCPECSAQAGRWHHWKCGIERCPICGEQLIACEHGPNGKD

SEQ ID NO: 104 - protein, 668 aa, Unknown
  Description of Unknown: Integrase B105 sequence
  PTHR30461:SF3,IPR036162,PS51737,IPR011109,PTHR30461, PS00397,PF00239,G3DSA:1.10.10.2600,IPR006119,SSF53041, cd00338,SM00857,IPR025827,IPR038109,PS51736, IPR006118,PF13408,G3DSA:3.40.50.1390,PF07508,Coil
MAYAKTKKHLKIWTKKKAALYVRVSTRYQVDKDSLPFQRKKLKEYCKFLGLEDYVIFEDDGYSAKNTERPHFQEMMSRVRSGEFSHLIVWKVDRVSRNLLDFAAMYQELKDHKVTFISMNEQFDTSTAIGEAMLKIILIFAELERNMTSERVTGIMLDRAEQGLWNGARMPVGYRWNDEAKFPEPDPEEVKIVQLIFDKYEEWKSSLKISRYLNNNNFKSKRGGQWTSKLIHDIIRNPFYIGTYRYNMRESGRGPLKPESEWIVREDNHPAIIKKAQFDRCNKIMDQNGSSRDTSDLRARKYVHTFSGHLVCGKCGSNMIASKDRARANGWRPSMYRCAQRSRMLDCDNSRTINESYIGPFVFNYIANLARVQKNFKNITTVEKLEKELLKGETFDGVAGILPEGLNLTFQALSFRQVGNGTYIPDIDFLGDSDGTSGRDQIELLKSEIEKSKNAVARLTDVYLFDPDSMTKEEFATKKKELAKKIEGMERQLADLLDDSGSDDLADMSFIKKASAFLVAQRIVSKSFVDYVGMAQELDNEILKDFIDQVVDQIVVLDGRVQSITFINGLKHEFRYTAPAELPVCKKCGGRIGSTCGCRTRTFDFSGKRYQRIKVGDPCDMLHGKKNPVCPECFAQEGRWHHWNCKIEACPICGERLAECEHGPNGKN

SEQ ID NO: 105 - protein, 668 aa, Unknown
  Description of Unknown: Integrase B106 sequence
  PTHR30461:SF3,IPR036162,PS51737,IPR011109,PTHR30461, PS00397,PF00239,G3DSA:1.10.10.2600,IPR006119,SSF53041, cd00338,SM00857,IPR025827,IPR038109,PS51736, IPR006118,PF13408,G3DSA:3.40.50.1390,PF07508,Coil
MAYAKAKKHLKIWTKKKAALYVRVSTRYQVDKDSLPFQRKKLKEYCKFLGLEDYVIFEDDGYSAKNTERPHFQEMMSRVRSGEFSHLIVWKVDRVSRNLLDFAAMYQELKDHKVTFISMNEQFDTSTAIGEAMLKIILIFAELERNMTSERVTGIMLDRAEQGLWNGARMPVGYRWNDETKFPEPDPEEVKIVQLIFDKYEEWKSSIKIARYLNNNNFKSKRGGQWTSKLIHDIIRNPFYIGTYRYNLRESGRGPLKPESEWIVRENNHPAIIDKAQFDRCNKIMDQNGSSRDTSDLRARKYVHTFSGHLVCGKCGANMIASKDRARANGWRPSMYRCAQRSRMLDCDNSRTINESYIGPFIFNYIANLARVQKNFKNIATPEKLERELLKGETFDGVAGILPEGLNLTFQALAFRQVGNGTYIPDIDFLGDSGGASDRDQIELLKSEIEKSKNAVTRLTDVYLFDPDSMTKEEFATKKKELAKKIEGMERQLADLLDDSGNDDLADMSFIKKASAFLVAQRIVSKSFVDYVGMAQELDNEILKDFIDQIVDQIVVLDGRVQSITFINGLKHEFRYTAPAELPVCKKCGGRIGSTCGCRTRTFDFSGKRYQRIKVSDPRDMLHGKKNPVCPECFAQEGRWHHWNCKIETCPICGGRLAECEHGPNGKK

SEQ ID NO: 106 - protein, 668 aa, Unknown
  Description of Unknown: Integrase B107 sequence
  PTHR30461:SF3,IPR036162,PS51737,IPR011109,PTHR30461, PS00397,PF00239,G3DSA:1.10.10.2600,IPR006119,SSF53041, cd00338,SM00857,IPR025827,IPR038109,PS51736, IPR006118,PF13408,G3DSA:3.40.50.1390,PF07508,Coil
MAYAKKKKILNFWTKKKAALYVRVSTRYQVDKDSLPFQRKKLKEYCKFLGLEDYVIFEDDGYSAKNTERPHFQEMMSRVRSGEFSHLIVWKVDRVSRNLLDFAAMYQELKDHKVTFISMNEQFDTSTAIGEAMLKIILIFAELERNMTSERVTGIMLDRAEQGLWNGARMPVGYRWNDEAKFPEPDPEEVKIVQLIFDKYEEWKSSIKIARYLNNNNFKSKRGGQWTSKLIHDIIRNPFYIGTYRYNLRESGRGPLKPESEWIVRENNHPAIIGKAQFDRCNKIMDQNGSSRDTSDLRARKYVHTFSGHLVCGKCGANMIASKDRARANGWRPSMYRCAQRSRMLDCDNSRTINESYIGPFIFNYIANLARVQKNFKNIATPEKLERELLKGETFDGVAGILPEGLNLTFQALAFRQVGNGTYIPDIDFLGDSDGASDRDQIELLKSEIEKSKNAVTRLTDVYLFDPDSMTKEEFATKKKELAKKIEGMERQLADLLDDSGNDDLADMSFIKKASAFLVAQRIVSKSFVDYVGMAQELDNEILKDFIDQIVDQIVVLGGRVQSITFINGLKHEFRYTAPAELPVCKKCGGRIGSTCGCRTRTFDFSGKRYQRIKVSDPRDMLHGKKNPVCPECFAQEGRWHHWNCKIETCPICGGRLAECEHGPNGKK

SEQ ID NO: 107 - protein, 668 aa, Unknown
  Description of Unknown: Integrase B108 sequence
  PTHR30461:SF3,IPR036162,PS51737,IPR011109,PTHR30461, PS00397,PF00239,G3DSA:1.10.10.2600,IPR006119,SSF53041, cd00338,SM00857,IPR025827,IPR038109,PS51736, IPR006118,PF13408,G3DSA:3.40.50.1390,PF07508,Coil
MAYVRNKKKILKFWSKKKAALYVRVSTRYQVDKDSLPFQRKKLKEYCKFLGIEDFVIFEDDGYSAKNTDRPHFQEMMSRVRDGEFSHLIVWKVDRVSRNLLDFAAMYQELKDHKVTFISMNEQFDTSTAIGEAMLKIILIFAELERNMTSERVTGIMLDRAEQGLWNGARMPVGYRWNPEIKFPEPDPEETKIVQFIFDEYERVRSTTKIARYLNHNQIASKRGGQWTSKLIRDIIRSPFYIGTYRYNLRESGRGPLKPESEWIVRENNHPAIITKEQFDRCNAIMDENGTSRDTSELRARKYVHTFSGRLVCGKCGANMIASKDRARANGWRPSMYRCAQRSRMMDCDNSKTVNESYIGPFIFNYVANLARIQKNFKNIKTLEQLEKELLKGPEFENMKVSKESLRRTFDALAFQEVGKGAYLPDIDISDGDDDYTAAEQLSILKRELDKCKTAIDRLTDLYLYDPDSMTKEEFAKKKRDLVNKIAGYEKQIEASQATGDKDDLADLEFIRKASAFLVAQRIVSKKHVDYIQMALDLDNEILKDFVDQVIDRIEILEGRVQSIRFVNGLVHEFTYSTPADLPVCQKCGGHIGSTCGCRTRTFDFAGKPYRRIKVGDPGDKFHGVAGAVCPECSAQAGRWHHWKCGIERCPICGEQLIACEHGPNGKD

SEQ ID NO: 108 - protein, 668 aa, Unknown
  Description of Unknown: Integrase B109 sequence
  PTHR30461:SF3,IPR036162,PS51737,IPR011109,PTHR30461, PS00397,PF00239,G3DSA:1.10.10.2600,IPR006119,SSF53041, cd00338,SM00857,IPR025827,IPR038109,PS51736, IPR006118,PF13408,G3DSA:3.40.50.1390,PF07508,Coil
MAYAKVKKHLKIWTKKKAALYVRVSTRYQVDKDSLPFQRKKLKEYCKFLGLEDYVIFEDDGYSAKNTERPHFQEMMSRVRSGEFSHLIVWKVDRVSRNLLDFAAMYQELKDHKVTFISMNEQFDTSTAIGEAMLKIILIFAELERNMTSERVTGIMLDRAEQGLWNGARMPVGYRWNDETKFPEPDPEEVKIVQLIFDKYEEWKSSIKIARYLNNNNFKSKRGGQWTSKLIHDIIRNPFYIGTYRYNMRESGRGPLKPESEWIVRENNHPAIIDKAQFDRCNKIMDQNGSSRDTSDLRARKYVHTFSGHLVCGKCGANMIASKDRARANGWRPSMYRCAQRSRMLDCDNSRTINESYIGPFIFNYIANLARVQKNFKNIATPEKLERELLKGETFDGVAGILPEGLNLTFQALSFRQVGNGTYIPDIDFLGDSDGASDRDQIELLKSEIEKSKNAVTRLTDVYLFDQDSMTKEEFATKKKELAKKIEGMERQLADLLDDSGNDDLADMSFIKKASAFLVAQRIVSKSFVDYVGMAQELDNEILKDFVDQIVDQIVVLDGRVQSITFINGLKHEFRYTAPVELPVCKKCGGRIGSTCGCRTRTFDFSGKRYQRIKVGDPRDMLHGKKNPVCPECFAQEGRWHHWNCKIEACPICGGRLAECEHGPNGKN

SEQ ID NO: 109 - protein, 668 aa, Unknown
  Description of Unknown: Integrase B110 sequence
  PTHR30461:SF3,IPR036162,PS51737,IPR011109,PTHR30461, PS00397,PF00239,G3DSA:1.10.10.2600,IPR006119,SSF53041, cd00338,SM00857,IPR025827,IPR038109,PS51736, IPR006118,PF13408,G3DSA:3.40.50.1390,PF07508,Coil
MAYVRNKKKILKFWSKKKAALYVRVSTRYQVDKDSLPFQRKKLKEYCKFLGIEDFVIFEDDGYSAKNTDRPHFQEMMSRVRDGEFSHLIVWKVDRVSRNLLDFAAMYQELKDHKVTFISMNEQFDTSTAIGEAMLKIILIFAELERNMTSERVTGIMLDRAEQGLWNGARMPVGYRWNPEIKFPEPDPEETKIVQFIFDEYERVRSTTKIARYLNHNQIASKRGGQWTSKLIRDIIRSPFYIGTYRYNLRESGRGPLKPESEWIVRENNHPAIITKEQFDRCNAIMDENGTSRDTSELRARKYVHTFSGRLVCGKCGANMIASKDRARANGWRPSMYRCAQRSRMMDCDNSKTVNESYIGPFIFNYAANLARIQKNFKNIKTLEQLEKELLKGPEFENMKVSKESLRRTFDALAFQEVGKGAYLPDINLSDGDDDYTAAEQLSILKRELDKCKTAVDRLTDLYLYDPDSMTKEEFAKKKRDLVNKIAGYEKQIEASQATGDKDDLADLEFIRKASAFLVAQRIVSKKHVDYIQMALDLDNEILKDFVDQIIDRIEILEGRVQSIRFVNGLVHEFTYSTPADLPVCQKCGGRIGSTCGCRTRTFDFAGKPYRRIKVGDPGDKFHGVAGAVCPECSAQVGRWHHWKCGIERCPICGEQLIACEHGPNGKD

SEQ ID NO: 110 - protein, 668 aa, Unknown
  Description of Unknown: Integrase B111 sequence
  PTHR30461:SF3,IPR036162,PS51737,IPR011109,PTHR30461, PS00397,PF00239,G3DSA:1.10.10.2600,IPR006119,SSF53041, cd00338,SM00857,IPR025827,IPR038109,PS51736, IPR006118,PF13408,G3DSA:3.40.50.1390,PF07508,Coil
MAYAKAKKHLKIWTKKKAALYVRVSTRYQVDKDSLPFQRKKLKEYCKFLGLEDHVIFEDDGYSAKNTERPHFQEMMSRVRSGEFSHLIVWKVDRVSRNLLDFAAMYQELKDHKVTFISMNEQFDTSTAIGEAMLKIILIFAELERNMTSERVTGIMLDRAEQGLWNGARMPVGYRWNGETKFPEPDPEEVKIVQLIFDKYEEWKSSIKIARYLNNNNFKSKRGGQWTSKLIHDIIRNPFYIGTYRYNLRESGRGPLKPESEWIVRENNHPAIIDKAQFDRCNKIMDQNGSRRDTSDLRARKYVHTFSGHLVCGKCGANMIASKDRARANGWRPSMYRCAQRSRMLDCDNSRTINESYIGPFIFNYIANLARVQKNFKNIATPEKLERELLKGETFGGVAGILPEGLNLTFQALSFRQVGNGTYIPDIDFLGDSDGASDRDQIELLKSEIEKSKNAVTRLTDVYLFDPDSMTKEEFATKKKELAKKIEGMERQLADLLDDSGNDDLADMSFIKKASAFLVAQRIVSKSFVDYVGMAQELDNEILKDFIDQIVDQIVVLDGRVQSITFINGLKHEFRYTAPAELPVCKKCGGRIGSTCGCRTRTFDFSGKRYQRIKVGDPRDMLHGKKNPVCPECFAQEGRWHHWNCKVETCPICGGRLAECEHGPDNKN

SEQ ID NO: 111 - protein, 668 aa, Unknown
  Description of Unknown: Integrase B112 sequence
  PTHR30461:SF3,IPR036162,PS51737,IPR011109,PTHR30461, PS00397,PF00239,G3DSA:1.10.10.2600,IPR006119,SSF53041, cd00338,SM00857,IPR025827,IPR038109,PS51736, IPR006118,PF13408,G3DSA:3.40.50.1390,PF07508,Coil
MAYAKAKKHLKIWTKKKAALYVRVSTRYQVDKDSLPFQRKKLKEYCKFLGLEDHVIFEDDGYSAKNTERPHFQEMMSRVRSGEFSHLIVWKVDRVSRNLLDFAAMYQELKDHKVTFISMNEQFDTSTAIGEAMLKIILIFAELERNMTSERVTGIMLDRAEQGLWNGARMPVGYRWNSETKFPEPDPEEVKIVQLIFDKYEEWKSSIKIARYLNNNNFKSKRGGQWTSKLIHDIIRNPFYIGTYRYNLRESGRGPLKPESEWIVRENNHPAIIDKAQFERCNKIMDQNGSSRDTSDLRARKYVHTFSGHLVCGKCGANMIASKDRARANGWQPSMYRCAQRSRMLDCDNSRTINESYIGPFIFNYIANLARVQKNFKNIATPEKLERELLKGETFDGVAGILPEGLNLTFQALSFRQVGNGTYIPDIDFLGDSDGASDRDQIELLKSEIEKSKNAVTRLTDVYLFDPDSMTKEEFATKKKGLAKKIEGMERQLADLLDDSGNDDLADMSFIKKASAFLVAQRIVSKSFVDYVGMAQELDNEILKDFIDQIVDQIVVLDGRVQSITFINGLKHEFRYTAPAELPVCKKCGGRIGSTCGCRTRTFDFSGKRYQRIKVGDPRDALHGKKNPVCPECFAQEGRWHHWNCKIEACPICGERLAECEHGPNGKN

SEQ ID NO: 112 - protein, 668 aa, Unknown
  Description of Unknown: Integrase B113 sequence
  PTHR30461:SF3,IPR036162,PS51737,IPR011109,PTHR30461, PS00397,PF00239,G3DSA:1.10.10.2600,IPR006119,SSF53041, cd00338,SM00857,IPR025827,IPR038109,PS51736, IPR006118,PF13408,G3DSA:3.40.50.1390,PF07508,Coil
MAYAKVKKHLKIWTKKKAALYVRVSTRYQVDKDSLPFQRKKLKEYCKFLGLEDYVIFEDDGYSAKNTERPHFQEMMSRVRSGEFSHLIVWKVDRVSRNLLDFAAMYQELKDHKVTFISMNEQFDTSTAIGEAMLKIILIFAELERNMTSERVTGIMLDRAEQGLWNGARMPVGYRWNNETKFPEPDPEEVKIVQLIFDKYEEWKSSIKIARYLNNNNFKSKRGGQWTSKLIHDIIRNPFYIGTYRYNLRESGRGPLKPESEWIVRENNHPAIIDKAQFDRCNKIMDQNGSSRDTSDLRARKYVHTFSGHLVCGKCGANMIASKDRARANGWRPSMYRCAQRSRMLDCDNSRTINESYIGPFIFNYIANLARVQKNFKNITMVEKLERELLKGETFDGVAGILPEGLNLTFQALSFRQVGNGTYIPDIDFLGDSDGASDHNQIELLKSEIEKSKNAVTRLTDVYLFDPDSMTKEEFATKKKELAKKIEGMERQLADLLDDSGNDDLADMSFIKKASAFLVAQRIVSKSFVDYVGMAQELDNEILKDFIDQIVDQIVVLDGRVQSITFINGLKHEFRYATPAELPVCQKCGGHIGSTCGCRTRTFDFSGKRYQRIKVGDPRDMLHGKKNPVCPECFAQEGRWHHWNCKVETCPICGGRLAECEHGPNGKN

SEQ ID NO: 113 - protein, 668 aa, Unknown
  Description of Unknown: Integrase B114 sequence
  PTHR30461:SF3,IPR036162,PS51737,IPR011109,PTHR30461, PS00397,PF00239,G3DSA:1.10.10.2600,IPR006119,SSF53041, cd00338,SM00857,IPR025827,IPR038109,PS51736, IPR006118,PF13408,G3DSA:3.40.50.1390,PF07508,Coil
MAYAKAKKHLKIWTKKKAALYVRVSTRYQVDKDSLPFQRKKLKEYCKFLGLEDYVIFEDDGYSAKNTERPHFQEMMSRVRSGEFSHLIVWKVDRVSRNLLDFAAMYQELKDHKVTFISMNEQFDTSTAIGEAMLKIILIFAELERNMTSERVTGIMLDRAEQGLWNGARMPVGYRWNNETKFPEPDPEEVKIVRLIFDKYEEWKSSIKIARYLNNNNFKSKRGGQWTSKLIHDIIRNPFYIGTYRYNLRESGRGPLKPESEWIVRENNHPAIIDKAQFDRCNKIMDQNGSSRDTSDLRARKYVHTFSGHLVCGKCGANMIASKDRARANGWRPSMYRCAQRSRMLDCDNSRTINESYIGPFIFNYIANLARVQKNFKNITTVEKLERELLKGETFDGVAGILPEGLNLTFQALSFRQVGNGTYIPDVDFLGDSDGASDRDQIELLKSEIEKSKNAVTRLTDVYLFDPDSMTKEEFATKKKELAKKIEGMERQLADLLDDSGNDDLADMSFIKKASAFLVAQRIVSKSFVDYVGMAQELDNEILKDFIDQIVDQIVVLDGRVQSITFINGLKHEFRYATPAELPVCQKCGGRIGSTCGCRTRTFDFSGKRYQRIKVGDPRDTLHGKKNPVCPECFAHEGRWHHWNCKIETCPICGGRLAECEHGPNGKK

SEQ ID NO: 114 - protein, 668 aa, Unknown
  Description of Unknown: Integrase B115 sequence
  PTHR30461:SF3,IPR036162,PS51737,IPR011109,PTHR30461, PS00397,PF00239,G3DSA:1.10.10.2600,IPR006119,SSF53041, cd00338,SM00857,IPR025827,IPR038109,PS51736, IPR006118,PF13408,G3DSA:3.40.50.1390,PF07508,Coil
MAYAKKKKILNFWTKKKAALYVRVSTRYQVDKDSLPFQRKKLKEYCKFLGLEDYVIFEDDGYSAKNTERPHFQEMMSRVRSGEFSYLIVWKVDRVSRNLLDFAAMYQELKDHKVTFISMNEQFDTSTAIGEAMLKIILIFAELERNMTSERVTGIMLDRAEQGLWNGARMPVGYRWNNETKFPEPDPEEVKIVQLIFDKYEEWKSSIKIARYLNNNNFKSKRGGQWTSKLIHDIIRNPFYIGTYRYNLRESGRGPLKPESEWIVRENNHPAIIDKAQFDRCNKIMDQNGSSRDTSDLRARKYVHTFSGHLVCGKCGANMIASKDRARANGWRPSMYRCAQRSRMLDCDNSRTINESYIGPFIFNYIANLARVQKNFKNITTVEKLERELLKGETFDGVAGILPEGLNLTFQALSFRQVGNGTYIPDVDFLGDSGGASDRDQIELLKSEIEKSKNAVTRLTDVYLFDPDSMTKEEFATKKKELAKKIEGMERQLADLLDDSGNDDLADMSFIKKASAFLVAQRIVSKSFVDYVGMAQELDNEILKDFIDQIVDQIVVLDGRVQSITFINGLKHEFRYAAPAELPVCKKCGGRIGSTCGCRTRTFDFSGKRYQRIKVGDPRDMLHGKKNPVCPECFAQEGRWHHWNCKIETCPICGERLAECEHGPNGKN

SEQ ID NO: 115 - protein, 668 aa, Unknown
  Description of Unknown: Integrase B116 sequence
  PTHR30461:SF3,IPR036162,PS51737,IPR011109,PTHR30461, PS00397,PF00239,G3DSA:1.10.10.2600,IPR006119,SSF53041, cd00338,SM00857,IPR025827,IPR038109,PS51736, IPR006118,PF13408,G3DSA:3.40.50.1390,PF07508,Coil
MAYAKAKKHLKIWTKKKAALYVRVSTRYQVDKDSLPFQRKKLKEYCKFLGLEDYVIFEDDGYSAKNTERPHFQEMMSRVRSGEFSHLIVWKVDRVSRNLLDFAAMYQELKDHKVTFISMNEQFDTSTAIGEAMLKIILIFAELERNMTSERVTGIMLDRAEQGLWNGARMPVGYRWNNETKFPEPDPEEVKIVQLIFDKYEEWKSSIKIARYLNNNNFKSKRGGQWTSKLIHDIIRNPFYIGTYRYNLRESGRGPLKPESEWIVRENNHPAIIDKAQFDRCNKIMDQNGSSRDTSDLRARKYVHTFSGHLVCGKCGVNMIASKDRARANGWRPSMYRCAQRSRMLDCDNSRTINESYIGPFIFNYIANLARVQKNFKNITTVEKLERELLKGETFDGVAGILPEGLNLTFQALSFRQVGNGTYIPDVDFLGDSDGASDRDQIELLKSEIEKSKNAVTRLTDVYLFDPDSMTKEEFATKKKELAKKIEGMERQLADLLDDSGNDDLADMSFIKKASAFLVAQRIVSKSFVDYVGMAQELDNEILKDFIDQIVDQIVVLDGRVQSITFINGLKHEFRYIVPAELPVCQKCGGRIGSTCGCRTRTFDFSGKRYQRIKVGDPRDMLHGKKNPVCPECFAQEGRWHHWNCKIETCPICGGRLAECEHGPDNKN

SEQ ID NO: 116 - protein, 668 aa, Unknown
  Description of Unknown: Integrase B117 sequence
  PTHR30461:SF3,IPR036162,PS51737,IPR011109,PTHR30461, PS00397,PF00239,G3DSA:1.10.10.2600,IPR006119,SSF53041, cd00338,SM00857,IPR025827,IPR038109,PS51736, IPR006118,PF13408,G3DSA:3.40.50.1390,PF07508,Coil
MAYAKAKKHLKIWTKKKAALYVRVSTRYQVDKDSLPFQRKKLKEYCKFLGLEDYVIFEDDGYSAKNTERPHFQEMMSRVRSGEFSHLIVWKVDRVSRNLLDFAAMYQELKDHKVTFISMNEQFDTSTAIGEAMLKIILIFAELERNMTSERVTGIMLDRAEQGLWNGARMPVGYRWNNETKFPEPDPEEVKIVQLIFDKYEEWKSSIKIARYLNNNNFKSKRGGQWTSKLIHDIIRNPFYIGTYRYNLRESGRGPLKPESEWIVRENNHPAIIDKAQFDRCNKIMDQNGSSRDTSDLRARKYVHTFSGHLVCGKCGANMIASKDRARANGWRPSMYRCAQRSRMLDCDNSRTINESYIGPFIFNYIANLARVQKNFKNITTVEKLERELLKGETFDGVAGILPEGLNLTFQALSFRQVGNGTYIPDVDFLGDSDGASDRDQIELLKSEIEKSKNAVTRLTDVYLFDPDSMTKEEFATKKKELAKKIEGMERQLADLLDDSGNDDLADMSFIKKASAFLVAQRIVSKSFVDYVGMAQELDNEILKDFIDQIVDQIVVLDGRVQSITFINGLKHEFRYATPAELPVCQKCGGRIGSTCGCRTRTFDFSGKRYQRIKVGDPRDTLHGKKNPVCPECFAQEGRWHHWNCKIETCPICGGRLAECEHGPNGKK

SEQ ID NO: 117 - protein, 668 aa, Unknown
  Description of Unknown: Integrase B118 sequence
  PTHR30461:SF3,IPR036162,PS51737,IPR011109,PTHR30461, PS00397,PF00239,G3DSA:1.10.10.2600,IPR006119,SSF53041, cd00338,SM00857,IPR025827,IPR038109,PS51736, IPR006118,PF13408,G3DSA:3.40.50.1390,PF07508,Coil
MAYVRNKKKILKFWSKKKAALYVRVSTRYQVDKDSLPFQRKKLKEYCKFLGIEDFVIFEDDGYSAKNTDRPHFQEMMSRVRDGEFSHLIVWKVDRVSRNLLDFAAMYQELKDHKVTFISMNEQFDTSTAIGEAMLKIILIFAELERNMTSERVTGIMLDRAEQGLWNGARMPVGYRWNTEIKFPEPDPEETKIVQFIFDEYERVRSTTKIARYLNHNQIASKRGGQWTSKLIRDIIRNPFYIGTYRYNLRESGRGPLKPESEWIVRENNHPAIITKEQFDRCNAIMDENGTSRDTSELRARKYVHTFSGRLVCGKCGANMIASKDRARANGWRPSMYRCAQRSRMMDCDNSKTVNESYIGPFIFNYVANLARIQKNFKNIKTLEQLEKELLKGPEFENMKVSKESLCRTFDALAFQEVGKGAYLPDIDLSDGDDDYTAAEQLSILKRELDKCKTAIDRLTDLYLYDPDSMTKEEFAKKKRDLVNKIAGYEKQIEASQATGGKDDLADLEFIRKASAFLVAQRIVSKKHVDYIQMAFDLDNEILKDFVDQVIDRIEILEGRVQSIRFVNGLVHEFTYSTPADLPVCQKCGGRIGSTCGCRTRTFDFAGKPYRRIKVGDPGDKFHGVTGAGCPECSAQAGRWHHWKCGIERCPICGEQLIACEHGPNGKD

SEQ ID NO: 118 - protein, 668 aa, Unknown
  Description of Unknown: Integrase B119 sequence
  PTHR30461:SF3,IPR036162,PS51737,IPR011109,PTHR30461, PS00397,PF00239,G3DSA:1.10.10.2600,IPR006119,SSF53041, cd00338,SM00857,IPR025827,IPR038109,PS51736, IPR006118,PF13408,G3DSA:3.40.50.1390,PF07508,Coil
MAYAKAKKHLKIWTKKKAALYVRVSTRYQVDKDSLPFQRKKLKEYCKFLGLEDHVIFEDDGYSAKNTERPHFQEMMSRVRSGEFSHLIVWKVDRVSRNLLDFAAMYQELKDHKVTFISMNEQFDTSTAIGEAMLKIILIFAELERNMTSERVTGIMLDRAEQGLWNGARMPVGYRWNDETKFPEPDPEEVKIVQLIFDKYEEWKSSIKIARYLNNNNFKSKRGGQWTSKLIHDIIRNPFYIGTYRYNLRESGRGPLKPESEWIVRENNHPAIIDKAQFDRCNKIMDQNGSSRDTSDLRARKYVHTFSGHLVCGKCGANMIASKDRARANGWRPSMYRCAQRSRMLDCDNSRTINESYIGPFIFNYIANLARVQKNFKNIATPEKLERELLKGETFDGVAGILPEGLNLTFQALSFRQVGNGTYIPDIDFLGDSDGASDNNQIELLKSEIEKSKNAVTRLTDVYLFDPDSMTKEEFATKKKELAKKIEGMERQLADLLDDSGNDDLADMSFIKKASAFLVAQRIVSKSFVDYVGMAQELDNEILKDFIDQIVDQIVVLDGRVQSITFINGLKHEFRYATPAELPVCQKCGGRIGSTCGCRTRTFDFSGKRYQRIKVGDPRDTLHGKKNPVCPECFAQEGRWHHWNCKVETCPICGGRLAECEHGPNGKK

SEQ ID NO: 119 - protein, 668 aa, Unknown
  Description of Unknown: Integrase B120 sequence
  PTHR30461:SF3,IPR036162,PS51737,IPR011109,PTHR30461, PS00397,PF00239,G3DSA:1.10.10.2600,IPR006119,SSF53041, cd00338,SM00857,IPR025827,IPR038109,PS51736, IPR006118,PF13408,G3DSA:3.40.50.1390,PF07508,Coil
MAYVRNKKKILKFWSKKKAALYVRVSTRYQVDKDSLPFQRKKLKEYCKFLGIEDFVIFEDDGYSAKNTDRPHFQEMMSRVRDGEFSHLIVWKVDRVSRNLLDFAAMYQELKDHKVTFISMNEQFDTSTAIGEAMLKIILIFAELERNMTSERVTGIMLDRAEQGLWNGARMPVGYRWNPEIKFPEPDPEEAKIVQFIFDEYERVRSTTKIARYLNHNQIASKRGGQWTSKLIRDIIRSPFYIGTYRYNLRESGRGPLKPESEWIVRENNHPAIIAKEQFDRCNAIMDENGTSRDTSDLRARKYVHTFSGRLVCGKCGANMIASKDRARANGWRPSMYRCAQRSRMMDCDNSKTVNESYIGPFIFNYVANLARIQKNFKNIKTLEQLEKELLKGPEFENMKVSKESLRRTFDALAFQEVGKGAYLPDIDLSDGDDDYTAAEQLSILKRELDKCKTAIDRLTDLYLYDPDSMTKEEFAKKKRDLVNKIAGYEKQIEASQVTGDKDDLADLEFIRKASAFLVAQRIVSKKHVDYIQMALDLDNEILKDFVDQVIDRIEILEGRVQSIRFVNGLVHEFTYSTPADLPVCQKCGGRIGSTCGCRTRTFDFAGKPYRRIKVGDPGDKFHGVTGAVCPECSAQAGRWHHWKCGIERCPICGEQLIACEHGPNGKD

SEQ ID NO: 120 - protein, 668 aa, Unknown
  Description of Unknown: Integrase B121 sequence
  PTHR30461:SF3,IPR036162,PS51737,IPR011109,PTHR30461, PS00397,PF00239,G3DSA:1.10.10.2600,IPR006119,SSF53041, cd00338,SM00857,IPR025827,IPR038109,PS51736, IPR006118,PF13408,G3DSA:3.40.50.1390,PF07508,Coil
MAYAKVKKHLKIWTKKKAALYVRVSTRYQVDKDSLPFQRKKLKEYCKFLGLEDYVIFEDDGYSAKNTERPHFQEMMSRVRSGEFSHLIVWKVDRVSRNLLDFAAMYQELKDHKVTFISMNEQFDTSTAIGEAMLKIILIFAELERNMTSERVTGIMLDRAEQGLWNGARMPVGYRWNNETKFPEPDPEEVKIVQLIFDKYEEWKSSIKIARYLNNNNFKSKRGGQWTSKLIHDIIRNPFYIGTYRYNLRESGRGPLKPESEWIVRENNHPAIIDKAQFDRCNKIMDQNGSSRDTSDLRARKYVHTFSGHLVCGKCGANMIASKDRARANGWRPSMYRCAQRSRMLDCDNSRTINESYIGPFIFNYIANLARVQKNFKNITTVEKLERELLKGETFDGVAGILPEGLNLTFQALSFRQVGNGTYIPDIDFLGDSDGASDHNQIELLKSEIEKSKNAVTRLTDVYLFDPDSMTKEEFATKKKELAKKIEGMERQLADLLDDSGNDDLADMSFIKKASAFLVAQRIVSKSFVDYVGMAQELDNEILKDFIDQIVDQIVVLDGRVQSITFINGLKHEFRYATPAELPVCQKCGGHIGSTCGCRTRTFDFSGKRYQRIKVGDPRDMLHGKKNPVCPECFAQEGRWHHWNCKVETCPICGGRLAECEHGPNGKN

SEQ ID NO: 121 - protein, 668 aa, Unknown
  Description of Unknown: Integrase B122 sequence
  PTHR30461:SF3,IPR036162,PS51737,IPR011109,PTHR30461, PS00397,PF00239,G3DSA:1.10.10.2600,IPR006119,SSF53041, cd00338,SM00857,IPR025827,IPR038109,PS51736, IPR006118,PF13408,G3DSA:3.40.50.1390,PF07508,Coil
MAYVRNKKKILKFWSKKKAALYVRVSTRYQVDKDSLPFQRKKLKEYCKFLGIEDFVIFEDDGYSAKNTDRPHFQEMMSRVRDGEFSHLIVWKVDRVSRNLLDFAAMYQELKDHKVTFISMNEQFDTSTAIGEAMLKIILIFAELERNMTSERVTGIMLDRAEQGLWNGARMPVGYRWNPEIKFPEPDPEETKIVQFIFDEYERVRSTTKIARYLNHNQIASKRGGQWTSKLIRDIIRNPFYIGTYRYNLRESGRGPLKPESEWIVRENNHPAIIAKEQFDRCNAIMDENGTSRDTSDLRARKYVHTFSGRLVCGKCGANMIASKDRARANGWRPSMYRCAQRSRMMDCDNSKTVNESYIGPFIFNYVANLARIQKNFKNIKTLEQLEKELLKGPEFENMKVSKESLRRTFDALAFQEVGKGAYLPDIDLSGGDDDYTAAEQLSILKRELDKCKTAIDRLTDLYLYDPDSMTKEEFAKKKRDLVNKIAGYEKQIEASQATGDKDDLADLEFIRKASAFLVAQRIVSKKHVDYIQMALDLDNEILKDFVDQVIDRIEILEGRVRSIRFVNGLVHEFTYSTPADLPVCQKCGGRIGSTCGCRTRTFDFAGKPYRRIKVGDPGDKFHGVTGAVCPECSAQVGRWHHWKCGIERCPICGEQLIACEHGPNGKD

SEQ ID NO: 122 - protein, 668 aa, Unknown
  Description of Unknown: Integrase B123 sequence
  PTHR30461:SF3,IPR036162,PS51737,IPR011109,PTHR30461, PS00397,PF00239,G3DSA:1.10.10.2600,IPR006119,SSF53041, cd00338,SM00857,IPR025827,IPR038109,PS51736, IPR006118,PF13408,G3DSA:3.40.50.1390,PF07508,Coil
MAYVRNKKKILKFWSKKKAALYVRVSTRYQVDKDSLPFQRKKLKEYCKFLGIEDFVIFEDDGYSAKNTDRPHFQEMMSRVRDGEFSHLVVWKVDRVSRNLLDFAAMYQELKDHKVTFISMNEQFDTSTAIGEAMLKIILIFAELERNMTSERVTGIMLDRAEQGLWNGARMPVGYRWNPEIKFPEPDPEETKIVQFIFDEYERVRSTTKIARYLNHNQIASKRGGQWTSKLIRDIIRSPFYIGTYRYNLRESGRGPLKPESEWIVRENNHPAIITKEQFDRCNAIMDENGTSRDTSELRARKYVHTFSGRLVCGKCGANMIASKDRARANGWRPSMYRCAQRSRMMDCDNSKTVNESYIGPFIFNYAANLARIQKNFKNIKTLEQLEKELLKGPEFENMKVSKESLRRTFDALAFQEVGKGAYLPDINLSDGDDDYTAAEQLSILKRELDKCKTAIDRLTDLYLYDPDSMTKEEFAKKKRDLVNKIAGYEKQIEASQATGDKDDLADLEFIRKASAFLVAQRIVSKKHVDYIQMALDLDNEILKDFVDQVIDRIEILEGRVRSIRFVNGLVHEFTYSTPADLPACQKCGGRIGSTCGCRTRTFDFAGKPYRRIKVGDPGDKFQGVSGAVCPECSAQAGRWHHWKCGIERCPICGEQLIACEHGPNGKD

SEQ ID NO: 123 - protein, 668 aa, Unknown
  Description of Unknown: Integrase B124 sequence
  PTHR30461:SF3,IPR036162,PS51737,IPR011109,PTHR30461, PS00397,PF00239,G3DSA:1.10.10.2600,IPR006119,SSF53041, cd00338,SM00857,IPR025827,IPR038109,PS51736, IPR006118,PF13408,G3DSA:3.40.50.1390,PF07508,Coil
MAYVRNKKKILKFWSKKKAALYVRVSTRYQVDKDSLPFQRKKLKEYCKFLGIEDFVIFEDDGYSAKNTDRPHFQEMMSRVRDGEFSHLIVWKVDRVSRNLLDFAAMYQELKDHKVTFISMNEQFDTSTAIGEAMLKIILIFAELERNMTSERVTGIMLDRAEQGLWNGARMPVGYRWNQEIKFPEPDPEETKIVQFIFDEYERVRSTTKIARYLNHNQIASKRGGQWTSKLIRDIIRNPFYIGTYRYNLRESGRGPLKPESEWIVRENNHPAIIAKEQFDRCNAIMDENGTSRDTSELRARKYVHTFSGRLVCGKCGANMIASKDRARANGWRPSMYRCAQRSRMMDCDNSKTVNESYIGPFIFNYVANLARIQKNFKNIKTLEQLEKELLKGPEFENMKVSKESLRRTFDALAFQEVGKGAYLPDIDLSDGDDDYTAAEQLSILKRELDKCKTAIDRLTDLYLYDPDSMTKEEFAKKKRDLVNKIAGYEKQIEASQATGDKDDLADLEFIRKASAFLVAQRIVSKKHVDYIQMALDLDNEILKDFVDQVIDRIEILEGRVRSIRFVNGLVHEFTYSTPADLPVCQKCGGRIGSTCGCRTRTFDFAGKPYRRIKVGDPGDKFHGVTGAVCPECSAQAGRWHHWKCGIERCPICGEQLIACEHGPNGKD

SEQ ID NO: 124 - protein, 668 aa, Unknown
  Description of Unknown: Integrase B125 sequence
  PTHR30461:SF3,IPR036162,PS51737,IPR011109,PTHR30461, PS00397,PF00239,G3DSA:1.10.10.2600,IPR006119,SSF53041, cd00338,SM00857,IPR025827,IPR038109,PS51736, IPR006118,PF13408,G3DSA:3.40.50.1390,PF07508,Coil
MAYVRNKKKILKFWSKKKAALYVRVSTRYQVDKDSLPFQRKKLKEYCKFLGIEDFVIFEDDGYSAKNTDRPHFQEMMSRVRDGEFSHLIVWKVDRVSRNLLDFAAMYQELKDHKVTFISMNEQFDTSTAIGEAMLKIILIFAELERNMTSERVTGIMLDRAEQGLWNGARMPVGYRWNPEIKFPEPDPEEAKIVQFIFDEYERVRSTTKIARYLNHNQIASKRGGQWTSKLIRDIIRSPFYIGTYRYNLRESGRGPLKPESEWIVRENNHPAIITKEQFDRCNAIMDENGTSRDTSELRARKYVHTFSGRLVCGKCGANMIASKDRARANGWRPSMYRCAQRSRMMDCDNSKTVNESYIGPFIFNYVANLARIQKNFKNIKTLEQLEKELLKGPEFENMKVSKESLRRTFDALAFQEVGKGAYLPDIDISDGDDDYTAAEQLSILKRELCKCKTAIDRLTDLYLYDPDSMTKEEFAKKKRDLVNKIAGYEKQIEASQATGDKDDLADLEFIRKASAFLVAQRIVSKKHVDYIQMALDLDNEILKDFVDQVIDRIEILEGRVQSIRFVNGLVHEFTYSTPADLPVCQKCGGRIGSTCGCRTRTFDFAGKPYRRIKVGDPGDKFHGVAGAVCPECSAQAGRWHHWKCGIERCPICGEQLIACEHGPNKKD

SEQ ID NO: 125 - protein, 668 aa, Unknown
  Description of Unknown: Integrase B126 sequence
  PTHR30461:SF3,IPR036162,PS51737,IPR011109,PTHR30461, PS00397,PF00239,G3DSA:1.10.10.2600,IPR006119,SSF53041, cd00338,SM00857,IPR025827,IPR038109,PS51736, IPR006118,PF13408,G3DSA:3.40.50.1390,PF07508,Coil
MAYVRNKKKILKFWSKKKAALYVRVSTRYQVDKDSLPFQRKKLKEYCKFLGIEDFVIFEDDGYSAKNTDRPHFQEMMSRVRDGEFSHLIVWKVDRVSRNLLDFAAMYKELKDHKVTFISMNEQFDTSTAIGEAMLKIILIFAELERNMTSERVTGIMLDRAEQGLWNGARMPVGYRWNPEIKFPEPDPEETKIVQFIFDEYERVRSTTKIARYLNHNQIASKRGGQWTSKLIRDIIRNPFYIGTYRYNLRESGRGPLKPESEWIVRENNHPAIIAKEQFDRCNAIMDENGTSRDTSDLRARKYVHTFSGRLVCGKCGANMIASKDRARANGWRPSMYRCAQRSRMMDCDNSKTVNESYIGPFIFNYVANLARIQKNFKNIKTLEQLEKELLKGPEFENMKVSKESLRRTFDALAFQEVGKGAYLPDIDLSDGDDDYTAAEQLSILKRELDKCKTAIDRLTDLYLYDPDSMTKEEFAKKKRDLVNKIAGYEKQIEASQATGDKDDLADLEFIRKASAFLVAQRIVSKKHVDYIQMALDLDNEILKDFVDQVIDRIEILEGRVQSIRFVNGLVHEFTYSTPADLPVCQKCGGRIGSTCGCRTRTFDFAGKPYRRIKVGDPGDKFHGVTGAVCPECSAQAGRWHHWKCGIERCPICGEQLIACEHGPNGKD

SEQ ID NO: 126 - protein, 668 aa, Unknown
  Description of Unknown: Integrase B127 sequence
  PTHR30461:SF3,cd00338,SM00857,IPR006118,G3DSA:1.10.10.2600, IPR036162,PS51737,G3DSA:3.40.50.1390,IPR006119,IPR038109, PF07508,IPR011109,SSF53041,PTHR30461,PS00397, PS51736,Coil,PF00239
MAYVKAKKHLKIWTKKKAALYVRVSTRYQVDKDSLPFQRKKLKEYCKFLGLEDYVIFEDDGYSAKNTERPHFQEMMSRVRSGEFSHLIVWKVDRVSRNLLDFAAMYQELKDHKVTFISMNEQFDTSTAIGEAMLKIILIFAELERNMTSERVTGIMLDRAEQGLWNGARMPVGYRWNDETKFPEPDPEEVKIVQLIFDKYEEWKSSIKIARYLNNNNFKSKRGGQWTSKLIHDIIRNPFYIGTYRYNLRESGRGPLKPESEWIVRENNHPAIIDKAQFDRCNKIMDQNGSSRDTSDLRARKYIHTFSGHLVSGMCGANMIASKDRARANGWRPSMYRCAQRSRMLDCDNSRTINESYIGPFIFNYIANLARVQKNFKNITTVEKLERELLKGETFDGVAGILPEGLNLTFQALSFRQVGNGTYIPDVDFLGDSDGASDRDQIELLKSEIEKSKNAVARLTDVYLFDPDSMTKEEFATKKKELAKKIEGMERQLADLLDDSGNDELADMSFIKKASAFLVAQRIVSKSFVDYVGMAQELDNEILKDFIDQIVDQIVVLDGRVQSITFINGLKHEFRYATPVELPVCQKCGGRIGSTCGCRTRTFDFSGKRYQRIKVGDPRDTLHGKKNPVCPECFAQEGRWHHWNCKIETCPICGGRLAECEHGPNGKN

SEQ ID NO: 127 - protein, 668 aa, Unknown
  Description of Unknown: Integrase B128 sequence
  PTHR30461:SF3,IPR036162,PS51737,IPR011109,PTHR30461, PS00397,PF00239,G3DSA:1.10.10.2600,IPR006119,SSF53041, cd00338,SM00857,IPR025827,IPR038109,PS51736, IPR006118,PF13408,G3DSA:3.40.50.1390,PF07508,Coil
MAYAKAKKHLKIWTKKKAALYVRVSTRYQVDKDSLPFQRKKLKEYCKFLGLEDHVIFEDDGYSAKNTERPHFQEMMSRVRSGEFSHLIVWKVDRVSRNLLDFAAMYQELKDHKVTFISMNEQFDTSTAIGEAMLKIILIFAELERNMTSERVTGIMLDRAEQGLWNGARMPVGYRWNDETKFPEPDPEEVKIVQLIFDKYEEWKSSIKIARYLNNNNFKSKRGGQWTSKLIHDIIRNPFYIGTYRYNMRESGRGPLKPESEWIVRENNHPAIIDKAQFDRCNKIMDQNGSSRDTSDLRARKYVHTFSGHLVCGKCGANMIASKDRARANGWRPSMYRCAQRSRMLDCDNSRTINESYIGPFIFNYIANLARVQKNFKNIATPEKLERELLKGETFDGVAGILPEGLNLTFQALSFRQVGNGTYIPDIDFLGDSDGASDRDQIELLKSEIEKSKNAVTRLTDVYLFDPDSMTKEEFATKKKELAKKIEGMERQLADLLDDSGNDDLADMSFIKKASAFLVAQRIVSKSFVDYVGMAQELDNEILKDFIDQIVDQIVVLDGRVQSITFINGLKHEFRYATPAELPVCQKCGGHIGSTCGCRTRTFDFSGKRYQRIKVGDPRDMLHGKKNPVCPECFAQEGRWHHWNCKVETCPICGGRLAECEHGPNGKN

SEQ ID NO: 128 - protein, 668 aa, Unknown
  Description of Unknown: Integrase B129 sequence
  PTHR30461:SF3,IPR036162,PS51737,IPR011109,PTHR30461, PS00397,PF00239,G3DSA:1.10.10.2600,IPR006119,SSF53041, cd00338,SM00857,IPR025827,IPR038109,PS51736, IPR006118,PF13408,G3DSA:3.40.50.1390,PF07508,Coil
MAYAKVKNHLKIWTKKKAALYVRVSTRYQVDKDSLPFQRKKLKEYCKFLGLEDYVIFEDDGYSAKNTERPHFQEMMSRVRSGEFSHLIVWKVDRVSRNLLDFAAMYQELKDHKVTFISMNEQFDTSTAIGEAMLKIILIFAELERNMTSERVTGIMLDRAEQGLWNGARMPVGYRWNNETKFPEPDPEEVKIVQLIFDKYEEWKSSIKIARYLNNNNFKSKRGGQWTSKLIHDIIRNPFYIGTYRYNLRESGRGPLKPESEWIVRENNHPAIIDKAQFDRCNKIMDRNGSSRDTSDLRARKYVHTFSGHLVCGKCGANMIASKDRARANGWRPSMYRCAQRSRMLDCDNSRTINESYIGPFIFNYIANLARVQKNFKNITTVEKLERELLKGETFDGVAGILPEGLNLTFQALSFRQVGNGTYIPDIDFLGDSDGASDHNQIELLKSEIEKSKNAVTRLTDVYLFDPDSMTKEEFATKKKELAKKIEGMERKLADLLDDSGNDDLADMSFIKKASAFLVAQRIVSKSFVDYVGMAQELDNEILKDFIDQIVDQIVVLDGRVQSITFINGLKHEFRYATPAELPVCQKCGGHIGSTCGCRTRTFDFSGKRYQRIKVGDPRDMLHGKKNPVCPECFAQEGRWHHWNCKVETCPICGGRLAECEHGPNGKN

SEQ ID NO: 129 - protein, 667 aa, Unknown
  Description of Unknown: Integrase B130 sequence
  PTHR30461:SF3,IPR036162,PS51737,IPR011109,PTHR30461, PF12158,IPR021994,PF00239,G3DSA:1.10.10.2600,IPR006119, SSF53041,cd00338,SM00857,IPR025827,IPR038109, PS51736,PF13408,G3DSA:3.40.50.1390,PF07508,Coil
MKKFPIDLSCLTEEEISQFQEDPYTLYNGDQDVALYLRYSSTGQSDQSIEGQLRDCRTFCKANHYRIVAIYVDRATTARKDVEKRVHLMEMVADSAKQNWEYVIVWKLDRFARNRNDSAIMKMRLRKNGVKVLSATEHLTDSPESIILESVLEGMAEFFSAELSQKVTRGMRESALKCHSVGGHIPLGYKVENHKLVVDPDTAHIVQEAFSLYANGESVADICRKFNSAGYKTAKNTEFNRSSFKAMFRNTRYIGTYTYKDIVIENGIPAIIDKELFETVQRRLSKTATAPARGKAKVDYLLSGKLFCGHCGASMNGESGAGRHGKVYHYYSCYTKKRKLGCDKRPLKKDYIEGIVARDALNLLTDQLIDEIADMAIRQSEQDLINDTHIPQLTAQLSEVEKSITNITTAIEKGIASETLMNRLVQLEHEKKTLNKEIKAEEKFVYRIDRDQIVFWLSQFKYGNIEDEDFRRRLIDLLVNSVTVWDEPDGYKITTAYNLTSCKTKTFRVEKNPAAEEATGFDFGESECTNGTVIGYSAVSYGGEGSAVHLPVARYTVEGQEYRVTGPRYRGYVTRTVSTPFAENTCRCYEKNGVLHIERSRNSIIGVSRNPMAEQYPVGTVLPVWFDPQRPQRSYVLRCVDNRWVFWMLLLLGAVLLAGCIGVITLL

SEQ ID NO: 130 - protein, 659 aa, Unknown
  Description of Unknown: Integrase B131 sequence
  PTHR30461:SF3,SM00857,G3DSA:1.10.10.2600,IPR036162,PF13408, PS51737,G3DSA:3.40.50.1390,IPR025827,IPR006119,IPR038109, PF07508,SSF53041,IPR011109,PF00239,PTHR30461, PS51736,Coil,cd00338
MRKKVYIYTRVSTSMQVDGYSLDAQKDKIRKYAEAFDYDIAGEYEDAGKSGKSIEGRAEFRKMLEDIETCKDDVSYVMVFKLSRFGRNAADVLNSLQLMQDYGVNLICVEDGIDSSKDAGKLMISVLSAVAEIERENILVQTMEGRKQKAREGKWNGGFAPYGYKLVNGELIINEEEAQAIRIIFDKYVNSTMGCNGIAKYLQQQGINKVERQNGKNPYFAASLIKQILKNPVYCGKIAFGRRKNEKVQGTRDTYHIVAQSEYLIADGIHEAIIDDELWQKAQDKLAAQAKKYEHVNKGKDEKIHLLSGILKCPICGAGMYGNKSTKNRNGIHYKDYFYYGCKHRGGERGHKCTYRKQLQEEKIDGAVAEIISKLISNPKFATMMQQKINMEVDTTEIDKELSNYQKMLGQFIGTKRSLEKQIDSLNVSDKHYERKLLDLQDRLDAMYDKIEEEEAKLEECKAKKRVIESDKMTADNIYKVLIYFDKLYAVMDDADKRALLYSLIDEIQVFEEEQANGQWLKSIKFKLPIIDGDMNLSLDKDSHIETVVLLSHKKPDGHINVKVEFGKGEGKVPLDNIAKRAEGYKPKERVTYKMIKEYIEAKYGFKVHTAYIAKVKRDLGLPMYDAPNAVEELKQPRKHPTAEKVEAIKDALKHFEVI

SEQ ID NO: 131 - protein, 659 aa, Unknown
  Description of Unknown: Integrase B132 sequence
  PTHR30461:SF3,IPR036162,PS51737,G3DSA:1.10.260.40,IPR011109, PTHR30461,PF00239,PF01381,PS50943,IPR006119, SSF53041,IPR010982,SSF47413,SM00857,IPR025827, PS51736,cd00093,cd03768,SM00530,PF13408,G3DSA:3.40.50.1390,
  CONT. FROM ABOVE: PF07508,IPR001387,Coil
METVGIYSRKSKFTGKGESIENQVQMCKEYINQRLGKNIKIVIYEDEGFSGSTTDRPKFKEMIKDIKLKKINILICYRLDRISRNVADFSNTLEILQENNCSFISIREQFDTSTPMGRAMIYIASVFAQLERETIAERVKDNMLELAKTGRWTGGKIPLGFISERVKYTDDAGLQREYSILKIDKEEIKFVEFLYEKYLELGSLHKLEVYITQNQLKSRNGIMFEKSSLKLILQNPIYVKANYEVITYLKENNWIVYGEPDNKHSLLSYNKTEQSFKNGKHTKVKKSENERFVAISNIEGFIDPNLWLQVQRQFDKNRSKFPRLGKTHNALLVGKLICGQCKEYMLVQHGRVSKTTGKKLFYYTCSLKRKSHKKLCDNNNAKADYVENLVINSLKLLSKSKKKFINQLKISYKNKLKSTKASIEKLSLEKSLSEKKNQIDNLVLALSKSSEIEDILLGKIKSLKNDCIQIENKIKYINSSAEEQKLNNINLDLIDSIIDECSIIDKLTRDKQKRIIDTLIDTIYWYGSGNGKGKIKIKFIGADEDTKEIVLSEEELQPKMLQFYSHSTCKVNKTATFKKIFKTIESNESVAYSSLPEDTIAEKIYKLRMIKGCTQREFAKICSIGYSSLCKYELGFNPSIKNLNKISSKFNIDIGYFLK

SEQ ID NO: 132 - protein, 658 aa, Unknown
  Description of Unknown: Integrase B133 sequence
  PTHR30461:SF3,IPR036162,PS51737,G3DSA:1.10.260.40,IPR011109, PTHR30461,PF00239,PF01381,G3DSA:1.10.10.2600,PS50943, IPR006119,SSF53041,IPR010982,cd00338,SSF47413, SM00857,IPR025827,IPR038109,PS51736,cd00093,SM00530,PF13408,
  CONT. FROM ABOVE: G3DSA:3.40.50.1390,PF07508,IPR001387,Coil
MKRVAVYSRKSKFTGKGDSIENQIEMCKEYITNNISKDVEFTIYEDEGFSGGNLDRPKFKKLIAAIKNKKFDILVCYRLDRISRNVADFSSTLEVLQSNNCSFVSIKEQFDTSSPMGRAMIYIASVFAQLERETIAERVKDNMIEIAKNGKWTGGKIPVGFNSEKIEYVDENGLTRVAPNLVINNKEMELVKFLYEKYLELGSLHKLEVYIHENNIRSRNDILYEKSSLKTILQNPIYVKANNAVINYLKNSKWNVYGDPDNIHSLLTYNKTEQIKKDGKYTKSKKDLSERFAAVSSIKGYIEPDLWLAVQRQFEKNKNTFPRLGKTHNALLVGKLRCGKCKEYMLVSHGRISKVTGQKLFYYTCSLKRKSHKKLCNNGNAKAGDIENLVLLSLKQLSLNKKKFILNLRNRYKSNASDENMDLEKLSLLKSLKEKKSQINNLVTKLSLCDSIDDILLHRIKLLKDECIAIEKNINNLESKALNLKNSLLNLDLIDELLDKCAIIDTLDRSQQKLIIDNLIDTIYWYSDNTGKGNIEIKFVGIEDEQKEFKFTSEEMKQLMLHFYSDSTCYENKKATFSEVFKPIENSQSNIYIMLPESNNKEKIYKLRMINGLTQKQFALRTGIGYSSLCKYEIGYAISKKNISKICSYFNISENYFD

SEQ ID NO: 133 - protein, 654 aa, Unknown
  Description of Unknown: Integrase B134 sequence
  PTHR30461:SF3,cd00338,SM00857,G3DSA:1.10.10.2600,IPR036162, PF13408,IPR025827,G3DSA:3.40.50.1390,PS51737,IPR006119, IPR038109,PF07508,IPR011109,SSF53041,PTHR30461, PS51736,Coil,PF00239
MCAKKKPAMLEPDMQDAVIYTRYSSHNQRDCSIEQQVADCEIFARQNNLRVVKVYADRHLSGTTDNRPQFQQMLKDAAHGHWAYVICWKIDRFARNRYDSATYKFRLKKAGVRVLYAKESIPDGPEGILLESVLEGSAEYYSAALAQNIRRGMKYNAEQCKVNSGSIPFGYCKGPDGRFAIHEANAEVVREIFRKAAAGMSFVDIANDLNSRGLKTSRGGRWNKGSFRLLMNEAYIGVYHFSDTRIEGGMPALIDQGTFWAANERLKANSSVRGRHQDGGDYLLTGKLKCAHCGSYMIGFSGTGKSGELHYYYGCQKRRRERACKKANVPREWIERVVVKAALDYVLRPDVMEWIADAVMEYQEREAASAQLAALTAELEENQKATDNVMKAIEAGIITSTTKQRLLDLEAKAQDLKRAIELEKLSHVRLERDQVLFWLDCFRGGSLQSQEFRRKVIDTFVSVVYLSDDHLRIAFNYSGGSNAEADFDLVMDAEAAAGELSKKFVQGHVASTMKKERHFVRNWRSFLYYGNVFGNTIKFSDCSHQRIIQHLNELYRAGRTGQRIACQLLHILRVCEPCTFSCPAYSALNRFWLTSSAVGDRGIDIFLNGLQAVFLLTDQLKTLAQDTVGAQIACDAHRAQQIIDLSGQFGNDHS

SEQ ID NO: 134 - protein, 654 aa, Unknown
  Description of Unknown: Integrase B135 sequence
  PTHR30461:SF3,cd00338,SM00857,G3DSA:1.10.10.2600,IPR036162, PF13408,PS51737,IPR025827,G3DSA:3.40.50.1390,IPR006119, IPR038109,PF07508,IPR011109,SSF53041,PTHR30461, PS51736,Coil,PF00239
MCAKKKPAMLEPDMQDAVIYTRYSSHNQRDCSIEQQVADCEIFARQNNLRVVKVYADRHLSGTTDNRPQFQQMLKDAAHGHWAYVICWKIDRFARNRYDSATYKFRLKKAGVRVLYAKESIPDGPEGILLESVLEGSAEYYSAALAQNIRRGMKYNAEQCKVNSGSIPFGYRKGPDGRFAIHEANAEVVREIFRKAAAGMPFVDIANDLNSRGLKTSRGGRWNKGSFRLLMNEAYIGVYHFSDTRIEGGMPALIDQGTFWAANERLKANSSVRGRHQDGGDYLLTGKLKCAHCGSYMIGFSGTGKSGELHYYYGCQKRRRERACKKANVPREWIERVVVKAALDYVLRPDVMEWIADAVMEYQEREAASAQLAALTAELEENQKATDNVMKAIEAGIITSTTKQRLLELEAKAQDLKRAIELEKLSHVRLERDQVLFWLDRFRGGSLQSQEFRRKVIDAFVSVVYLSDDHLRIAFNYSGGSNAEADFDLVMDAEAAAGELSKKFAQGHVASTMKKERHFVRNWRSFLCHGNVFGNTIKFSDCSHQCIIQHLNELHRAGRTGQRIACQLLHILRVCEPCTFSCPADSALNRFWLTSSAVGDRGIDIFLHGLQAVFLLTDQLKTLAQDTVGAQIACDAHRAQQIIDLSGQFGNDHS

SEQ ID NO: 135 - protein, 653 aa, Unknown
  Description of Unknown: Integrase B136 sequence
  SM00857,G3DSA:1.10.10.2600,IPR036162,PS51736,PS51737, G3DSA:3.40.50.1390,IPR006119,IPR038109,PF07508,SSF53041, IPR011109,PTHR30461,mobidb-lite,cd00338,PF00239
MKENSGQDRKQKIRDKYKGTDASEIEIIPAKPTADFMESGGIRRVAAYVRVSTDNDEQTSSYELQKNYYTEYITGHPGWELVGIYADEGISGTSIAHRKGMLQMIEDCKAGKIDLIMTKSIARFARNIVDCLSVIDLLKNLEPPVGVQFEADNIYTLDNNGRMILTILASVAEEESHSKSVIMNWSIERRFRKGLFLTPELLGYDRDEDGDLIVNEDEAETVKAIYYLYLNGVSFSDIAELLKAYKRKTKQGSYEWSASTLAEIVANERHCGDIRAWKTFTPNFLTHKAKKNNGERTQFRRKNHHEAIVSRTVYEAANFLRASRAYAKKARPLPVLSVVDNGILRGYVPLDKDWTGFSTDEYQKASESVMSELEDTRQIEYKAGLDMRGYEVVRSQYFSTTQNPAMTIADGKLNFNTACLKKFENVEYVELLLNSVNRCIAVRPCDGNNPNAIHWGKLREGRWCALSKSCRGLAKTLFDIMDWDQDLKYRFRGDFIENDDQKVMLFQLDEPEMVKTENIVLPPKEAETDDRAEIAGRTVKQIIYILPPEWEDTFGRPITSIGEINLLEQRHYAADWDVLRPAKELAEYSTLTSEDLEELLQEAEKIIEGWPIPDEHGTGETADNGDGESADVGTVCGSDVGEGTEENRDRADL

SEQ ID NO: 136 - protein, 653 aa, Unknown
  Description of Unknown: Integrase B137 sequence
  PTHR30461:SF3,cd00338,SM00857,G3DSA:1.10.10.2600,IPR036162, PF13408,PS51737,G3DSA:3.40.50.1390,IPR025827,IPR006119,IPR038109, PF07508,IPR011109,SSF53041,PTHR30461,PS51736, Coil,PF00239
MARKKNIAAGLDAVIYARYSSHNQREVSIEQQIAECTKHAAALGLRIVGTYEDRAISGKTDNRPRFQQMMRDAEKGKFQAVVAWKSNRIGRNMLQAMVNEAKLDDYGVKVFYAEEDFDDTAAGRFALRNMMNVNQFYSENMAEDITRGLYDNANKCMANGRQPLGYKRGADGKVMLDEPAAAVVREIFTRVAAGDLFVDIARDLNAKGIKTSKGAAWNKGSFQSICQNERYKGIYIYGDVRIVDGIPRIVSDELWYRVQEAMRMKKNPVGTRHRVGAEDYLLTGKLRCGHCGSYMTGVSGTSRNGELHYYYTCQKRRTEHACNKKNVRRDVIEPAIAQAIKMYCLTDDVIEWMADQTVQYWEKHDNDLQIEALEQQLAENKKATSNMLKAIEMGIITEATRSRMVELETENSKLTAQLSAAKRDVVKINREDLIDELHVLRSKDIQDREVQAELFKDFLVAAYIYDDNRLKLVFSFMGKDNSVEIPLETGEDPPDGEDSPDAKMFVLTPDCSTIQFVLEPDSLRKRVRVRFLFIGGSAEGLLGTVNEQRQGIAMIVVSCLLFCGIKFALCELGRPPYMARLGVIAAYVRTGRACTPLARCKHTRLCSKVCVPRGIAPLESLRSVYARTQENGKISLYRGCSFIGEYGILGLAQ

SEQ ID NO: 137 - protein, 651 aa, Unknown
  Description of Unknown: Integrase B138 sequence
  PTHR30461:SF3,SM00857,G3DSA:1.10.10.2600,IPR036162,PF13408, IPR025827,PS51737,G3DSA:3.40.50.1390,IPR006119,IPR038109, PF07508,IPR011109,SSF53041,PF00239,PTHR30461, PS51736,Coil,cd00338
MKNKKIKCDIYTRVSTTMQVDGYSLDAQKEKLKRYAEFQNMEIVNEYSDEGKSGKSVEGRPEFQRMLDNIENGTDEVQFVLVFKLSRFGRNAADVLNSLQRMQDFGVNLICVEDGIDSSKDSGKLMISVLSAVAEIERENILVQTMEGRKQKAREGKWNGGFAPYGYELVNGELQIAEDEAEIIRLTYDKFIHTNMGISAIAAWLNQHGYKKKKRQNNTLDAFAASFIKGVLDNPVYCGKLAYGRRKNEKVSGTRNEYRIVKQENYMLHDGIHEGIISETDWELAHQKREKTGVKYEKTHSLDHEHILSGILRCPLCGSGMYGNVNRKKKKDGTLYKDYFYYACKHRRLVDGHKCGYRKQWSEEKINNAVEEVIRKLVKNPKFEEAILNKIGSRIDTEEIEKEIEGLEKQHRQLTGAKARLGQQMDSLDIMDKFYEKKYQDMETRLYRLYDEIEGVENSIEEVKNRLPNIRQQKISEENVYQFLLYFDKLYDKFTDLEKKEFLNSFVEQVDIYEQEQPDGRFLKHIKFRFPVYFGDRETQELCWDNESTVETVVKLSLKKDTPKIEVTMEPDEESNYTPQEKATYSKIKEYVKDKYGVNVHTSYIAQVKRMCGLDMSENYNKSKKEKPEVKQCPQEKVEYIKDALRHFKLI

SEQ ID NO: 138 - protein, 650 aa, Unknown
  Description of Unknown: Integrase B139 sequence
  PTHR30461:SF3,cd00338,SM00857,G3DSA:1.10.10.2600,IPR036162, PF13408,IPR025827,G3DSA:3.40.50.1390,PS51737,IPR006119, IPR038109,PF07508,IPR011109,SSF53041,PTHR30461, PS51736,Coil,PF00239
MKKTKTKCYLYTRVSTSMQVDGYSLDAQRDKLRKYAEYEDMVVAGEYSDEGFSGKNIQGRHEFQRMLQDIQDCKDGVEYVLVFKLSRFGRNAADVLNSLQLMQDFGVNLICVEDGIDSSKDSGKLMISVLSAVAEIERENIRTQTMAGREQKAREGKWNGGFAPYGYRLEKGELLIAEDEVDVIRTIFDRYIHTNDGVSGVAKYLNRQGFVKKLRQNGTIPGFSASFVKSIIDNPVYMGKIAYGRRRTEKKIGTRNEMHVVEQSEFPVYEGKHEAIISEEDWNLAQEKRKINAYRREKVNDPTHAHILSGILKCPCCGKSLYGNIAKAHSKDKKTRYYYYCKNTVTPTGHECTFRLNIEQMEMNRMVASIISAMVSDPRFADAIKAKIGSAVDTNDLEKQLEALQAQLRQTLGTKARLERQMDGLDVNDPYYDRKISDLQRRYDEQYGAIDEIEVQIDDVQSQIRSIRQEKISGDNIYRLLLAFDQVYEAASEVERKEFMRAFIERIELFPEKQPDGNWIRKIIFNFPVPVNGTEVKELPLENETIVETVCLLSKLKSANHIEVELNMDELDLTDAEKKATYEEIKAYVLENTGLKVSHLYIAQVKQKYGIIERENYNKPKSENSRQPQCPPEKEAAITDALKHFGMIPD

SEQ ID NO: 139 - protein, 650 aa, Unknown
  Description of Unknown: Integrase B140 sequence
  SM00857,G3DSA:1.10.10.2600,IPR036162,G3DSA:3.40.50.1390,IPR006119 ,IPR038109,PF07508,SSF53041,IPR011109,PTHR30461, PS51736,cd00338,PF00239
MAKDENKESEIRGDEQEIVDQRLPVWRPQDADREYYRYETKKRIQHYTVPPQTIFRPAKPTPTIRDAEHKRVAVYARVSTKSKEQVSSIENQTKYYTEKIAKTPNWDLAEIYSDEGKSGTSKKWRPEFKRMLEDASKKKMDLIVCASVSRFARNISDLIEEVRKLRTTNPSNPVGVYFETEDLYTLDPNINERLQMQGLFAEWESGNKSRRMILSYDQRICTGQFPLSDLLGLRHTIEGGFIIEEEEAKTVKYIFLATLCGYTAEEIAEVLTDKQRPTLRGRTEWTASMVKAIMENERRWGDLEVRKRVVIDYKEKVTAKNDGLREGAYIPHYHEGIVSPEIARAAHMMRASRYKFGSVPDVYVIDSGALKGFVSISPTWSGIDNRAFQDISRQVYNEDEFCELQRRANIMNGRTHSNVVSMTLNDYRVAPGVMFMTRSDPQLTFSQRSMKLNAVCWEKLGQQKYVEFLYHPVLEVIAVRSCNATNPNAVLWDETKKSGLQLCTSAFSNAVYDKLDWMRKYKFRFRGVTRVRGGERIIFFFLDEPQILVGKDKKHLDAMDTSDSTVKYIPYKESECGEAAGLTAGIAYPENWQEQVGVSYEIKQQRGRVLDAVSSADIRNHGTKVVNPFIGVIPTHGELEDELEQIYEAM

SEQ ID NO: 140 - protein, 650 aa, Unknown
  Description of Unknown: Integrase B141 sequence
  PTHR30461:SF3,cd00338,SM00857,G3DSA:1.10.10.2600,IPR036162, PS51737,G3DSA:3.40.50.1390,IPR006119,IPR038109,PF07508, IPR011109,SSF53041,PTHR30461,PS51736,Coil,PF00239
MTDYIGNYKNRPRRVVFYGRVSTEHEEQLSALGNQMEWYTDLALRNPNWTVVAQYIDEGITGTQMKKRPSFMRMIEHAKEHRFDLIVTRELSRFARNTVDALNATRELKQYGVEVYFVNDGIWTMDGDGEVRLTIMASIAQDESRKTSERVKAGQKMSREKGVLYGSGNIIGYDRVDGTYVINEEQAATVRRIFNLYAEGHGETTVAKMLIEENRKDGCGGLSWTASKVSRVLRKPTYKGYMTYNKSHIDDFLSHNRINHNEEDFVLVKGNFEPIVSEELWETCNQIRSKRAAFVKGKDGRAHKFGVSFPQNKWTKILFCDCGMRFQIEGYDKTANGGKNMRLICARSKMFKKKDAARTLNGIPCPAPYASEWKLELMAREVFRTVWKENAEDILGLLRTLDANLNTTGTPNDGNQLENKLSALNEELDDLVSQRASRSITMDDFLSKSTEINNEIINVEGLLQSSIQEQRPKARLDMHSIEAALSDDASFPDGKIEPGFLDRYTNRIVKSNNRYIWMLQLMNVQQIMPIQSERQPIAMVTYKSGVPYDIEQEQIGKQDKESAGPDCATICRPQDFFLNMSRTKRKRKLVEWLESCQENQVSVLDEKIPLLSFAVDFVTAYEYQKARGIKIHPGLWKDMRVDIFLVKKEN

SEQ ID NO: 141 - protein, 650 aa, Unknown
  Description of Unknown: Integrase B142 sequence
  PTHR30461:SF3,SM00857,G3DSA:1.10.10.2600,IPR036162,PF13408, IPR025827,PS51737,G3DSA:3.40.50.1390,IPR006119,IPR038109, PF07508,IPR011109,SSF53041,PTHR30461,Coil, PS51736,cd00338,PF00239
MKKQQKCYIYTRVSISMQVDGYSLDAQKDKLRKYAEYQEMSIVGEYSDEGKSGKSVEGRPQFKQMLADVESGKDNVDYVLVFKLSRFGRNAADVLSSLQKMQDYGVNLICVEDGIDSSKDARKLMISVLSAVAEIERENILVQTMEGRRQKAREGRWNGGFAPYGYQLVNGELIIAEDEAEIIRIIYDKFVNTTMGMAAIATFLNNSGYKKKLRQNNTIEDFSTSFVKGVLDNPIYCGKLAFGRRKNEKISGTRNEYHIVKQKEYMLSDGIHEAIISEEMWNQAHRKRQETGVLQVKTHSLEHEHILSGIIKCPVCGSGIYGNVNRKKHPYGGYYKDYFYYACKHRKLVDGHRCTYKRQWNEDRINAAVEEIIRKFVKNPKFEQEIRKQIGSSIDTSELDKEYDGLKDRLSQTTGAKNRLADQMDHLSVSDKNYDKKYNDMQERLDKLYDEITDIEDAMEEVETRLYNIRQDKISEDNVYQFLLFFDKLYDKFTDLEKKTFLRSFLSDVFIYEEEQKDGRILKGLQFKFPIYMNGRNVLGVDWDNESTDETVVKLSLKKDTPRIEVTMKPDEESNYTPKEKATYPKIKEYVKNKYGVNVHTSYIAQIKRMCGLDMGENYNKSKKENPEVKQCPQEKVEYIKDALKHFKLI

SEQ ID NO: 142 - protein, 649 aa, Unknown
  Description of Unknown: Integrase B143 sequence
  SM00857,G3DSA:1.10.10.2600,IPR036162,PS51736,PS51737, G3DSA:3.40.50.1390,IPR006119,IPR038109,PF07508,IPR011109, SSF53041,PTHR30461,mobidb-lite,cd00338,PF00239
MKENSGQDRKQKIRDKYKGTDVSEIEIIPAKPIVDFTESGGIRRVAAYVRVSTDNDEQTLSYELQKNYYTEYITGHPGWEFVGIYADEGISGTSITHRKGMLQMIEDCKAGKIDLILTKSIARFARNIVDCLSVIDLLKNLEPPVGVQFEADNIYTLDNNGRMILTILASVAEEESHSKSVIMNWSIERRFRKGLFLTPELLGYDRDEEGDLIVNDDEAETVRAIYYLYLNGVSFSEIAELLKAYKRKTKQGSYEWSASTLAEIVANERHCGDIRAWKTFTPNFLTHKAKKNNGARTQFRRKNHHEAIVSRTVYDAANYLRASRSYAKKARPLPVLSVVDNGILRGYVPLDKDWTGFSKDEYQKASESVMSELENIRQIEYKVGLDMRGYEVVRSQYFATMKNPAMTIADGKLGFNTSCLKKFENVEYVELLLNSVNRCIAVRPCDQNNPNAIHWGRLREGRWCALSKSCRGLAKTLFDIMDWDKDLKYRFRGDFIEKDDQKVILFQLDEPEMVKTENIVLPPKDAESDNEAEITGRTVKQTIYILPPEWENTFGRQITSIVEVNLLEQRHYAADWDVLRPAKELAEYSALTSEDLEELLYEARTIIERWPIPDEHGTGKSTDDGTEESADAATECGTDVGAGAEENGD

SEQ ID NO: 143 - protein, 648 aa, Unknown
  Description of Unknown: Integrase B144 sequence
  PTHR30461:SF3,SM00857,G3DSA:1.10.10.2600,IPR036162,PF13408, IPR025827,G3DSA:3.40.50.1390,PS51737,IPR006119,IPR038109,PF07508, IPR011109,SSF53041,PF00239,PTHR30461,PS51736, Coil,cd00338
MSLALELAQTQIARAKPAEDQVPKTARVAIYARYSSHKQQELSIEGQLREIQEYCQKKDLKIVRAYIDRAKSGRTSTKRTEFRRMLEDAKQGEFDTIVVYKFNRFFRNLTEQVITMEDLRKVSVTMQSVHDVVPEGSGGVYMRAIYGADAEVYSLGVSEDTKRGMRDAAADYRTPGSLPMWLMADANKKIVLNEPAARVMRQAAVMYDEGATLRQCCEYINAAGYKTRQGHKWNPTTLSASFRNVRLMGVFRFKDEILKEGIFPAAVEPDLWRRINAKLDGKHMPQRARALEEYYLTPRLFCGLCGAPMYGAIAYGAMSHGVKNVYRYYRCDNRLKNHSCKQKLVRKEIVEDAVFRAVIGTLTDENIARIALQAEKLSAETATTGAEKLRLLDELAAVNTEINNISRAIAAGIITDTTRDMLIDAERRRTGIQQRIEDAEAKEKETVRAEDVAAWLYCFREGAKKDEELKAQILRRLVARAELFEDGPHDGHVVVWCKLADAETAITEFFERTPAGGAKKEHRFYRCSFYISGQTPGLAPERLYQQHHGAAKLIPHTGYVQHGCGRGGFPHAAHVKAVLPKRLQISGEGAVVFCHLFPKKHGRARPFFIIMVYREMQDAAVLAVHPLLRALCGEHGVLSAEHKPAAGT

SEQ ID NO: 144 - protein, 648 aa, Unknown
  Description of Unknown: Integrase B145 sequence
  PTHR30461:SF3,IPR036162,PS51737,G3DSA:1.10.260.40,IPR011109, PTHR30461,PF00239,IPR006119,SSF53041,IPR010982, cd00338,SSF47413,SM00857,IPR025827,PS51736, cd00093,PF13408,G3DSA:3.40.50.1390,PF07508,IPR001387,Coil
MKTVAIYSRKSRFTGKGDSIENQIEMCKEHIKKFVSPKVEFLIYEDEGFSGGNTNRPAFQRLINDIKYGNIDLLICYRLDRISRNVADFSSVLNVLQEYKVDFISIKEQFDTSSPMGRAMIYIASVFAQLERETIAERIKDNMLEMAKKGKWTGGKLPLGFTSKKIAYIDEEGKKRFKVTLEHDSKDLEFVKFLYEKYLELGSLHKLETYTHENNIRSASGKIFEKSTLKIILQNPIYVKADENVFNYFENKGWSVYGEPDGLHSLLSYNKTETAKKDGKLTKKTKDESESLVAVSDIKGFIDSSLWLKVQYQFKKNKNTFPRLGKTHNALLVGKLFCGNCGTRMIIQHGRTSPKTGIKTFYYVCSLKKTSKKKLCSAHNVKTDFLENLVLDSLEKLYYKKDFINDSLKINLKENKDNIKEINTTKKLIELNKNKINSLIEKLSLDFDNVLSDILIPQIKKIKIENDVLESKLEELKLKKQESEMNRIEIDLITSLLNKCKNIKELTRTEQKQIIDCLVDSIYYYSNDNGNDKIKIKFINDIDSINTLLSDEEKRQFEKLSFYSHSMYSMNKKTTINDILSNKELSIIDILPNETIGDKIKILRLSTGLNYNDFARKAKLGTMTIYRWEISKRIPNEKYLKQLKSQIK

SEQ ID NO: 145 - protein, 647 aa, Unknown
  Description of Unknown: Integrase B146 sequence
  IPR036162,PS51737,PS00398,IPR011109,PTHR30461, PF00239,G3DSA:1.10.10.2600,IPR006119,SSF53041,cd00338, SM00857,IPR025827,IPR038109,PS51736,IPR006118, PF13408,G3DSA:3.40.50.1390,PF07508,Coil
MLRPISYERVSTFQQVEMGKGLVDQRSSLTAFLDKNADKFTNERIFITDEGVSAFKNANISPESNLGKFLQDVRDRKYGKGDALIVTSLDRLSRRSSWSENTIQFIVAAGIVIYDISTDVVLRDDDSFSKILMEIILQRSHNESVMKSVRAKVAWQNKVMRAAANGEVVSNRMPFWLENIDNKYSVKEDQAALIVKCFELYKSGFSTGEIVKRIDDPKWQMVRVSRLIRDRRLLGEHKRYNDEVISNVYPKIIDDELFLTANRMMDTVMTDKKKPAEDLLLEPSVVKQIFSLSESGLGSGAIVKRLPKGWSTVNVLRVLRDKKVVEMKIIDNLTFERVNAKLTANGVANRIRKDVTIAQDDYITNLFPRILKCGCCGGNIAIHYNHVRTKYVICRTREEKKRCDAKSIQYTRIEKNILSVVMNVDFGKVLSEDSTKKDKVLEALKVELSALRKEENTYQLKIDERKKSGKKTSLPLMEGLTDVQDRIEETFEQISRSSTINELPTFDYDINCLLDPMNVELRAKVRKELKHVISKVTYQVIDKYILVRLHYYTDVLSHVLIIDNKRGGGDIISQIAIYTKDSTTIYTTPSFALTTSNNEIPRIHFMGNVPLNQIDYELLLISADYVECSDSVTSWMRHNHNFLFANN

SEQ ID NO: 146 - protein, 647 aa, Unknown
  Description of Unknown: Integrase B147 sequence
  SM00857,IPR036162,PF13408,IPR025827,G3DSA:3.40.50.1390, IPR006119,PF07508,SSF53041,IPR011109,PTHR30461, Coil,cd00338,PF00239
MKAAFLIRCSTKYQDLDRQVSDLTRLAKSMGYEYDLDNLVYGEKITGKDDVTKRNRASIDRLLKGAKEQKFDVVLVSEVSRMSRDPASGRIYVRLLINMEIPVYFRDIDIWTIDPITKKKVPNAEITIGGAFDAAWKYLKSMKTQIASARRNYLDKGAIALGTVKFGYRWNGGKDKHTKTKWVADEVESLIVPEIFTEYLREGSTLKSTALAISARFGDKTTYKFTVASIHHILTYDSYATGVKPINLADPDREEVEVFDVEIPKLIPMELYEAVREKLSNNRVKGEPYPSQATHLLSKLIKCPCCGYSLTPRAKGSDSTPDGRGANGAYRIINGKKAMSWVCMSGVNNSTKCPNRMSIANEKLEPIIWELVKNELIAFADVNNEDRLAKIEDLEGQISLQNSNIVNFQKELDKLAKRQTAAFQVATSAAMMAGDNEDMKAMAMEEFSKTSKAISKEKATYEGSIAAAKKEIERLTILRDYYSSPTLPKDIIEKAEANPTEQRNLVKQLITKIVPHKITTFRKQRREKGKESRKAYNATDIITVKNGAVLVEVHAINGVYYIFYNANGKEAVRYAYYLSADVVYTGSEHATDYIKGLGEELFYIVSPYLYFDDERANDEDAVININEFVEIAKAQNQVLEYQYKPEA

SEQ ID NO: 147 - protein, 646 aa, Unknown
  Description of Unknown: Integrase B148 sequence
  PTHR30461:SF3,IPR036162,PS51737,IPR011109,PTHR30461,PF00239 ,G3DSA:1.10.10.2600,IPR006119,PF14287,SSF53041,IPR025378,SM00857 ,IPR025827,cd03770,IPR038109,PS51736,mobidb-lite,PF13408, G3DSA:3.40.50.1390,PF07508,Coil
MAKSNQGKITALYERLSRDDELQGESNSILNQKKYLEDYARKNGFNNIQHFTDDGYSGTNFNRPGFQSMIAEIEAGHIATVIVKDMSRFGRNYLEVGFYTEIQFPSKGVRFIAINNNVDSANPTDNDFTPFLNIMNEWYAKDTSNKIRAVFKSRMQDGKRCSGSIPYGYKRVPGDKQTLHVDEEAASVVRRIFDMAASGASLAQIGQTLSDEKVLIPSAYEERYHPESARHHSYHDPYRWNTTTLTYILDRQEYLGHTVLCKSIRENFKLKKRRAATPEERIVFKNTHEAIIDQETWDKAQRLRKRNPKKLPSGTYSHRLAGMVFCADCGSRMSFSSPESKHRDSDVVYDSDSSWQCSKYRNMYVSCTSHFIKTSTIEATILNAIKAMTKEIIENEDEFAEQLQAAWENQNTQVSSESKKELHSVQKRMDELDALIRSLYENSVLGKIPERQYQRLMAQYDEEQAVCEARIAELKKELDNAETTKVDLKRFIRLIRKYKDCETLTDEMLYELVEKVVIHSASGGRTIYRQQQIDIYFNFIGDTFPSQIEISHGDKKNLTEQQLAKRKKYQKTSGENRKKKRAALREAAKTDPQAAAEYEALLQKGRERCRKYAQNKKLAQQEPADTVPIQFEPSFETPEEMKGESA

SEQ ID NO: 148 - protein, 646 aa, Unknown
  Description of Unknown: Integrase B149 sequence
  PTHR30461:SF3,cd00338,SM00857,IPR006118,G3DSA:1.10.10.2600, IPR036162,PS51737,G3DSA:3.40.50.1390,IPR006119,IPR038109, PF07508,IPR011109,SSF53041,PTHR30461,PS00397, PS51736,Coil,PF00239
MDSKNQEEKRIAGIYIRVSTEDQAREGFSLGEQEEKLKQLCAFKEYQVYKVYQDRGISAKDMEHRPGFQEMMDDMRKGKINYIVAYKLDRVTRSVRDLELLIAELEKYDCYLICERDDVNTSTANGRFFVRMLTVLSQLEIEVVSERTKFGMSGAIKAGHLPGTCPLGYYRDTDKVVKLDPNTKGIVRRIFNMYLEGKSYYQISCILDEEKVLYPEHNKWTEAAVRTIINNRIYVGDYVRNKTSKDASKEEVYPDVVAPIITRAEWEEVQIQKEKNMQSFSRDRVYIFFQKLICPKCGKLMLCKGAGGKKKKYMYYNCGDCHLYFREDKIEDVLLNFILSLVEYDEVVKKYFYPILAEKEKVNTENIDKEIAELEKQRNRIKKAFMSGIVEMEDFAEDYKSIENKLNKLEQDKMKNMEIDTEKFSLMKIMADRDFEIESRLNSDSFVEDIKTEWNAKTKLEKQEFISKFIESMVLEKDEENDSFKIIKINFRSRYLDELKKLNKADCIDLAKPTEDMQGISVIKSTPRITKSELNEYIENLKEHYDVKYYEDVYDWTRSYIQEDTMITMPREKGNEKLMRAVFVDNNKNFPIKDSKGKVRGKLGAVSYREKGTTDKNELDDYYEAISDLVLYKKEQTEDEEKSSKD

SEQ ID NO: 149 - protein, 644 aa, Unknown
  Description of Unknown: Integrase B150 sequence
  SM00857,IPR006118,IPR036162,PF13408,IPR025827, G3DSA:3.40.50.1390,PS00398,IPR006119,PF07508,SSF53041, IPR011109,PF00239,PTHR30461,PS51736,Coil, cd00338
MLRPICYERVSSIQQIEGGGGLDDQRSALEGYLDRNSDKFSNDRIFIQDRGVSAFKNSNISSESQLGIFLQDVQNRKYGEGDALIVMSLDRISRRSSWAEDTIRFIVNSGIEVHDISASTVLRKDNPHSKLIMELIQMRSHNESLMKSVRAKAAWDRKIIEAVQNGTVISNKMPMWLKNVDNRYQVIQEKADLIIRCFEWYRDGFSTGEIVKRIADPKWQMVTVSRLVRDRRLLGEHKRYNDEIIHNVYPKVIDDDLFLTANRMMDRVMLEKNKPAEDLLLESDVVQEIFQLYESGLGSGAIVKRLPKGWSTVNVLRVLRDKNVVTQKIIDNLTFERVNQKLSMNGVANRIRKDITIAQDDYITNLFPKILKCGCCGGNIAIHYNHVRTKYVICRNREERKICDAKSIQYIRIEKNILKCVKNVDFQKLMIESTGSETSVLDGLREELSSLRREESSYNDKINERKLAGKRVGIHLNDGLTEVQDRIEEIEKEIISAQTVREIPKFDFDMDEVLDPMNIELRAKVRKQLRLVLKAVKYWMFDKRIFIQLEYFNDVLSHMLVIDNKRGGGEVMYEMSIEEKKGERIYTVHENGYAVFIASVTIGTELWSLALSRTRTIDSVGNYLSLLAREGFEIFVNEDQIDWF

SEQ ID NO: 150 - protein, 644 aa, Unknown
  Description of Unknown: Integrase B151 sequence
  SM00857,IPR006118,IPR036162,PF13408,IPR025827, G3DSA:3.40.50.1390,PS00398,IPR006119,PF07508,SSF53041, IPR011109,PF00239,PTHR30461,PS51736,Coil, cd00338
MLRPICYERVSSIQQIEGGGGLDDQRSALEGYLDRNSDKFSNDRIFIQDRGVSAFKNSNISSESQLGIFLQDVQNRKYGEGDALIVMSLDRISRRSSWAEDTIRFIVNSGIEVHDISASTVLRKDDPHSKLIMELIQMRSHNESLMKSVRAKAAWDRKIIEAVQNGTVISNKMPMWLKNVDNRYQVIQEKADLIIRCFEWYRDGFSTGEIVKRIADPKWQMVTVSRLVRDRRLLGEHKRYNDEIIHNVYPKVIDDDLFLTANRMMDRVMLEKNKPAEDLLLESDVVQEIFQLYESGLGSGAIVKRLPKGWSTVNVLRVLRDKNVVTQKIIDNLTFERVNQKLSMNGVANRIRKDITIAQDDYITNLFPKILKCGYCGGNIAIHYNHVRTKYVICRNREERKICDAKSIQYIRIEKNILKCVKNVDFQKLMIESTGSETSVLDGLREELSSLRREESSYNDKINERKLAGKRVGIHLNDGLTEVQDRIEEIEKEIISAQTVREIPKFDFDMDEVLDPMNIELRAKVRKQLRLVLKAVKYWMFDKRIFIQLEYFNDVLSHMLVIDNKRGGGEVMYEMSIEEKKGERIYTVHENGYVVFIASVTIGTELWSLALSRTRTIDSVGNYLSLLAREGFEIFVNEDQIDWF

SEQ ID NO: 151 - protein, 643 aa, Unknown
  Description of Unknown: Integrase B152 sequence
  PTHR30461:SF3,SM00857,G3DSA:1.10.10.2600,IPR036162,PS51737, G3DSA:3.40.50.1390,IPR006119,IPR038109,PF07508,SSF53041, IPR011109,PTHR30461,Coil,PS51736,cd00338, PF00239
MVDEKKKCGLYMRVSTEDQAREGFSLPEQKERLEAYCKFKGYEIVDYYEDAGVSAKTGNYRAEFERLKDDIKSKKINTIISLKLDRFTRSIYDWEELITFLDENEAYIDCVNDDINTTTANGKMISRLLVSVSQNEIERTSERTKIGLAGAIKQGHIPHIAPLGYKHENKTLVIDYSTKDIVVRIFELYFNGYSYQKISTLFNEEKVLGKDNWRDSTIQNILQNEIYKGDFVHGKRTKSPTYYENVVEPIISKEMWEDCQVQKKKNSRSYQRTLTYLYLQKIKCPKCNRILGGKATTKKNGKPYFYYYCNDCKITIKENAINEYFNQFINELVEYDSVVNQFFLPMIRQRFDEPKEKLQKEIDEQNAKLERIRKAYINGAFDLDVYTSETAVIEKAINNLKEELEATDCVEELRFTPKDILLKRDIDFLNKMIMNKQYKERTKTWKDYTREEQAELIMKYVDEIKLTLIGSEVIVKEINFRDSICKPCQELYDKGYIDTTKPVLLGNVLGNVRFSNYLPEEEFGEIIMRLQQYYDVHYTEAIYYLQKQVFYFNFVEDNSAIVRVFPLEDYYKLDPNNKMEEYRFGIIYINGDNYDDFEITEADNIEPFFNAIPDDNETTIKFENGERSEIVVKPVKFSEEDTK

SEQ ID NO: 152 - protein, 642 aa, Unknown
  Description of Unknown: Integrase B153 sequence
  SM00857,G3DSA:1.10.10.2600,IPR036162,PS51736,PS51737, G3DSA:3.40.50.1390,IPR006119,IPR038109,PF07508,IPR011109, SSF53041,PTHR30461,mobidb-lite,cd00338,PF00239
MSNSTKKAAEQAEREKVKRRYANRREPDIIYPAKKQVDFYDDAVHQRVAVYVRVSTDNLGQETSYELQKNYYEEFVLKHPNWALVKIYADKGISGTSTRHRDELNQMLTDCRSGKIDLIITKSVSRLARNTVDCITMVRNLAELRNPVGVFFESECIFSLNEDTSMPLSFLASIAENESRIRSRSMEVSLAQRLNGGLPLTPKLLGYSHNAEGKLVINPDEAPTVRLIFYMYLSGYSSSHIARTLEELGKTTYLGNTKWTSGAVIQVLRNERHCGDVLTRKTWTPDVISHKSKKNRGERQQSLYKDDHEAIISRDDFIAVQHMINNAKYGGKSILPELRVIGSGLLKGYVTISPKWAGFKAMDYLQASMSVYKDEDEYYGQSQEADATFEVSAGDFDLRGFEVTNAALFDTNKRPYVVLQNKKIKFSTDCVRRFGKDNKVELLIHPGLRKLAVRRAAKDCRHFVQWSRSDDGKYYTKDIPCSAFGDTLFELLDWGTEYKFKAYGRYIEGDGESVFLFDLSEPEIFIQSYLMTGTDTPAGGRGDLSPLSISGKRIRAVPKKLADRFGSDFYSHRLASSSMEPQSEDAWKLWLEGQLFETGEKLQVTGFDEMHRFIIEQLSSAKPKEEMPANEREERSTCLSES

SEQ ID NO: 153 - protein, 642 aa, Unknown
  Description of Unknown: Integrase B154 sequence
  PTHR30461:SF3,SM00857,G3DSA:1.10.10.2600,IPR036162,PS51737, G3DSA:3.40.50.1390,IPR006119,IPR038109,PF07508,IPR011109, SSF53041,PTHR30461,Coil,PS51736,cd00338,PF00239
MKDEKKKCGLYMRVSTEDQAREGFSLPEQKERLESFCKFKGYEIIDYYQDAGISAKTGNHRPEFERLKDDIKTKRINTIVALKLDRITRSIYDWENLMTFLDENDAYLDCVNDEINTTSANGKMISRLLMSVSQNEIERTSERTKVGLAGAIKCGHIPHIAPLGYKHEDKKLVIDYATKDVIVRIFDLYYNGYSYQKISNLFNEEKVLGKDNWRDSTIQNILENEIYKGDFIHGKRTKNPTYYEDVVEPIISKEMWADCQVQKKKNSRSYQRTLTYLYLQKLKCPKCNRILGGKATTKKNGKTYFYYYCNDCKIQFKENVINEYFEQFIDELTEYDSVVNQFFLPMIKQKFDEPKEQLEKEINNQKSKLERIKKAYINGAFELKEYNEEKHIVEKIIVELEEKLNITDCTEELKFTPKDILLKRDIDFINKIKLDKEYQEKTKTWKDYTREEKADLIMRYVEDIELALVGNEVILKQINFRDSICKPCQKLYDKGYIDITKPMILGNVLGSVRFSNYLPDEEVCEIIMRLQQYYDVHFTEATYYLQKQMFYFNFVEDNSAIIRVFPLEDYYKLDPNNKMEKYRFGILYINEEDKFEMQDINTAFDYIPDESNDSVIYMKEPVPISVGVKPVKFCEDNTEEKN

SEQ ID NO: 154 - protein, 642 aa, Unknown
  Description of Unknown: Integrase B155 sequence
  SM00857,G3DSA:1.10.10.2600,IPR036162,PS51736,PS51737, G3DSA:3.40.50.1390,IPR006119,IPR038109,PF07508,SSF53041, IPR011109,PTHR30461,mobidb-lite,cd00338,PF00239
MSNSTKKAAEQAEREKVKKRYANRREPDIIYPAKKQVDFYDDAVHQRVAVYVRVSTDNLGQETSYELQKNYYEEFVLKHPNWALVKIYADKGISGTSTKHRDELNQMLTDCRAGKIDLIITKSVSRLARNTVDCITMVRNLAELRNPVGVFFESECIFSLNEDTSMPLSFLASIAENESRIRSRSMEVSLAQRLNGGLPLTPKLLGYSHNAEGKLVINPDEAPTVRLIFYMYLSGYSSSHIARTLEELGKTTYLGNTKWTSNAVIQVLRNERHCGDVLTRKTWTPDVISHKSKKNRGERQQSLYKDDHEAIVSRDDFIAVQHMINNAKYGGKSILPELRVIGSGLLKGYVTISPKWAGFKAMDYLQASMSVYADEDAYYGQPQGTETTFEVTAGDFDLRGFEVTNAALFDSNKRPYVLLQNKKIKFSTDCVRRFGKDNKVELLIHPGMRRLAVRRAAKDCRHFVQWSRSVDGKYYTKDIPCSAFGDTLFELLDWGTEYKFKAYGRHIESDGESVFLFDLSEPEIFIQSYLMTGTDIPNGEHGGLSPLSISGKRIRAVPKKLADRFGSDFYSHRLASSAMEPQSEDAWKLWLEGQLFETGEKLQVTRFDEMQRFIIEQLSSAKPKEGMSVNEREKRDPLLSES

SEQ ID NO: 155 - protein, 641 aa, Unknown
  Description of Unknown: Integrase B156 sequence
  PTHR30461:SF3,SM00857,IPR006118,G3DSA:1.10.10.2600,IPR036162, PS51737,PS00397,G3DSA:3.40.50.1390,IPR006119,IPR038109,PF07508, IPR011109,SSF53041,PTHR30461,Coil,PS51736, cd00338,PF00239
MNNEKKKCGLYLRVSTDDQAREGFSLPEQKERLEMFCKLKNYEIIDYYEDAGISAKTGNNRPEFERLKRDIQAKRINTIVSLKLDRVTRSIYDWENLMTFLDENDAFIDCVNDEVNTTNANGKMISRLLMSVSQNEIERTSERTKIGLAGAIKQGHIPHVAPLGYKHEDKKLVIDYATKDIVVRIYDLYYNGNSYQTISNIFNEEQVLGKTNWRDSTIVTILENEIYKGDFVHGKRTKNPIYYENVVEPIVSKEMWEDCQVQKKKNSRSYKRTLTYLYLQKLKCPKCNRILGGKATTKKNGKAYFYYYCNDCKIEFKENIVTEYFSQFIDELTEYDSVVNQFFLPMIKQKFDEPKEQLEKEIKNQKAKLERITTAYINGSFELDEYNKRKKIVENAIKELESELQATDCAEEIRFTPKDILLKRDIDFLNKLKLNKEYHERTKTWKDYTREEQAELIMKYVDDIELDMLGEVIAVKQINFRESICKPCQELYDNGYIDTLKPMILGNVLGNVRFSNYLPEEEYGEIIMRLRQYYDVRYMEATYYVKDQVFYFDFAEDNSAIVRVFPLEDYYKLDPDNKMETYQFGIIYIDEEDRFEMQDINTAFDYIPDESNDSIIYMKDPTPISIGVKPVKFSEEDTEEK

SEQ ID NO: 156 - protein, 641 aa, Unknown
  Description of Unknown: Integrase B157 sequence
  PTHR30461:SF3,SM00857,IPR006118,G3DSA:1.10.10.2600,IPR036162, PS51737,G3DSA:3.40.50.1390,IPR006119,IPR038109,PF07508, SSF53041,IPR011109,PF00239,PTHR30461,PS00397, PS51736,Coil,cd00338
MESKVKNLCGLYLRVSTEDQAREGFSLPEQKERLETFCKFKSYEIVDYYEDAGISAKTGNYRPEFERLKEDIKSKRINTIIALKLDRITRSIFDWEKLMTFLDENDAYIDCANDEVNTTNANGKMVSRLLMSVSQNEIERTSERTKVGLAGAIKQGHLPSQAPLGYKHENKKLVIDYSTKDVVIRIFELYYNGNSYQIISNILNEEQVLGKTNWRDSTITAILENEVYKGDFVHGKRTKHPTYYENVVEPLVSKEMWEDCQAQKKKNSRAYQRTLTYLFLQKIRCPRCNNLMGGKATKKKNGNVYYYYYCNDCKFNLKENVIEEYFENFINEIVEYDSVVNQFFLPMIKQKFDELKELLEKELDKQNAKLDRIRKAYISGAFDLEEYNAEKKIVDEAISKIQSELNTTNITEELKFTPQDILLKRDIDFINKVKLKDEYKERTKTWKDYTREEKSDLIMKYVDDITLLEKNKVMIVDEVRFRESICRPCNELVQAGYIDIKTPTLFSNLVGQLRFSNYLPEEEVGKHIMRLRQYYDVGFEEAIYYVEDRVFYFNFLQDNRAIVRIFPMEDYCKIDPDIKMKEYRYGIIYIRETDEFQMQDIDSAFDYIPDETNDSVIYMRETIPIEIGVKPVKKELLSIEK

SEQ ID NO: 157 - protein, 640 aa, Unknown
  Description of Unknown: Integrase B158 sequence
  PTHR30461:SF3,IPR012347,IPR036162,PS51737,IPR011109, PTHR30461,IPR009078,PF00239,G3DSA:1.10.10.2600,IPR006119, SSF53041,G3DSA:1.20.1260.10,cd00338,SM00857,IPR025827, IPR038109,PF05067,PS51736,SSF47240,PF13408,IPR007760,
  CONT. FROM ABOVE: G3DSA:3.40.50.1390,PF07508,Coil
MYCIYLRKSRADMEAEARGEGETLARHKRILTELAQRRDLEIGEIYQEVVSGESLAARAEAQRMLSDVQAGMWEGVLVMEIERLARGDTIDQGIVMNTIKYSGTKIITPTKTYDPNNEFDEEYVEFSLFMSRREYKTIARRMNAGRIASVKEGNYIGSRPPYGYDKVKDDKSFTLAPNPAESDIVRSIFSWYVHGCINENGELERIGISKIARKLNDMHAPTRKGGAWVTATIRDMIKNPVYIGKIRWNWRKGVTQFKDGKKTVARPHSPEDSWLLVDGRHVPLVDEDTWNAAQSIIADNRPATVPGNREMQNPLAGLMVCGKCGRKMVRRPYSNREQPPSLICSCNACDNVSAALHLVEERIIEALAFWLKNNAIKYESAKPAATDEEQAAISILNAEITELEKQRKNLFGFLERGIYSEAEFRERRADIDAQITALREDVKTLGDKIILKETYNEAIRNEVPKIRTVVETYSSLSSARAKNDMLKEVLSKVVYTRDKGGRWSGLCDNFVLDLYHKIPTPSPELLQRWDNHIQVVGTDEIAHWEMIGTMIHQCLRDATLKDIEAAGLMGYYTMHSKGVYPADPNGVPFTAAYLQCTGDPIADITEDMAADAAMSKRQHFAQKKKNCPAWQCFFLRCINK

SEQ ID NO: 158 - protein, 640 aa, Unknown
  Description of Unknown: Integrase B159 sequence
  PTHR30461:SF3,IPR036162,PS51737,IPR011109,PTHR30461, PF00239,G3DSA:1.10.10.2600,IPR006119,SSF53041,cd00338, SM00857,IPR025827,IPR038109,mobidb-lite,PS51736, PF13408,G3DSA:3.40.50.1390,G3DSA:3.40.50.300,PF07508,Coil
MKKRINTNSAARAVIYARYSSANQRDCSIEQQVEKCRELAAREGVTVIEIYADRAVSGKTDRRPNFQRMMKDASLRQFDVVLAWKSNRMGRNMLQAMMNEEQLRSNGIRTIYAEEDFDDTAAGRFALRNMMNVNQFYSENMAEDISRGLMDNASKCMSNGSLPLGYKTGKDQKVVLDEAEAAIVQEIFTRVSCYEPFIDIARDLNRRGIKTKKGAEWGRSSFHTICRNERYRGIYIYRDIRVEGGMPRIVSDELFYKVQEVLKVKKNPQGRRKRSGYEEYLLTGKLYCGHCGSTMTGIAGTSKTGAMHYYYTCQKRRTDHSCDKKAVRRDQIEKAVAIAIQQQLLTDENIQMMADETMAYNARTEIKYRLQSLQQQLYSNETSTANIMKAIEMGIITDTTKARLLALEQEHGQLLAKIDTAKAEMVPINREDFVSLLDIYRTGDVNNKKYLAALFDTFLVRVDLYDDHFKITFDPTGGKMPVDIPIGAEDSPESPGDSPESSDFEASPQDAEKFVLALHNRTKECLTRKCRAFFCCSILRRHDLVQRRRYSNRAAARSAVRNATVRRSFQCPDANILPGQIKNNMNIRICGRADTTLSTIIIGDGRAAEQIPHDAQGRFLMEDGTVFQAYYFNDDTISKW

SEQ ID NO: 159 - protein, 640 aa, Unknown
  Description of Unknown: Integrase B160 sequence
  PTHR30461:SF3,cd00338,SM00857,G3DSA:1.10.10.2600,IPR036162, PS51737,G3DSA:3.40.50.1390,IPR006119,IPR038109,PF07508, SSF53041,IPR011109,PTHR30461,PS51736,Coil, PF00239
MGILNNDIKVRAGLYMRVSTEDQAREGFSLPEQKERLEAYCKLNNFEIVDYYEDAGISAKKGNYRPEWERLKEDIKSKKINTMIALKQDRITRSIYDWENILSFLEENEAYLDFVYDDINTTTSNGRMISRIMMSVSQNEIERTSERTKVGLAGAIKQGHIPHQAPIGYKHVDKMLVPDESTKDIVIRIFNLYHNGLSYQKIANLFKEEKVLGKENWRDNTILHIIENEIYKGDFIHGKRTKNPTYYENVVEPIISKELWEECQHQKRNNSRAYSRTLTYIFLQKCLCPKCGRILGGKACKKKGNEYFYYYCRDCKLNIKESEIERGFKEVVDQLTEYDSIVNQFFVPMVIKNFDEPRDKIYKEINTQKQRLERAKLAYVDGAFTLDDYKENAKIIEDTIKSLEEKINTADKFEVFNYSAKDILISRDIAFINSKLHPDEYQERIKTWNKRTREEKATLVMNYVDTIELELVGKECFVKNINFRESIAKPCNELYDKGYIDRPTPAVFGNVVGELRFSNYLPEEEVVEIVMRLKNFYNVSYTEATYYVKNQVFFFNFIKDNSAIVRVFPLEDYYKKDPEVKMEEYRFGIIYIKEDNIVVTKNKDELDKLFNYIPTETSFTPLRDLKDVPSKPIKMELIKK

SEQ ID NO: 160 - protein, 640 aa, Unknown
  Description of Unknown: Integrase B161 sequence
  PTHR30461:SF3,IPR036162,PS51737,IPR011109,PTHR30461, PF00239,G3DSA:1.10.10.2600,IPR006119,SSF53041,cd00338, SM00857,IPR025827,IPR038109,PS51736,mobidb-lite, PF13408,G3DSA:3.40.50.1390,PF07508,Coil
MYEDIKTACLYVRFSSHNQTEQSIEGQTRVCRDFCKRHNIRIVEIYADRATSASKDIEKRVQFLKMIKDSEKGLFDAVIVYKLDRFARSRYDSATYKYRLKRNGVQLISATENISNDPEGIILESVLEGMAEFYSAELSQKINRGMRESAYKHNSIGGAIPLGYKIEDKKLVIDPKTAPIVKEAFEKYADGETVAEICRQFNARGYKTSKGTAFGKSSFTKIFRNERYIGVYSFHDYRAEDAIPAIIDKDLWDRVQLRVGKIKNAPARNKAKVVYLLSGKIFCGHCGSKMNGNCNAGNYYYYQCYGKKNGNVDCKKKNIRKEFIERLVAQDALSLLTDEYIEQIATIACEKNQHEIELDSALPTIRDRIHQVDLSLNNLLKAIESGSAPDMLVKRMGELEKEKKDLQVQAKKESEDIVELDKAQVIYWLEQFRGGSIEDEEFCRMLIDLFVNSVTVWDEDDNTYKVTVAYNLTSLPTKTYRLNKGGTLSDFTSNAPASAPPEPHKETVSLRHSQPIFEKFLQPQHKLIHHDGRHRKHEDGRHHEVHVEHLRPVDDQIAETGFGDQKFAHDDTDPRQADVHAQRIEERGVVGRDDQPPQDLMPGRTERLHQADLLPVRGQEADMHIQDRDKDRDCDRHGDD

SEQ ID NO: 161 - protein, 640 aa, Unknown
  Description of Unknown: Integrase B162 sequence
  PTHR30461:SF3,IPR036162,PS51737,IPR011109,PTHR30461, PF00239,G3DSA:1.10.10.2600,IPR006119,PF14287,SSF53041, IPR025378,SM00857,IPR025827,cd03770,IPR038109, PS51736,PF13408,G3DSA:3.40.50.1390,PF07508,Coil
MNNRQSQEKITAIYCRLSRDDDLAGDSNSIIHQKDMLTRYARERNFPNVSVYSDDGWSGTNFDRPDWKRLIADIEAGKVGIVLVKDLSRVGRDYLRVGFYTEVTFPQNGVRFIAVNNGVDSANQSENDFAPFLNIMNDFYARDTSKKVSAVYRAKGNKGEHTGNHPIYGYLKDPENKQRWIIDEEAAAVVRRIFRMVIDGKGVYQIADILSEEKVLCPSAYLAAKGVGNRRNNKFEDPYRWWGTTVSYILARVEYMGHTVNFKTFKTCYRDKHRKQAPKEDWKIFENTHEAIIDKTTWETAQKLRRTIRRGDRNREPNPLTGLLYCGECGAKMYNERSDGDAYHKTPKDNYVCASYRKKTTSCTIHFIRSEIVRDLILDALRNVATYARANKEDFEQLVMQTTSDARKRSLQSGRTELDRIMRRTNELDTLLQKLYEDYALGRLPEKRHAKLSAQYEAEQAQLEQRSAELMEQMNAEQEESVNVDRFMELVDRYTDFTELTTPMLNEFIDKVIVYERRKINRYQYDQQIEIYFNFIGKVTLPEEETEASPEAPKTLHVASNSSFAPIGDYLSAQGEEAIALPFSKVEELTGKPLCKSAYKYASYWYPAQDRPLSNTIYNAGYDVDRVDLAAGIVYLTKAA

SEQ ID NO: 162 - protein, 639 aa, Unknown
  Description of Unknown: Integrase B163 sequence
  SM00857,G3DSA:1.10.10.2600,IPR036162,PF13408,IPR025827, PS51737,G3DSA:3.40.50.1390,PS51736,IPR006119,IPR038109, PF07508,IPR011109,SSF53041,PTHR30461,Coil, mobidb-lite,cd00338,PF00239
MSPRKKLADQQERYSGTAVIYARYSSHNQRDVSIEQQVKQCQEFAQQNSFQIIEIYADRAISGKTDKRPNFQRMMRDAEKKKFKYVIAWKSNRMGRNMLQAMMNEAKLNDLGIRVLYAEEDFDDTAAGRFALRSMMNVNQFYSENMAEDIKRGLYDNAAKCKIANGGLPLGYKKGDDLRYALDPPNDEIVREIFSRTACGDSFADIAADLNARGIKTSRGKAWGKNSFHALLTNERYTGVYIYGDIRIEGGVPQIVDKGLFFRVQEVLKTKKNPQGRHRINGDYLLTGKLFCGHCKSPMAGISGTGKNGKLHHYYICQKRRMEKSCDKANIRRDKIEHEVAVAIRNYIMRDDVLEWIADSAMTFAKEYRNQTCIGSLETQLAENKQATKNLLTAIEHGIITSTTKDRLLELEREQAILVSRLDEEQASLLHYSRDDIISAMSLYKNGNIEDKAFQAKLFDTFLIAVYLYDDHLKIEFSVTGKKTFVNLPLDTSVIDNIESFAAEECSFSLSLGPPKKCPLWIPSAEMPMVSGFSGGGPPQISQLKQKIQTGGSQKLAGSEPQNSIEIHSVLFEMRFFKKGAVFIFRKRALKLQRKENHCYAGDKCQLLLEDIRRQIERNVPNPRERMRQSDQNEINMSL

SEQ ID NO: 163 - protein, 639 aa, Unknown
  Description of Unknown: Integrase B164 sequence
  PTHR30461:SF3,IPR036162,PS51737,IPR011109,PTHR30461, SSF82771,PS50164,PF00239,G3DSA:1.10.10.2600,IPR006119, SSF53041,cd00338,PF01541,SM00857,IPR025827, IPR038109,PS51736,PF13408,G3DSA:3.40.50.1390,IPR035901,PF07508,
  CONT. FROM ABOVE: IPR000305,cd10456,G3DSA:3.40.1440.10,Coil
MKKFPIDLSCLTEEEISQFQEDPYTLYNGDQDVTLYLRYSSTGQSDQSIEGQLRDCRAFCKANHYRIVAIYVDRATTARKDVEKRVHLMEMIADSAKQNWEYVIVWKLDRFARNRNDSAIMKMRLRKNGVKVLSATEHLTDSPESIILESVLEGMAEFFSAELSQKVTRGMRESALKCHSVGGHIPLGYKVENHKLVVDPDTAHIVQEAFSLYANGESVAAICRKFNSAGYKTAKNTEFNRSSFKAMFRNTRYIGTYTYKDIVIENGIPAIIDKELFETVQRRLSKTATAPARGKAKVDYLLSGKLFCGHCGASMNGESGAGRHGKVYHYYSCYTKKRKLGCDKRPLKKDYIEGIVARDALNLLTDQLIDEIADMAIRQSEQDLINDTHIPQLTAQLSEVEKSITNITAAIEKGIASETLMNRLVQLEHEKKTLNKELKAEEKFVYRIDRDQIVFWLSQFKYGNIEDEDFRRRLIDLLVNSVTVWDEPDGYKITTAYNLTSCKTKTFRVEKNPAAEEATGFDFGESECAIPPQAIHCGGFFIICWRVECAVSWWVYVLECRDGTLYTGCTDDIPRRLEAHNAGRGAKYTRGRGPVTLRYREETLDKPAALRREAAIKRLSRTGKQALIDVYNKENKDEI

SEQ ID NO: 164 - protein, 638 aa, Unknown
  Description of Unknown: Integrase B165 sequence
  PTHR30461:SF3,IPR036162,PS51737,IPR011109,PTHR30461, PF00239,G3DSA:1.10.10.2600,IPR006119,PF14287,SSF53041, IPR025378,SM00857,IPR025827,cd03770,IPR038109, PF13408,G3DSA:3.40.50.1390,PF07508,Coil
MALPYVVHNLNCKENYVDAGGMHMNEYNKITALYSRLSVGDEDRDGGESNSIVNQKAFLERYAQQQRLTNIRHYIDDDESGRFFDRSAYSRMMEDVENGKIGVCIMKDLTRWGRDYLQVGNAMEVFRRNNVRFIAVNNGIDSDNPDTLEFAPFINIMSEWYAKDISKKVKTGIRTKGASGKPIATEAPYGYMKDPNNKDFWIIDEEAAEVVRLIFRLFIGGKNRNQIAVYLKNEQILTPTFYLKQHDRGTAKSRPLNEENRYKWNKATLTKILTRQEYCGDVVNFKTTKHFRDKRNHYVDKSEWQITENVHEPIIDRADFETVQRILENAPVRRPNGDGEIHPLSGLMFCKDCGAKMHIRIDYRNGGKRHVAFCSEYHKGKAKNPKCNSPHIIDADLVMQTIADVLKKVAEYSISNREEFEALVRKNLDMQQTDKSKKQQKRIPQITTRLEQIDKVLNKLYEDNALGAIPQDRYEQMSQKYSEEYYTLKAELAELKEQLSAFEDAGGWAHKFLKLIERYAAFTDLTPAILNEFISRIEVHERDKKRAKQAVQHIGIYFSYIGKFENELTQLAEPTEEEIRQMREKIEEAQKEKSRAYHRNYSKEYRAKNLEKRREYERIKAREYRAKRKAQAAALPVS

SEQ ID NO: 165 - protein, 638 aa, Unknown
  Description of Unknown: Integrase B166 sequence
  PTHR30461:SF3,IPR036162,PS51737,IPR011109,PTHR30461, PF00239,G3DSA:1.10.10.2600,IPR006119,PF14287,SSF53041, IPR025378,SM00857,IPR025827,cd03770,IPR038109, PF13408,G3DSA:3.40.50.1390,PF07508,Coil
MALLYVVHNLNCKENYVDAGGMHMNEYNKITALYSRLSVGDEDRDGGESNSIVNQKAFLERYAQQQRLTNIRHYIDDDESGRFFDRSAYSRMMEDVENGKIGVCIMKDLTRWGRDYLQVGNAMEVFRRNNVRFIAVNNGIDSDNPDTLEFAPFINIMSEWYVKDISKKVKTGIRTKGASGKPIATEAPYGYMKDPNNKDFWIIDEEAAEVVRLIFRLFIGGKNRNQIAVYLKNEQILTPTFYLKQHDRGTAKSRPLNEENRYKWNKATLTKILTRQEYCGDVVNFKTTKHFRDKRNHYVDKSEWQITENVHEPIIDRADFETVQRILENAPVRRPNGDGEIHPLSGLMFCKDCGAKMHIRIDYRNGGKRHVAFCSEYHKGKAKNPKCNSPHIIDADLVMQTIADVLKKVAEYSISNREEFEALVRKNLDMQQTDKSKKQQKRIPQITTRLEQIDKVLNKLYEDNALGAIPQDRYEQMSQKYSEEYYTLKAELAELKEQLSAFEDAGGWAHKFLKLIERYAAFTDLTPAILNEFISRIEVHERDKKRAKQAVQHIGIYFSYIGKFENELTQLAEPTEEEIRQMREKIEEAQKEKSRAYHRNYSKEYRAKNLEKRREYERIKAREYRAKRKAQAAALPVS

SEQ ID NO: 166 - protein, 637 aa, Unknown
  Description of Unknown: Integrase B167 sequence
  PTHR30461:SF3,cd00338,SM00857,IPR006118,G3DSA:1.10.10.2600, IPR036162,PS51737,G3DSA:3.40.50.1390,IPR006119,IPR038109, PF07508,IPR011109,SSF53041,PTHR30461,PS00397, PS51736,Coil,PF00239
MKNKKKGNDLLMSEEKKIAGIYIRVSTEDQAREGFSLPEQEKRLRAMCEFKGYEIYKIYKDAGISAKTGNHRPAFEELKEDIRKKKCNTIVVLKLDRLTRSVYDMEDIMKFLDEKNAYLDCANDDINTTNANGRMVARLLTTVSQNEIERTSERTKIGLAGAIKVGNIPNKAPFGYKRNNKKLVPDPLTKDQVIRIFNLYYEGNSYQTIANIYNDEKVFGKTNWCDSTILKILTNEIYKGDFVHGRKTNNPTYYSNVVEPLVSKELWEECQVQKRKNSRNYKRDKEYLFLQKLRCPKCNRILGGNATRKKNGKVYYYYQCNNCKITIKEPKIEETIKTILGDILEYDNVVNEFFLPVLKSKVEDPKEELGKELKSLNTKKERIKKAYIDSLFTEKEFKEETKIIEEQIELINSKLLENEQTEQLNFTVSDILLKRDMDFINKVKLPISYYAFNDNWDLLDRDIKADIIMRYVDDIELEMINNTYEIKQVNFRSTFYSDFEELYKQGYIDRKRPFTYDFNGICVDSEVRYSEYLPIKEVMQHFYRLNECYEVNFYKGTLYKETRKLDIGPLLKNEVPIRVFPLQANDNGNKDWVSMGMFATKNNPNDIKVNIRDLFEVIPDNVTEEDFLNNDENSSQE

SEQ ID NO: 167 - protein, 637 aa, Unknown
  Description of Unknown: Integrase B168 sequence
  PTHR30461:SF3,SM00857,G3DSA:1.10.10.2600,IPR036162,PF13408, PS51737,IPR025827,G3DSA:3.40.50.1390,IPR006119,IPR038109, PF07508,IPR011109,SSF53041,PF00239,PTHR30461, PS51736,Coil,cd00338
MRKKCYIYTRVSTAVQVDGYSLEAQAEKLRKYAEYKDMEVTREYCDAGRSGISIKGRPAFMEMLDDVSSEKDEISCVLVFKLSRFGRNAADILKSLQLLMDFDVDLICVEDAIDSSTQGGRLTLAILSAVAEMEHENITVQFTTARMQKLMNGGWPGGGVPYGYVSVNKELMVVPEAADLVRMIYQKYLEPDMMLNTVVGWMNENGYKRVVKGEDKVITSDFVSSVLGNPIYYGMIVYNRRTNSEEIKKNPKEVISIRGRHEAIIPEDVWMRVQEKRKSLRRPQKKVDDPERISLLSGLVKCPVCGTGLVTKKNKRKNSNRGGYYKIVYSYGCRNYRKSAGRVCDCWRTYNQEKLDKAVMEIVGKVTETREFRQAVMDVVGDRSSLDACEADLKRTRKELHSQEHLKYKLGMELDNLDILAEDYDGEYEAVQAKIDGAYDQIECLEEKIRKLKKKMEALKKGVRSSDNIRKILDNFDLLFERMSCEERRELCRQFIERIDVFSEEREDGRILKKIVFRFPVYYESDGKRKVNDEPDEMVTFAVDCTEHQVTASEAKATYVEIRAYVKEKYGMNIPTLYIAQVKRKYGLDMGKAYNKPAKNKNHVPVCPVEKEKAILDALKHFRMLDEDVEYRKESAE

SEQ ID NO: 168 - protein, 635 aa, Unknown
  Description of Unknown: Integrase B169 sequence
  SM00857,G3DSA:1.10.10.2600,IPR036162,PS51737,G3DSA:3.40.50.1390, IPR006119,IPR038109,PF07508,SSF53041,IPR011109, PTHR30461,PS51736,cd00338,PF00239
MLDTESKRRKEQQKQKVKKRYNVTIDPENYLFIPAKKQTDYYDNDVNQRVAIYVRVSTDDVRQTTSYELQKKYYEEFVTRHPNWTLVKIYADEGISGTSLKKRDEFNRMIADCRAGKIDMIITKSVSRFARNVEDFIGTVRNLAELKPRVGVFFESEAIFSLNDDSQMALTFQATMAEEESHTRSRSMETSLRMRLDHGIPLTPKLFGYTHDEEGELQVNPEEAPTVKLMFYMYLYGYSTQQIADTLIAQERLSYFGKLCWTASGVASVLRNERHCGDVLTRKTYTENYRTHRTLKNCGEKPQSWYFNHHTAIVSRDDFNAVQRMLDNAKYGNKSILPELRVIDSGVLKGFVTINPRWAGFKEADYMNAAQSVYIEDDNVPSESQEPEEMTIQVEAGDFDLRGFEITRTEFFGGYTYPTVTFQDRKIKFSTECIKKFGTKNFVELLINPVEMKFAVRPTDASNRNGVLISKTCGGRPKPRDIPSAAFSDTVFSLFGWNTECKYRMTGFLFEGEGELAYIFDAKDSEAFFKSYVLPTKESGEGGASSVQPLTPIGKHIRAIPAQWTRTFGKEFYLHEQPFSSLASMTKSDWELRIKGQLFETGKKLNVTGFDELKQYITHELGGVMPQEVSNGNLE

SEQ ID NO: 169 - protein, 635 aa, Unknown
  Description of Unknown: Integrase B170 sequence
  SM00857,IPR036162,G3DSA:3.40.50.1390,IPR006119,PF07508,SSF53041 ,IPR011109,PTHR30461,Coil,PS51736,cd00338,PF00239
MPQLYSYIRWSSDRQEKGTTRNRQVAAAKAYADEAGLEMVEIIEPGVSAFRGKNRAGKLGDFIDAVKNNAIPSDSWLYCENLDRLSRDQVDEALRLFLELIGLGLTIVTGMDRKVYNRESIRQNPTDLMISILMFIRGNEESETKSNRTVGNVVALVERHKKGLSVNIKSVGRHPFWIDDSGSQYEAVKEHPVYWSIAREAIDMFLAGDGIYTVKRYLDQKYPNGLKGKEWDYQVLKKMRDNRALIGERTINVAGATYKLDNYYPWLCKDEAEFLTLAERKQQNNYKGKKDKVEEIKLLSGLQVLRCSKCGGTMHSFMNHGSARYICTNGVHLQKNCSGWSISAQLVEHCTMISLLIAYMDKSHKDGIDTTVIEEDISRKETLISDLESRIANMAQAIAIAPDVSALAVQLNAFDMERKNTILEIDKLKERLYSLKGKGSFGVDVTEFLVLIQWAVFTNMEDTDRNKIRKIISSIIESVVVDKTDGCITIKIKYYHKDEWLVFGGVNRKPYWAFTVEYSTDDEMGIEGKNSSDFISNPLFQKAVEQLDSIEQSYLNLFETANTMLGVVGYSEIRGSSFWPNTGQYERVNVEYEGVTYSIALNGRVPKIIASALEATGLSRKDFIARFKVCKAEKR

SEQ ID NO: 170 - protein, 634 aa, Unknown
  Description of Unknown: Integrase B171 sequence
  SM00857,G3DSA:1.10.10.2600,IPR036162,PS51737,G3DSA:3.40.50.1390, IPR006119,IPR038109,PF07508,SSF53041,IPR011109, PTHR30461,PS51736,cd00338,PF00239
MHNSEARRRKERQKEQIKQRYNVVIDPENYEYIPAKKQADYYDNDVNQRVAIYVRVSTDDVRQTTSYELQKKYYEEFVTRHPNWTLVNIYADEGISGTSLKHRDEFNRMIADCKAGKIDMIVTKSVSRFARNVEDFIGTVRSLAERRPPVGVFFESEAIFSLNDDSQMALTFQATMAEEESHTRSRSMEASLRMRLDHGVPLTPKLFGYTHDEDGHLQINPDEAPTVKLIFYMYLYGYSAQQIADTLTNQARSTYFGKSCWPSSGIVSILRNERHCGDVLTRKTVTENYRTHRTLKNRGEKPQSRYYNHHDAIIRRDDFNAVQRMLDNAKYGNKSILPELRVIHDGLLKGFVSINPRWSGFKEGDYLSASRSAYTDIPTAGAPSQIPADATFAVNAGDFDLRGFEITRTEFLGTHSQPFVTFADKKVKFSAACVRHFGAKRYVELLINPLEMKFAVRPTDSSNRSGVIISSNYSGKPQPREISAAAFSDTIFHLFGWNTACKYRINGILCEDAGQLVYIFDVADSETFIRSQELSVRAASTNEETIHPLSTLGKHVRAIPEQWVGTFGKEFYLHECSLSALEHMTRSNWSLNLQGQLFETGKKLHVTDFDELRQYIMKELGGTMPQEDRNGNME

SEQ ID NO: 171 - protein, 634 aa, Unknown
  Description of Unknown: Integrase B172 sequence
  PTHR30461:SF3,cd00338,SM00857,G3DSA:1.10.10.2600,IPR036162, PF13408,IPR025827,G3DSA:3.40.50.1390,PS51737,IPR006119, IPR038109,PF07508,SSF53041,IPR011109,PTHR30461,PS51736, Coil,PF00239
MARKKNIAAGLDAVIYARYSSHNQREVSIEQQIAECTKHAAALGLRIVGTYEDRAISGKTDNRPRFQQMMRDAEKGKFQAVVAWKSNRIGRNMLQAMVNEAKLDDYGVKVFYAEEDFDDTAAGRFALRNMMNVNQFYSENMAEDITRGLYDNANKCMANGRQPLGYKRGADGKVMLDEPAAAVVREIFTRVAAGDLFVDIARDLNAKGIKTSKGAAWNKGSFQSICQNERYKGIYIYGNVHIVDGIPRIVSDELWYKVQEAMRMKKNPVGTRHRVGAEDYLLTGKLRCGHCGSYMTGISGTSRNGELHYYYTCQKRRTEHACNKKNVRRDVIEPAIAQAIKMYCLTDDVIEWMADQTVQYWEKHDNDLQIEALEQQLAENKKATSNMLKAIEMGIITEATRSRMVELETENSKLTAQLSAAKRDVVKINREDLIDELHILRSKDIHDREVQAELFKDFLVAAYIYDDNRLKLVFSFMDKDNSVEIPLETGEDPPDGGDSPDAKMFVLPLECSTKKALYFVGSMVLFFLPKPIFGGCIASPAPFSGFCRRFRYNPQRLTLHRFQTGKRFEPSIRKKRKILIPTWVYSCCVRHEENRSESCRIVFPHMDVSRMGYGHCNIIYGQIRQKSLIFFVYL

SEQ ID NO: 172 - protein, 634 aa, Unknown
  Description of Unknown: Integrase B173 sequence
  SM00857,G3DSA:1.10.10.2600,IPR036162,PS51736,PS51737, G3DSA:3.40.50.1390,IPR006119,IPR038109,PF07508,IPR011109, SSF53041,PTHR30461,mobidb-lite,cd00338,PF00239
MNQNEAKLSKEEQKAKIRERYRGHVSSDTVVIPGKPQADLYDDTETKRVAVYARVSTDNVQQTSSYELQKNYYEDQVKRHPNWTLVGIYPDEGISGTSLQHRAKFNQMIADCRAGKIDLIITKSVSRFARNIVDCISLVRELASLNPPVGVFFESENIFTLKDNTEMSLSFVATMAQEESHIKSTIMNASIEMRFGREIYLTPVLLGYDHDEDGNLVINEEEANTVRLIFFMYLYGYTCQEIADTLTQLGRKTKKGNFTWSASSVLQQLRNERHCGALLARKTFTPHYLDHKSKKNTGERTQYYKKHHHEGIISYDDFIAVQHLIDNARYGNKGILPELQVIPEGALKGFVVINPRWAGFQAADYEVASESVYENEVFVPKSLRDVEAQSGDFDLRGYEIARVQFFNTQNRISVSLSNDYLLFSTACIRKFDNAQYVELLIHPHEHLLAVRKCDKDARNAIKWAKLDDNGNYGPRHISGAAFISTIFELFDWRLDCKYRVRGVRRQKDNEAVLVFDMRETEMFVPSSAPNQEGGSAAHAEDGLRPLIPAKNSIVAFPSAWADNFGSNFYRHAQARELAAIDQNGEWQIGEEAQPYSTQPELNVTTPEEAAFHIERIIRDMRQGGEMNGTIQPVE

SEQ ID NO: 173 - protein, 634 aa, Unknown
  Description of Unknown: Integrase B174 sequence
  SM00857,G3DSA:1.10.10.2600,IPR036162,PS51737,G3DSA:3.40.50.1390, IPR006119,IPR038109,PF07508,IPR011109,SSF53041,PTHR30461,PS51736 ,cd00338,PF00239
MNQNEAKLSKEEQKAKIRERYRGHVSSDTVVIPGKPQADIYDDSEMKRVAVYARVSTDNVQQTSSYELQKNYYEDQVQRHPNWVLVGIYPDEGISGTSLKHRDHFNQMIADCRAGKIDLIITKSVSRFARNIVDCISLVRELASLNPPVGVFFESENIFTLKDNTEMSLSFVATMAQEESHIKSTIMNASIEMRFGREIYLTPVLLGYDHDEDGNLVINEEEANTVRLIFFMYLYGYTCQEIADTLMQLGRKTKKGNVAWSASTVLQQLRNERHCGALLARKTFTPHYLDHKSKKNMGERTQYYKKHHHEGIISYDDFIAVQHLIDNARYGNKGILPELQVIPEGALKGFVLINPRWAGFQAADYEVASESVYEDEVFVPQSLRDVEAQSGDFDLRGYEIARVQFFDTQNRISVSLSNDYLLFSTACIRKFDNAQYVEMLIHPHEHLLAVRKCEKDARNAIKWAKLDDNGNYGPRHISGAAFISTIFELFDWRLDCKYRVRGVRRQKDNEAVLVFDMRETEMFVPNAAPDPDDGSAAPAEDGLRPLVPSKNSIVAFPSAWADNFGSNFYRHAQARELAAIDQNGEWQIGEEAQPYSTQPELNVTTPEEAAFHIERIIRDMHRGGEMNGTIQPVE

SEQ ID NO: 174 - protein, 633 aa, Unknown
  Description of Unknown: Integrase B175 sequence
  PTHR30461:SF3,SM00857,IPR006118,G3DSA:1.10.10.2600,IPR036162, PS51737,G3DSA:3.40.50.1390,Coil,IPR006119,IPR038109, PF07508,IPR011109,SSF53041,PTHR30461,PS00397, PS51736,cd00338,PF00239
MEYNEQNNTEKKNVAGIYIRVSTEDQVREGFSLGEQKEKLEALCKYKGYEIYKVYKDAGISAKDMTHRPQFQQMIEDMKSGKINYIVAYKLDRVTRSVRDLEILISTLEQYHCYLICDRDDVNTSTANGRFFIRMLTVLSQLEIEIVSERTKFGLGGAIKAGHIPGVCPFGYYRDTDKTIKIDNSTKDIVIRIYQMYLEGKSYQQIANILNDEKVPSPVKTKWGDSTIEKIINNRVYMGDFERYKKDKTRESEIYMNVVPPIISRAMWEDTQNQKGKNQRAYSRHRIYIFFQKLICPKCGRIMTGKGAGGKKSKYMYYTCEKCKIYFNEDDVEGTLINHILDFIEYDYHVNKFFYPLLAEKKDDESKEIEKEISKLTAQKDRLKKAYMNGIVEMDDFAEDFKVIDERLSILETKRINSIDLQEECYNPAHLIAQRDIEKETLIEGQMYKDVILNLWTMKSKEEKQAFISKFIESVALNKNEDGSINIEKVNLRSSFIEQVDKLYKKGVIDIPSTMETDGNLQNVRTSINLSAKQVNEYLDEIKKEMNINYLDLGEYHFNGEEFDETEGLKNEIATYKDKVVSFKIKKYEKPIRFFAIKEMKNFLAKPDGNVHLSVVTHVIPPESTKKKKSKNK

SEQ ID NO: 175 - protein, 633 aa, Unknown
  Description of Unknown: Integrase B176 sequence
  cd00338,SM00857,G3DSA:1.10.10.2600,IPR036162,PS51737, G3DSA:3.40.50.1390,mobidb-lite,IPR006119,IPR038109,PF07508, IPR011109,SSF53041,PTHR30461,PS51736,Coil, PF00239
MIDLDKRRLKEQQKARQRQRMQGRLDPDNYEYIPAKKPIDFYDNDVHQRVGIYARVSTDDVRQTTSYELQKKYYEDFVVRHPNWTLVRIYADEGISGTSLRKRDEFNQMISDCRAGKLDIIITKSVSRFARNVMICIGMVRELAELKPPVGVFFESECIFSLNDESQMALSFQATMAEEESHIRSRSMETSLRMRLDNGIPLTPKLLGYTHDMDGNLIVNEQEAPTVKLAFFMYLYGYSTQQIADVFIALGRRSYLGNIKWTSNSIVQILRNERHCGDVLTRKTFTPNFHDHLSKKNRGERPQSRYYNHHEPIVSRDDFIAVQRLLDNAKYRGKSVLPELRVIDSGMLKGYVSVNPRWAGFKSDDYIMASQSAYAEDEAEETYAKSEDKVIEIEVEPGDFDLRGFEVARSELFNPLNRATVVLSDQKIKFNTTCVRKFGNKNRVEILINPLERKLAVRPTDKANRNSVIFSKKEDGTYLPREIPASAFIGTLFELFGWKLDCKYRIIGSLYETDTEMAYVFDAVNTEAFFKSYVLPVQQLSPEGTALIEPLTTSGKRIRAIPKEWVNEFGELFYLQERSLAALESQSEEDWKLYMEGRMFESGKQLKVTSFDELQRYIKQELSVLTRPEVNHE

SEQ ID NO: 176 - protein, 633 aa, Unknown
  Description of Unknown: Integrase B177 sequence
  PTHR30461:SF3,cd00338,SM00857,G3DSA:1.10.10.2600,IPR036162, PF13408,PS51737,G3DSA:3.40.50.1390,IPR025827,IPR006119, IPR038109,PF07508,IPR011109,SSF53041,PTHR30461, PS51736,Coil,PF00239
MTVKKFPIDLSCLTEEEISQFQEDPYTLYNGDQDVALYLRYSSTGQSDQSIEGQLRDCRAFCKANHYRIVAIYVDRATTARKDVEKRVHLMEMVADSAKQNWEYVIVWKLDRFARNRNDSAIMKMRLRKNGVKVLSATEHLTDSPESIILESVLEGMAEFFSAELSQKVTRGMRESALKCHSVGGHIPLGYKVENHKLVVDPDTAHIVQEAFSLYANGESVADICRKFNSAGYKTAKNTEFNRSSFKAMFRNTRYIGTYTYKDIVIENGIPAIIDKELFETVQRRLSKTATAPARGKAKVDYLLSGKLFCGHCGASMNGESGAGRHGKVYHYYSCYTKKRKLGCDKRPLKKDYIEGIVAHDALNLLTDQLIDEIADMAIRQSEQDLINDTHIPQLTAQLSEVEKSIMNITAAIEKGIASEALMNRLVQLEHEKKTLNKEIKAEEKFVYRIDRDQIVFWLSQFKYGNIEDENFRRRLIDLLVNSVTVWDEPDGYKITTAYNLTSCKTKTFRVDKNPAAEEATGFDFGESECTTANLLISMGSRFLFYLRISFIHLFSNVFLTSFIQAFCQLICKALLSGCIQMPVDIGSRLNVAVSHPFLYVFQAATVIQQQTGATMTEFMESNVWHSIPFKHF

SEQ ID NO: 177 - protein, 632 aa, Unknown
  Description of Unknown: Integrase B178 sequence
  SM00857,IPR036162,G3DSA:3.40.50.1390,IPR006119,PF07508, SSF53041,IPR011109,PTHR30461,cd00338,PF00239
MPQLYSYIRWSSDRQEKGTTKNRQVAAAKAYAEEAGLEMVEILEPGTSAYRGKNRAGKLGDFIDAVKNNAIPSDSWLYCENLDRLSRDQVDEALRLFLELIGLGLTIVTGMDRKVYNRESIRQNPTDLMISILMFIRGNEESETKSNRTIGNVVALVERHKAGLPVNIKSVGRHPFWIDDSGSQYEAVKEHPVYWSIAREAIDMFLDGNGIYTVKRHLDKKYPNGLKGKEWDYQVLKKMRDNRALIGERTINAGGATYKLDNYYPWLCKDEAEYLTLAERKQQNNFKAKKDKVEEIKLLSGLQVLRCSKCGGTMHSFMNHGSARYICTNGVHLQKNCSGWSISAQLVEHCTIISLLIGYMNKRLKDGIDTTVIEEDLSRKETLITDLESRITNMAQAIAIAPNVSALAVQLNAFDMERKKTVLEVDKLKERLYSLKGKGSLEVDINEFMILIQWAVFTNMQDTDRNKIRKVISSIIESVIVDKTDGCITIKIKYHFKDEWLVFGGTDRKPHWAFKVEFSSVDNVSIRDEGFLTTSNLPLFNKAVEQLDKIEQSYLDLFNTANEMLEVVGYSEISGASFWPNTGKYDRVDIVYEGNTYSIALNGRVPKDIATALESTGLTRKEFIERYRIDQI

SEQ ID NO: 178 - protein, 631 aa, Unknown
  Description of Unknown: Integrase B179 sequence
  PTHR30461:SF3,SM00857,G3DSA:1.10.10.2600,IPR036162,PF13408, IPR025827,PS51737,G3DSA:3.40.50.1390,IPR006119,IPR038109,PF07508, IPR011109,SSF53041,PF00239,PTHR30461,PS51736, Coil,cd00338
MKKFPIDLSCLTEEEISQFQEDPYTLYNGDQNVAIYLRYSSTGQSDQSIEGQLRDCRTFCKANHYRIVAIYVDRATTARKDVEKRVHLMEMVADSAKQNWEYVIVWKLDRFARNRNDSAIMKMRLRKNGVKVLSATEHLTDSPESIILESVLEGMAEFFSAELSQKVTRGMRESALKCHSVGGHIPLGYKVENHKLVVDPDTAHIVQEAFSLYANGESVADICRKFNSAGYKTAKNTEFNRSSFKAMFRNTRYIGTYTYKDIVIENGIPAIIDKELFETVQRRLSKTATAPARGKAKVDYLLSGKLFCGHCGASMNGESGAGRHGKVYHYYSCYTKKRKLGCDKRPLKKDYIEGIVARDALNLLTDQLIDEIADMAIRQSEQDLINDTHIPQLTAQLTEVEKSITNITAAIEKGIASETLMNRLVQLEHEKKTLNKEIKAEEKFVYRIDRDQIVFWLSQFKYGNIEDEDFRRRLIDLLVNSVTVWDEPDGYKITTAYNLTSCKTKTFRVEKNPAAEEATGFDFGESECTTANLLISMGLRFLFYLRISFIHLFSNVFLTSFIQAFCQLICKALLSGGIQMPVDIGSRLNVAVSHPFLYVFQAATVIQQQTGATMTEFMESNVWHSIPFKHF

SEQ ID NO: 179 - protein, 631 aa, Unknown
  Description of Unknown: Integrase B180 sequence
  PTHR30461:SF3,SM00857,G3DSA:1.10.10.2600,IPR036162,PF13408, IPR025827,PS51737,G3DSA:3.40.50.1390,IPR006119,IPR038109, PF07508,IPR011109,SSF53041,PF00239,PTHR30461, PS51736,Coil,cd00338
MKKFPIDLSCLTEEEISQFQEDPYTLYNGDQDVALYLRYSSTGQSDQSIEGQLRDCRAFCKANHYRIVAIYVDRATTAHKDVEKRVHLMEMVADSAKQNWEYVIVWKLDRFARNRNDSAIMKMRLRKNGVKVLSATEHLTDSPESIILESVLEGMAEFFSAELSQKVTRGMRESALKCHSVGGHIPLGYKVENHKLVVNPDTAHIVQEAFSLYANGESVADICRKFNSVGYKTAKNTEFNRSSFKAMFRNTRYIGTYTYKDIVIENGIPAIIDKELFETVQRRLSKTATAPARGKAKVDYLLSGKLFCGHCGASMNGESGAGRHGKVYHYYSCYTKKRKLGCDKRPLKKDYIEGIVARDALNLLTDQLIDEIADMAIRQSEQDLINDTHIPQLTTQLSEVEKSIMNITAAIEKGIASETLMNRLVQLEHEKKTLNKEIKAEEKFVYRIDRDQIVFWLSQFKYGNIEDEDFRRRLIDLLVNSVTVWDEPDGYKITTAYNLTSCKTKTFRVEKNPAAEEATGFDFGESECTTANLLISMGSRFLFYLRISFIHLFSNVFLTSFIQAFCQLICKALLSGCIQMPVDIGSRLNVAVSHPFLYVFQAATVIQQQTGATMTEFMESNVWHSIPFKHF

SEQ ID NO: 180 - protein, 631 aa, Unknown
  Description of Unknown: Integrase B181 sequence
  PTHR30461:SF3,IPR036162,PS51737,IPR011109,PTHR30461, PF00239,G3DSA:1.10.10.2600,IPR006119,PF14287,SSF53041, IPR025378,SM00857,IPR025827,cd03770,IPR038109, mobidb-lite,PS51736,PF13408,G3DSA:3.40.50.1390,PF07508,Coil
MIRQTTQLAPVTALYARLSKDDELQGESNSISNQKQMLEDFARRNGLPNPTHFTDDGISGTRFDRPGFLAMMEEVEAGRVEAIVIKDMSRLGRDYLKVGQVMEVLRQRGVRLIAINDGVDSLKGDDDFTPFRNIMNEFYARDTSRKIRSVFKSKGMSGKHLTGTVIYGYLWDEKREHWLVDKEAAEVVRRIFSLTLEGYGPYQIACKLSTDRIEIPVVHLARFNEGVNRSKPVKDPYGWGSSTIVNILKKREYLGHTINFKTRKHFKDKKSHYVSEDEWTIFENTHEAIIDQQTFDLAQKIRSNVRRYPNGWGEAAPLTGLLYCADCGGKMYVHRTNNGKRISQYTCSNYTKVPCGTLCPTQHRINESAVLTLVSDTLRAIAEYSRNGRTEFIHTVQETQVAQQSADISKKRRRLAAAQKRAGELEKLICKIYEDNALGKLPDARYKALDAQYAKEQDALEIEIAELEKAVTGYEQSQKSAEKFIALIDKYENFDTLTNTMLNEFVEKILVHERARKGSQDTTQEIEIYFNFLGRYIPPSLQPVPLTPEEQEELRKKEERKDRLHQNYLKRKASGAQKRYENKIKAKKKAEMDAKKALIRAEDMKKGVFSTIGQLPKEEPRKGSIAASAAV

SEQ ID NO: 181 - protein, 630 aa, Unknown
  Description of Unknown: Integrase B182 sequence
  SM00857,G3DSA:1.10.10.2600,IPR036162,PS51736,PS51737, G3DSA:3.40.50.1390,IPR006119,IPR038109,PF07508,IPR011109, SSF53041,PTHR30461,mobidb-lite,cd00338,PF00239
MSKSTKKAADQAEREKVHKRYSNRREPDVIYPARKQVDFYDADVHQRVAVYVRVSTDNLGQETSYELQKNYYEEFVLKHPNWSLVKIYADKGISGTSTKHRVALNQMLTDSRAGKIDLIITKSVSRLARNTVDCITMVRNLAELRNPVGVFFESECIFSLNEDTSMPLSFLASIAENESRIRSRSMEVSLAQRLNGGLPLTPKLLGYSHDTDGKLVINPDEAPTVKLIFYMYLSGYSSAYIAKTLEELGKTTFLGNTKWTSSTVIQILRNERHCGDVLTRKTWTPDVISHKSKKNRGECQQSLYRGEHEAIVSRDDYIAVQHMINNAKYGGKSILPELRVIESGILKGFVTISPKWAGFKAADYLQASMSVYTDDTYYGQPAEGDATFEVAAGDFDLRGFEVTNASLFDANKRPYVLFQSKQIKFSTDCVRQFGKDNKVELLIHPGLRKLAVRRASKDSRQFVQWSRPDDGKYYVKEIPCSAFGETLFELLGWETAYKFKAYGSLLESDGDSVFLFDLSEPAIFIQSYLMTGTDAPGSGNSGLSPLSVSGKRIRAVPKKLADRFGSDFYSHRLTASSLELQSEDAWKLWLEGQLFETSEKLHVTKFDEMQRFINEQLSASKQLEGADYNA

SEQ ID NO: 182 - protein, 630 aa, Unknown
  Description of Unknown: Integrase B183 sequence
  SM00857,G3DSA:1.10.10.2600,IPR036162,PS51737,G3DSA:3.40.50.1390, mobidb-lite,IPR006119,IPR038109,PF07508,IPR011109,SSF53041, PTHR30461,PS51736,cd00338,PF00239
MSKSAKKAADQAEREKVHKRYSNRREPDVIYPAKKQVDFYDADVHQRVAVYVRVSTDNLGQETSYELQKNYYEEFVLKHPNWKLVKIYADKGISGTSTKHRAELNQMLTDSRAGKIDLIITKSVSRLARNTVDCITMVRNLAELRNPVGVFFESECIFSLNEDTNMPLSFLASIAENESRIRSRSMEVSLAQRLNGGLPLTPKLLGYSHDADGKLVINPDEAPTVKLIFYMYLSGYSSSHIAKTLEALGKRTFLGNSKWTSGTVIQVLRNERHCGDVLTRKTFTPDVISHKSKKNRGERQQSLYKGEHEAIVSRDDYIAVQHMINNAKYGGKSILPELRVIGSGVLKGFVTISPKWAGFKAADYLQASMSVYTDDTYYGQPAEGDATFEVAAGDFDLRGFEVTNSSLFDANKRPYVLFQSKQIKFSTDCVRQFGKDNKVELLIHPGLRKLAVRRASKDSRQCVQWSRPDDGKYYAKEIPCTAFGGTLFELLDWETDFKFRAYGRLLQNEGDSVFLFDLSEPEIFIQSYLMTGTDSPISGDGELSPLSVSGKRIRAVPKKLADRFGSDFYSHRLTSSSPELQSEDAWKLWLEGQLFETGEKLQVTKFDEMQRFIAEQLAPIKQMEEVDFNA

SEQ ID NO: 183 - protein, 630 aa, Unknown
  Description of Unknown: Integrase B184 sequence
  SM00857,G3DSA:1.10.10.2600,IPR036162,PS51737,G3DSA:3.40.50.1390, mobidb-lite,IPR006119,IPR038109,PF07508,IPR011109, SSF53041,PTHR30461,PS51736,cd00338,PF00239
MSKSAKKAADQAEREKVHKRYSNRREPDVIYPAKKQVDFYDADIHQRVAVYVRVSTDNLGQETSYELQKNYYEEFVLKHPNWKLVKIYADKGISGTSTKHRVELNQMLTDSRAGKIDLIITKSVSRLARNTVDCITMVRNLAELRNPVGVFFESECIFSLNEDTNMPLSFLASIAENESRIRSRSMEVSLAQRLNGGLPLTPKLLGYSHDADGKLVINPDEAPTVKLIFYMYLSGYSSSHIAKTLEALGKRTFLGNSKWTSGTVIQVLRNERHCGDVLTRKTFTPDVISHKSKKNRGERQQSLYKGEHEAIVSRDDYIAVQHMINNAKYGGKSILPELRVIGSGVLKGFVTISPKWAGFKAADYLQASMSVYTDDTYYGQPAEGDATFEVAAGDFDLRGFEVTNSSLFDANKRPYVLFQSKQIKFSTDCVRQFGKDNKVELLIHPGLRKLAVRRASKDSRQCVQWSRPDDGKYYAKEIPCTAFGGTLFELLDWETDFKFRAYGRLLQNEGDSVFLFDLSEPEIFIQSYLMTGTDSPISGNGELSPLSVSGKRVRAVPKKLADRFGSDFYSHRLTSSSPELQSEDAWKLWLEGQLFETGEKLRVTKFDEMQRFIAEQLAPIKQMEEVDFNA

SEQ ID NO: 184 - protein, 630 aa, Unknown
  Description of Unknown: Integrase B185 sequence
  SM00857,G3DSA:1.10.10.2600,IPR036162,PS51736,PS51737,G3DSA:3. 40.50.1390,IPR006119,IPR038109,PF07508,IPR011109,SSF53041, PTHR30461,mobidb-lite,cd00338,PF00239
MSKSAKKAADQAEREKVHKRYSNRREPDVIYPAKKQVDFYDADIHQRVAVYVRVSTDNLGQETSYELQKNYYEEFVLKHPNWKLVKIYADKGISGTSTKHRVELNQMLADSSAGKIDLIITKSVSRLARNTVDCITMVRNLAELRNPVGVFFESECIFSLNEDTNMPLSFLASIAENESRIRSRSMEVSLAQRLNGGLPLTPKLLGYSHDTDGKLVINPDEAPTVKLIFYMYLSGYSSSHIAKTLEALGKRTFLGNSKWTSGTVIQVLRNERHCGDVLTRKTFTPDVISHKSKKNRGERQQSLYKGEHEAIVSRDDYIAVQHMINNAKYGGKSILPELRVIESGVLKGFVTISPKWAGFKAADYLQASMSVYTDDTYYGQPAEGDATFEVAAGDFDLRGFEVTNASLFDANKRPYVLFQSKQIKFSTDCVRQFGKDNKVELLIHPGLRKLAVRRASKDSRQCVQWSRPDDGKYYAKEIPCTAFGGTLFELLDWETDFKFRAYGRLLQNEGDAVFLFDLSEPEIFIQSYLMTGTDSPISGDGELSPLSVSGKRVRAVPKKLADRFGSDFYSHRLTSSSPELQSEDAWKLWLEGQLFETGEKLRVTQFDEMQRFIAEQLAPIKQMEEVDFNA

SEQ ID NO: 185 - protein, 630 aa, Unknown
  Description of Unknown: Integrase B186 sequence
  SM00857,G3DSA:1.10.10.2600,IPR036162,PS51736,PS51737, G3DSA:3.40.50.1390,IPR006119,IPR038109,PF07508,IPR011109, SSF53041,PTHR30461,mobidb-lite,cd00338,PF00239
MSKSAKKAADQAEREKVHKRYSNRREPDVIYPAKKQVDFYDADIHQRVAVYVRVSTDNLGQETSYELQKNYYEEFVLKHPNWKLVKIYADKGISGTSTKHRVELNQMLADSRAGKIDLIITKSVSRLARNTVDCITMVRNLAELRNPVGVFFESECIFSLNEDTNMPLSFLASIAENESRIRSRSMEVSLAQRLNGGLPLTPKLLGYSHDTDGKLVINPDEAPTVKLIFYMYLSGYSSSHIAKTLEALGKRTFLGNSKWTSGTVIQVLRNERHCGDVLTRKTFTPDVISHKSKKNRGERQQSLYKGEHEAIVSRDDYIAVQHMINNAKYGGKSILPELRVIESGVLKGFVTISPKWAGFKAADYLQASMSVYTDDTYYGQPAEGDATFEVAAGDFDLRGFEVTNSSLFDANKRPYVLFQSKQIKFSTDCVRQFGKDNKVELLIHPGLRKLAVRRASKDSRQCVQWSRPDDGKYYAKEIPCTAFGGTLFELLDWETDFKFRAYGRLLQNEGDSVFIFDLSEPEIFIQSYLMTGTDSPISGDGELSPLSVSGKRVRAVPKKLADRFGSDFYSHRLTSSSPELQSEDAWKLWLEGQLFETGEKLRVTKFDEMQRFIAEQLAPIKQKDEVDFNA

SEQ ID NO: 186 - protein, 630 aa, Unknown
  Description of Unknown: Integrase B187 sequence
  SM00857,G3DSA:1.10.10.2600,IPR036162,PS51736,PS51737,G3DSA:3. 40.50.1390,IPR006119,IPR038109,PF07508,IPR011109,SSF53041, PTHR30461,mobidb-lite,cd00338,PF00239
MSKSAKKAADQAEREKVHKRYSNRREPDVIYPAKKQVDFYDADIHQRVAVYVRVSTDNLGQETSYELQKNYYEEFVLKHPNWKLVKIYADKGISGTSTKHRVELNQMLTDSSAGKIDLIITKSVSRLARNTVDCITMVRNLAELRNPVGVFFESECIFSLNEDTNMPLSFLASIAENESRIRSRSMEVSLAQRLNGGLPLTPKLLGYSHDADGKLVINPDEAPTVKLIFYMYLSGYSSSHIAKTLEALGKTTFLGNTKWTSGTVIQVLRNERHCGDVLTRKTFTPDVISHKSKKNRGERQQSLYKGEHEAIVSRDDYIAVQHMINNAKYGGKSILPELRVIGSGVLKGFVTISPKWAGFKAADYLQASMSVYTDDTYYGQPAEGDATFEVAAGDFDLRGFEVTNSSLFDANKRPYVLFQSKQIKFSTDCVRQFGKDNKVELLIHPGLRKLAVRRAAKDSRQCVQWSRPDDGKYYAKEIPCTAFGGTLFELLDWETDFKFRAYGRLLQNEGDSVFLFDLSEPEIFIQSYLMTGTDSPISGDGELSPLSVSGKRIRAVPKKLADRFGSDFYSHRLTSSSPELQSEDAWKLWLEGQLFETGEKLRVTKFDEMQRFIAEQLAPIKQMEEVDFNA

SEQ ID NO: 187 - protein, 629 aa, Unknown
  Description of Unknown: Integrase B188 sequence
  PTHR30461:SF3,SM00857,IPR036162,PF13408,IPR025827, G3DSA:3.40.50.1390,IPR006119,PF07508,SSF53041,IPR011109, PTHR30461,Coil,cd00338,PF00239
MPQLYSYIRWSTDRQDKGTTRNRQLAAAKAYADENGLEMVEILEPGVSAFRGKNRTEKLGGFIDAVKNNAIPSDSYLYCENLDRISRDQVDKALSLFLELIGLGLTIITGMDRKVYNRDTIRQNPTDLMISILMFIRGNEESETKSNRTVGNVVALVERHKEGLPVNIKSVGRHPFWIDDTGSQYEAVKKHPFYWNIAREIIDMFLSGNGVYSVKKYLDEKYPNGLKGREWDYQVLKKMRDNRALIGERTINLRGVPYKLENYYPWLCKDEAEFFLLEKRKQQNNYKSKKEGADTIKLLSGLSILRCSKCGGTMHSFMNHGKARYICTNGVHLQKNCSGWSITAQLVEHCTMIALLIGYMDKSRKNGSDTTLIEEELNEKEKFIKALDSKISNLVTAIAIAPDVNSLAHSLNEINSKRKELVLSVEKLKERLVSFQGKGSFEVDIMEFLILIQWAVFTNMEDNDRDKIRKIIDAIIEYIVVDKTNDCITIKIKYYGNDEVLVFGGVDRKPHWRFSIDFDTGKEGALTVLENDLKDVPEIQKAVSYLHKLEKGYLAMYDSAVTMLAEVGYPEIKGTQFWPNTGKHEKVTVAFDGVEHTISFNGRLPKAIASAIEKTGLTRQQFIEKFKIQ

SEQ ID NO: 188 - protein, 629 aa, Unknown
  Description of Unknown: Integrase B189 sequence
  PTHR30461:SF3,SM00857,G3DSA:1.10.10.2600,IPR036162,PF13408, PS51737,G3DSA:3.40.50.1390,IPR025827,IPR006119,IPR038109, PF07508,SSF53041,IPR011109,PTHR30461,Coil,PS51736,cd00338,PF00239
MTAVIYARYSSDNQREESIEGQIRECTAYAEKNDITIVKHYIDRAISAKTDNRPQFQQMIKDSDKKLFDIVLVWKLDRFARNRYDSARYKTQLKKNGVKLMSATEIISEGPEGIILESVLEGYAEYYSADLAEKVVRGQTENILKGRCNGGRGTFGYTLDSERKFHIDPLASSFVLESFKKYDEGSTMKEIRDWLNENGIKNPVGGAFTYNSVEHMLKNRRYIGELKFRDVVVPDAIPPIIPLELFEDVQEKIAKNKKAPARRKAEDDYLLTTKLHCGYCGALMFGESGTSRTGEVHRYYKCATAKKHKGCKKKTVRKQWLEDLVVNETMKLVEDDASMNAIIAKVMELQNQESTDLPIYEKQLKETETGITNMLNAIQMGILTSSTKERLEALEEQRKELQARIAEERLAKPKMKEEFVRFWLLRFRKLDMTQPEQRQALVDTFINAIYLYDDKVLITFNYKEGTETVAFGEAVKAEKSSDMSARGAPRKTSTLCVLVFLFRCERGLEKGGGALRRKQSPSGVLLSLRFPTRRNIYREDCRKNRKSEPFLDRRRVRIFCFRVEYIPWRAARVTPSGWLPAALGIALRFSSYRVGHLWRSALPPTHKWTPPQRPYRSCKWTGPCFRCFP

SEQ ID NO: 189 - protein, 628 aa, Unknown
  Description of Unknown: Integrase B190 sequence
  SM00857,G3DSA:1.10.10.2600,IPR036162,PF13408,IPR025827, G3DSA:3.40.50.1390,PS51737,IPR006119,IPR038109,PF07508, SSF53041,IPR011109,PTHR30461,Coil,cd00338, PF00239
MKAAFLIRCSTKNQDLNRQTRDLTRLAKSMGYEYDLENLVYGEKITGKDDVTKKNRDSIDRLLRAAKEQRFNVVLVSEVSRMSRDPASGRIYVRLLINMNIPVYFKDIDLWTINPETGKKVRDAELVIGAAFDAAWKYLKSMKTQIASARRNELDNNRISIGQPYFGYKRYEGTDKSKKNQIVVNEEEAEVVQAVYNEYLKEGATLKSTALAITNMYGEKLNRKFSLGTIEHILTYESYATGIKKVNLKDPDTDEVEVFDVSTPIIIDKELYEAATNKRKKNRVKDEPYPNQQVYLLSKLIKCPDCGYTLTPRRKAGEFGQTYRLVNGKPAVSWFCMSGINNITNCTNRTSIANEKLEPIIWELVKKELIGYANMNDEKREEQIRECEEKIEYQNYSIQNFTKEIDKLKKRLSTAYQFSINAAEMAGDDEDMRTMAMEEFNRTAKGVRQEMKNFEKSIEQAKGELEKLRDLKTFYSQPTLPKDYLEQIEGNFTEKRNLVKQLITKIVPYRITTFKKKERESGVKTCNKMITVKNGAVLLEVYTIGGVYNVFYNANSKFQVKTAYYVHGEYATFQNGIRKYPAYNEGEYFVISNANMVMETDDIDEVVTVNEFVDIAIANNWVIEYQYI

SEQ ID NO: 190 - protein, 628 aa, Unknown
  Description of Unknown: Integrase B191 sequence
  SM00857,G3DSA:1.10.10.2600,IPR036162,PF13408,IPR025827, PS51737,G3DSA:3.40.50.1390,IPR006119,IPR038109,PF07508, SSF53041,IPR011109,PTHR30461,Coil,cd00338, PF00239
MKAAFLIRCSTKNQDLNRQTRDLTRLAKSMGYEYDLENLVYGEKITGKDDVTKKNRDSIDRLLRAAKEQRFDVVLVSEVSRMSRDPASGRIYVRLLINMNIPVYFKDIDLWTINPETGKKVRDAELVIGAAFDAAWKYLKSMKTQIASARRNELDNNRISIGQPYFGYKRYEGTDKSKKNQIVVNEEEAEVVQAVYNEYLKEGATLKSTALAITDKYGEKLNRKFSLGTIEHILTYESYATGIKKVNLKDPDTDEVEVFDVSTPIIIDKELYEAAANKRKKNRVKDEPYPNQQVYLLSKLIKCPDCGYTLTPRRKAGEFGQTYRLVNGKPAVSWLCMSGINNITDCTNRTSIANEKLEPIIWELVKKELIGYANMNDEKREEQIRECEEKIEYQNYSIQNFTKEIDKLKKRLSTAYQFSINAAEMAGDDEDMRTMAMEEFNRTAKGVRQEMKNFEKSIEQAKGELEKLRDLKTFYSQPTLPKDYLEQIEGNFTEKRNLVKQLITKIVPYRITTFKKKERESGVKTCNKMITVKNGAVLLEVYTIGGVYNVFYNANSKFQVKTAYYVHGEYATFQNGIRKYPAYDEGEYFVISNANMVMETDDIDEVVTVNEFVDIAIANNWVIEYQYQ

SEQ ID NO: 191 - protein, 628 aa, Unknown
  Description of Unknown: Integrase B192 sequence
  cd00338,SM00857,G3DSA:1.10.10.2600,IPR036162,PF13408, IPR025827,G3DSA:3.40.50.1390,PS51737,IPR006119,IPR038109, PF07508,IPR011109,SSF53041,PTHR30461,Coil, PF00239
MKAAFLIRCSTKNQDLNRQTRDLTRLAKSMGYEYDLENLVYGEKITGKDDVTKKNRDSIDRLLRAAKEQRFDVVLVSEVSRMSRDPASGRIYVRLLINMNIPVYFKDIDLWTINPETGKKVRDAELVIGAAFDAAWKYLKSMKTQIASARRNELDNNRISIGQPYFGYKRYEGTDKSKKNQIVVNEEEAEVVQAVYNEYLKEGATLKSTALAITDKYGEKLNRKFSLGTIEHILTYESYATGIKKVNLKDPDTDEVEVFDVSTPIIIDKELYEAATNKRKKNRVKDEPYPNQQVYLLSKLIKCPDCGYTLTPRRKAGEFGQTYRLVNGKPAVSWLCMSGINNITDCTNRTSIANEKLEPIIWELVKKELIGYANMNDEKREEQIRECEEKIEYQNYSIQNFTKEIDKLKKRLSTAYQFSINAAEMAGDDEDMRTMAMEEFNRTAKGVRQEMKNFEKSIEQAKGELEKLRDLKTFYSQPTLPKDYLEQIEGNFTEKRNLVKQLITKIVPYRITTFKKKERESGVKTCNKMITVKNGAVLLEVYTIGGVYNVFYNANSKFQVKTAYYVHGEYATFQNGIRKYPAYDEGEYFVISNANMVMETDDIDEVVTVNEFVDIAIANNWVIEYQYQ

SEQ ID NO: 192 - protein, 628 aa, Unknown
  Description of Unknown: Integrase B193 sequence
  SM00857,G3DSA:1.10.10.2600,IPR036162,PF13408,PS51737, G3DSA:3.40.50.1390,IPR025827,IPR006119,IPR038109,PF07508, IPR011109,SSF53041,PTHR30461,Coil,cd00338, PF00239
MKAAFLIRCSTKYQDLDRQVSDLTRLAKSMGYEYDLENLVYGEKITGKDDVTKKNRDSIDRLLRAAKEQRFDVVLVSEVSRMSRDPASGRIYVRLLINMNIPVYFKDIDLWTINPETGKKVRDAELVIGAAFDAAWKYLKSMKTQIASARRNELDNNRISIGQPYFGYKRYEGTDKSKKNQIVVNEEEAEVVQAVYNEYLKEGATLKSTALAITDKYGEKLNRKFSLGTIEHILIYESYATGIKKVNLKDPDTDEVEVFDVSTPIIIDKELYEAAANKRKNNRVKDEPYPNQQVYLLSKLIKCPDCGYTLTPRRKAGEFGQTYRLVNGKPAVSWLCMSGINNITDCTNRTSIANEKLEPIIWELVKKELIGYANMNDEKREEQIRECEEKIEYQNYSIQNFTKEIDKLKKRLSTAYQFSINAAEMAGDDEDMRTMAMEEFNRTAKGVRQEMKNFEKSIEQAKGELEKLRDLKTFYSQPTLPKDYLEQIEGNFTEKRNLVKQLITKIVPYRITTFKKKERESGVKTCNKMITVKNGAVLLEVYTIGGVYNVFYNANSKFQVKTAYYVHGEYATFQNGIRKFPAYDEGEYFVISNANMVMETDNIDEVVTVNEFVDIAIANNWVIEYQYI

SEQ ID NO: 193 - protein, 628 aa, Unknown
  Description of Unknown: Integrase B194 sequence
  SM00857,G3DSA:1.10.10.2600,IPR036162,PF13408,IPR025827, G3DSA:3.40.50.1390,PS51737,IPR006119,IPR038109,PF07508, SSF53041,IPR011109,PTHR30461,Coil,cd00338, PF00239
MKAAFLIRCSTKNQDLNRQTRDLTRLAKSMGYEYDLENLVYGEKITGKDDVTKKNRDSIDRLLRAAKEQRFNVVLVSEVSRMSRDPASGRIYVRLLINMNIPVYFKDIDLWTINPETGKKVRDAELVIGAAFDAAWKYLKSMKTQIASARRNELDNNRISIGQPYFGYKRYEGTDKSKKNQIVVNEEEAEVVQAVYNEYLKEGATLKSTALAITNMYGEKLNRKFSLGTIEHILTYESYATGIKKVNLKDPDTDEVEVFDVSTPIIIDKELYEAATNKRKKNRVKDEPYPNQQVYLLSKLIKCPDCGYTLTPRRKAGEFGQTYRLVNGKPAVSWFCMSGINNITNCTNRTSIANEKLEPIIWELVKKELIGYANMNDEKREEQIRECEEKIEYQNYSIQNFTKEIDKLKKRLSTAYQFSINAAEMAGDDEDMRTMAMEEFNRTAKGVRQEMKNFEKSIEQAKGELEKLRDLKTFYSQPTLPKDYLEQIEGNFTEKRNLVKQLITKIVPYRITTFKKKERESGVKTCNKVITVKNGAVLLEVYTIGGVYNVFYNANSKFQVKTAYYVHGEYATFQNGIRKFPAYDEGEYFVISNANMVMETDDIDEVVTVNEFVDIAIANNWVIEYQYI

SEQ ID NO: 194 - protein, 628 aa, Unknown
  Description of Unknown: Integrase B195 sequence
  PTHR30461:SF3,SM00857,G3DSA:1.10.10.2600,IPR036162,PF13408, IPR025827,PS51737,G3DSA:3.40.50.1390,IPR006119,IPR038109, PF07508,SSF53041,IPR011109,PTHR30461,Coil, cd00338,PF00239
MKAAFLIRCSTKNQDLNRQTRDLTRLAKSMGFEYDLENLVYGEKITGKDDVTKKNRDSIDRLLRAAKEQRFDVVLVSEVSRMSRDPASGRIYVRLLINMNIPVYFKDIDLWTINPETGKKVRDAELVIGAAFDAAWKYLKSMKTQIASARRNELDNNRISIGQPYFGYKRYEGIDKSKKNQIVVNETEAEVVLAVYNEYLKEGATLKSTALAITDKYGEKLNRKFSLGTIEHILTYENYATGIKKVNLKDPDTDEVEVFDVSTPIIIDKELYEAATNKRKKNRVKDEPYPNQQVYLLSKLIKCPDCGYTLTPRRKAGEFGQTYRLVNGKPAVSWLCMSGINNASDCTSRTAIANEKLEPIIWELVKKELIGYANMNDEKREEQIRECEEKIEYQNYSIQNFTKEIEKLKKRLSTAYQFSINAAEMAVDDEDMRTMAMEEFNRTAKGVRQEMKNFEKSIEQAKGELEKLRDLKTFYSQPTLPKDYLERIEGNFTEKRNLVKQLITQIVPYRINTFKKKERESGAKTCNKMITVKNGAVLLEVYTIGGVYNVFYNANSKFQVKTAYYVHGEYATFQNGIRKYPAYDEGEYFVISNANMVMETDDIDEVVTVNEFVDIAIANNWVIEYQYQ

SEQ ID NO: 195 - protein, 628 aa, Unknown
  Description of Unknown: Integrase B196 sequence
  SM00857,G3DSA:1.10.10.2600,IPR036162,PF13408,IPR025827, G3DSA:3.40.50.1390,PS51737,IPR006119,IPR038109,PF07508, SSF53041,IPR011109,PTHR30461,Coil,cd00338, PF00239
MKAAFLIRCSTKNQDLNRQTRDLTRLAKSMGYEYDLENLVYGEKITGKDDVTKKNRDSIDRLLRAAKEQRFDVVLVSEVSRMSRDPASGRIYVRLLINMNIPVYFKDIDLWTINPETGKKVRDAELVIGAAFDAAWKYLKSMKTQIASARRNELDNNRISIGQPYFGYKRYEGIDKSKKNQIVVNEEESEVVQAVYNEYLKEGATLKSTALAITDKYGEKLNRKFSLGTIEHILTYESYATGIKKVNLKDPDTDEVEVFDVSTPIIIDKELYEAAANKRKNNRVKDEPYPNQQVYLLSKLIKCPDCGYTLTPRRKAGEFGQTYRLVNGKPAVSWLCMSGINNITDCTNRTSIANEKLEPIIWELVKKELIGYANMNDEKRGEQIRECEEKIEYQNYSIQNFIKEIEKLKKRLSTAYQFSINAAEMAGDDEDMRTMAMEEFNRTAKGVRQEMKNFEKSIEQAKGELEKLRDLKTFYSQPTLPKDYLEQIEGNFTEKRNLVKQLITKIVPYRITTFKKKERESGVKTCNKMITVKNGAVLLEVYTIGGVYNVFYNANSKFQVKTAYYVHGEYATFQNGIRKYPAYDEGEYFVISNANMVMETDDIDEVVTVNEFVDIAIANNWVIEYQYI

SEQ ID NO: 196 - protein, 628 aa, Unknown
  Description of Unknown: Integrase B197 sequence
  PTHR30461:SF3,SM00857,G3DSA:1.10.10.2600,IPR036162,PF13408, PS51737,G3DSA:3.40.50.1390,IPR025827,IPR006119,IPR038109, PF07508,SSF53041,IPR011109,PTHR30461,Coil, cd00338,PF00239
MKAAFLIRCSTKNQDLNRQTRDLTRLAKSMGYEYDLENLVYGEKITGKDDVTKKNRDSIDRLLRAAKEQRFDVVLVSEVSRMSRDPASGRIYVRLLINMNIPVYFKDIDLWTINPETGKKVRDAELVIGAAFDAAWKYLKSMKTQIASARRNELDNNRISIGQPYFGYKRYEGTDKSKKNQIVVNEEEAEVVQAVYNEYLKEGATLKSTALAITDKYGEKLNRKFSLGTIEHILTYESYATGIKKVNLKDPDTDEVEVFDVSTPIIIDKELYEAAANKRKKNRVKDEPYPNQQVYLLSKLIKCPDCGYTLTPRRKAGEFGQTYRLVNGKPAVSWLCMSGINNITDCTNRTSIANEKLEPIIWELVKKELIGYANMNDEKREEQIRECEEKIEYQNYSIQNFTKEIDKLKKRLSTAYQFSINAAEMAGDDEDMRTMAMEEFNRTAKGVRQEMKNFEKSIEQAKGELEKLVDLKTFYSQPTLPKDYLEQIEGNFTEKRNLVKQLITKIVPYRITTFKKKERESGVKTCNKMITVKNGAVLLEVYTIGGVYNVFYNANSKFQVKTAYYVHGEYATFQNGIRKYPAYDEGEYFVISNANMVMETDDIDEVVTVNEFVDIAIANNWVIEYQYI

SEQ ID NO: 197 - protein, 628 aa, Unknown
  Description of Unknown: Integrase B198 sequence
  SM00857,G3DSA:1.10.10.2600,IPR036162,PF13408,IPR025827, G3DSA:3.40.50.1390,PS51737,IPR006119,IPR038109,PF07508, SSF53041,IPR011109,PTHR30461,Coil,cd00338, PF00239
MKAAFLIRCSTKNQDLNRQTRDLTRLAKSMGYEYDLENLVYGEKITGKDDVTKKNRDSIDRLLRAAKEQRFDVVLVSEVSRMSRDPASGRIYVRLLINMNIPVYFKDIDLWTINPETGKKVRDAELVIGAAFDAAWKYLKSMKTQIASARRNELDNNRISIGQPYFGYKRYEGTDKSKKNQIVVNEEEAEVVQAVYNEYLKEGATLKSTALAITDKYGEKLNRKFSLGTIEHILTYESYATGIKKVNLKDPDTDEVEVFDVNTPIIIDKELYEAATNKRKKNRVKDEPYPNQQVYLLSKLIKCPDCGYTLTPRRKAGEFGQTYRLVNGKPAVSWLCMSGINNITDCTNRTSIANEKLEPIIWELVKKELIGYANMNDEKREEQIRECEEKIEYQNYSIQNFTKEIDKLKKRLSTAYQFSINAAEMAGDDEDMRTMAMEEFNRTAKGVRQEMKNFEKSIEQAKGELEKLRDLKTFYSQPTLPKDYLEQIEGNFTEKRNLVKQLITKIVPYRITTFKKKERESGVKTCNKMITVKNGAVLLEVYTIGGVYNVFYNANSKFQVKTAYYVHGEYATFQNGIRKFPAYDEGEYFVINNANMVMETDDIDEVVTVNEFVDIAIANNWVIEYQYI

SEQ ID NO: 198 - protein, 628 aa, Unknown
  Description of Unknown: Integrase B199 sequence
  PTHR30461:SF3,SM00857,G3DSA:1.10.10.2600,IPR036162,PF13408, IPR025827,PS51737,G3DSA:3.40.50.1390,IPR006119,IPR038109, PF07508,SSF53041,IPR011109,PTHR30461,Coil, PS51736,cd00338,PF00239
MHGAYILARYSTDRQNEDSIEVQVSACRKWCDERSLPVLDVFADEATSGMKDTRPEYARMMRQLDRGGADTVVIYDQSRMFRKMSAWFDFRDRLARQGVRVVSVTQPMIGGDLRDPANFVAEGSMALFNQMWVLQTRQKVVEKMRFMARQGLHTGGTPPLGFRVEGKRLVIDEAEAETVRLIFGRYAAGWTYREIIRQLNAEGRHTKTGGEFGTNSLHDMLKNPKYVGDLVYGKVEKRPDGSRNSHAVADNQIMIEGALPAIVDRETWDKVQAKMKENKREAVGRPASAREYPLKGKVFCRECKSAMVVTASNRGGKKYFYYACAAKHRKGLCDNSPIPVGGLEALVADAVRQRLGQPESVEGLIRILREERSKLSGSAVQRLCELQKRDREIAKQLDAAVNAVLGGLHSPTLAAKVNALEAERAKIAHDMQQLRAQVSGAEIDEPHLRELLALAMQDDAAVLSIVVRVEVGKDEIAVWTLLDADPNGDFDFAEDGVPITPSEVSPSYNNSGCPATGTSVRRSKHRSVSALRRKLHYVSSFFLLNCDPLCWARSLVFMFRCISIQNLSAAALPAVGVFHAVYLIWLAVAAHQVTDVLVEQVVFVVIASYRLPDCLQRFQTHFAGCRGI

SEQ ID NO: 199 - protein, 628 aa, Unknown
  Description of Unknown: Integrase B200 sequence
  SM00857,G3DSA:1.10.10.2600,IPR036162,PF13408,IPR025827, G3DSA:3.40.50.1390,PS51737,IPR006119,IPR038109,PF07508, IPR011109,SSF53041,PTHR30461,Coil,cd00338, PF00239
MKAAFLIRCSTKNQDLNRQTRDLTRLAKSMGYEYDLENLVYGEKITGKDDVTKKNRDSIDRLLRAAKEQRFDVVLVSEVSRMSRDPASGRIYVRLLINMNIPVYFKDIDLWTINPETGKKVRDAELVIGAAFDAAWKYLKSMKTQIASARRNELDNNRISIGQPYFGYKRYEGIDKSKKNQIVVNEEESEVVQAVYNEYLKEGATLKSTALAITDKYGEKLNRKFSLGTIEHILTYESYATGIKKVNLKDPDTDEVEVFDVSTPIIIDKELYEAAANKRKNNRVKDEPYPNQQVYLLSKLIKCPDCGYTLTPRRKAGEFGQTYRLVNGKPAVSWLCMSGINNITDCTNRTSIANEKLEPIIWELVKKELIGYANMNDEKRGEQIRECEEKIEYQNYSIQNFTKEIEKLKKRLSTAYQFSINAAEMAGDDEDMRTMAMEEFNRTAKGVRQEMKNFEKSIEQAKGELEKLRDLKTFYSQPTLPKDYLEQIEGNFTEKRNLVKQLITKIVPYRIITFKKKERESGVKTCNKMITVKNGAVLLEVYTIGGVYNVFYNANSKFQVKTAYYVHGEYATFQNGIRKYPAYDEGEYFVISNANMVMETDDIDEVVTVNEFVDIAIANNWVIEYQYI

SEQ ID NO: 200 - protein, 628 aa, Unknown
  Description of Unknown: Integrase B201 sequence
  SM00857,G3DSA:1.10.10.2600,IPR036162,PF13408,IPR025827, G3DSA:3.40.50.1390,PS51737,IPR006119,IPR038109,PF07508, SSF53041,IPR011109,PTHR30461,Coil,cd00338, PF00239
MKAAFLIRCSTKNQDLNRQTRDLTRLAKSMGYEYDLENLVYGEKITGKDDVTKKNRDSIDRLLRAAKEQRFDVVLVSEVSRMSRDPASGRIYVRLLINMNIPVYFKDIDLWTINPETGKKVRDAELVIGAAFDAAWKYLKSMKTQIASARRNELDNNRISIGQPYFGYKRYEGTDKSKKNQIVVNEEEAEVVQAVYNEYLKEGATLKSTALAITDKYGEKLNRKFSLGTIEHILTYESYATGIKKVNLKDPDTDEVEVFDVNTPIIIDKELYEAATNKRKKNRVKDEPYPNQQVYLLSKLIKCPDCGYTLTPRRKAGEFGQTYRLVNGKPAVSWLCMSGINNITDCTNRTSIANEKLEPIIWELVKKELIGYANMNDEKREEQIRECEEKIEYQNYSIQNFTKEIDKLKKRLSTAYQFSINAAEMAGDDEDMRTMAMEEFNRTAKGVRQEMKNFEKSIEQAKGELEKLRDLKTFYSQPTLPKDYLEQIEGNFTEKRNLVKQLITKIVPYRITTFKKKERESGVKTCNKMITVKNGAVLLEVYTIGGVYNVFYNANSKFQVKTAYYVHGEYATFQNGIRKFPAYDEGEYFVISNANMVMETDDIDEVVTVNEFVDIAIANNWVIEYQYI

SEQ ID NO: 201 - protein, 628 aa, Unknown
  Description of Unknown: Integrase B202 sequence
  SM00857,G3DSA:1.10.10.2600,IPR036162,PF13408,IPR025827, G3DSA:3.40.50.1390,PS51737,IPR006119,IPR038109,PF07508, IPR011109,SSF53041,PTHR30461,Coil,cd00338, PF00239
MKAAFLIRCSTKNQDLNRQTRDLTRLAKSMGYEYDLENLVYGEKITGKDDVTKKNRDSIDRLLRAAKEQRFNVVLVSEVSRMSRDPASGRIYVRLLINMNIPVYFKDIDLWTINPETGKKVRDAELVIGAAFDAAWKYLKSMKTQIASARRNELDNNRISIGQPYFGYKRYEGTDKSKKNQIVVNEEEAEVVQAVYNEYLKEGATLKSTALAITDKYGEKLNRKFSLGTIEHILTYESYATGIKKVNLKDPDTDEVEVFDVNTPIIIDKELYEAATNKRKKNRVKDEPYPNQQVYLLSKLIKCPDCGYTLTPRRKAGEFGQTYRLVNGKPAVSWLCMSGINNITDCTNRTSIANEKLEPIIWELVKKELIGYANMNDEKREEQIRECEEKIEYQNYSIQNFTKEIDKLKKRLSTAYQFSINAAEMAGDDEDMRTMAMEEFNRTAKGVRQEMKNFEKSIEQAKGELEKLRDLKTFYSQPTLPKDYLEQIEGNFTEKRNLVKQLITKIVPYRITTFKKKERESGVKTCNKMITVKNGAVLLEVYTIGGVYNVFYNANSKFQVKTAYYVHGEYATFQNGIRKYPAYDEGEYFVISNANMVMETDNIDEVVTVNEFVDIAIANNWVIEYQYI

SEQ ID NO: 202 - protein, 628 aa, Unknown
  Description of Unknown: Integrase B203 sequence
  SM00857,G3DSA:1.10.10.2600,IPR036162,PF13408,IPR025827, G3DSA:3.40.50.1390,PS51737,IPR006119,IPR038109,PF07508, SSF53041,IPR011109,PTHR30461,Coil,cd00338, PF00239
MKAAFLIRCSTKNQDLNRQTRDLTRLAKSMGYEYDLENLVYGEKITGKDDVTKKNRDSIDRLLRAAKEQRFDVVLVSEVSRMSRDPASGRIYVRLLINMNIPVYFKDIDLWTINPETGKKVRDAELVIGAAFDAAWKYLKSMKTQIASARRNELDNNRISIGQPYFGYKRYEGTDKSKKNQIVVNEEEAEVVQAVYNEYLKEGATLKSTALAITDKYGEKLNRKFSLGTIEHILIYESYATGIKKVNLKDPDTDEVEVFDVSTPIIIDKELYEAAANKRKNNRVKDEPYPNQQVYLLSKLIKCPDCGYTLTPRRKAGEFGQTYRLVNGKPAVSWLCMSGINNITDCTNRTSIANEKLEPIIWELVKKELIGYANMNDEKREEQIRECEEKIEYQNYSIQNFTKEIDKLKKRLSTAYQFSINAAEMAGDDEDMRTMAMEEFNRTAKGVRQEMKNFEKSIEQAKGELEKLRDLKTFYSQPTLPKDYLEQIEGNFTEKRNLVKQLITKIVPYRITTFKKKERESGVKTCNKMITVKNGAVLLEVYTIGGVYNVFYNANSKFQVKTAYYVHGEYATFQNGIRKFPAYDEGEYFVISNANMVMETDDIDEVVTVNEFVDIAIANNWVIEYQYI

SEQ ID NO: 203 - protein, 628 aa, Unknown
  Description of Unknown: Integrase B204 sequence
  SM00857,G3DSA:1.10.10.2600,IPR036162,PF13408,PS51737, G3DSA:3.40.50.1390,IPR025827,IPR006119,IPR038109,PF07508, IPR011109,SSF53041,PTHR30461,Coil,cd00338, PF00239
MKAAFLIRCSTKNQDLNRQTRDLTRLAKSMGYEYDLENLVYGEKITGKDDVTKKNRDSIDRLLRAAKEQRFDVVLVSEVSRMSRDPASGRIYVRLLINMNIPVYFKDIDLWTINPETGKKVRDAELVIGAAFDAAWKYLKSMKTQIASARRNELDNNRISIGQPYFGYKRYEGIDKSKKNQIVVNEEEAEVVQAVYNEYLKEGATLKSTALAITDKYGEQLNRKFSLGTIEHILTYESYATGIKKVNLKDPDTDEVEVFDVSTPIIIDKELYEAAANKRKNNRVKDEPYPNQQVYLLSKLIKCPDCGYTLTPRRKAGEFGQTYRLVNGKPAVSWLCMSGINNITDCTNRTSIANEKLEPIIWELVKKELIGYANMNDEKREEQIRECEEKIEYQNYSIQNFTKEIEKLKKRLSTAYQFSINAAEMAGDDEDMRTMAMEEFNRTAKGVRQEMKNFEKSIEQAKGELEKLRDLKTFYCQPTLPKDYLEQIEGNFTEKRNLVKQLITKIVPYRIITFKKKERESGVKTCNKMITVKNGAVLLEVYTIGGVYNVFYNANSKFQVKTAYYVHGEYATFQNGIRKYPAYDEGEYFVISNANMVMETDDIDEVVTVNEFVDIAIANNWVIEYQYI

SEQ ID NO: 204 - protein, 628 aa, Unknown
  Description of Unknown: Integrase B205 sequence
  SM00857,G3DSA:1.10.10.2600,IPR036162,PF13408,IPR025827, G3DSA:3.40.50.1390,PS51737,IPR006119,IPR038109,PF07508, SSF53041,IPR011109,PTHR30461,Coil,cd00338, PF00239
MKAAFLIRCSTKNQDLNRQTRDLTRLAKSMGYEYDLENLVYGEKITGKDDVTKKNRDSIDRLLRAAKEQRFDVVLVSEVSRMSRDPASGRIYVRLLINMNIPVYFKDIDLWTINPETGKKVRDAELVIGAAFDAAWKYLKSMKTQIASARRNELDNNRISIGQPYFGYKRYEGIDKSKKNQIVVNEEEAEVVQAVYNEYLKEGATLKSTALAITDKYGEKLNRKFSLGTIEHILTYESYATGIKKVNLKDPDTDEVEVFDVSTPIIIDKELYEAAANKRKNNRVKDEPYPNQQVYLLSKLIKCPDCGYTLTPRRKAGEFGQTYRLVNGKPAVSWLCMSGINNITDCTNRTSIANEKLEPIIWELVKKELIGYANMNDEKRGEQIRECEEKIEYQNYSIQNFTKEIEKLKKRLSTAYQFSINAAEMAGDDEDMRTMAMEEFNRTAKGVRQEMKNFEKSIEQAKGELEKLRDLKTFYSQPTLPKDYLEQIEGNFTEKRNLVKQLITKIVPYRIITFKKKERESGVKTCNKMITVKNGAVLLEVYTIGGVYNVFYNANSKFQVKTAYYVHGEYATFQNGIRKYPAYDEGEYFVISNANMVMETDDIDEVVTVNEFVDIAIANNWVIEYQYI

SEQ ID NO: 205 - protein, 628 aa, Unknown
  Description of Unknown: Integrase B206 sequence
  PTHR30461:SF3,SM00857,G3DSA:1.10.10.2600,IPR036162,PF13408, PS51737,G3DSA:3.40.50.1390,IPR025827,IPR006119,IPR038109, PF07508,SSF53041,IPR011109,PTHR30461,Coil, cd00338,PF00239
MKAAFLIRCSTKNQDLNRQTRDLTRLAKSMGYEYDLENLVYGEKITGKDDVTKKNRDSIDRLLRAAKEQRFDVVLVSEVSRMSRDPASGRIYVRLLINMNIPVYFKDIDLWTINPETGKKVRDAELVIGAAFDAAWKYLKSMKTQIASARRNELDNNRISIGQPYFGYKRYEGTDKSKKNQIVVNEEEAEVVLAVYNEYLKEGATLKSTALAITDKYGEKLNRKFSLGTIEHILTYESYATGIKKVNLKDPDTDEVEVFDVSTPIIIDKELYEAAANKRKNNRVKDEPYPNQQVYLLSKLIKCPDCGYTLTPRRKAGEFGQTYRLVNGKPAVSWLCMSGINNITDCTNRTSIANEKLEPIIWELVKKELIGYANMNDEKREEQIRECEEKIEYQNYSIQNFTKEIDKLKKRLSTAYQFSINAAEMAGDDEDMRTMAMEEFNRTAKGVRQEMKNFEKSIEQAKGELEKLRDLKTFYSQPTLPKDYLEQIEGNFTEKRNLVKQLITKIVPYRITTFKKKERESGVKTCNKMITVKNGAVLLEVYTIGGVYNVFYNANSKFQVKTAYYVHGEYATFQNGIRKYPAYDEGEYFVISNANMVMETDDIDEVVTVNEFVDIAIANNWVIEYQYI

SEQ ID NO: 206 - protein, 628 aa, Unknown
  Description of Unknown: Integrase B207 sequence
  SM00857,G3DSA:1.10.10.2600,IPR036162,PF13408,IPR025827, G3DSA:3.40.50.1390,PS51737,IPR006119,IPR038109,PF07508, SSF53041,IPR011109,PTHR30461,Coil,cd00338, PF00239
MKAAFLIRCSTKNQDLNRQTRDLTRLAKSMGYEYDLENLVYGEKITGKDDVTKKNRDSIDRLLRAAKEQRFDVVLVSEVSRMSRDPASGRIYVRLLINMNIPVYFKDIDLWTINPETGKKVRDAELVIGAAFDAAWKYLKSMKTQIASARRNELDNNRISIGQPYFGYKRYEGTDKSKKNQIVVNEEEAEVVQAVYNEYLKEGATLKSTALAITDKYGEKLNRKFSLGTIEHILTYESYATGIKKVNLKDPDTDEVEVFDVNTPIIIDKELYEAATNKRKKNRVKDEPYPNQQVYLLSKLIKCPDCGYTLTPRRKAGEFGQTYRLVNGKPAVSWFCMSGINNITNCTNRTSIANEKLEPIIWELVKKELIGYANMNDEKREEQIRECEEKIEYQNYSIQNFTKEIDKLKKRLSTAYQFSINAAEMAGDDEDMRTMAMEEFNRTAKGVRQEMKNFEKSIEQAKGELEKLRDLKTFYSQPTLPKDYLEQIEGNFTEKRNLVKQLITKIVPYRITTFKKKERESGVKTCNKMITVKNGAVLLEVYTIGGVYNVFYNANSKFQVKTAYYVHGEYATFQNGIRKFPAYDEGEYFVINNANMVMETDDIDEVVTVNEFVDIAIANNWVIEYQYI

SEQ ID NO: 207 - protein, 628 aa, Unknown
  Description of Unknown: Integrase B208 sequence
  SM00857,G3DSA:1.10.10.2600,IPR036162,PF13408,IPR025827, G3DSA:3.40.50.1390,PS51737,IPR006119,IPR038109,PF07508, SSF53041,IPR011109,PTHR30461,Coil,cd00338, PF00239
MKAAFLIRCSTKNQDLNRQTRDLTRLAKSMGYEYDLENLVYGEKITGKDDVTKKNRDSIDRLLRAAKEQRFDVVLVSEVSRMSRDPASGRIYVRLLINMNIPVYFKDIDLWTINPETGKKVRDAELVIGAAFDAAWKYLKSMKTQIASARRNELDNNRISIGQPYFGYKRYEGTDKSKKNQIVVNEEEAEVVQAVYNEYLKEGATLKSTALAITDKYGEKLNRKFSLGTIEHILIYESYATGIKKVNLKDPDTDEVEVFDVSTPIIIDKELYEAATNKRKKNRVKDEPYPNQQVYLLSKLIKCPDCGYTLTPRRKAGEFGQTYRLVNGKPAVSWLCMSGINNITDCTNRTSIANEKLEPIIWELVKKELIGYANMNDEKREEQIRECEEKIEYQNYSIQNFTKEIDKLKKRLSTAYQFSINAAEMAGDDEDMRTMAMEEFNRTAKGVRQEMKNFEKSIEQAKGELEKLRDLKTFYSQPTLPKDYLEQIEGNFTEKRNLVKQLITKIVPYRITTFKKKERESGVKTCNKMITVKNGAVLLEVYTIGGVYNVFYNANSKFQVKTAYYVHGEYATFQNGIRKFPAYDEGEYFVISNANMVMETDDIDEVVTVNEFVDIAIANNWVIEYQYI

SEQ ID NO: 208 - protein, 628 aa, Unknown
  Description of Unknown: Integrase B209 sequence
  SM00857,G3DSA:1.10.10.2600,IPR036162,PF13408,IPR025827, G3DSA:3.40.50.1390,PS51737,IPR006119,IPR038109,PF07508, IPR011109,SSF53041,PTHR30461,Coil,cd00338, PF00239
MKAAFLIRCSTKNQDLNRQTRDLTRLAKSMGYEYDLENLVYGEKITGKDDVTKKNRDSIDRLLRAAKEQRFNVVLVSEVSRMSRDPASGRIYVRLLINMNIPVYFKDIDLWTINPETGKKVRDAELVIGAAFDAAWKYLKSMKTQIASARRNELDNNRISIGQPYFGYKRYEGIDKSKKNQIVVNEEEAEVVQAVYNEYLKEGATLKSTALAITDKYGEQLNRKFSLGTIEHILTYESYATGIKKVNLKDPDTDEVEVFDVSTPIIIDKELYEAATNKRKKNRVKDEPYPNQQVYLLSKLIKCPDCGYTLTPRRKAGEFGQTYRLVNGKPAVSWLCMSGINNITDCTNRTSIANEKLEPIIWELVKKELIGYANMNDEKREEQIRECEEKIEYQNYSIQNFTKEIEKLKKRLSTAYQFSINAAEMAGDDEDMRTMAMEEFNRTAKGVRQEMKNFEKSIEQAKGELEKLRDLKTFYSQPTLPKDYLEQIEGNFTEKRNLVKQLITKIVPYRITTFKKKERESGVKTCNKMITVKNGAVLLEVYTIGGVYNVFYNANSKFQVKTAYYVHGEYATFQNGIRKYPAYDEGEYFVISNANMVMETDNIDEVVTVNEFVDIAIANNWVIEYQYQ

SEQ ID NO: 209 - protein, 628 aa, Unknown
  Description of Unknown: Integrase B210 sequence
  SM00857,G3DSA:1.10.10.2600,IPR036162,PF13408,IPR025827, G3DSA:3.40.50.1390,PS51737,IPR006119,IPR038109,PF07508, SSF53041,IPR011109,PTHR30461,Coil,cd00338, PF00239
MKAAFLIRCSTKNQDLNRQTRDLTRLAKSMGYEYDLENLVYGEKITGKDDVTKKNRDSIDRLLRAAKEQRFNVVLVSEVSRMSRDPASGRIYVRLLINMNIPVYFKDIDLWTINPETGKKVRDAELVIGAAFDAAWKYLKSMKTQIASARRNELDNNRISIGQPYFGYKRYEGTDKSKKNQIVVNEEEAEVVQAVYNEYLKEGATLKSTALAITNMYGEKLNRKFSLGTIEHILTYESYATGIKKVNLKDPDTDEVEVFDVSTPIIIDKELYEAATNKRKKNRVKDEPYPNQQVYLLSKLIKCPDCGYTLTPRRKAGEFGQTYRLVNGKPAVSWLCMSGINNITDCTNRTSIANEKLEPIIWELVKKELIGYANMNDEKREEQIRECEEKIEYQNYSIQNFTKEIDKLKKRLSTAYQFSINAAEMAGDDEDMRTMAMEEFNRTAKGVRQEMKNFEKSIEQAKGELEKLRDLKTFYSQPTLPKDYLEQIEGNFTEKRNLVKQLITKIVPYRITTFKKKERESGVKTCNKMITVKNGAVLLEVYTIGGVYNVFYNANSKFQVKTAYYVHGEYATFQNGIRKFPTYDEGEYFVISNANMVMETDNIDEVVTVNEFVDIAIANNWVIEYQYI

SEQ ID NO: 210 - protein, 628 aa, Unknown
  Description of Unknown: Integrase B211 sequence
  SM00857,G3DSA:1.10.10.2600,IPR036162,PF13408,PS51737, G3DSA:3.40.50.1390,IPR025827,IPR006119,IPR038109,PF07508, SSF53041,IPR011109,PTHR30461,Coil,cd00338, PF00239
MKAAFLIRCSTKNQDLNRQTRDLTRLAKSMGYEYDLENLVYGEKITGKDDVTKKNRDSIDRLLRAAKEQRFDVVLVSEVSRMSRDPASGRIYVRLLINMNIPVYFKDIDLWTINPETGKKVRDAELVIGAAFDAAWKYLKSMKTQIASARRNELDNNRISIGQPYFGYKRYEGTDKSKKNQIVVNEEEAEVVQAVYNEYLKEGATLKSTALAITDKYGEKLNRKFSLGTIEHILTYESYATGIKKVNLKDPDTDEVEVFDVSTPIIIDKELYEAAANKRKKNRVKDEPYPNQQVYLLSKLIKCPDCGYTLTPRRKAGEFGQTYRLVNGKPAISWLCMSGINNITDCTNRTSIANEKLEPIIWELVKKELIGYANMNDEKREEQIRECEEKIEYQNYSIQNFTKEIDKLKKRLSTAYQFSINAAEMAGDDEDMRTMAMEEFNRTAKGVRQEMKNFEKSIEQAKGELEKLRDLKTFYSQPTLPKDYLEQIEGNFTEKRNLVKQLITKIVPYRITTFKKKERESGVKTCNKMITVKNGAVLLEVYTIGGVYNVFYNANSKFQVKTAYYVHGEYATFQNGIRKFPAYDEGEYFVISNANMVMETDDIDEVVTVNEFVDIAIANNWVIEYQYI

SEQ ID NO: 211 - protein, 628 aa, Unknown
  Description of Unknown: Integrase B212 sequence
  SM00857,G3DSA:1.10.10.2600,IPR036162,PF13408,IPR025827, G3DSA:3.40.50.1390,PS51737,IPR006119,IPR038109,PF07508, SSF53041,IPR011109,PTHR30461,Coil,cd00338, PF00239
MKAAFLIRCSTKNQDLNRQTRDLTRLAKSMGYEYDLENLVYGEKITGKDDVTKKNRDSIDRLLRAAKEQRFDVVLVSEVSRMSRDPASGRIYVRLLINMNIPVYFKDIDLWTINPETGKKVRDAELVIGAAFDAAWKYLKSMKTQIASARRNELDNNRISIGQPYFGYKRYEGTDKSKKNQIVVNEEEAEVVQAVYNEYLKEGATLKSTALAITDKYGEKLNRKFSLGTIEHILTYESYATGIKKVNLKDPDTDEVEVFDVNTPIIIDKELYEAATNKRKKNRVKDEPYPNQQVYLLSKLIKCPDCGYTLTPRRKAGEFGQTYRLVNGKPAVSWLCMSGINNITDCTNRTSIANEKLEPIIWELVKKELIGYANMNDEKREEQIRECEEKIEYQNYSIQNFTKEIDKLKKRLSTAYQFSINAAEMAGDDEDMRTMAMEEFNRTAKGVRQEMKNFEKSIEQAKGELEKLRDLKTFYSQPTLPKDYLEQIEGNFTEKRNLVKQLITKIVPYRITTFKKKERESGVKTCNKMITVKNGAVLLEVYTIGGVYNVFYNANSKFQVKTAYYVHGEYATFQNGIRKFPTYDEGEYFVISNANMVMETDNIDEVVTVNEFVDIAIANNWVIEYQYI

SEQ ID NO: 212 - protein, 628 aa, Unknown
  Description of Unknown: Integrase B213 sequence
  cd00338,SM00857,G3DSA:1.10.10.2600,IPR036162,PF13408, IPR025827,G3DSA:3.40.50.1390,PS51737,IPR006119,IPR038109, PF07508,IPR011109,SSF53041,PTHR30461,Coil, PF00239
MKAAFLIRCSTKNQDLNRQTRDLTRLAKSMGYEYDLENLVYGEKITGKDDVTKKNRDSIDRLLRAAKEQRFDVVLVSEVSRMSRDPASGRIYVRLLINMNIPVYFKDIDLWTINPETGKKVRDAELVIGAAFDAAWKYLKSMKTQIASARRNELDNNRISIGQPYFGYKRYEGTDKSKKNQIVVNEEEAEVVQAVYNEYLKEGATLKSTALAITDKYGEQLNRKFSLGTIEHILTYESYATGIKKVNLKDPDTDEVEVFDVSTPIIIDKELYEAATNKRKKNRVKDEPYPNQQVYLLSKLIKCPDCGYTLTPRRKAGEFGQTYRLVNGKPAVSWLCMSGINNITDCTNRTSIANEKLEPIIWELVKKELIGYANMNDEKREEQIRECEEKIEYQNYSIQNFTKEIDKLKKRLSTAYQFSINAAEMAGDDEDMRTMAMEEFNRTAKGVRQEMKNFEKSIEQAKGELEKLRDLKTFYSQPTLPKDYLEQIEGNFTEKRNLVKQLITKIVPYRITTFKKKERESGVKTCNKMITVKNGAVLLEVYTIGGVYNVFYNANSKFQVKTAYYVHGEYATFQNGIRKYPAYDEGEYFVISNANMVMETDDIDEVVTVNEFVDIAIANNWVIEYQYI

SEQ ID NO: 213 - protein, 628 aa, Unknown
  Description of Unknown: Integrase B214 sequence
  SM00857,G3DSA:1.10.10.2600,IPR036162,PF13408,IPR025827, G3DSA:3.40.50.1390,PS51737,IPR006119,IPR038109,PF07508, SSF53041,IPR011109,PTHR30461,Coil,cd00338, PF00239
MKAAFLIRCSTKNQDLNRQTRDLTRLAKSMGYEYDLENLVYGEKITGKDDVTKKNRDSIDRLLRAAKEQRFDVVLVSEVSRMSRDPASGRIYVRLLINMNIPVYFKDIDLWTINPETGKKVRDAELVIGAAFDAAWKYLKSMKTQIASARRNELDNNRISIGQPYFGYKRYEGTDKSKKNQIVVNEEEAEVVQAVYNEYLKEGATLKSTALAITDKYGEKLNRKFSLGTIEHILTYESYATGIKKVNLKDPDTDEVEVFDVSTPIIIDKELYEAATNKRKKNRVKDEPYPNQQVYLLSKLIKCPDCGYTLTPRRKAGEFGQTYRLVNGKPAVSWLCMSGINNITDCTNRTSIANEKLEPIIWELVKKELIGYANMNDEKREEQIRECEEKIEYQNYSIQNFTKEIDKLKKRLSTAYQFSINAAEMAGDDEDMRTMAMEEFNRTAKGVRQEMKNFEKSIEQAKGELEKLRDLKTFYSQPTLPKDYLEQIEGNFTEKRNLVKQLITKIVPYRITTFKKKERESGVKTCNKMITVKNGAVLLEVYTIGGVYNVFYNANSKFQVKTAYYVHGEYATFQNGIRKFPTYDEGEYFVISNANMVMETDDIDEVVTVNEFVDIAIANNWVIEYQYI

SEQ ID NO: 214 - protein, 628 aa, Unknown
  Description of Unknown: Integrase B215 sequence
  SM00857,G3DSA:1.10.10.2600,IPR036162,PF13408,IPR025827, G3DSA:3.40.50.1390,PS51737,IPR006119,IPR038109,PF07508, SSF53041,IPR011109,PTHR30461,Coil,cd00338, PF00239
MKAAFLIRCSTKNQDLNRQTRDLTRLAKSMGYEYDLENLVYGEKITGKDDVTKKNRDSIDRLLRAAKEQRFNVVLVSEVSRMSRDPASGRIYVRLLINMNIPVYFKDIDLWTINPETGKKVRDAELVIGAAFDAAWKYLKSMKTQIASARRNELDNNRISIGQPYFGYKRYEGTDKSKKNQIVVNEEEAEVVQAVYNEYLKEGATLKSTALAITNMYGEKLNRKFSLGTIEHILTYESYATGIKKVNLKDPDTDEVEVFDVSTPIIIDKELYEAATNKRKKNRVKDEPYPNQQVYLLSKLIKCPDCGYTLTPRRKAGEFGQTYRLVNGKPAVSWFCMSGINNITNCTNRTSIANEKLEPIIWELVKKELIGYANMNDEKREEQIRECEEKIEYQNYSIQNFTKEIDKLKKRLSTAYQFSINAAEMAGDDEDMRTMAMEEFNRTAKGVRQEMKNFEKSIEQAKGELEKLRDLKTFYSQPTLPKDYLEQIEGNFTEKRNLVKQLITKIVPYRITTFKKKERESGVKTCNKMITVKNGAVLLEVYTIGSVYNVFYNANSKFQVKTAYYVHGEYATFQNGIRKYPAYNEGEYFVISNANMVMETDDIDEVVTVNEFVDIAIANNWVIEYQYI

SEQ ID NO: 215 - protein, 628 aa, Unknown
  Description of Unknown: Integrase B216 sequence
  SM00857,G3DSA:1.10.10.2600,IPR036162,PF13408,IPR025827, G3DSA:3.40.50.1390,PS51737,IPR006119,IPR038109,PF07508, SSF53041,IPR011109,PTHR30461,Coil,cd00338, PF00239
MKAAFLIRCSTKNQDLNRQTRDLTRLAKSMGYEYDLENLVYGEKITGKDDVTKKNRDSIDRLLRAAKEQRFDVVLVSEVSRMSRDPASGRIYVRLLINMNIPVYFKDIDLWTINPETGKKVRDAELVIGAAFDAAWKYLKSMKTQIASARRNELDNNRISIGQPYFGYKRYEGTDKSKKNQIVVNEEEAEVVQAVYNEYLKEGATLKSTALAITDKYGEKLNRKFSLGTIEHILTYESYATGIKKVNLKDPDTDEVEVFDVNTPIIIDKELYEAATNKRKKNRVKDEPYPNQQVYLLSKLIKCPDCGYTLTPRRKAGEFGQTYRLVNGKPAVSWLCMSGINNITDCTNRTSIANEKLEPIIWELVKKELIGYANMNDEKREEQIRECEEKIEYQNYSIQNFTKEIDKLKKRLSTAYQFSINAAEMAGDDEDMRTMAMEEFNRTAKGVRQEMKNFEKSIEQAKGELEKLRDLKTFYSQPTLPKDYLEQIEGNFTEKRNLVKQLITKIVPYRITTFKKKERESGVKTCNKMITVKNGAVLLEVYTIGGVYNVFYNANSKFQVKAAYYVHGEYATFQNGIRKYPAYNEGEYFVISNANMVMETDDIDEVVTVNEFVDIAIANNWVIEYQYI

SEQ ID NO: 216 - protein, 628 aa, Unknown
  Description of Unknown: Integrase B217 sequence
  SM00857,G3DSA:1.10.10.2600,IPR036162,PS51737,G3DSA:3.40.50.1390, IPR006119,IPR038109,PF07508,IPR011109,SSF53041, PF00239,PTHR30461,PS51736,Coil,cd00338
MKENEEKLSSAAAQKEKIRQRYKGISENELDVIPALPQENFYEDQHEKRVAVYARVSTDDPRQTSSYELQKNHYQDVVSRHAGWKLIDIYADEGISGTSLQHRDAFIRMIADCQAGKIDLIVTKSVSRFARNVLDCIGHVRQLKAMKPPIGVFFETENIYTLNENSEMSLSFISTLAQEESHNKSEIMNASIEMRFRRGIFLTPPLLGYDQDEDGNLVINEEEAETVRLIFFMYLYGYTCQEIANTLTKTGRRTKLGNTTWSPSSVLSVLTNERHCGDVLARKTWTPSYLDHKSKKNRQDRNQYRQRNHHEAIISRDDFIAVQRLISNAKYGNKGILPELHVINDGVLRGCVTVNPKWAGFKADDYKRASESVYDELIRDKSMEVQVKSGDLDLRGYEIARAQFFDTLNKVCVTLSSDTMNFSTECVRKFNSQFIEILVHPSERFIAIRPSTKDSRNSVQWSKKHNGLIVPRQISGAAFLPNIFDLFNWDTECRYRIIGVKRQNNDESIILFYLEDTEMLIPNATIVAAEEDTDIPKPSFDDDIKPIGTRGSILAYPEEWIHTFGSDYYRQAQANELQTYNETGKWNTQSEGTPFNLDEVPLQVTSVQEIEETLENILNNQNQEETNE

SEQ ID NO: 217 - protein, 628 aa, Unknown
  Description of Unknown: Integrase B218 sequence
  SM00857,G3DSA:1.10.10.2600,IPR036162,PF13408,IPR025827,G3DSA:3. 40.50.1390,PS51737,IPR006119,IPR038109,PF07508,SSF53041,IPR011109 ,PTHR30461,Coil,cd00338,PF00239
MKAAFLIRCSTKNQDLNRQTRDLTRLAKSMGYEYDLENLVYGEKITGKDDVTKKNRDSIDRLLRAAKEQRFDVVLVSEVSRMSRDPASGRIYVRLLINMNIPVYFKDIDLWTINPETGKKVRDAELVIGAAFDAAWKYLKSMKTQIASARRNELDNNRISIGQPYFGYKRYEGTDKSKKNQIVVNEEEAEVVQAVYNEYLKEGATLKSTALAITDKYGEKLNRKFSLGTIEHILTYESYATGIKKVNLKDPDTDEVEVFDVSTPIIIDKELYEAATNKRKKNRVKDEPYPNQQVYLLSKLIKCPDCGYTLTPRRKAGEFGQTYRLVNGKPAVSWLCMSGINNITDCTNRTSIANEKLEPIIWELVKKELIGYANMNDEKREEQIRECEEKIEYQNYSIQNFTKEIDKLKKRLSTAYQFSINAAEMAGDDEDMRTMAMEEFNRTAKGVRQEMKNFEKSIEQAKGELEKLRDLKTFYSQPTLPKDYLEQIEGNFTEKRNLVKQLITKIVPYRITTFKKKERESGVKTCNKMITVKNGAVLLEVYTIGGVYNVFYNANSKFQVKTAYYVHGEYATFQNGIRKFPTYDEGEYFVISNANMVMETDNIDEVVTVNEFVDIAIANNWVIEYQYI

SEQ ID NO: 218 - protein, 628 aa, Unknown
  Description of Unknown: Integrase B219 sequence
  SM00857,G3DSA:1.10.10.2600,IPR036162,PF13408,IPR025827, G3DSA:3.40.50.1390,PS51737,IPR006119,IPR038109,PF07508, SSF53041,IPR011109,PTHR30461,Coil,cd00338, PF00239
MKAAFLIRCSTKNQDLNRQTRDLTRLAKSMGYEYDLENLVYGEKITGKDDVTKKNRDSIDRLLRAAKEQRFDVVLVSEVSRMSRDPASGRIYVRLLINMNIPVYFKDIDLWTINPETGKKVRDAELVIGAAFDAAWKYLKSMKTQIASARRNELDNNRISIGQPYFGYKRYEGIDKSKKNQIVVNEEESEVVQAIYNEYLKEGATLKSTALAITDKYGEKLNRKFSLGTIEHILTYESYATGIKKVNLKDPDTDEVEVFDVSTPIIIDKELYEAATNKRKKNRVKDEPYPNQQVYLLSKLIKCPDCGYTLTPRRKAGEFGQTYRLVNGKPAVSWLCMSGINNITDCTNRTSIANEKLEPIIWELVKKELIGYANMNDEKREEQIRECEEKIEYQNYSIQNFTKEIDKLKKRLSTAYQFSINAAEMAGDDEDMRTMAMEEFNRTAKGVRQEMKNFEKSIEQAKGELEKLRDLKTFYSQPTLPKDYLEQIEGNFTEKRNLVKQLITKIVPYRIITFKKKERESGVKTCNKMITVKNGAVLLEVYTIGGVYNVFYNANSKFQVKTAYYVHGEYATFQNGIRKYPAYDEGEYFVISNANMVMETDDIDEVVTVNEFVDIAIANNWVIEYQYQ

SEQ ID NO: 219 - protein, 628 aa, Unknown
  Description of Unknown: Integrase B220 sequence
  SM00857,G3DSA:1.10.10.2600,IPR036162,PF13408,PS51737, G3DSA:3.40.50.1390,IPR025827,IPR006119,IPR038109,PF07508, SSF53041,IPR011109,PTHR30461,Coil,cd00338, PF00239
MKAAFLIRCSTKNQDLNRQTRDLTRLAKSMGYEYDLENLVYGEKITGKDDVTKKNRDSIDRLLRAAKEQRFDVVLVSEVSRMSRDPASGRIYVRLLINMNIPVYFKDIDLWTINPETGKKVRDAELVIGAAFDAAWKYLKSMKTQIASARRNELDNNRISIGQPYFGYKRYEGTDKSKKNQIVVNEEEAEVVQAVYNEYLKEGATLKSTALAITDKYGEKLNRKFSLGTIEHILTYESYATGIKKVNLKDPDTDEVEVFDVSTPIIIDKELYEAATNKRKKNRVKDEPYPNQQVYLLSKLIKCPDCGYTLTPRRKAGEFGQTYRLVNGKPAISWLCMSGINNITDCTNRTSIANEKLEPIIWELVKKELIGYANMNDEKREEQIRECEEKIEYQNYSIQNFTKEIDKLKKRLSTAYQFSINAAEMAGDDEDMRTMAMEEFNRTAKGVRQEMKNFEKSIEQAKGELEKLRDLKTFYSQPTLPKDYLEQIEGNFTEKRNLVKQLITKIVPYRITTFKKKERESGVKTCNKMITVKNGAVLLEVYTIGGVYNVFYNANSKFQVKTAYYVHGEYATFQNGIRKYPAYDEGEYFVISNANMVMETDDIDEVVTVNEFVAIAIANNWVIEYQYI

SEQ ID NO: 220 - protein, 628 aa, Unknown
  Description of Unknown: Integrase B221 sequence
  cd00338,SM00857,G3DSA:1.10.10.2600,IPR036162,PS51737, G3DSA:3.40.50.1390,IPR006119,IPR038109,PF07508,SSF53041, IPR011109,PTHR30461,PS51736,Coil,PF00239
MTNTIFKNNTKIGNPYDFLDRNRHRKMVFYGRVSTEHEAQMAALENQIEWYDDQAKYHPNWEVLNKYIDEGITGTQAKKRPAFLQMIEDAKKGKFDLIVTREVCRFARNTVDTLVTTRELKNIGVEVYFVEDNIWTMDGDGELRLTIMATLAQEESRKTSERVKAGQHISRQQGMVYGRGNILGYNRKAKSTYTINPEQAETVRMIFDMYLQGEMGASKIANELTRLGRKNASGLVKWSPCVITRIVNNPTYMGYQAYGKSYSNNYLEQKRILNNDFSTYMLVKSDYEPIITEEEWYRCQEIKQRRVTKTIGVSTDGKKKQPNHGKNETKDLWATKLKCRCGASFRRNRWHKNNNAPWSYGYLCYNRLNNGSAQKRRDAGLDDTGYCDQTEIPDWKLEMMGKMIMEQVWRTRAEDIKLACEILQECYKPDSKAPQQNKSVMLANIEKLKSKKDILLDMRSDGEITKEEFLKKKEDIDKKISQLTAEYEKDDCPTESDEAGLELGKIEAALNELIDFSQLVLPREIYQKFVSKVTPYSKTHYRWYLNLDGTGTQMADVKVNGRKSNATVAFCDEGEIPPVHFKEIIFFNILKQEIKNKKSFFVATLHRLLLLRCNSVIFVLMGKTIYQP

SEQ ID NO: 221 - protein, 628 aa, Unknown
  Description of Unknown: Integrase B222 sequence
  SM00857,G3DSA:1.10.10.2600,IPR036162,PF13408,IPR025827, G3DSA:3.40.50.1390,PS51737,IPR006119,IPR038109,PF07508, SSF53041,IPR011109,PTHR30461,Coil,cd00338,PF00239
MKAAFLIRCSTKNQDLNRQTRDLTRLAKSMGYEYDLENLVYGEKITGKDDVTKKNRDSIDRLLRAAKEQRFDVVLVSEVSRMSRDPASGRIYVRLLINMNIPVYFKDIDLWTINPETGKKVRDAELVIGAAFDAAWKYLKSMKTQIASARRNELDNNRISIGQPYFGYKRYEGTDKSKKNQIVVNEEEAEVVQAVYNEYLKEGATLKSTALAITDKYGEKLNRKFSLGTIEHILTYESYATGIKKVNLKDPDTDEVEVFDVNTPIIIDKELYEAATNKRKKNRVKDEPYPNQQVYLLSKLIKCPDCGYTLTPRRKAGEFGQTYRLVNGKPAVSWLCMSGINNITDCTNRTSIANEKLEPIIWELVKKELIGYANMNDEKREEQIRECEEKIEYQNYSIQNFTKEIDKLKKRLSTAYQFSINAAEMAGDDEDMRTMAMEEFNRTAKGVRQEMKNFEKSIEQAKGELEKLRDLKTFYSQPTLPKDYLEQIEGNFTEKRNLVKQLITKIVPYRITTFKKKERESGVKTCNKMITVKNGAVLLEVYTIGGVYNVFYNANSKFQVKTAYYVHGEYATFQNGIRKYPAYNEGEYFVISNANMVMETDDIDEVVTVNEFVDIAIANNWVIEYQYI

SEQ ID NO: 222 - protein, 628 aa, Unknown
  Description of Unknown: Integrase B223 sequence
  SM00857,G3DSA:1.10.10.2600,IPR036162,PF13408,IPR025827, G3DSA:3.40.50.1390,PS51737,IPR006119,IPR038109,PF07508, IPR011109,SSF53041,PTHR30461,Coil,cd00338, PF00239
MKAAFLIRCSTKNQDLNRQTRDLTRLAKSMGYEYDLENLVYGEKITGKDDVTKKNRDSIDRLLRAAKEQRFNVVLVSEVSRMSRDPASGRIYVRLLINMNIPVYFKDIDLWTINPETGKKVRDAELVIGAAFDAAWKYLKSMKTQIASARRNELDNNRISIGQPYFGYKRYEGTDKSKKNQIVINEEEAEVVQAVYNEYLKEGATLKSTALAITDKYGEKLNRKFSLGTIEHILTYESYATGIKKVNLKDPDTDEVEVFDVSTPIIIDKELYEAATNKRKKNRVKDEPYPNQQVYLLSKLIKCPDCGYTLTPRRKASEFGQTYRLVNGKPAVSWLCMSGINNASNCTSRTSIANEKLEPIIWELVKKELIGYANMNDEKREEQIRECEEKIEYQNYSIQNFTKEIDKLKKRLSTAYQFSINAAEMAGDDEDMRTMAMEEFNRTAKGVRQEMKNFEKSIEQAKGELEKLRDLKTFYSQPTLPKDYLEQIEGNFTEKRNLVKQLITKIVPYRITTFKKKERESGAKTCNKMITVKNGAVLLEVYTIGGVYNVFYNANSKFQVKTAYYVHGEYATFQNGIRKFPAYDEGEYFVISNANMVMETDDIDEVVTVNEFVDIAIANNWVIEYQYQ

SEQ ID NO: 223 - protein, 628 aa, Unknown
  Description of Unknown: Integrase B224 sequence
  PTHR30461:SF3,SM00857,G3DSA:1.10.10.2600,IPR036162,PF13408, IPR025827,G3DSA:3.40.50.1390,PS51737,IPR006119,IPR038109, PF07508,SSF53041,IPR011109,PTHR30461,Coil, cd00338,PF00239
MKAAFLIRCSTKNQDLNRQTRDLTRLAKSMGYEYDLENLVYGEKITGKDDVTKKNRDSIDRLLRAAKEQRFNVVLVSEVSRMSRDPASGRIYVRLLINMNIPVYFKDIDLWTINPETGKKVRDAELVIGAAFDAAWKYLKSMKTQIASARRNELDNNRISIGQPYFGYKRYEGTDKSKKNQIVVNEEEAEVVQAVYNEYLKEGATLKSTALAITNMYGEKLNRKFSLGTIEHILTYESYATGIKKVNLKDPDTDEVEVFDVSTPIIIDKELYEAATNKRKKNRVKDEPYPNQQVYLLSKLIKCPDCGYTLTPRRKAGEFGQTYRLVNGKPAVSWLCMSGINNITDCTNRTSIANEKLEPIIWELVKKELIGYANMNDEKREEQIRECEEKIEYQNYSIQNFTKEIDKLKKRLSTAYQFSINAAEMAGDDEDMRTMAMEEFNRTAKGVRQEMKNFEKSIEQAKGELEKLRDLKTFYSQPTLPKDYLEQIEGNFTEKRNLVKQLITKIVPYRITTFKKKERESGVKTCNKMITVKNGAVLLEVYTIGGVYNVFYNANSKFQVKTAYYVHGEYATFQNGIRKYPAYDEGEYFVISNANMVMETDDIDEVVTVNEFVDIAIANNWVIEYQYQ

SEQ ID NO: 224 - protein, 627 aa, Unknown
  Description of Unknown: Integrase B225 sequence
  PTHR30461:SF3,SM00857,G3DSA:1.10.10.2600,IPR036162,PF13408, IPR025827,PS51737,G3DSA:3.40.50.1390,IPR006119,IPR038109, PF07508,IPR011109,SSF53041,PF00239,PTHR30461, PS51736,Coil,cd00338
MARKKNIAAGLDAVIYARYSSHNQREVSIEQQIAECTKHAAALGLRVVGTYEDRAISGKTDNRPRFQQMMRDAEKGKFQAVVAWKSNRIGRNMLQAMVNEAKLDDYGVKVFYAEEDFDDTAAGRFALRNMMNVNQFYSENMAEDITRGLYDNANKCMANGRQPLGYKRGADGKVMLDEPAAAVVREIFTRVATGDLFVDIARDLNAKGIKTSKGAAWNKGSFQSICQNERYKGIYIYGNVRIVDGIPRIVSDELWYRVQEAMRMKKNPVGTRHRVGAEDYLLTGKLRCGHCGSYMTGVSGTSRNGELHYYYTCQKRRTEHACNKKNVRRDVIEPAIAQAIKMYCLTDDVIEWVADRTVEYWEKHDNDLHIEALEQQLEENKKATSNMLKAIEMGIITDATRSRMIELETEQSKLAVQLNAAKADVVKIDRDDLIDELQIFRDMDVNNRSVQAELFKDFLVAAYLYDDNRLKLVFSFMGKEKNVEIPLETGEDPPDGGDSPDTKMFVFAPDCSTKKALYFVGSMVLFFFVPAKRSGVHRSPCRRASDTPDLHNSRHLPCRFNRGFRGQHGAGPTAPAPAWQALAGARAVRQRGRRRKKKFLRRKVCVAAVVSPGKMTRRFTSFWERSI

SEQ ID NO: 225 - protein, 627 aa, Unknown
  Description of Unknown: Integrase B226 sequence
  PTHR30461:SF3,IPR036162,PS51737,IPR011109,PTHR30461, PF00239,G3DSA:1.10.10.2600,PF14287,IPR006119,SSF53041, IPR025378,SM00857,IPR025827,cd03770,IPR038109, mobidb-lite,PS51736,PF13408,G3DSA:3.40.50.1390,PF07508,Coil
MTEKQGFMTALYERLSRDDELNGESNSISNQKKLLEQYAKEHGFTNLVHFTDDGISGTRFDRPGFLAMMKEVESGKVGTILIKDMSRMGRDYLKVGQYMELLRQKNVRLIAVNENVDSFREDDDFTPFRNIMNEWYARDTSKKIKSTFKAKGKSGKHVASTTPYGYLKDKDDPNVWIVDEEAAVVVRRIFHMTMDGYGPYQIAKALKEDKVEIPAVHMAKKDAGLWKGRVEEIKDPYGWGSSTVAGILKKREYLGHTVNFKTRKHFKDKKSHYVSEDNWTVFENTQEAIIDQETFDNVQRIRSNVRRYPDGWGEAHPLTGLMYCADCGSKMYVHRVNNGKRVPQYTCSAYSKVPVGTLCQTQHRINADVVMELIKELLKAVAEYSQLNREEFLETVKKAQTSQQSSEITRLKSRLAEAKKRVQELEKLICRIYEDNILGKLPDERYAILDGQYSKEQKDLSAEIADMEAELSGYEEGRRSAEKFIALVDKYQNFEELTTYMLNEFVEKIVVHERDRKGSVETTQEVEIYFNFIGRYLPPHFGEVKMTPEEIEEMEKREARKDRLHQNYLRRKANGKQQEYYERTKAKKKAELDAKKEEIRQEDIAKGVFIPLSLLPPAEPKKGVASA

SEQ ID NO: 226 - protein, 626 aa, Unknown
  Description of Unknown: Integrase B227 sequence
  PTHR30461:SF3,IPR036162,PS51737,IPR011109,PTHR30461, PF00239,G3DSA:1.10.10.2600,IPR006119,PF14287,SSF53041, IPR025378,SM00857,IPR025827,cd03770,IPR038109, PS51736,mobidb-lite,PF13408,G3DSA:3.40.50.1390,PF07508,Coil
MRNEKITPLYERLSRDDELQGESNSISNQKQMLEDFARRNGLPNPTHFTDDGISGTRFDRPGFLAMMEEVEAGRVEAIVIKDMSRLGRDYLKVGQVMEVLRQRGVRLIAINDGVDSLKGDDDFTPFRNIMNEFYARDTSRKIRSVFKSKGMSGKHLTGTVIYGYLWDEKREHWLVDEEAAEVVRRIFSLTLEGYGPYQIACKLSADRIEIPVVHLARFNEGVNRSKPVKDPYGWGSSTIVNILKKREYLGHTINFKTRKHFKDKKSHYVSEDEWTIFENTHEAIIDQQTFDLAQKIRSNVRRYPNGWGEAAPLTGLLYCADCGGKMYVHRTNNGKRISQYTCSNYTKVPCGTLCPTQHRINESAVLTLVSDTLRAIAEYSRNDRTEFIHTVQETQVAQQSADISKKRRRLAAAQKRAGELEKLICKIYEDNALGKLPDARYRALDAQYAKEQDALEIEIAELEKAVTGYEQSQKSAEKFIALIDKYENFDTLTNTMLNEFVEKILVHERARKGSQDTTQEIEIYFNFLGRYIPPSLQPVPLTPEEQEELRKKEERKDRLHQNYLKRKASGAQKRYEDKIKAKKKAEMDAKKALIRAEDMKKGVFSTIGQLPKEEPRKGSIAASAAV

SEQ ID NO: 227 - protein, 625 aa, Unknown
  Description of Unknown: Integrase B228 sequence
  PTHR30461:SF3,cd00338,SM00857,G3DSA:1.10.10.2600,IPR036162, PF13408,PS51737,G3DSA:3.40.50.1390,IPR025827,IPR006119, IPR038109,PF07508,IPR011109,SSF53041,PTHR30461, PS51736,Coil,PF00239
MSSVDKIAVVYARYSSHGQTEQSIEGQIAAAQKYAEQHGYTIIHVYADRAMTGRNDDREEFQRMLSDTATHQFGVILLWKIDRFGRNREEIAFNRYRCKKNGVRVERVAEDVPDGPEGVILDSVLEGMAEYYSLQLAQNVRRGQRESAKKSMSIGGNKMLGYIVNPETKRYESDPKTASYVTEIFKRYANGETISEIVAWLNAQGIRTTRGSEFTVNSLHRLLKNEKYTGVYIFHDIRNEGGMPALTDRTTFDKVQEMLKVNRRAPARVWSKTEYLLTDKLFCGHCGAMMVGESGHGRNGIKHSYYTCLNRKKKKSCDKKPVRQDVIESLVLRAIGKLLENPATLENIADQVWAAYERSDTSGDAIKALDKQIADVDRALSNVMKAIEMGIINEMTKTRMDELTNQKQALSTARAEAGLAEGFKLTRDMILFFLQEISALDMADRDSQKRLIKTFVNAIYLYDDHFDIAFNYTDNGNVVVRMREINDAARGEMFGRCAQCPTKKDPQLRLRVLFCAGAGRIRTGRPSADGKKQSCGLFFRPRLANPPAPTKKLWQEYCRSFFSLVYRAKSAKAMTDFQSAFYRDVQLLPGGWIFSGCRKTLVGASIARPRPFALQETIPENALLR

SEQ ID NO: 228 - protein, 625 aa, Unknown
  Description of Unknown: Integrase B229 sequence
  PTHR30461:SF3,IPR036162,PS51737,IPR011109,PTHR30461, PS00028,PS00397,PF00239,G3DSA:1.10.10.2600,IPR006119, SSF53041,IPR013087,cd00338,SM00857,IPR038109, PS51736,IPR006118,G3DSA:3.40.50.1390,PF07508,Coil
MAKHAITIPQNPKAALYIRVSTDMQADKDSLPLQESDLRKLADLNGINDTEVFCDAGFSGKNLNRPAFRSMMDRIRAREFSHLYVWKLDRISRNLLDFLELYDELKCYGVAFASKNECFDTQSPGGEAMLKILLIFAELERKTIAERVTAVMLGRANENKWNGGRVPFGYMPGPVTTDANGKKCKSWPVPDPIEAPIVRAIFELYLREKALKKVAKALNAAGYRSRKGTLWSDTTVRCILKNHFYKGEYVYNRQNPNAGRREDFYRSENDWVVVTGQHEAIIPEETWRRCNEMLSKNRSWLAPIGSLVSAQDKYIFGGLLQCAECGYTMNSKDRTGAHDHIHSSYYYCTGRWKAPAVCTGEHSGYASDRTLLPQTLKLIARMIEACANAIKFASAEQLVSYLLNDNLIPGAIGIEESQRIFMIVRSHVKHVYGVDQADQFNPNALLVEQSQKEKEKQERALSRLKRAYLFDDGDMSEAEYFEQKAAIEDTIAKLEKQIKSLSGNDIGADEAYLAQLSKLIMIKKLQDTNSDFDYYKLAKAIGRKPIHDFLSEIISRIIIGKKNRIIKIIFKNSVPITFQYAKKKIPSHKAIMTGYRLFICVLLLDALRIPYARQLVSSGPYGRQN

SEQ ID NO: 229 - protein, 625 aa, Unknown
  Description of Unknown: Integrase B230 sequence
  PTHR30461:SF3,cd00338,SM00857,G3DSA:1.10.10.2600,IPR036162, PF13408,IPR025827,G3DSA:3.40.50.1390,PS51737,IPR006119, IPR038109,PF07508,IPR011109,SSF53041,PTHR30461, PS51736,Coil,PF00239
MSSVDKIAVVYARYSSHGQTEQSIEGQIAAAQKYAEQHGYTIIHVYADRAMTGRNDDREQFQKMLSDTAMHQFGVILLWKIDRFGRNREEIAFNRYRCKKNGVRVERVAEDVPDGPEGVILDSVLEGMAEYYSLQLAQNVRRGQRESAKKSMSIGGNKMLGYIVNPETKRYESDPKTASYVTEIFKRYANGETISEIVVWLNAQGIRTTRGSEFTVNSLHRLLKNEKYTGVYIFHDIRNEGGMPALTDRATFDKVQEMLKVNRRAPVRVWSKTEYLLTDKLFCGHCGAMMVGESGHGRNGIKHSYYTCLNRKKKKSCDKKPVRQDVIEPLVLKSIGKLLENPATLENIADQVWAAYERSDTSGDTIKALDKQIADVNKALSNVMKAIEMGIINEMTKTRMDELTDQKQALSAARAEAGLAGGFKLTRDMILFFLQEIAALDMADRDSQKRLIKTFVNAIYLYDDHFDIAFNYTDNGKMVVRMQEINDAVRGEVFGRCAQSPTKKDPQLRLRVLFCAGAGRIRTGRPSADSKKQSCGLFFRPRLANPPAPTKKLRQRYCRSFFSLLYRTKQAKAVSDFQSAFYRDVQLLPGGWIFSGCRKTLVGASIARLRPFALQETIPENALLR

SEQ ID NO: 230 - protein, 624 aa, Unknown
  Description of Unknown: Integrase B231 sequence
  PTHR30461:SF3,IPR036162,PS51737,IPR011109,PTHR30461, PF00239,G3DSA:1.10.10.2600,IPR006119,PF14287,SSF53041, IPR025378,SM00857,IPR025827,cd03770,IPR038109, PS51736,PF13408,G3DSA:3.40.50.1390,PF07508,Coil
MSKSEKITALYERLSRDDDMDGESNSISNQKRQLEDYAAQHNLPNIVHFTDDGISGTRFDRPGFLALMKEVEAGNVEYLCLKDMSRLGRDYLKVGQIMEILRQQGVRLIAINDGVDTARGDDDFTPFRNIMNEYYARDTSRKIRSTFQAKGKTGKHLTGLVIYGYLWNETRDQWLVDEYSAEVVKRIFSMTIEGMGPYQIANRLKEEKVLIPSAYLAQFNEGVNKNKTFKDVYGWGSSTICNILDKREYLGHTINFKTRKHFKDKKSHYVPEDEWTIFENTHEAIIDQETFDLAQKVRSKVRRYPDGWGDVAPLTGLLYCADCGGKMYVHRFNNGKRISQYTCSKYSKIPVGTLCKTQHRINESVVLELVKDLLKAIAEYAKHERAEFVRVVQEAQSSQQTAEVKKQRTRLATAKQRISELEVLLCKIYEDNILGKLSDSRYATLDAQYEKEQKELTAEISTLEKAISDYEKHEKDADRFIALIDKYENFDELTITMLNEFVEKILVHERDRKGSIQTTQEVEIYFNFVGRFVPPKFAEVELTPEELEEIRKREERKDRLHQNYLKRKASGWQRQYEDRTKAKKKAEMDAKKNALRAEDIAKGVFIPVSNMPKLEPKIAPQKGA

SEQ ID NO: 231 - protein, 624 aa, Unknown
  Description of Unknown: Integrase B232 sequence
  cd00338,IPR036390,SM00857,IPR036162,PF13408, IPR025827,G3DSA:3.40.50.1390,IPR006119,PF07508,IPR011109, SSF53041,PTHR30461,SSF46785,Coil,PF00239
MSELSKFSPQTRVAIYNRVSTEKKVQMEALDVQVAYTRKLVEDNHLTIVDQYIEPETGTEAEHRLEYQRMIRDIKADRIDLVVVKCSDRLCRDQAEWHNFVKLHLQKKFQLYFYLDDHIYDHERDDIKYSVQAIVDAEQSKITSKKIRDIHSNRQIYATGSKALHICRPLYGWDRNVEFIDENTKRVWWTVNEKEATELRYALSLVEQGIGFYRLANIMYDRGVRSKGTTGYHKMPSVRIAANTWKKMLTSPMLHGDCILHKEVSNFYTKERVKLPQEDWIYKENVIPPIVSREYHEKIVQIIDARRFQMGCCKGLAGTYKWSNRLVCANCKKPYYRMHYKLNSEKVITWKCSEQFQRTRSACDNMVIAEKELEKQLAAALKEKYAYLFHISSGLINDTIHTIEKALCNSDNGKKLKALENQRELLIRNKDVLFHKLMNGVISDEDFGIYKDRLETELRELEEKIEGQKDGEKSLADQYRRLQQIRDTIENKNYNEQAILEILYGCVEVIEIHNNGDMDVTMSRELMRSKFELYSIVESDYSLFYFSFTYKKETIYDRNRKAYNEKVLELIRSEKYITIPQMAERLGNTYSYTWHSIQQLKEQGRIVYIKEKFEHSECYWEVVE

SEQ ID NO: 232 - protein, 624 aa, Unknown
  Description of Unknown: Integrase B233 sequence
  IPR036390,SM00857,IPR036162,PF13408,IPR025827, G3DSA:3.40.50.1390,IPR006119,PF07508,SSF53041,IPR011109, PTHR30461,Coil,SSF46785,cd00338,PF00239
MSELSKFSPQTRVAIYNRVSTEKKVQMEALDVQVAYTRKLVEDNHLTIVDQYIEPETGTEAEHRLEYQRMIRDIKADRIDLVVVKCSDRLCRDQAEWHNFVKLHLQKKFQLYFYLDDHIYDHERDDIKYSVQAIVDAEQSKITSKKIRDIHSNRQIYATGSKALHICRPLYGWDRNVEFIDENTKRVWWTVNEKEATELRYALSLVEQGIGFYRLANIMYDRGVRSKGTTGYHKMPSVRIAANTWKKMLTSPMLHGDCILHKEVSNFYTKERVKLPQEDWIYKENVIPPIVSREYHEKIVQIIDARRFQMGCCKGLAGTYKWSNRLVCANCKKPYYRMHYKLHSEKVITWKCSEQFQRTRSACDNMVIAEKELEKQLAAALKEKYAYLFHISSGLINDTIHTIEKALCNSDNGKKLKALETQRELLLRNKDVLFHKLMNGVISDEDFGIYKDRLEKELRELEEKIEGQKDGEKSLADQYRRLQQIRDTIENKNYNEQAILEILYGCVEVIEIHNNGDMDVTMSRELMRSKFELYSIVESDYSLFHFSFTYKKETIYDRNRKAYNEKVLELIRSEKYITIPQMAEQLGNTYSYTWHSIQQLKEQGRIVYIKEKFEHSECYWEVVE

SEQ ID NO: 233 - protein, 624 aa, Unknown
  Description of Unknown: Integrase B234 sequence
  IPR036390,SM00857,IPR036162,PF13408,IPR025827, G3DSA:3.40.50.1390,IPR006119,PF07508,SSF53041,IPR011109, PTHR30461,Coil,SSF46785,cd00338,PF00239
MSELSKFSPQTRVAIYNRVSTEKKVQMEALDVQVAYTRKLVEDNHLTIVDQYIEPETGTEAEHRLEYQRMIRDIKADRIDLVVVKCSDRLCRDQAEWHNFVKLHLQKKFQLYFYLDDHIYDHERDDIKYSVQAIVDAEQSKITSKKIRDIHSNRQIYATGSKALHICRPLYGWDRNVEFIDENTKRVWWTVNEKEATELRYALSLVEQGIGFYRLANIMYDRGVRSKGTTGYHKMPSVRIAANTWKKMLTSPMLHGDCILHKEVSNFYTKERVKLPQEDWIYKENVIPPIVSREYHEKIVQIIDARRFQMGCCKGLAGTYKWSNRLVCANCKKPYYRMHYKLHSEKVITWKCSEQFQRTRSACDNMVIAEKELEKQLAAALKEKYAYLFHISSGLINDTIHTIEKALCNSDNGKKLKALETQRELLLRNKDVLFHKLMNGVISDEDFGIYKDRLEKELRELEEKIEGQKDGEKSLADQYRRLQQIRDTIENKNYNEQAILEILYGCVEVIEIHNNGDMDVTMSKELMRSKFELYSIVESDYSLFYFSFTYKKETIYDRNRKAYNEKVLELIRGEKYITIPQMAERLGNTYSYTWHSIQQLKEQGRIVYIKEKFEHSECYWEVVE

SEQ ID NO: 234 - protein, 624 aa, Unknown
  Description of Unknown: Integrase B235 sequence
  IPR036390,SM00857,IPR036162,PF13408,IPR025827, G3DSA:3.40.50.1390,IPR006119,PF07508,SSF53041,IPR011109, PF00239,PTHR30461,PF13412,SSF46785,Coil,cd00338
MSELSKFSPQTRVAIYNRVSTEKKVQMEALDVQVAYTRKLVEDNHLTIVDQYIEPETGTEAEHRLEYQRMIRDIKADRIDLVVVKCSDRLCRDQAEWHNFVKLHLQKKFQLYFYLDDHIYDHERDDIKYSVQAIVDAEQSKITSKKIRDIHSNRQIYATGSKALHICRPLYGWDRNVEFIDENTKRVWWTVNEKEATELRYALSLVEQGIGFYRLANIMYDRGVRSKGTTGYHKMPSVRIAANTWKKMLTSPMLHGDCILHKEVSNFYTKERVKLPQEDWIYKENVIPPIVSREYHEKIVQIIDARRFQMGCCKGLAGTYKWSNRLVCANCKKPYYRMHYKLNSEKVITWKCSEQFQRTRSACDNMVIAEKELEKQLAAALKEKYAYLFHISSGLINDTIHTIEKALCNSDNGKKLKALETQRELLLRNKDVLFHKLMNGVISDEDFGIYKDRLEKELRELEEKIEGQKDGEKSLADQYRRLQQIRDTIENKNYNEQAILEILYGCVEVIEIHNNGDMDVTMSKELMRSKFELYSIVESDYRLFYFSFTYKKETIYDRNRKAYNEKILELIRSEKYITIPQMAERLGNTYSYTWHSIQQLKEQGRIVYIKEKFEHSECYWEVVE

SEQ ID NO: 235 - protein, 624 aa, Unknown
  Description of Unknown: Integrase B236 sequence
  IPR036390,SM00857,IPR036162,PF13408,IPR025827, G3DSA:3.40.50.1390,IPR006119,PF07508,SSF53041,IPR011109, PTHR30461,Coil,PF13412,SSF46785,cd00338, PF00239
MSELSKFSPQTRVAIYNRVSTEKKVQMEALDVQVAYTRKLVEDNHLTIVDQYIEPETGTEAEHRLEYQRMIRDIKADRIDLVVVKCSDRLCRDQAEWHNFVKLHLQKKFQLYFYLDDHIYDHERDDIKYSVQAIVDAEQSKITSKKIRDIHSNRQIYATGSKALHICRPLYGWDRNVEFIDENTKRVWWTVNEKEATELRYALSLVEQGIGFYRLANIMYDRGVRSKGTTGYHKMPSVRIAANTWKKMLTSPMLHGDCILHKEVSNFYTKERVKLPQEDWIYKENVIPPIVSREYHEKIVQIIDARRFQMGCCKGLAGTYKWSNRLVCANCKKPYYRMHYKLHSEKVITWKCSEQFQRTRSTCDNMVIAEKELEKQLAAALKEKYAYLFHISSGLINDTIHTIEKALCNSDNGKKLKALETQRELLLRNKDVLFHKLMNGVISDEDFGIYKDRLEKELRELEEKIEGQKDGEKSLADQYRRLQQIRDTIENKNYNEQAILEILYGCVEVIEIHNNGDMDVTMSKELMRSKFELYSIVESDYRLFYFSFTYKKETIYDRNRKAYNEKILELIRSEKYITIPQMAERLGNTYSYTWHSIQQLKEQGRIVYIKEKFEHSECYWEVVE

SEQ ID NO: 236 - protein, 624 aa, Unknown
  Description of Unknown: Integrase B237 sequence
  IPR036390,SM00857,IPR036162,PF13408,IPR025827, G3DSA:3.40.50.1390,IPR006119,PF07508,SSF53041,IPR011109, PTHR30461,Coil,SSF46785,cd00338,PF00239
MSELSKFSSQTRVAIYNRVSTEKKVQMEALDVQVAYTRKLVEDNHLTIVDQYIEPETGTEAEHRLEYQRMIRDIKADRIDLVVVKCSDRLCRDQAEWHNFVKLHLQKKFQLYFYLDDHIYDHERDDIKYSVQAIVDAEQSKITSKKIRDIHSNRQIYATGSKALHICRPLYGWDRNVEFIDENTKRVWWTVNEKEATELRYALSLVEQGIGFYRLANIMYDRGVRSKGTTGYHKMPSVRIAANTWKKMLTSPMLHGDCILHKEVSNFYTKERVKLPQEDWIYKENVIPPIVSREYHEKIVQIIDERRFRMGCCKGLAGTYKWSNRLVCANCKKPYYRMHYKLNSEKVITWKCSEQFQRTRSACDNIVIAEKELEKQLAAALKEKYAYLFHISSGLINDTIHTIEKALCNSDNGKKLKALETQRELLLRNKDVLFHKLMNGVISDEDFGIYKDRLEKELRELEEKIEGQKDGEKSLADQYRRLQQIRDTIENKNYNEQAILEILYGCVEVIEIHNNGDMDVIMSKELMRSKFELYSIVESDYRLFHFSFTYKKETIYDRNRKAYNEKVLELIRSEKYITIPQMAERLGNTYSYTWHSIQQLKEQGRIVYIKEKFEHNECYWEVVE

SEQ ID NO: 237 - protein, 623 aa, Unknown
  Description of Unknown: Integrase B238 sequence
  SM00857,G3DSA:1.10.10.2600,IPR036162,PS51737,G3DSA:3.40.50. 1390,IPR006119,IPR038109,PF07508,IPR011109,SSF53041,PTHR30461 ,PS51736,cd00338,PF00239
MKETEKLGNAQSQKEKIRERYKGIDTDQLDVIPALPQDSFYEDKREKRVAVYARVSTDDPRQTSSYELQKNHYQDVVTRHPGWRLIEIYADEGISGTSLQHRDAFIRMINDCHSGKIDLIVTKSVSRFARNVLDCIGYVRQLAALNPPIGIFFETENIYTLNSNSEMSLSFISTLAQEESHTKSEIMNASIEMRFRRAIFLTPPLLGFDLDEDGNLVINEEEAKTVRLIFFMYLYGYTCQEIAETLTSLGRKTKLNNTVWSAGSVLQQLQNERHCGDVLARKTWTPSYLDHKSKKNKQDRNQYRQKNHHEAIISRDDFIAVQRLISNAKYGNRGFLPDLHVFTSGALRGFVSVNPRWAGFKAADYKRASESVYTPAIVLPTKQTYEVNSGDFDLRGFEVARAQFFSSANRVYVTFSNNGIRFSTECVRKLDSHFVEMMIHPGNGIIAFKPAAKDNRNSMEWSRQINGAKVPKPVSGAAFLPNLYNLFGWDSSCKYRIMGFKKHNNDNTLVLFSLADAEILIPNSTIEGDDEEPISLFEEDVKPLGTKTTTFGYPEEWVYSFGNNFYRQAQANELAAFNESDWSVEEEKTSYNPDPPLQVTAQEEIEENIKSMIDGMRQEANNE

SEQ ID NO: 238 - protein, 623 aa, Unknown
  Description of Unknown: Integrase B239 sequence
  PTHR30461:SF3,IPR036162,PS51737,IPR011109,PTHR30461, cd18714,PF00239,G3DSA:1.10.10.2600,IPR006119,PF14287, SSF53041,IPR025378,SM00857,IPR025827,cd03770, IPR038109,PS51736,PF13408,G3DSA:3.40.50.1390,PF07508,Coil
MDTRMITALYERLSRDDDLEGESNSISNQKRQLEDYARSQGFPNPVHFTDDGISGTCFDRPGFLAMMKEVEAERVEYLLIKDMSRLGRDYLKVGQIMEILRQKGVRLIAINDGVDSARGDDDFTPFRNIMNEYYARDTSRKIRSTFQSKGKSGKHVTGTVIYGYLWNETRDQWLVDEYSAGIVKRIFAMTIEGMGPYQIANRLKEEKVLIPSAYLATHNEGVNKNKTFKDVYGWGSSTIVNILDKREYLGHTVNFKTRKHFKDKKSHYVPEDEWTIFENTHEAIIEQETFDLAQKVRSKVRRYPDGWGEVAPLTGLMYCADCGGKMYVHRTNNGKRISQYTCSQYTKVPCGTLCKTQHRINESVVLELISDLLKAIAEYAQHDREEFVRVVQKAQDSHFASDVKKKRNRLTAAQNRLNELEVLLCKIYEDNILGKLPDARYATLDAQYGKEQAELKSEVKALEEFLESHEKNKKSAERFISLIEKYENFDNLTIAMLNEFIDKILVHERDRKGSIQTTQEIEIYFNFVGKFVPPQFMEVELTPEELEEIRKREERKDRLHQNYLKRKASGAQKRYEDKIKAKKKAEMDAKKNALRAEDVAKGVFVPVSNMPKLEPKIAPQKGA

SEQ ID NO: 239 - protein, 623 aa, Unknown
  Description of Unknown: Integrase B240 sequence
  PTHR30461:SF3,IPR036162,PS51737,G3DSA:3.60.15.10,IPR011109, PTHR30461,PF00239,G3DSA:1.10.10.2600,IPR006119,SSF53041, cd00338,SM00857,IPR025827,IPR038109,PS51736, IPR036866,PF13408,G3DSA:3.40.50.1390,PF07508,SSF56281,Coil
MNRYGKRCVLYPRVSTEMQVDGYSLEGQKTMLTRFADREEMVIVDTYEDAGKSGKSIEGRPAFQKMLRDIEEGLDIDYVLVYKLSRFGRNAADILNSLELIQSYGVNLICIEEGIDSSQTSGKLLISVLSAVAEIERENIIEQTMNGRREKARQGGWNGGFAPYGYALVDNKLVIAEAEAVAIRRIFELYTSSEIGLGGVANQLNLEGIRKIPRQNGTLEDWTGHFIKLILDNPVYYGKIAYGRRTKEKVKGTKNDYQMKRNDDYILTDGQHEGIVSEEVWEKAHAKRLRTGVKQPSKIGRDRVHLLSGLLKCPVCGSPMYTNKHAWTNKDGTYKEVYYYVCSRNRMVRGKHCEYKAMLKKTDIEPMVIEAIREIVRNKEYAQAIKKRIGVQIDTKAVDKELEGYRAKLKEVDLNKSRLEREIDNLPIDTKYRERKLHDMTLRLDSLYDIIVELEEKIEDAMMRRDAIAQQAITLEGIYKIMVNFDCVYNIISDEEKRAVVTALIKEIELYRNDESECPLKRIGLNFPVFKDGKEVSELLWDKGNTVETYDLPDIEVLLVGHHGSKYSTGTTLLESVTPEVGVISVGDNSYGHPTEEALLRLTDAGLTVYRTDMQGNILITVD

SEQ ID NO: 240 - protein, 623 aa, Unknown
  Description of Unknown: Integrase B241 sequence
  PTHR30461:SF3,IPR036162,PS51737,IPR011109,PTHR30461, PF00239,G3DSA:1.10.10.2600,IPR006119,PF14287,SSF53041, IPR025378,SM00857,IPR025827,cd03770,IPR038109, PS51736,PF13408,G3DSA:3.40.50.1390,PF07508,Coil
MSKQPEMVIARNPRATRNNDTTLNLDNQMYQQPVTSFQRVSNDAPLSEETKTAIQNTVLQFYVHSQPQEEAEGITACYERLSQEDKLDGESNSISNQKRILEKYCREHGYTAIRHYDEDDGYSGTNFNRPGFQRMLADIKAGKIKRVVVKDMSRFGRNYLQVGMYTEMLFPEYGVHFIAVNDGVDSVRGDSEFTAIRNVFNEMYAKDTSKKIRATWQSKGRSGEHLTTIPPYGYKKDPENKKRWIVDEEAAAVVQKIFALCMDGMGPTQIAKWLQENKVLSPVAYCYENDLPTTSKRPTDPYKWATKTVVHILERLDYLGHTVNFKTSKQSFKSKKVLWNDPADWVIFENTQEPIIEESVFLIVQKIRQGRRRPTKMGDMGMFSGLLFCADCGGKMYLCRANHFKPEQEYYLCSTYRKDRTLCSTHSIRRVVLEEIVLRNLREAIQYVTQYEDDFVQRAADQSLRERDKELAQKKDTLAQSQKRIAELDVIIKRLYEDNISGKLSDERFIKLSRDYELEQTNLTNLVEHLRQEVKEQEKQKVNVRQFIAAVRKYTDMQQLDAYILREFVDKIYISEVYTPDENEPRIKVREIEIVYNFIGAFDFEEAREQSQAAQKEKKTGVA

SEQ ID NO: 241 - protein, 623 aa, Unknown
  Description of Unknown: Integrase B242 sequence
  PTHR30461:SF3,IPR036162,PS51737,IPR011109,PTHR30461, PF00239,G3DSA:1.10.10.2600,PF14287,IPR006119,SSF53041, IPR025378,SM00857,IPR025827,cd03770,IPR038109, PF13408,G3DSA:3.40.50.1390,PF07508,Coil
MDAQEVMHMTDYSKITALYSRLSVGDEDRDGGESNSIQNQKIFLENYARGQHLTNIRHYIDDDESGRFFDRSAYSRMMDDVENGKIGVCIMKDLTRWGRDYLQVGNAMEIFRRNNVRFIAVNNGIDSEKPDTLEFAPFINIMSEWYAKDISKKVKTGIKTKGMSGKPIATEAPYGYVKDPDNKDFWIIDEEAAEVVRLIFRLFIDGKNRNQIAVYLTQEQIPTPTFYMKDRGRGTCKNRALNEDNRYKWNKATLTHILTRQEYCGDVVNFKTTKHFRDKRNHYVDRSQWQITENVHEPIVDRTDFETAQRILENAPVKRPNGDGEIHPLSGLLFCKDCGAKMHIRIDYRNGGKRHVAYCSEYHKGKAKNPKCHSPHIMDADLLMQTIAEVLKKIEDYSISNRAEFEALVKKNLAMQQTDQTKKQQKRIPQITTRLEQIDKVLNKLYEDNALGTIPQDRYEQMSQKYSEEYYTLKTELATLQEQLSAYENAGGRAQKFLKLTERHAAFTDLTPAILNEFISRIEVHERDQKRARYAIQHISIYFNYIGRFENEVTQLAEPTEQEIRQMREEIEEAQREKSRAYHRQYSREYRARNLEKRREYERIKAREYRARRKAQAAAAPTQ

SEQ ID NO: 242 - protein, 623 aa, Unknown
  Description of Unknown: Integrase B243 sequence
  PTHR30461:SF3,cd00338,SM00857,IPR036162,PF13408, IPR025827,G3DSA:3.40.50.1390,IPR006119,PF07508,IPR011109, SSF53041,PTHR30461,Coil,PF00239
MKAAFLIRCSTKNQDLDRQTRDLTRLAKSLGYEYDIENLVFGEKITGKDDVTIKNRESIDKLLRAAKEQKFDVVLVAEVSRMSRDPASGRVYVRQLINMSIPVYFRDIDTWTINPDNGKRVRDAEQVIGAAFDAAWKYLRSLKTQVASGRRNELDNNQISVGQPFFGYTRYGGKDKSKKNCWIVDEVAAEVVVFVFNEYIKDGSTLKSTALATTAKYGELLGRKFSVGSIEHILTYESYHTGIKKISLTDPDTEEIEVFDVKVPILVDTELFEKATAKRKNNRVKSEPYPKQTTYILSKLLKCPYCGYTMTPRAKGNDSRGKTTNERYRIINGKKALSWLCMSGINNATSCNNRISVANEKAEPIIWELIKKELIVFANLNNEERELKVEELTEKITHLASNIDNYNAHKSSLQKQLSKAYTVATMADESVLAMAMTEFNKTARNIRKEMSDCDSAIEQIKGEIDNLVNLKIFYSQPNLPSDIIEKAETDEAEKRKLVKELINKIVPYKITTFKKQHRDRGLVTLNFGVVLLEVYTVNGIYYVFYNANDRGDIRQAYYISGVFAKFQNSINKFDAYKEGEYFVISNADMVMETEEIDELITVNQMVEIAINNGWVLSYCYKQK

SEQ ID NO: 243 - protein, 623 aa, Unknown
  Description of Unknown: Integrase B244 sequence
  SM00857,G3DSA:1.10.10.2600,IPR036162,PF13408,PS51737, G3DSA:3.40.50.1390,IPR025827,IPR006119,cd03770,PF07508, PF14287,IPR011109,SSF53041,IPR038109,PTHR30461, Coil,IPR025378,PF00239
MKKKKVKEIGITALYERLSRDDDGDGDSNSIVHQKQMLEAYAKEHGFVNLRHYTDDGWSGASFDRPAWNELVAGVKAEEITTVIVKDLSRVGRDHLQVGFFTDILFREKEVHFIAIGNGIDSNDQQSSEFAPFLNIMNEWYVRDTSKKIKSVLKARGMSGSAHTSNCACYGYKKDPENPDKWVIDEEAASVVREIFQMCVDGKGPYEIARCLAERKVERPSYYLAKRGLGNHQSDCDYSNPYTWRGHTVATILERPEYTGCTVNFRTYKNSYKDKKIKKADKSDWVIFEGTQEPIIDKETWSIVQNLRKHTRRTDSLGEANPLTGKVFCGECGSLMYNHRRKNGRVRVYYTSKGERRESYSKPEDCYACSKHILTRQTYKAACSGHHIRTSALRSIVLECIRKTCSYVQSNPEEFLELYNQISESQNQSHLRELRSRITKAEHRTKDIDALIRKIYEDNIAGRLSDKMLENLLEGYEKEKNELEEEQKDCQQQLDSAEKQADNTNHFIELAKKYTDFSELTPAMVNEFVSKIIVHRPFELNGTRAVQVEVYLNYIGKFDVPEEPMILSEEELATQKIREEKLEKHRIASRKYMAKYRKRLKEMKKAGTILPENLPAETKGEWL

SEQ ID NO: 244 - protein, 622 aa, Unknown
  Description of Unknown: Integrase B245 sequence
  PTHR30461:SF3,IPR036162,PS51737,IPR011109,PTHR30461, PF00239,G3DSA:1.10.10.2600,IPR006119,PF14287,SSF53041, IPR025378,SM00857,IPR025827,cd03770,IPR038109, PS51736,PF13408,G3DSA:3.40.50.1390,PF07508,Coil
MSKQKITALYERLSRDDELQGESNSISNQKKLLEEYAAQQGFTNCVHFTDDGISGTCFDRPGFLDMMRQVEAGNVDYLCIKDMSRLGRDYLKVGQIMEILRQRGVRLIAINDGVDSARGDDDFTPFRNIMNEYYARDTSRKIKSTFKTKGMTGKHLTGTVIYGYLWNETRDQWIVDEYAAEVVKRIFAMTIDGYGPYQIANRLKEDKILIPSAYLAQHNEGVNKNKTFKDVYGWGSSTIVNLLEKREYLGHTVNFKTRKHFKDKKSHYVPEDEWTIFENTHEAIIEQETFDLAQKIRSKVRRYPDGWGEAAPLTGLLYCADCGGKMYVHRTNNGKRISQYTCSQYTKVPCGTLCKTQHRINEDVVLSLVSDMLRAIAEYAKHDRAEFVRVVQEAQSSQQTSEVKKQRTRLATAKQRVSELEVLLCKIYEDNVLGKLPDARYAVLDAQYAKEQASLTAEIATLEKAVGDYEKHEKSADRFIALIDKYQNFDKLTNTMLNEFVDKILVHERARKGSRETTQEVEIFFNFVGRFVPPAFAEVELTPEELEEIRKREERKDKLHQNYLKRKASGAQKRYEDKIKAAKKAEMDEKKNAIRAEDIARGVFIPVSNLPKREPQKGAITA

SEQ ID NO: 245 - protein, 622 aa, Unknown
  Description of Unknown: Integrase B246 sequence
  SM00857,G3DSA:1.10.10.2600,IPR036162,PS51737,G3DSA:3.40.50.1390, IPR006119,IPR038109,PF07508,IPR011109,SSF53041, PTHR30461,PS51736,cd00338,PF00239
MIDKTKRLEKEQAKAKTKKRIYVEVDPENYDYFPETRQADYYDNDVPQRVAIYVRVSTDDVRQTTSFELQKKYYEDFVIKHPHWTLVKIYADEGISGTSLNKREQFLQMISDAKRGKIDMIITKSVSRFARNIYDFIGIVRDLAERNPPVGVFFESEGIFSLNDDSQLALSFQATMAEEESHTRSRSMETSLRMRLDNGIPLTPKLLGYMHDADGTLIPNPDEAPTVKLAFYMYLYGYSSQQIADAFNALGRKSYLGNINWTSNGIVQILRNERHCGDVLTRKTFTPNFRTHKAKKNRGQRPQSRYRNHHPGIVSRDDYIAVQRMLDNAKYGNKSILPEIRVVEDGVLKGFVTINPRWAGFKEGDYYLASKSVYSSPEEEPHPEEEIQFEVEAGDFDLRGFEIARGEFFDAPRQPHAIIYHKFIKFSTACVRKFGTQNYIEILINPISRKLAIRPTTKENRNSVMASKPEKGILYPRLIPTAAFSETMFNLLGWNIEYKYRILGTLYEQDGVVAYIFDTVDSEAYFKPNVLSKENGEEDCTNVQPLMPSGKRIRAIPESWTSSFGKQFYAQEKSVTELQRQSEEDWMLRLEGQLFETGNKLHVTGFEELKSFITQELQGVDI

SEQ ID NO: 246 - protein, 622 aa, Unknown
  Description of Unknown: Integrase B247 sequence
  PTHR30461:SF3,SM00857,G3DSA:1.10.10.2600,IPR036162,PF13408, PS51737,G3DSA:3.40.50.1390,IPR025827,IPR006119,IPR038109, PF07508,IPR011109,SSF53041,PTHR30461,Coil,PS51736,cd00338,PF00239
MQQALNAVIYARYSSHSQQEQSIEGQLRDCYAYAQREGLQVVGEYIDRAISGKTDERPDFQRMIADASKKQFQRVIVWKLDRFARNRYDSAHYKAKLKKYGVKVVSATENISDEPEGIILEGLLESMAEYYSANLSKHVRRGQRESIINGTYLGGVPPIGYKVENKRLVIDERTAPTIRYMFEQYAKGVPKREIIAELNARGIRNKKGKPLTLSSMQAALRNEKYIGIYRYSGQEVMGGCEALIDEATFRKVQERLDKVKHAPAAAKAKIDYLLQGKAFCGYCGSRMVGESGRGKMGNTYHYYACGKRKKEHTCAKKNEKKDFIEWYVVEQTVEYVLTPDRMDYIAAALVAQYEKDFGDNRIKDYEKQLERINGEIRSLVDTLAVCPPSARQPIFDKMELLDVQKTDLEIDIAKLRVAARVQLTEEQIKVWLKQFCKGDLDDMEFRERIIDVFINSVYLYDDKTVIYYNIEGGKQVSYMEMLDSTEEPPFADDPQGSSGVRISNDTPQLLFAVLQQRTVNIAANQSDVHGCYSLSVFSYFTTVFRCGKAPARLLCPSPVPRSALRLVVHTGHIINRNKGLWVLAVDKVHQLLILVFVHDGNDLVVLFKVVCADGLVHGGTAV

SEQ ID NO: 247 - protein, 622 aa, Unknown
  Description of Unknown: Integrase B248 sequence
  SM00857,G3DSA:1.10.10.2600,PS51736,IPR036162,PS51737, G3DSA:3.40.50.1390,IPR006119,IPR038109,PF07508,IPR011109, SSF53041,PTHR30461,Coil,mobidb-lite,cd00338, PF00239
MKEYEERTETIEQQKALIRERYKGINPDELDVIPALPKPDIFKTSSMLRVAVYARVSTDDPRQTSSYELQKNHYQDVVDRNPNWNLVKIYADEGISGTSLQHREAFKQMVQDCEDGKIDLILTKSVSRFARNVVDCIGYVRELLSLRPPVGVFFETEHLNTLDPKSEMILSFMSTLAQEESHTKSEIMNASIEMRFRRGIFLTPPLLGYDQDENGELKINEHEAKIVKLIFYMYLNGNTCQEIADTLTELGCKTKKNNEVWSSGSVLQILQNERHCGDVLARKTWTPNYLDHKSRKNNQDRNQYRKREHHEAIISRDDFIAVQKLISNAKYGNKALLPELHVIPDGALKGFITVNPRWAGFKPDDYRAASSSIPDSEITLSDTIPITAQLGSFDLRGYEIAHGQFFETTGKISATLSYEKLNFSTEALRKFGKIKTVELLIHPSSYLLAVRPCTLEDNRNKVQWARLRNGVLVPRYIYGAAFLPTLYELFGWNPNCKYRVLGVAHQKGSENVLIFNMKETEVRIPNEAPATTDKDSPNKSTEASSTPKTILGYPAEWMNSFGNNYYSQTHARELAAFTNNKNWKTTSEGQPYKESELHTTPKADLTKGIVEIMEEIKENRND

SEQ ID NO: 248 - protein, 622 aa, Unknown
  Description of Unknown: Integrase B249 sequence
  PTHR30461:SF3,IPR036162,PS51737,IPR011109,PTHR30461, PF00239,G3DSA:1.10.10.2600,IPR006119,PF14287,SSF53041, IPR025378,SM00857,IPR025827,cd03770,IPR038109, PS51736,PF13408,G3DSA:3.40.50.1390,PF07508,Coil
MSKQKITALYERLSRDDELQGESNSISNQKKLLEEYAAQQGFTNCVHFTDDGISGTCFDRPGFLDMMRQVEAGNVDYLCIKDMSRLGRDYLKVGQIMEILRQRGVRLIAINDGVDSARGDDDFTPFRNIMNEYYARDTSRKIKSTFKTKGMTGKHLTGTVIYGYLWNETRDQWIVDEYAAEVVKRIFAMTIDGYGPYQIAKKLSEDKILIPSAYLAQHNEGVNKNKTFKDVYGWGSSTIVNLLDKREYLGHTVNFKTRKHFKDKKSHYVPEDEWTIFENTHEAIISQETFDLAQKIRSKVRRYPDGWGEAAPLTGLLYCADCGGKMYVHRTNNGKRISQYTCSQYTKVPCGTLCKTQHRINEDVVLSLVSDMLRAIAEYAKHERAEFVRVVQEAQSSQQTSEVKKQRTRLATAKQRVSELEVLLCKIYEDNVLGKLPDARYAVLDAQYAKEQAALTAEIATLEKAVGDYEKHEKSADRFIALIDKYQNFDKLTNTMLNEFVDKILVHERARKGSRETTQEVEIFFNFVGRFVPPAFAEVELTPEELEEIRKREERKDKLHQNYLKRKASGAQKRYEDKIKAAKKAEMDEKKNAIRAEDIARGVFIPVSNLPKREPQKGAITA

SEQ ID NO: 249 - protein, 621 aa, Unknown
  Description of Unknown: Integrase B250 sequence
  PTHR30461:SF3,SM00857,IPR036162,PF13408,IPR025827, G3DSA:3.40.50.1390,IPR006119,PF07508,SSF53041,IPR011109, PF00239,PTHR30461,Coil,cd00338
MKAAFLIRCSTKKQDYNRQVKDLSRLADRMGYSYDASTIYGEHITGKDDATKQDRASIRHLKDDAEAGRFDVVLVAEVSRLSRDPMSGRVYVRELSNMNIPVYFRDIDKWTIDPATGKKVPNAETEIGANFDGAWKYLKSLKTQIASGRRDELDNNCMSIGQPFFGYKRFGGRDKTKKNSWVIDEDAKEVVIEVFNRYLQDDATLKSVALSITKDYGDKFGKKFSLGSIEHILTFEPYYTGIKIVSLRDPDADEVEQFEVQIPAIITETTYKNAENKRKTNRVKSDPYPMQVERTLSKLVKCPCCGHSLTPRKRAGDGAGQKYRMTNGKLGISWFCMSRINNMADCTATVSINNEKLEPIIWELVKKELISFANLNTEDRLQKVEEYKKKIANVEADMANYQEQKDSLAKKVNRAYQAYIDAPDEIVEDAKNMYLQTQTSCKKEMLECQSKIEGFQQKKETYLMYKKALEQPEVPDDAIKKAEADPKEKRRLVKELIEKIVPYSVSTYQVKERYGTGMRTLKQGVLLIEVYAICGTYNILFNGNQRGKEQYAYYIGGNFATYQKGLRKFDAYEEGEYFVISNASLVMNTDDVDECVTMNEFQEIAEENQWVLSFEYNCKKK

SEQ ID NO: 250 - protein, 621 aa, Unknown
  Description of Unknown: Integrase B251 sequence
  PTHR30461:SF3,SM00857,IPR036162,PF13408,IPR025827, G3DSA:3.40.50.1390,IPR006119,PF07508,SSF53041,IPR011109, PTHR30461,Coil,cd00338,PF00239
MKAAFLIRCSTKKQDYNRQVKDLSRLADRMGYSYDASTIYGEHITGKDDATKQDRASIRHLKEDAEAGRFDVVLVAEVSRLSRDPMSGRVYVRELSNMNIPVYFRDIDKWTIDPATGKKVPNAETEIGANFDGAWKYLKSLKTQIASGRRDELDNNCMSIGQPFFGYKRFGGRDKTKKNSWVIDEDAKEVVIEVFNRYLQDDATLKSVALSITKDYGDKFGKKFSLGSIEHILTFEPYYTGIKIVSLRDPDADEVEQFEVQIPAIITETTYKNAENKRKTNRVKSDPYPMQVERTLSKLVKCPCCGHSLTPRKRAGDGAGQKYRMTNGKLGISWFCMSRINNMADCTATVSINNEKLEPIIWELVKKELISFANLNTEDRLQKVEEYKQKIANVEADMANYNEQKESLAKKVNRAYQAYIDAPDEIVEDAKNMYLQTQASCKKEMLECQSKIEGFQQKKETYLMYKKALEQPEVPDDAIKKAEADPKEKRRLVKELIEKIVPYSVSTYQVKERYGTGMRTLKQGVLLIEVYAICGTYNILFNGNQRGKEQYAYYIGGNFATYQKGLRKFDAYEEGEYFVISNASLVMNTDDVDECVTMNEFQDIAEENQWVLSFEYNCKKK

SEQ ID NO: 251 - protein, 621 aa, Unknown
  Description of Unknown: Integrase B252 sequence
  PTHR30461:SF3,cd00338,SM00857,G3DSA:1.10.10.2600,IPR036162, PS51737,G3DSA:3.40.50.1390,IPR006119,IPR038109,PF07508, SSF53041,IPR011109,PTHR30461,Coil,PF00239
MNIKNMTITPIFEEIDLMLLRKSRTDDTKEPIEITLKRHEEQLQELSIKTTGKPIKEENIYREIVSGGENIKDRPDFLRLLRRLENGNIKRVWCMDPERLSRSGIYGAGDVLKIFDITNTLIATIEQIYDLKNPMDKKYLEMRMIQSAEYRNYSKDVMNRGRHKSVRDGYYIGSSAPFGYKRKQLPQEKNRFILEPHEDESITVKLMFEMLLEGVGTSNLANHLNKYKYKARKNEYWTPAMVRNIVTSEVYCGYNTWEKFKTVEEIINGEIVKKRKLNEDYYIYKGKHKALISEEEFKHVQEILKSHPSSKCSLNKKPSNPLAGIMICKKCGRHMVRRPYTEKHLKHGYRKYKYDKQELLDFMRKSKEDSKLSLTQIAKKMNVSTDTVKGWFPTKIERFYDGKNLSDNWFKLKEVLNIQETKWDKIITTYKKKVKQNDSLICITPFCDNVSSELQLVEKRLLQALEIQLNDFKYYVDNYEQEIIKEAKDNAKTLNKIEKQIEELKKELKNLRRSYNREEFTYDEYVEDKTDIENELKEIEQTKEEILKDTNQDKIMRYKKGIPILADTLKKYDTLSIQEKNELLKDIFIKVEYEKNEGGRWNKEAIDKFTLTPYLKILTNE

SEQ ID NO: 252 - protein, 620 aa, Unknown
  Description of Unknown: Integrase B253 sequence
  PTHR30461:SF3,cd00338,SM00857,G3DSA:1.10.10.2600,IPR036162, PF13408,PS51737,G3DSA:3.40.50.1390,IPR025827,IPR006119, IPR038109,PF07508,IPR011109,SSF53041,PTHR30461,PS51736, Coil,PF00239
MNPVDKIAVVYARYSSHGQTEQSIEGQIAAAQKYAEQHGYTIIHVYADRAMTGRNDDREQFQKMLSDTAMHQFGVILLWKIDRFGRNREEIAFNRYRCKKNGVRVERVAEDVPDGPEGVILDSVLEGMAEYYSLQLAQNVRRGQRESAKKSMSIGGNKMLGYIVNPETKRYESDPKTASYVTEIFKRYANGETISEIVAWLNAQGIRTTRGSEFTVNSLHRLLKNEKYTGVYIFHDIRNEGGMPALTDRTTFDKVQEMLKVNRRAPVRVWSKTEYLLTDKLFCGHCGAMMVGESGHGRNGIKHSYYTCLNRKKKKSCDKKPVRQDMIEPLVLRAIGKLLENPATLENIADQVWAAYERSDTSGDAIKALDKQIADVDRALSNVMKAIEMGIINEMTKTRMDELTNQKQALSTARAEAGLAEGFKLTRDMILFFLQEISALDMADRDSQKRLIKTFVNAIYLYDDHFDIAFNYTDNGKVVVRMQEINDAVRGEVFGCCAQSPTKKDPQLRLRVLFCAGAGRIRTGRPSADGKKQSCGLFFRPRLANPPAPTKKLWQRCCRSFFSLLYRTKPAKAMTDFQSAFYRDVQLLPGGWTFFVANLYNSKCRYGERGAAAAGAVLEP

SEQ ID NO: 253 - protein, 620 aa, Unknown
  Description of Unknown: Integrase B254 sequence
  PTHR30461:SF3,cd00338,SM00857,G3DSA:1.10.10.2600,IPR036162, PF13408,IPR025827,G3DSA:3.40.50.1390,PS51737,IPR006119, IPR038109,PF07508,IPR011109,SSF53041,PTHR30461, PS51736,Coil,PF00239
MKDVEVIKARNTLSPRARTNFEKRLRVAAYCRVSTDTEDQLNSYKSQVKYYTELIKSKPEWSLAGIYADEAITGTQVKKREDFQRLINDCMNGDVDMVITKSISRFARNTLDTLKYVRMLKDKGVAVFFEEENINTLTMDGELLLVILSSVAQQEVENISANVKKGLKMKMQRGELVGFQGCLGYDYNPEDKTLTVNEEEAAVVRYIFQRYTEGAGGSVIAKELENLGYKTKRGSPKWADSTVIGIIKNEKYKGDILLGKTFTVDPISKRRLYNFGEEDQFYIREHHEPIISEEVFEAAQEILRRRAKPRSLNVDGKREKFSRKYAFSCMIECGFCGGTLTRRSWHSSSQYNKAIWQCVVSTKKGKKFCPESKGVDERTIERAFVESYRLLCQNNKDVLDEFMKRTEEALSESNAGKRLAKAEKDIHALEVKKNKLVDMRLEDTIDKETYDRKYLDLSSQIEQLQKECESLQDAAETETTMRKRVAMFRQTLEQNEVLDTFDRHIFESIVEKVIVGGYDSDGNKDPYMIVFVYKTGFKNSVDGKNFKPLRKNSKENHSPAVLCSHASNEAESMCSDSSDDTLRGCELLYQNDVTNATLKPLRVYHGINPHKTLIFSIFKT

SEQ ID NO: 254 - protein, 620 aa, Unknown
  Description of Unknown: Integrase B255 sequence
  PTHR30461:SF3,SM00857,G3DSA:1.10.10.2600,IPR036162,PS51737, G3DSA:3.40.50.1390,IPR006119,IPR038109,PF07508,IPR011109, SSF53041,PTHR30461,Coil,PS51736,cd00338, PF00239
MYQYSQECLPARNVVVYARVSTEHEAQLSALENQKDWYKPIIDRHPEWNVVRMYVDEGITGTSAKKRPQFMKMIQDADSGEFDLILTREVSRFARNTVDTLQYTRSLKEKGVEVFFINDNIKTFDGDGELRLTIMATLAQDESRKTSMRVKSGQQTSMENGVFYGNGNILGYNRVEKDMIINPDQARTVRMIYDMYLDGAGMRAIQFKLEEEGRLTAMGKTNWHTSNISKILKNSFYCGIITYHKEFTPNYLEQKKIRNFGDIEITTVKGSHEPIVTQEEFERVQQIMASRRGEIPNLAYGERIGKNPPKCVWAKLLVCDCGHKFNRKIWHRGKDSIQYAYQCYSSIRTGTASSRARRGLPTEGICRSPMIPEWKLQLMAKYVFTECLIGKNQILDLAESMLRKHIDDKKAEFDNTKIIEQKEAEYTKFLKRLENLIEMRADGEITRDEFKYMREEVESKLSKLRSEIDSLKLQDNEEEDINQKDKIKILRYYLEQSLTVVEGEDIPEDVIQAFVSKIVVYEDRFDWYLRFSANKIPESLTVQGNKKASKNTPPFVIHNSGCYRRKKELISPIITEISQSTYIKIYEFKIGLKEAKAFQNQYNQNHKIHKWNDLKVSIYL

SEQ ID NO: 255 - protein, 620 aa, Unknown
  Description of Unknown: Integrase B256 sequence
  PTHR30461:SF3,cd00338,SM00857,G3DSA:1.10.10.2600,IPR036162, PF13408,PS51737,IPR025827,G3DSA:3.40.50.1390,IPR006119, IPR038109,PF07508,IPR011109,SSF53041,PTHR30461, PS51736,Coil,PF00239
MSSVDKIAVVYARYSSHGQTEQSIEGQIAAAQKYAEQHGYTIIHVYADRAMTGRNDDREQFQKMLSDTAMHQFGVILLWKIDRFGRNREEIAFNRYRCKKNGVRVERVAEDVPDGPEGVILDSVLEGMAEYYSLQLAQNVRRGQRESAKKSMSIGGNKMLGYIVNPETKRYESDPKTASYVTEIFKRYANGETISEIVAWLNAQGIRTTRGSEFTVNSLHRLLKNEKYTGVYIFHDIRNEGGMPALTDRTTFDKVQEMLKVNRRAPARVWSKTEYLLTDKLFCGHCGAMMVGESGHGRNGIKHSYYTCLNRKKKKSCDKKPVRQDVIESLVLRAIGKLLENPATLENIADQVWAAYERSDTSGDAIKALDKQIADVDRALSNVMKAIEMGIINEMTKTRMDELTNQKQALSTARAEAGLAEGFKLTRDMILFFLQEISALDMADRDSQKRLIKTFVNAIYLYDDHFDIAFNYTDNGNVVVRMREINDAARGEMFGRCAQCPTKKDPQLRLRVLFCAGAGRIRTGRPSADGKKQSCGLFFRPRLANPPAPTKKLWQRCCRSFFSLLYRTKPAKAMTDFQSAFYRDVQLLPGGWTFFVANLYNSKCRYGERGAAAAGAVLEP

SEQ ID NO: 256 - protein, 619 aa, Unknown
  Description of Unknown: Integrase B257 sequence
  PTHR30461:SF3,cd00338,SM00857,G3DSA:1.10.10.2600,IPR036162, PF13408,IPR025827,PS51737,G3DSA:3.40.50.1390,IPR006119, IPR038109,PF07508,IPR011109,SSF53041,PTHR30461, PS51736,Coil,PF00239
MARKKNIAAGLDAVIYARYSSHNQREVSIEQQIAECTKHAAALGLRIVGTYEDRAISGKTDNRPRFQQMMRDAEKGKFQAVVAWKSNRIGRNMLQAMVNEAKLDDYGVKVFYAEEDFDDTAAGRFALRNMMNVNQFYSENMAEDITRGLYDNANKCMANGRQPLGYKRGADGKVMLDEPAAAVVREIFTRVAAGDLFVDIARDLNAKGIKTSKGATWNKGSFQSICQNERYKGIYIYGNVRIVDGIPRIVSDELWYKVQEAMRMKKNPVGTRHRVGAEDYLLTGKLRCGHCGSYMTGVSGTSRNGELHYYYTCQKRRTEHACNKKNVRRDVIEPAIAQAIKMYCLTDDVIEWVANRTVEYWEKHDNDLHIEALEQQLEENKKATSNMLKAIEMGIITDATRSRMIELETEQSKLAVQLNAAKADVVKIDRDDLIDELQIFRDMDVNNRSVQAELFKDFLVAAYIYDDNRLKLVFSFMGKDNSIEIPLETGEDPPDGEDSPDAKMFVLTPDCSTKKALYFVGSTVLFFFVPAKRSGVHRSPCRRASDTPDLHNSRHLPCRFNRGFRRGLRRQHGAGPTVPAPAWQALAGARRARPVIQPESRNVLILQMWNCNRCVKLVQ

SEQ ID NO: 257 - protein, 619 aa, Unknown
  Description of Unknown: Integrase B258 sequence
  cd00338,SM00857,G3DSA:1.10.10.2600,IPR036162,PS51737, G3DSA:3.40.50.1390,IPR006119,IPR038109,PF07508,IPR011109, SSF53041,PTHR30461,PS51736,Coil,PF00239
MTNTIFKNNTKIGNPYDFLDRNRHRKMVFYGRVSTEHEAQMAALENQIEWYDDQAKYHPNWEVLNKYIDEGITGTQAKKRPAFLQMIEDAKKGKFDLIVTREVCRFARNTVDTLVTTRELKNIGVEVYFVEDNIWTMDGDGELRLTIMATLAQEESRKTSERVKAGQHISRQQGMVYGRGNILGYNRKAKSTYTINPEQAETVRMIFDLYLQGEMGASKIANELTRLGRKNASGLVKWSPCVITRIVNNPTYMGYQAYGKSYSNNYLEQKRILNNDFSTYMLVKSDYEPIITEEEWYRCQEIKQRRVTKTIGVSTDGKKKQPNHGKNETKDLWATKLKCRCGASFRRNRWHKNNNAPWSYGYLCYNRLNNGSAQKRRDAGLDDTGYCDQTEIPDWKLEMMGKMIMEQVWRTRAEDIKLACEILQECYKPDSKAPRQNKSVILANIEKLKYKKDILLDMRSDGEITKEEFLNKKEEIDIKISQLTAEYEKDDCPIESDEAGLELGKIEAALNELIDFSQPVLPREIYQKFVAKVTPYSKTHYRWYLNLDGTGTQTADVKVNGRKSNAAVAFCDEGEIPPVHFKEIIFFNILKQEIINKKSFFVATLHRLLLLKCNSVILY

SEQ ID NO: 258 - protein, 619 aa, Unknown
  Description of Unknown: Integrase B259 sequence
  PTHR30461:SF3,SM00857,G3DSA:1.10.10.2600,IPR036162,PF13408, IPR025827,PS51737,G3DSA:3.40.50.1390,IPR006119,IPR038109, PF07508,SSF53041,IPR011109,PTHR30461,PS51736,cd00338, PF00239
MFCKCGIIELHRKIQKGGSAVKKDVKVIKGDTTLKRTASGCVQRSIKRVAAYCRVSTDTEDQINSYNSQVEHYTEFIQKNKEWTLAGIYADEAITGTQVDRRIDFQRLINDCMNGDIDMIITKSISRFARNTLDTLKYVRKLKEFNVAVFFEEENINTLTMDGELLLTILSSVAQQEVENISANVKKGLRMKMERGEMVGFQGCLGYDYDPETKSISINEKEAEIVRYIFRRYIEGVGGMVISRELEEQGYLSPRGNKRWTETTVLGIIKNEKYKGDLMMGKTYTVDPISKRRLDNFGEQDKFYIENHHEPIISEEDFEKAQGIRLRRSKNRNTVANNGGKREKYSRKYAFSSMLECGFCGHNLSRRNWHSSSEYTKVIWQCVNATKNGKKYCPHSKGIEEEAIEKAFMESYRQVCHNNVEITNEFLKTVEEELKDNSLAKDLKKITNQLDKILKKEKDLVELRLNESISMDIYQDKYNEIAISKEKLLAEKRTLEVTLTDEKALKKRLEGFKKLLESNKYLEEFDRAVFESIVDKIIIGGTNDEGEIDPAMITIIYKTGKKDSQDGRLFKSRRKNAKEVNEETDNKLYPHSSDEVNNLYSYPIDNTCGDGGIIVKKIE

SEQ ID NO: 259 - protein, 619 aa, Unknown
  Description of Unknown: Integrase B260 sequence
  cd00338,SM00857,G3DSA:1.10.10.2600,IPR036162,PS51737, G3DSA:3.40.50.1390,IPR006119,IPR038109,PF07508,SSF53041, IPR011109,PTHR30461,PS51736,Coil,PF00239
MTNTIFKNNTKIGNPYDFLDRNRHRKMVFYGRVSTEHEAQMAALENQIEWYDDQAKHHPNWEVLNKYIDEGITGTQAKKRPAFLQMIEDAKKGKFDLIVTREVCRFARNTVDTLVTTRELKNIGVEVYFVEDNIWTMDGDGELRLTIMATLAQEESRKTSERVKAGQHISRQQGMVYGRGNILGYNRKAKSTYTINPEQAETVRMIFDMYLQGEMGASKIANELTRLGRKNASGLVKWSPCVITRIVNNPTYMGYQAYGKSYSNNYLEQKRILNNDFSTYMLVKSDYEPIITEEEWYRCQEIKQRRVTKTIGVSTDGKKKQPNHGKNETKDLWATKLKCRCGASFRRNRWHKNNNAPWSYGYLCYNRLNNGSAQKRRDAGLDDTGYCDQTEIPDWKLEMMGKMIMEQVWRTRAEDIKLACKILNECYKPDIKAPRQNKSVMLANIEKLKSKKDNLLDMRSDGEITKEEFLNKKEEIDKKISQLTAEYEKDDCPTESDEAGLELSKIEAALNELIDFSQPVLPREIYQKFVSKVTPYSKTHYRWYLNLDGTGTQTADVKVNGRKSNAAVAFCEEGEIPPVHFKEIIFFNILKQEIINKKSFFVATLHRLLSQTSNPHRMY

SEQ ID NO: 260 - protein, 618 aa, Unknown
  Description of Unknown: Integrase B261 sequence
  PTHR30461:SF3,cd00338,SM00857,G3DSA:1.10.10.2600,IPR036162, PS51737,G3DSA:3.40.50.1390,IPR006119,IPR038109,PF07508, IPR011109,SSF53041,PTHR30461,Coil,PF00239
MNEIPIFEEIDLMLLRKSRSDNMKEPIEITLKRHEEQLQELCIKTTGKPVKEENIYREIVSGGENIKDRPDFLRLLRRLENGNVKRVWCVDPERLSRSGIYGAGDVLKIFDVTNTLIATLDQTYDLKNPMDKKYLEMRMIQSADYRNYSKDVMNRGRHKSVRDGYYIGSSAPFGYKRKQLHDEQDRFILEPHEEESQTVILMFEMLLEGVGTSNLANHLNKYKYKARKNEYWTPAMVRNIVTSEVYCGYNTWEKFKTVEEIINGEVVKKRKLNDKYYVYKGKHKALISEEEFKSVQEILKSHPSSKLGGNKNASNPLAGVVFCKKCGRHMIRRPYNEKHLKNGFRKYKYNKQELLDFMRSSKEKSNLSLSQIAKKMNISRDTVKGWFPTNIDKFYDGKNLANHWYQLKEVLEIKDSKWDKIITTYNKKVKQNDSLICLTPFCDNVSSELQLVEKRLLQALEIQLNDFRYYVDNYEQEIIKEAKSNAKTLNKIEKQIEDLKKELKNLRRSYNREEFTYDEYVEDKNDIESELKEIEKTKEEILKDTNQDKIIRYKKAIPILADCLKQYDKLSIQEKNNLLKDIFVKVEYEKNEGGRWNKEAIDKFTLTPHLKILIDEIE

SEQ ID NO: 261 - protein, 618 aa, Unknown
  Description of Unknown: Integrase B262 sequence
  PTHR30461:SF3,SM00857,G3DSA:1.10.10.2600,IPR036162,PS51737, G3DSA:3.40.50.1390,IPR006119,IPR038109,PF07508,IPR011109, SSF53041,PTHR30461,Coil,PS51736,cd00338, PF00239
MNEIPIFEEIDLMLLRKSRSDNIKEPIEITLKRHEEQLQELCIKTTGKPVKEENIYREIVSGGENIKDRPDFLRLLRRLENGNIKRVWCVDPERLSRSGMYGAGDVLKIFDVTNTLIATLDQTYDLKNPMDKKYLEMRMIQSAEYRNYAKDVMNRGRHKSVRDGYYIGSSAPFGYKRKQLHDEKDRYILEPHEEESQTVILMFEMLLEGVGTSNLANHLNKYKYKARKNEYWTPAMVRNIVTSEVYCGYNTWEKFKTVEEIINGEVVKKRKLNDKYYVYKGKHKALISEEEFKSVQEILKSHPSSKLGGNKNASNPLAGVVFCKKCGRHMIRRPYNEKHLKNGFRKYKYDKQELLDFMRSSKEKSNLSLSQIAKKMNISRDTVKGWFPTNIDKFYDGKNLANHWYQLKEVLEIKDSKWDKIITTYNKKVKQNDSLICLTPFCDNVSSELQLVEKRLLQALEIQLNDFRYYVDNYEQEIIKEAKSNAKNLNKIEKQIEDLKKELKNLRRSYNREEFTYDEYVEDKNDIESELKEIEKTKEEILKDTNQDKIIRYKKAIPILADCLKQYDKLSIQEKNNLLKDIFVKVEYEKNEGGRWNKEAIDKFTLTPHLKILLEENE

SEQ ID NO: 262 - protein, 618 aa, Unknown
  Description of Unknown: Integrase B263 sequence
  PTHR30461:SF3,SM00857,G3DSA:1.10.10.2600,IPR036162,PS51737, G3DSA:3.40.50.1390,IPR006119,IPR038109,PF07508,IPR011109, SSF53041,PTHR30461,Coil,PS51736,cd00338, PF00239
MNEIPIFEEIDLMLLRKSRSDNIKEPIEITLKRHEEQLQELCIKTTGKPVKEENIYREIVSGGENIKDRPDFLRLLRRLENGNIKRVWCVDPERLSRSGMYGAGDVLKIFDVTNTLIATLDQTYDLKNPMDKKYLEMRMIQSAEYRNYAKDVMNRGRHKSVRDGYYIGSSAPFGYKRKQLHDEKDRYILEPHEEESQTVILMFEMLLEGVGTSNLANHLNKYKYKARKNEYWTPAMVRNIVTSEVYCGYNTWEKFKTVEEIINGEVVKKRKLNDKYYVYKGKHKALISEEEFKSVQEILKSHPSSKLGGNKNASNPLAGVVFCKKCGRHMIRRPYNEKHLKNGFRKYKYDKQELLDFMRSSKEKSNLSLSQIAKKMNISRDTVKGWFPTNIDKFYDGKNLANHWYQLKEVLEIEDSKWDKIITTYNKKVKQNDSLICLTPFCDNVSSELKLVEKRLLQALEIQLNDFKYYVNNYEQEIIKEAKSNAKNLNKIEKQIEDLKKELKNLRRSYNREEFTYDEYVEDKNDIESELKEIEKTKEEILKDTNQDKIIRYKKAIPILADCLKQYDKLSIQEKNNLLKDIFVKVEYEKNEGGRWNKEAIDKFTLTPHLKILLEENE

SEQ ID NO: 263 - protein, 618 aa, Unknown
  Description of Unknown: Integrase B264 sequence
  PTHR30461:SF3,IPR036162,PS51737,IPR011109,PTHR30461, PF00239,G3DSA:1.10.10.2600,IPR006119,PF14287,SSF53041, IPR025378,SM00857,IPR025827,cd03770,IPR038109, PS51736,PF13408,G3DSA:3.40.50.1390,PF07508,Coil
MAGIKEEKKIYLVGIYCRLSKDDGTDNESASIATQKSILTDYVKKQGWHIAKTYVDDGYSGTNFQRPSFQNMIKDIESGLINCVITKDLSRLGRNYLDCGLYLEVFFPEHNVRYIAVNDGVDTLNKSAMDITPFRNILNEMYAADISVKIKSAYRARFQQGKFMGTTAPYGYIKDPADHNHLLIDDKVAHVVKEIFDLALKGNGVAKICRHLNKQHILRPAAYAAERGETGFERHFEGNEDKRYIWSGNSVRSILRSPIYAGNLVGYKRIAANMKSKKRPSKLPEEWEVIPNTHEGIVTQEEFDIVQQLITSRRLPQNKGGFVNIFAGVIKCVDCGCALRAMNVHRRKRPEIIDCVQYSCNNYARNGRSECSAHNIEARDLFNAVLADINCFADMAVNDEKAVRAIEKRLTETDQSRAKALEKERKKLNKRLAELDRLFSSLYEDKVMERITERNFEMMSGKYQKEQLEIEARLKEVTETLNESYEKSRGIRDFLALIRNYQGLKELDATVINALIDKILVSEREKMADGTVKQEIKIYYKFIGFVDELHIIPTKRWAAMPAKNCTVCGVEYVPGSGASRYCPACAKKIRREKSNESKRRSREQKRIACMNCPQKMTD

SEQ ID NO: 264 - protein, 618 aa, Unknown
  Description of Unknown: Integrase B265 sequence
  PTHR30461:SF3,cd00338,SM00857,G3DSA:1.10.10.2600,IPR036162, PF13408,PS51737,IPR025827,G3DSA:3.40.50.1390,IPR006119, IPR038109,PF07508,IPR011109,SSF53041,PTHR30461, PS51736,Coil,PF00239
MKEKTKVYIYTRVSTAVQVDGYSLDAQKSRMKAYAEFNDFEIVGEYEDAGKSGKSIEGRLEFNRMMEDIKSGKDGVSYVLVFKLSRFGRNAADVLSTLQVMQDFDVNLICVEDGIDSSKDAGKLMISVLSAVAEIERENIRVQTMEGRIQKAREGKWNGGFAPYGYKLEKGMLYINEEEAEAIRIIFDQYVHTDIGANGLAKYLANHGINKIQRQNGKNPLFDAALIRRILKNPVYCGKIAYGRRRTEKVHGTRNDYRLVEQENYLLVDGLHEAIVSEGLWHEAQVKLLAQAKKYEKVNNGKDNKVHLLTGLLKCPICGAGMYGNKSIKHKPDGTKYKDFFYYGCKHRTMTRGHKCEYKKQINEELLDGAVAEVIIKLVSNPKFAAMMQQKINMKIDTSAIEQEIANYEKQLRQSYATKSRLIDEIDTLDPDDKHYIKRKADLDDRLYKMYDKIEDTENLLIEARAKKMAIEAEKLTADNIYKVLIYFEKLYAVMDEQEKRQIMESLISEIHIYEERQPNGQWLKSIKFKLPIIEEDMEMSLDSDTHVDTERPIMAATSASDRPLLRRSFALRTSSGIIFLFAVIFLSLISAAQNGKSSSSSITAKSSVPVSAACWAL

SEQ ID NO: 265 - protein, 618 aa, Unknown
  Description of Unknown: Integrase B266 sequence
  PTHR30461:SF3,SM00857,G3DSA:1.10.10.2600,IPR036162,PS51737, G3DSA:3.40.50.1390,IPR006119,IPR038109,PF07508,SSF53041, IPR011109,PF00239,PTHR30461,PS51736,Coil, cd00338
MNKIPIFEEIDLMLLRKSRSDNIKEPIEITLKRHEEQLQELCIKTTGKPVKEENIYREIVSGGENIKDRPDFLRLLRRLENGNIKRVWCVDPERLSRSGMYGAGDVLKIFDVTNTLIATLDQTYDLKNPMDKKYLEMRMIQSAEYRNYAKDVMNRGRHKSVRDGYYIGSSAPFGYKRKQLHDEQDRFILEPHEEESQTVILMFEMLLEGVGTSNLANHLNKYKYKARKNEYWTPAMVRNIVTSEVYCGYNTWEKFKTVEEIINGEVVKKRKLNDKYYVYKGKHKALISEEEFKNVQEILKSHPSSKLGGNKNASNPLAGVVFCKKCGRHMIRRPYNEKHLKNGFRKYKYDKQELLDFMRSSKEKSNLSLSQIAKKMNISRDTVKGWFPTNIDKFYDGKNLANHWYQLKEVLEIEDSKWDKIITTYNKKVKQNDSLICLTPFCDNVSSELQLVEKRLLQALEIQLNDFRYYVDNYEQEIIKEAKSNAKTLNKIEKQIEDLKKELKNLRRSYNREEFTYNEYIEDKNDIENELKEIEKTKEEILKDTNQDKIIRYKKAIPIIADCLKQYDKLSIQEKNDLLKDIFVKVEYEKNEGGRWNKEAIDKFTLTPHLKILIDETE

SEQ ID NO: 266 - protein, 618 aa, Unknown
  Description of Unknown: Integrase B267 sequence
  PTHR30461:SF3,SM00857,G3DSA:1.10.10.2600,IPR036162,PS51737, G3DSA:3.40.50.1390,IPR006119,IPR038109,PF07508,SSF53041, IPR011109,PTHR30461,Coil,PS51736,cd00338, PF00239
MNKIPIFEEIDLMLLRKSRSDNIKEPIEITLKRHEEQLQELCIKTTGKPVKEENIYREIVSGGENIKDRPDFLRLLRRLENGNIKRVWCVDPERLSRSGMYGAGDVLKIFDVTNTLIATLDQTYDLKNPMDKKYLEMRMIQSAEYRNYAKDVMNRGRHKSVRDGYYIGSSAPFGYKRKQLHDEQDRFILEPHEEESQTVILMFEMLLEGVGTSNLANHLNKYKYKARKNEYWTPAMVRNIVTSEVYCGYNTWEKFKTVEEIINGEVVKKRKLNDKYYVYKGKHKALISEEEFKSVQEILKSHPSSKLGGNKNASNPLAGVVFCKKCGRHMIRRPYNEKHLKNGFRKYKYDKQELLDFMRSSKEKSNLSLSQIAKKMNISRDTVKGWFPTNIDKFYDGKNLANHWYQLKEVLEIKDSKWDKIITTYNKKVKQNDSLICLTPFCDNVSSELQLVEKRLLQALEIQLNDFRYYVDNYEQEIIKEAKSNAKTLNKIEKQIEDLKKELKNLRRSYNREEFTYDEYVEDKNDIESELKEIEKTKEEILKDTNQDKIIRYKKAIPILADCLKQYDKLSIQEKNNLLKDIFVKVEYEKNEGGRWNKEAIDKFTLTPHLKILIDEIE

SEQ ID NO: 267 - protein, 618 aa, Unknown
  Description of Unknown: Integrase B268 sequence
  PTHR30461:SF3,cd00338,SM00857,G3DSA:1.10.10.2600,IPR036162, PF13408,IPR025827,G3DSA:3.40.50.1390,PS51737,IPR006119, IPR038109,PF07508,SSF53041,IPR011109,PTHR30461, Coil,PF00239
MGNATIKKAAFLVRCSTNKQDYDRQVRDLQLVADRFRYSLYEIYGEHITGKDDTTKRDRLSIIRVRKDAELHKFDVLLVAEVSRMSRDSVSGRVYVRQFCNLGIPVYFRDKMKWTIDPQTMKEDESFVKELGLYFDGAAEYLKSMKTQIASGRRNSLMNNQLVVGHPPIGYKKRGGTDKYTKNELVIDEALAPMVKDVFAMYLEPEGTLKSVSLAISAKYSKELKGKRKTVSGVQQILCRKEYYTGEYTVYMSDPDNKDLEPEPFTITFEPLIDQETFDAATEKRDLKKSTDSPYPKQAIHPLSRLIKCPHCEHSFSPRVRSGDKPGEKHRIINGKKAYSWICMTRINNAGECNSHVNLNNEKTETIIWDLIKKELLTFADLNKDDRETRIYDLQQKIADAQNQIPVYEEEITRQDRKIKRAYNAYIDAPEVALEKAKEDYHKTLLDATKVKDDYAKEIKQLKKQIKGWEKSIDYYNNSNITTEYIDSIEDKEDEKRKIFLQLIQKIVPIGIRPGVVILQTHTINGIYWVLFDGNQVGQKRIAHYIHESFAVWHSTVKGEIQSSEAESYFSLKNTDVLVGTEDVDPAHVKFREMQMVCEANENVIPYNYIYERAYEGE

SEQ ID NO: 268 - protein, 617 aa, Unknown
  Description of Unknown: Integrase B269 sequence
  cd00338,SM00857,IPR006118,G3DSA:1.10.10.2600,IPR036162, PS51737,G3DSA:3.40.50.1390,IPR006119,IPR038109,PF07508, IPR011109,SSF53041,PTHR30461,PS00397,PS51736, Coil,PF00239
MDNEKKVAGLYIRVSTEDQAREGFSLPEQEKRLRAMCEYKGYEIYKLYKDAGISAKTGNYRPAFEELLQDIREKKCNTIVVLKLDRLTRSVFDLEGIMRFLEENNAYLDCANEEINTTNSSGKLVARMLTSVSQNEIERTSERTKFGLVGAIKEGHIPGKNPLGYKRDGKKLVIDPLTKDIVKRIYDLYFEGKSYSNIATLFNNEEVLGKTNWRDTGILRIISNEIYKGDFVSGKTFNKPVYYENVVEPIVSRELWENCQVQKKKNQKSYMRTQTYIFLQKLKCTKCGRILAGGASHKLKSDKWYFYYRCEDCKNNIKEEVIENSVKTLLADILEYDNVVNEFFLPVLKSKLNDPKVELEKELKSLNNKKERIRKAYIDSVFTEEEYKQESKTIDRQIEFVNSKLLENSQAEQLNFTTEDILLKRDMDFINKVKLPISYYAFNENWDLLDRETKADIVMRYIDDIELEIKNKKYHVKQINFRSTFYNDYEDLYKKGYIDKKRPLTYDFNGVCVDTNIRYSEYLPIKDVMQHLYRLNEYYEVNLYKGTYYKETEKLDIGPLQRNEVPIRVFPLQKDNNGDKNWLSMGMLATKNNLNDIKVNIRDVFETIPDNVTKEDF

SEQ ID NO: 269 - protein, 617 aa, Unknown
  Description of Unknown: Integrase B270 sequence
  PTHR30461:SF3,cd00338,SM00857,G3DSA:1.10.10.2600,IPR036162, PS51737,G3DSA:3.40.50.1390,IPR006119,IPR038109,PF07508, IPR011109,SSF53041,PTHR30461,PS51736,Coil, PF00239
MDNYIASLDRNRPRNIAFYGRVSTEHEAQLSALQNQMQWYDDQLKFHPNWNLVEKYIDEGITGTQAKKRPGFLRMIEDSKKGKFDLIVTREVCRFARNTVDTLVYTRELKSKYNIEVYFVDDNIWTMDGDGELRLTLMATLAQEESRKTSDRVKAGQKISRENGSLYGNGNILGYDRVGNTYVINEEQAETVRMIYDMYLDGLGSMKIAKSLSVQQRKNASGDIKWSAERVMRILKKSTYTGVLAYGQSHSNNYLEQKRINNLDRDSYMYQKVNIPVIIPQNKWDDVQKIIAKRTKSVGDKLSGKKDVKEFWSKKLLCNCGSSFRRNKWRTNKTGEAVYGYQCQRQLNYGSKQFREKNGLDTDGYCGIRMVADWKLDMMAKMVIEHIWKNKGESVILALKMISENYEEDVKPNKKNIKETELKIEKLQKRLQNLIEMRADGEISKEEFAESKNTITEQISILNSELTIDEVESDEPESIEKKIEVIKQAMNEVIDFSQPKLPKYIIDKFISKVLVLDNNKFRWYINLGNDYDKNSDIYLDTQVEGRKNNYSAQILSNDDSLSSVHSSTGSYRRNKGEIINLNFVITYKMAQDYRKSIGKYLRKNQWSDAIIDVAVEL

SEQ ID NO: 270 - protein, 617 aa, Unknown
  Description of Unknown: Integrase B271 sequence
  PTHR30461:SF3,cd00338,SM00857,G3DSA:1.10.10.2600,IPR036162, PS51737,G3DSA:3.40.50.1390,IPR006119,IPR038109,PF07508, IPR011109,SSF53041,PTHR30461,PS51736,Coil, PF00239
MDNYITSLDRNRPRNIAFYGRVSTEHEAQLSALQNQMQWYDDQLKFHPNWNLVEKYIDEGITGTQAKKRPGFLRMIEDSKKGKFDLIVTREVCRFARNTVDTLVYTRELKSKYNIEVYFVDDNIWTMDGDGELRLTLMATLAQEESRKTSDRVKAGQKISRENGSLYGNGNILGYDRVGITYVINEEQAETVRMIYDMYLDGLGSMKIAKSLSVQQRKNASGDIKWSAERVMRILKKSTYTGVLAYGQSHSNNYLEQKRINNLDRDSYMYQKVNIPVIIPQNKWDDVQKIIARRTKSVGDKLSGKKDVKEFWSKKLLCNCGSSFRRNKWRTNKTGEAVYGYQCQRQLNYGSKQFREKNGLDTDGYCGIRMVADWKLDMMAKMVIEHIWKNKGESVILALKMISENYEEDVKPNKKNIKETELKIEKLQKRLQNLIEMRADGEISKEEFAESKNTITEQISILNSELTIDEVESDEPESIEKKIEVIKQAMNEVIDFSQPKLPKYIIDKFISRVLVLDNNKFRWYISLGNDYDKNSDIYLDTQVEGRKNNYSAQILSNDDSLSSVHSSTGSYRRNKGEIINLNFVITYKMAQDYRKSIGKYLRKNQWSDAIIDVAVEL

SEQ ID NO: 271 - protein, 617 aa, Unknown
  Description of Unknown: Integrase B272 sequence
  PTHR30461:SF3,SM00857,G3DSA:1.10.10.2600,IPR036162,PS51737, G3DSA:3.40.50.1390,IPR006119,IPR038109,PF07508,IPR011109, SSF53041,PTHR30461,Coil,PS51736,cd00338, PF00239
MEIENIEQLFNILSTIKVHQIIIYLRKSRNEEKEDLQVVLARHEKMLQDYAIRNFGERIPEENIFREVVSGETIDDRIEIKKVFNKLADEDIKAVLVVEPQRLSRGDMEDCGRVVNVLRYSNTLCITLSKTYDLTNKFDRKIFEMELTQGNEYLEYTKTILKRGKKISLEEGKYIYSTAPFGYGREKLDKGFKLVPHPVEAPIVKMMFELFVESMSSHELANYLNQQGCESRTKTPWNYGMVNNILENETYYGVLVNEKRKVLKKLIDGERIVKTRPRQENYLIVKGLHEPLISKEMYELAQAKIKNNPNSRTGLNRELKNPLAGVVFCSYCGRSLVRNPCTRKHERKKVRAYEINKLELSQYLTEHKKQTNLSLQDIANELNLTKALVAGWFRKKEEKIIYSDVFTEKWPELKKLLNIKGKKFDKEITTYKEPEPRKDMLQCPDLNCKNVSSTLDTVEAAILKKLEETLDDYKYFLDNYEQEAKKKKTNNEKRLKQIETKLSKFKVALRNARRDYNEEKFSYEEYLEDKKYYEAQIEELEKEKNKLSNKDEEEIIIQYKKAVPILANCIKQYNTLESITDKNELLKSFIEKIVYKKTKRMNWRRNDPDDMELTIYM

SEQ ID NO: 272 - protein, 617 aa, Unknown
  Description of Unknown: Integrase B273 sequence
  PTHR30461:SF3,SM00857,G3DSA:1.10.10.2600,IPR036162,PF13408, IPR025827,G3DSA:3.40.50.1390,PS51737,IPR006119,IPR038109, PF07508,SSF53041,IPR011109,PTHR30461,Coil, PS51736,cd00338,PF00239
MGKRQKATGGDAVIYARYSSHNQRDVSIEQQVEACRKHAAELGLTVTATYEDRAISGKTDKRPSFQRMMRDAEQHKFAYVLAWKSNRIGRNMMQALVNESRLVDCGVKVFYAEEDFDDNAAGRFALRSMMNVNQFYIENMAEDVKRGLYDNAKKGLVNGSLPLGYKRGADGKPEIDEPKAAIVREIYTRVAAGELFASIAADLNARGIRTARGREWNKGSFHVLCHNDRYRGIYMYGDIRIPGGMPRIISDELFYDAQEAYGMKKDNRYGRARHGAENYLLTGKLYCGHCGSYMVGISGTSKTGEMHYYYACQKHRLEHTCEKKAIRRDVIENAVARVIMMYCLDDETIDFIVDSTIAYFKQKDHELHIEAMENELVAVQQAISNLMKAIEAGIITPTTRTRLLDLEEQQAKLSAKINTAKAERVEIDRDDLIAGLQLFRTGDIKNKKFLAKLFNTFLLAVYLYDDNRLKIVFSFTGNHNNIEIPLDLDNDCPDSESGPYETEVRMSHLECRKNSGTPPSLGGAEKGDGCSGGRFVRTAPLPPHQLTSGPFRPEVLFYPDAVQRRLSWSTPSVKWQRCWAFLHPPCATMTRKVCCPLWRGHPAASASSAKTTSSGCG

SEQ ID NO: 273 - protein, 617 aa, Unknown
  Description of Unknown: Integrase B274 sequence
  SM00857,G3DSA:1.10.10.2600,IPR036162,PS51737,G3DSA:3.40.50.1390, IPR006119,IPR038109,PF07508,SSF53041,IPR011109, PTHR30461,Coil,PS51736,cd00338,PF00239
MKESEERSSNIDEQKARIRQRYKGIDPEELEVIPALPPEDIFKTEKKLRVAVYARVSTDDPRQTSSYELQKNHYQDVVNKNPNWMLVEIYADEGISGTSLQHRDAFKKMIEDCEAGKIDLIITKSVSRFARNVVDCIRYVRELSSLRPPVGVFFETEHLNTLDPKSEMILSFMSTLAQEESHTKSEIMNSSIEMRFRRGIFLTPPLLGYDQDENGDLVINPHEAKIVQLIFYMYLNGSSTQQIADSLTELGCKTKKNNDVWSSSTILQILQNERHCGDVLARKTWTPNYLDHKSRKNNQDRNQYRKVGHHEAIISRDDFIAVQKLITNAKYGNKEILPELHVIQEGSLSGFISINPRWSGFKARDYFEASQSVLKPANMNVPDTITASAGSFDLRDYEVARGQFFSSVGRISVSFSYKQISFNKDAIRKFPNIKFVELLIHPSSKLLAIRPCSSETKNKVQWSRLKDGQLIPKPISGAAFLPTLYEIFKWDKKCKYRILGVAHQKGNENVLIFNMDDTEIRIPTSTNDVSAPNNNMPDTISDSKSVLAYPADWMNSFGNNYYTQSQAPELTEFTADKNWQTASESKPYKEPELQTTPKETIIQNIKNIITEIKGDTQ

SEQ ID NO: 274 - protein, 617 aa, Unknown
  Description of Unknown: Integrase B275 sequence
  SM00857,G3DSA:1.10.10.2600,IPR036162,PS51737,G3DSA:3.40.50 .1390,IPR006119,IPR038109,PF07508,SSF53041,IPR011109, PTHR30461,Coil,PS51736,cd00338,PF00239
MKESEERSSNIDEQKARIRQRYKGIDPEELEVIPALPPEDIFKTEKKLRVAVYARVSTDDPRQTSSYELQKNHYQDVVNKNPNWMLVEIYADEGISGTSLQHRDAFKKMIEDCEAGKIDLIITKSVSRFARNVVDCIRYVRELSSLRPPVGVFFETEHLNTLDPKSEMILSFMSTLAQEESHTKSEIMNSSIEMRFRRGIFLTPPLLGYDQDENGDLVINPHEAKIVQLIFYMYLNGSSTQQIADSLTELGCKTKKNNDVWSSSTILQILQNERHCGDVLARKTWTPNYLDHKSRKNNQDRNQYRKVGHHEAIISRDDFIAVQKLITNAKYGNKEILPELHVIQEGSLSGFISINPRWSGFKARDYFEASQSVLKPANMNVPDTITASAGSFDLRDYEVARGQFFSSVGRISVSFSYKQISFNKDAIRKFPNIKFVELLIHPSSKLLAIRPCSSETKNKVQWSRLKDGQLIPKPISGAAFLPTLYEIFKWDKKCKYRILGVAHQKDNENVLIFNMDDTEIRIPTSTNDVSAPNNNMPDTISDSKSVLAYPADWMNSFGNNYYTQSQAPELTEFTADKNWQTASESKPYKEPELQTTPKETIIQNIKNIITEIKGDTQ

SEQ ID NO: 275 - protein, 617 aa, Unknown
  Description of Unknown: Integrase B276 sequence
  PTHR30461:SF3,IPR036162,PS51737,IPR011109,PTHR30461, PF00239,G3DSA:1.10.10.2600,IPR006119,SSF53041,cd00338, SM00857,IPR025827,IPR038109,PS51736,mobidb-lite, PF13408,G3DSA:3.40.50.1390,PF07508,Coil
MAKTADTIAIYSRKSRYTGKGESIGNQIDLCREYIRTHYGDAAAEHTVVFEDEGFSGGNLNRPDFKKMMTAAKDRKFKAIVVYRLDRISRNISDFSSLIEELGRLGIDFVSIRESFDTSSPMGRAMMYIASVFSQLERETIAERIRDNMHELAKTGRWLGGTTPTGYASESVKSITVDGKTKKACKLKLLPDEAEIIYKIFDLYEQYDSLTMTETELLRQGIKTKTGRSFTRFSIKSILQNPVYLIADKDAYQYFVDNEAELFAPESDFDGVRGVLAYNRSDQEKGRATVYNPISEWIVSVGEHPGIISSNRWIRVQESLERNKSKSYHKSRGNEALLTGLLWCSCGSRMYPKVTGRKTADGQVVFPYMCKLKERSRRELCNVRNANGNLLDAAICEQVKHLADHSSDFMKQLEKAKSAHAGNRSEFETKLSTLRKEQAETQRKINALIDSLADFSDSTAAVHLKKRIEELNTQDATLSSRIRELESLTDSGVLGGIEFDVMRQLLTVFHDNIDDMTVTQKRAAIRTVVRKVVWDGKVAHVVLFGSPEDEIDWTTFPVDPEEDDNDPEGGGDGSDSPSGVRSGEDSILNASAGIGRKPRLAGGIKGIHGLHQPNGSN

SEQ ID NO: 276 - protein, 617 aa, Unknown
  Description of Unknown: Integrase B277 sequence
  PTHR30461:SF3,SM00857,G3DSA:1.10.10.2600,IPR036162,PS51737, G3DSA:3.40.50.1390,IPR006119,IPR038109,PF07508,IPR011109, SSF53041,PF00239,PTHR30461,PS51736,Coil, cd00338
MEIENIEQLFNVLSTIKVHQIIIYLRKSRNEEKEDLQVVLARHEKMLQDYAIRNFGERIPEENIFREIVSGETIDDRIEIKKVFNKLADDDIKAVLVVEPQRLSRGDMEDCGRVVNVLRYSNTLCITLSKTYDLNNKFDRKIFEMELTQGNEYLEYTKTILRRGKKISLEEGKYIYSTAPFGYDREKLDKGFKLVPHPVEAPIVKMMFELFVESMSSHELANYLNQQGCESRTKTPWNYGMVNNILENETYYGVLVNEKRKVLKKLIDGERIVKTRPRQENYLIVKGLHEPLISKEMYELAQAKIKNNPNSRTGLNRELKNPLAGVVFCSYCGRSLVRNPCTRKHERKKIRVYEINKLELSQYLTKHKNQTNLSLQDIANELNLTKALVAGWFRKKEEKIIYSDVFTEKWPELKKLLNIKGKKFDKEITTYKEPEPRKDMLQCPDLNCKNVSSTLDTVEAAILKKLEETLDDYNYFLDNYEQEAKKKKTNNEKRLKQIETKLSKFKVALRNARRDYNEEKFSYEEYLEDKKYYEAQIEELEKEKNKLSNKDEEEIIIQYKKAVPILANCIKQYNTLESITDKNELLKSFIEKIVYKKTKRMNWRRNDSDDMELTIYM

SEQ ID NO: 277 - protein, 617 aa, Unknown
  Description of Unknown: Integrase B278 sequence
  SM00857,G3DSA:1.10.10.2600,IPR036162,PS51737,G3DSA:3.40.50.1390, IPR006119,IPR038109,PF07508,SSF53041,IPR011109, PTHR30461,Coil,PS51736,cd00338,PF00239
MKESEERSSNIDEQKARIRQRYKGIDPEELEVIPALPPEDIFKTEKKLRVAVYARVSTDDPRQTSSYELQKNHYQDVVNKNPNWMLVEIYADEGISGTSLQHRDAFKKMIEDCEAGKIDLIITKSVSRFARNVVDCIRYVRELSSLRPPVGVFFETEHLNTLDPKSEMILSFMSTLAQEESHTKSEIMNSSIEMRFRRGIFLTPPLLGYDQDENGDLVINPHEAKIVQLIFYMYLNGSSTQQIADSLTELGCKTKKNNDVWSSSTILQILQNERHCGDVLARKTWTPNYLDHKSRKNNQDRNQYRKVGHHEAIISRDDFIAVQKLITNAKYGNKEILPELHVIQEGSLSGFISINPRWSGFKARDYFEASQSVLKPANMNVPDTITASAGSFDLRDYEVARGQFFSSVGRISVSFSYKQISFNKDAIRKFPNIKFVELLIHPSSKLLAIRPCSSETKNKVQWSRLKDGQLIPKPISGAAFLPTLYEIFKWDKKCKYRILGVAHQKDNENVLIFNMDDTEIRIPTNTNDVSAPNNNTPDTISDSKSVLAYPADWMNSFGNNYYTQSQAPELTEFTADKNWQTASESKPYKEPELQTTPKETIIQNIKNIITEIKGDTQ

SEQ ID NO: 278 - protein, 617 aa, Unknown
  Description of Unknown: Integrase B279 sequence
  SM00857,G3DSA:1.10.10.2600,IPR036162,PS51737,G3DSA:3.40.50.1390, IPR006119,IPR038109,PF07508,SSF53041,IPR011109, PTHR30461,Coil,PS51736,cd00338,PF00239
MKESEERSSNIDEQKARIRQRYKGIDPEELEVIPALPPEDIFKTEKKLRVAVYARVSTDDPRQTSSYELQKNHYQDVVNKNPNWMLVEIYADEGISGTSLQHRDAFKKMIEDCEGGKIDLIITKSVSRFARNVVDCIRYVRELSSLRPPVGVFFETEHLNTLDPKSEMILSFMSTLAQEESHTKSEIMNSSIEMRFRRGIFLTPPLLGYDQDENGDLVINPHEAKIVQLIFYMYLNGSSTQQIADSLTELGCKTKKNNDVWSSSTILQILQNERHCGDVLARKTWTPNYLDHKSRKNNQDRNQYRKVGHHEAIISRNDFIAVQKLITNAKYGNKEILPELHVIQEGSLSGFISINPRWSGFKSRDYFEASQSVLKPANMNAPDTITASAGSFDLRDYEVARGQFFSSVGRISVSFSYKQISFNKDAIRKFPNIKFVEMLIHPSSKLLAIRPCSSETKNKVQWSRLKDGQLIPKPISGAAFLPTLYEIFKWDKKCKYRILGVAHQKDNENVLIFNMDDTEIRIPTSTNEVSAPNNNTPDTISDSKSVLAYPADWMNSFGNNYYTQSQAPELTEFTVDKNWQTASESKPYKEPELQTTPKETIIQNIKNIITEIKGDTQ

SEQ ID NO: 279 - protein, 617 aa, Unknown
  Description of Unknown: Integrase B280 sequence
  PTHR30461:SF3,cd00338,SM00857,G3DSA:1.10.10.2600,IPR036162, PS51737,G3DSA:3.40.50.1390,IPR006119,IPR038109,PF07508, IPR011109,SSF53041,PTHR30461,PS51736,Coil, PF00239
MDNYIASIDRNRPRNIAFYGRVSTEHEAQLSALQNQMQWYDDQLKFHPNWNLVEKYIDEGITGTQAKKRPGFLRMIEDSKKGKFDLIVTREVCRFARNTVDTLVYTRELKSKYNIEVYFVDDNIWTMDGDGELRLTLMATLAQEESRKTSDRVKAGQKISRENGSLYGNGNILGYDRVGNTYVINEEQAETVRMIYDMYLDGLGSMKIAKSLSVQQRKNASGDIKWSAERVMRILKKSTYTGVLAYGQSHSNNYLEQKRINNLDRDSYMYQKVNIPVIIPQNKWNDVQKIIARRTKSVGDKLSGKKDVKEFWSKKLLCNCGSSFRRNKWRTNKTGEAVYGYQCQRQLNYGSKQFREKNGLDTDGYCGIRMVADWKLDMMAKMVIEHIWKNKGESVILALKMISENYEEDVKPNKKNIKETELKIEKLQKRLQNLIEMRADGEISKEEFAESKNTITEQISILNSELTIDEVESDEPESIEKKIEVIKQAMNEVIDFSQPKLPKYIIDKFISKVLVLDNNKFRWYISLGNDYDKNSDIYLDTQVEGRKNNYSAQILSNDDSLSSVHSSTGSYRRNKGEIINLNFIITYKMAQDYRKSIGKYLRKNQWSDAIIDVAVEL

SEQ ID NO: 280 - protein, 617 aa, Unknown
  Description of Unknown: Integrase B281 sequence
  SM00857,G3DSA:1.10.10.2600,IPR036162,PS51736,PS51737, G3DSA:3.40.50.1390,IPR006119,IPR038109,PF07508,SSF53041, IPR011109,PTHR30461,Coil,mobidb-lite,cd00338, PF00239
MKESEERSSNIDEQKARIRQRYKGIDPEELEVIPALPPEDIFKTEKKLRVAVYARVSTDDPRQTSSYELQKNHYQDVVNKNPNWMLVEIYADEGISGTSLQHRDAFKKMIEDCEAGKIDLIITKSVSRFARNVVDCIRYVRELSSLRPPVGVFFETEHLNTLDPKSEMILSFMSTLAQEESHTKSEIMNSSIEMRFRRGIFLTPPLLGYDQDENGDLVINPHEAKIVQLIFYMYLNGSSTQQIADSLTELGCKTKKNNDVWSSSTILQILQNERHCGDVLARKTWTPNYLDHKSRKNNQDRNQYRKVGHHEAIISRDDFIAVQKLITNAKYGNKEILPELHVIQEGSLSGFISINPRWSGFKARDYFEASQSVLKPENMNVPDTITASAGSFDLRDYEVARGQFFSSVGRISVSFSYKQISFNKDAIRKFPNIKFVELLIHPSSKLLAIRPCSSETKNKVQWSRLKDGQLIPKPISGAAFLPTLYEIFKWDKKCKYRILGVAHQKDNENVLIFNMDDTEIRIPTSTNDVSAPNNNTPDTTSDSKSVLAYPADWMNSFGNNYYTQSQAPELTEFTADKNWQTASESKPYKEPELQTTPKETIIQNIKNIITEIKGDTQ

SEQ ID NO: 281 - protein, 617 aa, Unknown
  Description of Unknown: Integrase B282 sequence
  PTHR30461:SF3,SM00857,G3DSA:1.10.10.2600,IPR036162,PS51737, G3DSA:3.40.50.1390,IPR006119,IPR038109,PF07508,IPR011109, SSF53041,PF00239,PTHR30461,PS51736,Coil, cd00338
MNNYIASLDRNRPRNIAFYGRVSTEHEAQLSALQNQMQWYDDQLKFHPNWNLVEKYIDEGITGTQAKKRPGFLRMIEDSKKGKFDLIVTREVCRFARNTVDTLVYTRELKSKYNIEVYFVDDNIWTMDGDGELRLTLMATLAQEESRKTSDRVKAGQKISRENGSLYGNGNILGYDRVGNTYVINEEQAETVRMIYDMYLDGLGSMKIAKSLSVQQRKNASGDIKWSAERVMRILKKSTYTGVLAYGQSHSNNYLEQKRINNLDRDSYMYQKVNIPVIIPQNKWDDVQKIIARRTKSVGDKLSGKKDVKEFWSKKLLCNCGSSFRRNKWRTNKTGEAVYGYQCQRQLNYGSKQFREKNGLDTDGYCGIRMVADWKLDMMAKMVIEHIWKNKGESVILALKMISENYEEDVKPNKKNIKETELKIEKLQKRLQNLIEMRADGEISKEEFAESKSTITEQISILNSELTIDEVESDEPESIEKKIEVIKQAMNEVIDFSQPKLPKYIIDKFISKVLVLDNNKFRWYINLGNDYDKNSDIYLDTQVEGRKNNYSAQILSNDDSLSSVHSSTGSYRRNKGEIINLNFVITYKMAQDYRKSIGKYLRKNQWSDAIIDVAVEL

SEQ ID NO: 282 - protein, 617 aa, Unknown
  Description of Unknown: Integrase B283 sequence
  PTHR30461:SF3,SM00857,IPR006118,G3DSA:1.10.10.2600,IPR036162, PS51737,G3DSA:3.40.50.1390,IPR006119,IPR038109,PF07508, IPR011109,SSF53041,PF00239,PTHR30461,PS00397, PS51736,Coil,cd00338
MSEEKKIAGIYIRVSTEDQAREGFSLPEQEKRLRAMCEYKNYEIYKVYKDAGISAKTGNKRPAFEELKEDIVNKKCNTIVVLKLDRLTRSVYDWENIMKFLEENNAYLDCANDDINTTNANGRMVARLLTTVSQNEIERTSERTKIGLAGAIKVGNIPNKAPFGYKHVNKKLVINPLTKDEVIRIFNLYFEGNSYQTIANIYNSEKVFGKTNWCDSTILRILENEIYKGDYVHGKKTNHPTYYENVVEPLVSKELWEECQVQKRKNSRNYKRDKEYLFLQKLRCPKCGRILGGNATRKKNGKVYYYYQCNNCKTIIKEPKIEETIKTMLADILEYDNVVNEFFLPVLKSKLENPKEELGKELKKLNSKKERIKKAYIDSLFTEEEFKEETKIIEEQIELINSKLLENEQTEQLNFTIDDILLKRDMDFINKVKLPISYYAFNDNWNLLDRETKADIIMRYVDDIELETINNKYEVKQVNFRSTFYSDFEELYKQGYIDKKRPLTYNFNGICVDTIVRYSEYLPLKEVMQHLCRLNEYYEVNFYKGTLYKETEKLDMFPLQKNEVPIRIFPLQENNNGNENWVSMGMIATKNNPNDIKVNIRDVFETIPDNVKEEDFC

SEQ ID NO: 283 - protein, 617 aa, Unknown
  Description of Unknown: Integrase B284 sequence
  SM00857,G3DSA:1.10.10.2600,IPR036162,PS51737,G3DSA:3.40.50.1390, IPR006119,IPR038109,PF07508,SSF53041,IPR011109, PTHR30461,Coil,PS51736,cd00338,PF00239
MKESEERSSNIDEQKARIRQRYKGIDPEELEVIPALPPEDIFKTEKKLRVAVYARVSTDDPRQTSSYELQKNHYQDVVNKNPNWMLVEIYADEGISGTSLQHRDAFKKMIKDCEGGKIDLIITKSVSRFARNVVDCIRYVRELSSLRPPVGVFFETEHLNTLDPKSEMILSFMSTLAQEESHTKSEIMNSSIEMRFRRGIFLTPPLLGYDQDENGDLVINPHEAKIVQLIFYMYLNGSSTQQIADSLTELGCKTKKNNDVWSSSTILQILQNERHCGDVLARKTWTPNYLDHKSRKNNQDRNQYRKVGHHEAIISRDDFIAVQKLITNAKYGNKEILPELHVIQEGSLSGFISINPRWSGFKSRDYFEASQSVLKPANMNAPDTITASAGSFDLRDYEVARGQFFSSVGRISVSFSYKQISFNKDAIRKFPNIKFVEMLIHPSSKLLAIRPCSSETKNKVQWSRLKDGQLIPKPISGAAFLPTLYEIFKWDKKCKYRILGVAHQKDNENVLIFNMDDTEIRIPTSTNDVSAPNNNTPDTISDSKSVLAYPADWMNSFGNNYYTQSQAPELTEFTVDKNWQTASESKPYKEPELQTTPKETIIQNIKNIITEIKGDTQ

SEQ ID NO: 284 - protein, 616 aa, Unknown
  Description of Unknown: Integrase B285 sequence
  PTHR30461:SF3,IPR036162,PS51737,IPR011109,PTHR30461, PF00239,G3DSA:1.10.10.2600,IPR006119,PF14287,SSF53041, IPR025378,SM00857,IPR025827,cd03770,IPR038109, PF13408,G3DSA:3.40.50.1390,PF07508,Coil
MTDYSKITALYSRLSVGDEDRDGGESNSIQNQKIFLENYARGQHLTNIRHYIDDDESGRFFDRSAYSRMMDDVENGKIGVCIMKDLTRWGRDYLQVGNAMEIFRRNNVRFIAVNNGIDSEKPDTLEFAPFINIMSEWYAKDISKKVKTGIKTKGMSGKPIVTEAPYGYVKDPDNKDFWIIDEEAAEVVRLIFRLFIGGKNRNQIAVHLKNEQIPTPTFYMKDRGRGTCKNKTLNEDNRCKWNKATLTNILTRQEYCGDVVNFKTTKHFRDKHNHYVDRSQWHITENVHEPIISRSDFETVQRILENAPVRRPNGDGEIHPLSGLLFCKDCGAKMHIRIDYRNGGKRHVAYCSEYHKGKAKNPKCHSPHIMDADLLMQTIAEVLKKIEDYSISNRAEFEALVKKNLAMQQTDQTKKQQKRIPQITTRLEQIDKVLNKLYEDNALGTIPQDRYEQMSQKYSEEYYALKAELATLQEQLSAYENAGGRAQKFLKLTERHAAFTELTPAILNEFISRIEVHERDQKRARYAIQHISIYFNYIGKFENEVTQLAEPTEQEIRQMREEIEEAKKEKSRAYHRQYSREYRARNLEKQREYDRIKAREYRAKKKAQAAAAQPTQ

SEQ ID NO: 285 - protein, 616 aa, Unknown
  Description of Unknown: Integrase B286 sequence
  SM00857,G3DSA:1.10.10.2600,IPR036162,PS51737,G3DSA:3.40.50.1390, IPR006119,IPR038109,PF07508,IPR011109,SSF53041, PTHR30461,Coil,PS51736,cd00338,PF00239
MKESEERSSNIDEQKARIRQRYKGIDPEELEVIPALPPEDIFKTEKKLRVAVYARVSTDDPRQTSSYELQKNHYQDVVNKNPNWILVEIYADEGISGTSLQHRDAFKKMIKDCEAGKIDLIITKSVSRFARNVVDCIRYVRELSSLRPPVGVFFETEHLNTLDPKSEMILSFMSTLAQEESHTKSEIMNSSIEMRFRRGIFLTPPLLGYDQDENGDLVINPHEAKIVQLIFYMYLNGSSAQQIADSLTELGCKTKKNNDVWSSSTVLQILQNERHCGDVLARKTWTPSYLDHKSRKNNQDRNQYRKVGHHEAIISRDDFIAVQKLITNAKYGNKEILPELHVIQEGSLSGFISINPRWSGFKARDYFEASQSVLKPANMNTPDTITASAGSFDLRDYEVARGQFFSSVGRISVSFSYKQISFNKDAIRKFPNTKFVEMLIHPSSKLLAIRPCSSETKNKVQWSRLKDGQPIPKPISGAAFLPTLYEIFKWDKKCKYRIIGVAHQKDNENVLIFNMNDTEIRIPTSTNDVSCSDNNAPDTISDSKSVLAYPADWMNGFGNNYYTQSQAPELTEFTAEKNWQTTSESKPYKEPELQTTPKETIIQNIKNIITEIKGDT

SEQ ID NO: 286 - protein, 616 aa, Unknown
  Description of Unknown: Integrase B287 sequence
  PTHR30461:SF3,IPR036162,PS51737,IPR011109,PTHR30461, PF00239,G3DSA:1.10.10.2600,IPR006119,PF14287,SSF53041, IPR025378,SM00857,IPR025827,cd03770,IPR038109, PS51736,PF13408,G3DSA:3.40.50.1390,PF07508,Coil
MGTKKDSTIYDVAIYCRLSKEDLKEDGDRDESASIGTQKAILTDYVRQRGWHLVQTYVDDGYSGTNFQRPGFQSMIQDIEAKRINCVITKDLSRLGRNYLDCGLYLEVFFPEHGVRYISVNDGVDTLNKSAMDITPFRNILNEMYAADVSMKVKSALRARFNSGLYVSTSPPYGYLKDPADHNHLIIDEKAAPVVKLIFQMALDGAGIAKIRNHLNASYILRPAAYAAAERGESGYERHFEGKEDNRYQWSNNSVRAILRSPVYAGNLVGYKRVAVSMKSKKRPSRLPEEWEVIPNTHEGIVTQAQFDIVQRMMTSRRRDKGGSGFDNIFSGILKCADCGYAMRATSANRRKRPNPIDCVQYMCNNYGTNGSKGCSAHSIEARDLFDAVLADIRHFARLAVEGDEKRVRQLQQQLSSIGATEQKALEREKRKLSKRLGELDKLFSALYEDKVMERITERNFDMVSRKYETEQAQLSARIEEINASLAEKETSDNGVTDFFSLIAGYADAAELSAAMVNALIEKITVGERVQKEDGTVEQTIKIYYKFVGVLSNELHIKATKRYAAPLSPKRCQCCGAEFTPGSGVAKYCKPCAQKIHTQQSTESTRRRRAAARKAA

SEQ ID NO: 287 - protein, 616 aa, Unknown
  Description of Unknown: Integrase B288 sequence
  PTHR30461:SF3,IPR036162,PS51737,IPR011109,PTHR30461, PF00239,G3DSA:1.10.10.2600,IPR006119,PF14287,SSF53041, IPR025378,SM00857,IPR025827,cd03770,IPR038109, PF13408,G3DSA:3.40.50.1390,PF07508,Coil
MTDYSKITALYSRLSVGDEDRDGGESNSIQNQKIFLENYARGQHLTNIRHYIDDDESGRFFDRSAYSRMMDDVENGKIGVCIMKDLTRWGRDYLQVGNAMEIFRRNNVRFIAVNNGIDSEKPDTLEFAPFINIMSEWYAKDISKKVKTGIKTKGMSGKPIVTEAPYGYAKDPDNKDFWIIDEEAAEVVRLIFRLFIGGKNRNQIAVYLTQEQIPTPTFYMKDRGRGTCKNKALNEDNRCKWNKATLTNILTRQEYCGDVVNFKTTKHFRDKHNHYVDRSQWHITENVHEPIISRSDFETVQRILENAPVRRPNGDGEIHPLSGLLFCKDCGAKMHIRIDYRNGGKRHVAFCSEYHKGKAKNPKCHSPHIMDADLLMQTIAEVLKKIEDYSISNRAEFEALVKKNLAMQQTDQTKKQQKRIPQITTRLEQIDKVLNKLYEDNALGAISQDRYEQMSQKYSEEYYALKAELATLQEQLSAYENAGGRAQKFLKLTERHAAFTELTPAILNEFISRIEVHERDQKRARYAIQHISIYFNYIGKFENEVTQLAEPTEQEIRQMREEIEEAKKEKSRAYHRNYSREYRAKNLEKQREYDRMKAREYRARRKAQAAAAQPTQ

SEQ ID NO: 288 - protein, 616 aa, Unknown
  Description of Unknown: Integrase B289 sequence
  PTHR30461:SF3,IPR036162,PS51737,IPR011109,PTHR30461, PF00239,G3DSA:1.10.10.2600,IPR006119,PF14287,SSF53041, IPR025378,SM00857,IPR025827,cd03770,IPR038109, PF13408,G3DSA:3.40.50.1390,PF07508,Coil
MTDYSKITALYSRLSVGDEDRDGGESNSIQNQKIFLENYARGQHLTNIRHYIDDDESGRFFDRSAYSRMMDDVENGKIGVCIMKDLTRWGRDYLQVGNAMEIFRRNNVRFIAVNNGIDSEKPDTLEFAPFINIMSEWYAKDISKKVKTGIKTKGMSGKPIVTEAPYGYVKDPDNKDFWIIDEEAAEVVRLIFRLFIGGKNRNQIAVYLTQEKIPTPTFYMKDRGRGTCKNKTLNEDNRCKWNKATLTNILTRQEYCGDVVNFKTTKHFRDKHNHYVDRSQWHITENVHEPIISRSDFETVQRILENAPVRRPNGDGEIHPLSGLLFCKDCGAKMHIRIDYRNGGKRHVAFCSEYHKGKAKNPKCNSPHIMDADLLMQTIAEVLKKIEDYSISNRAEFEALVKKNLAMQQTDQTKKQQKRIPQITTRLEQIDKVLNKLYEDNALGTIPQDRYEQMSQKYSEEYYALKAELATLQEQLSAYENAGGRAQKFLKLTERHAAFTDLTPAILNEFISRIEVHERDQKRARYAIQHISIYFNYIGKFENEVTQLAEPTEQEIRQMREEIEEAKKEKSRAYHRQYSREYRARNLEKQREYDRMKAREYRARRKAQAAAAQPTQ

SEQ ID NO: 289 - protein, 616 aa, Unknown
  Description of Unknown: Integrase B290 sequence
  PTHR30461:SF3,IPR022025,IPR036162,PS51737,IPR011109, PTHR30461,PF00239,G3DSA:1.10.10.2600,IPR006119,SSF53041, cd00338,SM00857,IPR025827,IPR038109,PF12224, PS51736,PF13408,G3DSA:3.40.50.1390,PF07508,Coil
MAKKKKPTGGVAIIYARYSSHNQRDVSIEQQIEACRKHAAELGLTITDTYEDRAISGRTDNRPAFQRMMRDAEDGKFQYVLAWKSNRMGRNMMQAMVNESRLMDCGVKVFYAEEDFDDSAAGRFALRSMMNVNQFYSDNLAEDVRRGLMDNASKCMANGRQPLGYKRGEDGKVVVDEPAAAIVREIYTRIASGEMFMDIARDLNRRGIKTQSGSEWNKSSFKVLCRNERYRGIYIYGDTRIEGGIPPIVDDVLWYKVQEVLKVKKSKNRHHCPSDEDYLLTGKLRCGKCGGYMIGMSGRSKTGDVHHYYACQNRRVGHTCDKKNIRRDVVEPAVAQAIKQYCLTDDAIEWITDQTIAYWEDEDRKLQIDSIENDLSAVQSSISNVMKAIEMGVITETTRDRLIELERQQTDLKSKLALAKEEIVHVDGANHTPESLCRLLNFATGRQDLFYEALQIGSRADHWCHKINPTLFREMKKNGRASRNDAERIWYSVANDGYDGGVDSSHYNSTRYHGINLHAFFTKGTVEFRLFNGTTHAGRIKAYVQFCLAMSAWAINCDHDNLHFKSVAGYTQQQKHDLMLRVLTKRLGMRGPEFKTARLHLTSAFLTEAESENTAA

SEQ ID NO: 290 - protein, 615 aa, Unknown
  Description of Unknown: Integrase B291 sequence
  cd00338,SM00857,G3DSA:1.10.10.2600,IPR036162,PS51737, G3DSA:3.40.50.1390,IPR006119,IPR038109,PF07508,IPR011109, SSF53041,PTHR30461,PS51736,Coil,PF00239
MHNKYDINEYVVKLDKLGKIIIYLRKSREDIIDGRYASTEETLSRHEEQLQQWAENNLGYRIPEDYIFKEVVSGEKIKNRPEFQKVLKMIENDDIDGVLVVNCSRLSRGDLIDCGTIINTFEVTNTLVLTPPKIYNLKNKYDKRFFKDELLRGNEYLEQTKELLQNGRHWSTSIGKYIGSVAPYGYDRVTCKEMKVSDGKGFTLRPNEKAEFVKLMFDWYVDGAGCYKIASRLNEMNAPYIDDTPWERCKVQRILKNTTYYGYLTYGEYTTVEKMVNGETISQRRYNKDCPKYKGLHTPIVSKEQWDAVQSRLSVGEAPVRKGEETQNPLAGIVKCAVCHRAMVRNADNRKYAKKRVNDLNKAELLRFLNEHKKKAKLSGRKLAVMLDVKTHYCHDWFGTNEARFHPNSPLFVSKWEDIKRVLNITDDRFDKAVTEFKEVTRAPALVCSGHNCENTSARVHAVEEIVIEEVKKRFEDYTYFVDNYAVEITKKIASAKKTAASIDKDIALKEKQIRNAKIAYEKGIDSIEEYIDRKKELLSEIDALNEKKNKIVNADEEEKTITIKKSVPILKNVFESYNELSSGERNALLRTIIESIEYNRMGGGEIKLDICWLV

SEQ ID NO: 291 - protein, 615 aa, Unknown
  Description of Unknown: Integrase B292 sequence
  SM00857,G3DSA:1.10.10.2600,IPR036162,PF13408,IPR025827, G3DSA:3.40.50.1390,PS51737,IPR006119,IPR038109,PF07508, IPR011109,SSF53041,PTHR30461,Coil,cd00338,PF00239
MAYRKITDIRDTIGMRAVFYARVSTAEEEQLNAIELQIEENRGCIKDHGWKLVGEYIDRSKSGTMVKGRDDYQRLYEDLYEDLFDIVVIKDQERLQRNTLDWYLFINRVVQTGKLLFMYMDGKFYSPDDALITGVRAIIAEEFSRNLSKKLHNYHDHRIEKARQGQEIALQGSGNVYGWDKKDGKYYINPEQAKVRRLMCEGIMARKGSTLIAKELNDAGYRNTVGKPWKPMDIPKFVYDCKNVGTMIINKERHDFESKQTIKLPKEEWVYVENALPPIVTQEEWDLICKIHEERVIATGSDRRGKKTSGYSFSGKLVCGICGAPYWRKQRVSKDEYWVCSTKQTKGRRTRKRDSTMGKAGEINPLGCDNENISYNSLMEIMGVVSERLQANTDTIKHDMINWLTKLRKQLLEANGGHTEADLQRELSRKSKLLDAYLDGILNKQEYQKKAEELDERIIQLKAETEKNKANSGDIEEIDKVLANIDEEVSRYVDGNEKLKVEYLLEHLEQVQIFPDKVIVIVPILSEGIVVEKAQYVSREKRSGEDDVDSANLRSAEPHFRELQPLRCQKYGPCDPENAETDGSCGGNAGHLSGYDGCREPGRGFFHLLCHGDGE

SEQ ID NO: 292 - protein, 615 aa, Unknown
  Description of Unknown: Integrase B293 sequence
  PTHR30461:SF3,cd00338,SM00857,G3DSA:1.10.10.2600,IPR036162, PS51737,G3DSA:3.40.50.1390,IPR006119,IPR038109,PF07508, IPR011109,SSF53041,PTHR30461,Coil,PF00239
MQSSEEAIKFLDEYLIYLRKSRNDGEKVPVEVIVKRHEEALQELAERELGFKIPEKNIYREIVSGGESIEDRPEFIKVLQRLEVGNIKGVFVFDPHRLSRSGLYGAGDVLEAFEVTQTLICTPMKFYNLDDKMDKKYLEMIMIQAAEYLNYAKDVMDAGRMKSFAEGKAILSTPPYGYGKEKISDEKGYKLIPNPVEAPNVKKMFELCCEGLGTTAIANYLNERNVKPRKKAYWEPTTIRDMLKNETYIGILTWGKNPIKKILQNGKARKKRFYNQEGFKVAKGLYEPLVTKEQFELAQEMMKSRRNREYYNNGIKNPLAGLVFCGYCGNAMIRRPYNKSFRKNLVRVYEIDKQELLDYLRAYKQQSNLSLTEIAKRLNVTRDVVVGWFPAKLEKFYPSKTLADKWFDLKTLLDIKDDKFDKEVTTYKEPDIQKDSLICSSLKCNCVSSYLEIVENGLIDKLKNELYKRKHFLDNYEQELKKEKVSNEKELKEVEKKIEEIQGYIKNAAKKNAMDIITDEQFLDLKEEFETELNPLLKKKEKLADTKDEERIIQYRRSIPVLERCVSDYHLLSIEEKNRLLKSFIDRIEYKKEVGGRWNKEAINQFELAVETYDF

SEQ ID NO: 293 - protein, 615 aa, Unknown
  Description of Unknown: Integrase B294 sequence
  PTHR30461:SF3,IPR036162,PS51737,IPR011109,PTHR30461, PS00397,PF00239,G3DSA:1.10.10.2600,IPR006119,SSF53041, cd00338,SM00857,IPR025827,IPR038109,mobidb-lite, PS51736,IPR006118,PF13408,G3DSA:3.40.50.1390,PF07508,Coil
MTRKAKTCFIYVRVSTKMQVENGESIEAQLYDLRQYAKRENLRILHEYIDDGYSGKNITGRPHFQEMMEEIKSGVHVDYVLVFKLSRFGRNAADALSSLQFMQDYGTNLVCVKDGINSEAQMGKMMIAFMSAFAEMERENILVQTMAGREQKAREGKWNGGQAPFGYRLVKDEKGKGHLEIDEDEAEIVRIIFREYTKNGKGVHAIASWLNTQGYRKKIRGNSKYEHFAPGTVKNIIRNPVYAGKIAFGRRRTTPVKGERNVYHMVKQDNFDIYEGEHDAIIDEATWNAAQKRLAEDSHPFPEAKPDGHTHLLTGMLVCPVCGRSMIANVSRGKRKKDGTIGKTTYAYTCKYSKRQFGHDCTFTRQFKQEYIDREVIEVISRAAHSAVFEERVREELDAAVDIEKLEADVARIGKALENNGAARRMLSRQLDALDASDRSYERKYEDMQARLDKLYDESADIEEALDEAEAKLESAKEKQVTTARVYEMLDEFQEKFDTYDPAKQKEILQQVVERVEIDPDANPKKGDAIVKRVRFKCPVSFYRTLPEEAYDVLGINEFNRLETTEYTPDENSRVDGNHDESVCVLEKKQFNLKPTKKAQRQAQFRSSKMSKKKR

SEQ ID NO: 294 - protein, 614 aa, Unknown
  Description of Unknown: Integrase B295 sequence
  PTHR30461:SF3,SM00857,G3DSA:1.10.10.2600,IPR036162,PF13408, IPR025827,G3DSA:3.40.50.1390,PS51737,IPR006119,IPR038109, PF07508,SSF53041,IPR011109,PTHR30461,Coil, PS51736,cd00338,PF00239
MNVYRTREILKTCSIFDLKLKVAFYARVSTESEDQQVSIHHQDEYYRNFIAKNKNWVFVGAYIDNGISGIRTEKRDEFQRMMADAKTGKIDMIVTKEITRFARNTLDSIRYTRELLMYGVCVWFQNDNINTIDEDSELRLTIMSGIAQDESRKLSNRIKFGHAQSIKNGVVLGARIYGYIKKDGKLTVDPKTAPMVKEIFEKYSTGEWSTSTIEKYLYKKGYRNYKGGKLSRDNIKKIIKNPKYKGYYCGGKVKVVDMFTKKQEFLPEDEWTMYKDDGNHVPQIVDESVWNKANVIMQTRSNAIKSHRTSFKQNNLFTGYIFCGNDGAPYWMKQHTIRGREDARWVCSYRIKNGAQSCNSFGIREKELRVMLADLINKSGDIQAAIEKYISLVEKNIDFSNDGAEISRLKNMVLQLEKKKEKLLDLNLDGIITNAEYLDKSEKFKDEIQNINNKLSELESKEEADKDSHLKLKEIGKILNDLQGIGPEDITKTVLGEFLDKIVINPKRPQECEILFFLKTGDVKKKSIIERDKQGCSEYFFLTIYPPTDPFCLEVRFPLYPSVSGTPSSFATSYLKRSSAPFASGTTALLEEVLLGIIHFLLGCYLVYCYIASM

SEQ ID NO: 295 - protein, 614 aa, Unknown
  Description of Unknown: Integrase B296 sequence
  PTHR30461:SF3,IPR036162,PS51737,IPR011109,PTHR30461, PF00239,G3DSA:1.10.10.2600,IPR006119,SSF53041,cd00338, SM00857,IPR025827,IPR038109,mobidb-lite,PS51736, PF13408,G3DSA:3.40.50.1390,PF07508,Coil
MRKKSNLNAATRAVIYARYSSANQRDCSIEQQVAKCRELAARLGLTVIDVYEDRAISGKTDRRPNFQRMMKDADLRQFDVVLAWKSNRMGRNMLQAMTNEERLRDNGIRTVYAEEDFDDTAAGRFALRNMMNVNQFYSENMAEDITRGLMDNAAKCLSNGSLPLGYKPGDDRHVVLDEAEAAIVQEIFTRVSCYEPFIDIARDLNRRGIKTKKGAEWGRSSFHTICRNERYRGIYIYRDVRVEGGMPRIISDELFYKVQEVLKVKKNPQGRRKRSGYEEYLLTGKLYCGHCGSPMTGIAGTSKTGAMHYYYTCQKRRTDHSCDKKAVRRDQIERAVGVAIQQQLLTDENIQMMADKLMEYNARTETKYRLQGLQDQLNANKTATANILKAIEMGIITDATKARLLELEKEQGQLLVKIDEAKAEMVPISRNDFVKLLYIYKEGEPTDKKYLAALFDNFLVRVDLYDDHLKITFDPTGGRQPIDMPIGAEESPESPGDSSESSDFEASSQDAEKFVLALHNCTKECLTRKCRAFFYCSILRRHDLVHRQGYSNRAAARSAVRNATVRRSLARGRVPDGAPEKAATNVAAFLLHHSLRDGLALRASARVRLAGTGR

SEQ ID NO: 296 - protein, 614 aa, Unknown
  Description of Unknown: Integrase B297 sequence
  PTHR30461:SF3,IPR036162,PS51737,IPR011109,PTHR30461, PF00239,G3DSA:1.10.10.2600,IPR006119,PF14287,SSF53041, IPR025378,SM00857,IPR025827,cd03770,IPR038109, PF13408,G3DSA:3.40.50.1390,PF07508,Coil
MKIKDKRFKITALYERLSKDDEVQGESNSIVNQKRMLTQYAEQHGYVNIEHYTDDGWTGTNFDRPDWKRMLADIEAGKVGTVIVKDMSRIGRDYLQVGFYTEVMFREKGVHFIAISNGVDSERRESAEFAPFLNIMNEWYVRDTSRKITTVLKARGMSGKAHTTNRCCYGYKKSADNPDKWIIDEEAAEVVRRIFNMCLNGKGPYQIARELAEDKVERPEYYLGIRGRGVNTKSFDMEHPYMWRGGTVKTILTRMEYTGCTVNFRTKKESYKDKRPTKVDSSEWIIFEDTQEPIIDKHTWETVQKLLDTPRRKGVFEENNPLTGKVFCADCGAKMYHHRNAQGIWKKNYFKAGEMIYHAPEDRYDCSNNIRGRQRYEKLCCSHSITTKALETLVLETIKRTCDYAVENEAEFREKVCSISEEQQGELSVRLEKRLAQKQKRVSEINRLIKKLYEDNISGKLNDKRFNTMLSDYESELEALEEDIERDNAELEGMCAKKTDVDVFMELVKKHMAFDELTPAILNEFVDKIMVYKAVGSGANRMQDVDIYLNYIGRFVVPEVVVELTEEEKLAEAKRQEKLEKKRASNRKYMARKREEARKAWAEIEAEKAKVVGH

SEQ ID NO: 297 - protein, 614 aa, Unknown
  Description of Unknown: Integrase B298 sequence
  PTHR30461:SF3,cd00338,SM00857,G3DSA:1.10.10.2600,IPR036162, PF13408,PS51737,IPR025827,G3DSA:3.40.50.1390,IPR006119, IPR038109,PF07508,IPR011109,SSF53041,PTHR30461, PS51736,Coil,PF00239
MDVVLYLRYSSERQNEQSIEGQRHVCEKYCADMGYTIVGEYTDRALSASKETDKRVDFQRMIRDSEKRLWQGVIVYKLDRFARNRYDSATYKTRLKKNGVKVISATEAISDNPEGIILESVLEGMAEFYSKELSQKITRGMHESALKGNSCGGQISLGYKIENKKLVIDPKTAPIVRQAFDMYANGHTVAEICKVFNAAGYKTKSGSDFNKNSFHSMFRNRKYIGEYKFMEVVIDDGVPAIIDKDTFDRVQTILSRKAQAPARGKAIVDYMLSGKVFCGHCGKLMTGTASTSKTGRKYFYYTCAGRRSHNGCTKSPIRKERLEEAVVNDTIKMLTPDFIEYLADLAVKESVKEREESTLIPSLKAEIAEYDKSIERLLKLVENGAESPSLSKRLNELEKSKRAAEKNLAKENAEYFMLDKAQVIFFLTKFTTGNKTDPEFQRRIIDLLVNSVIVWDENDNDDGTQDITITYNLTPKKTRKITVKDIRKSECVFHPVKSTIKTHAKGAYKTPTRVSFSMQNRGKLPFSWQFTLFVVSSSIAVGICSSLALKSRKPLTIAQKGFLHDKERMISSVLINEKMTDRTLTNTVGRLLIRFLLLLFRTRTRFRFPCWTAQ

SEQ ID NO: 298 - protein, 613 aa, Unknown
  Description of Unknown: Integrase B299 sequence
  SM00857,G3DSA:1.10.10.2600,IPR036162,PF13408,IPR025827, PS51737,G3DSA:3.40.50.1390,IPR006119,IPR038109,PF07508, SSF53041,IPR011109,PTHR30461,Coil,PS51736, cd00338,PF00239
MAYRKITDIKDTIGMRAVFYARVSTAEEEQLNAIELQIEENRGCIKDHGWKLVGEYIDRSKSGTMVKGRDDYQRLYEDLYEDLFDIVVIKDQERLQRNTLDWYLFINRIVQTGKLLFMYMDGKFYSPDDALITGVRAIIAEEFSRNLSKKLHNYHDHRIEKARQGQEIALQGSGNVYGWDKKDGKYYINPEQAKVRRLMCEGIMARKGSTLIAKELNDAGYRNTVGKPWKPMDIPKFVYDCKNVGTMIINKERHDFESKQTIKLPKEEWVYVENALPPIVTQEEWDLICKIHEERVIATGSDRRGKKTSGYSFSGKLVCGICGAPYWRKQRVSKDEYWVCSTKQTKGRRTRKRDSTMGKAGEINPLGCDNENISYNSLMEIMGVVSERLQANTDTIKQDMINWLTKLRKQLLEANGGHTEADLQRELSRKSKLLDAYLDGILNKQEYQKKAEELDERIIQLKTETEKNKANSGDIAEIDKVLANIDEEVTRYVDGNEKLKVEYLLEHLEQVQIFPDKVIVIVPILSEGIVVEKTQYVSREKRGGKNHIDPSDLRTAKTDIRKLQVIWKRKYGQENFGSAEKNRRSCGDPVDLSGYDGGRKHERAVLCFGFAVF

SEQ ID NO: 299 - protein, 613 aa, Unknown
  Description of Unknown: Integrase B300 sequence
  PTHR30461:SF3,SM00857,G3DSA:1.10.10.2600,IPR036162,PS51737, G3DSA:3.40.50.1390,IPR006119,IPR038109,PF07508,SSF53041, IPR011109,PTHR30461,Coil,PS51736,cd00338, PF00239
MNKIPIFEEIDLMLLRKSRSDNIKEPIEITLKRHEEQLQELCIKTTGKPVKEENIYREIVSGGENIKDRPDFLRLLRRLENGNIKRVWCVDPERLSRSGMYGAGDVLKIFDVTNTLIATLDQTYDLKNPMDKKYLEMRMIQSAEYRNYAKDVMNRGRHKSVRDGYYIGSSAPFGYKRKQLHDEQDRFILEPHEEESQTVILMFEMLLEGVGTSNLANHLNKYKYKARKNEYWTPAMVRNIVTSEVYCGYNTWEKFKTVEEIINGEVVKKRKLNDKYYVYKGKHKALISEEEFKNVQEILKSHPSSKLGGNKNASNPLAGVVFCKKCGRHMIRRPYNEKHLKNGFRKYKYDKQELLDFMRSSKEKSNLSLSQIAKKMNISRDTVKGWFPTNIDKFYDGKNLANHWYQLKEVLEIKDSKWDKIITTYNKKVKQNDSLICLTPFCDNVSSELQLVEKRLLQALEIQLNDFRYYVDNYEQEIIKEAKSNAKTLNKIEKQIEDLKKELKNLRRSYNREEFTYDEYIEDKNDIESELKEIEKTKEEILKDTNQDKIIRYKKAIPKLSECLKTYSKLSIQDKNDLLKSLVYKVDYLKTGKNGRWNKEEATTFTLEISLKI

SEQ ID NO: 300 - protein, 613 aa, Unknown
  Description of Unknown: Integrase B301 sequence
  PTHR30461:SF3,SM00857,G3DSA:1.10.10.2600,IPR036162,PS51737, G3DSA:3.40.50.1390,IPR006119,IPR038109,PF07508,IPR011109, SSF53041,PTHR30461,Coil,PS51736,cd00338, PF00239
MYDIYNQKPTSRKVVIYARVSTEHEAQLSALENQKDWYKPILQQHPEWDIVKMYVDEGITGTSAKKRPQFMQMIQDASSGNFDLILTREVSRFARNTVDTLQYTRELKSKGVEVFFLNDNIKTFDGDGELRLTIMATLAQDESRKTSVRVKSGQQTSMENGVFYGNGNILGYDRVGKDMVINPEQAKTVRMIFDWYLDGWGMRKIQFELEKAGRLTAMGKSNWHVSNISKILRNSFYCGIITYHKEFTPDFLEQKKIRNFGDMEFTQVRGNHKPIITEEEYDQAQKRINSRRKTLSVDTSGQRMYGEKPPSDVWVKLLECECGHKFNRKMWHNTTEGKQYGYQCYSSIRTGTVRTRLNKGLPIDGICQTPMIAGWKLQMMAKYIFKNYLSDTDQVLSLAESMLEKHIDDEEEVCDNTDIINQKKEELQKLLKRLDNLIEMRADGELARDIFILKKESTENSISQLKKELAELEPSEIESEIDEVTSKEKITILKYALDQYTNFDSDADIPESVIEAFVEKIIARKDGFDWYLRFNPEESPMGCLVDGKRKRGAKVSSFCSPQHRQLLTKVGNNSFTKMYEYVINLADAKSYLYTYSTKHRIFRWEDINVSIFM

SEQ ID NO: 301 - protein, 613 aa, Unknown
  Description of Unknown: Integrase B302 sequence
  SM00857,G3DSA:1.10.10.2600,IPR036162,PS51737,G3DSA:3.40.50.1390, IPR006119,IPR038109,PF07508,IPR011109,SSF53041, PTHR30461,PS51736,cd00338,PF00239
MYVMSTEEEKQKVRERQKGYRTDEIVVIKAAEPVSLRDTRTELRVCAYCRVSTDNIEQTSSFELQKNYYEEYIAKHDNWKMVDIFADEGISGTSMAKREGFKRMIRECLAGKIDLIVTKSVSRFSRNVVDCIDTIRKLKTMNPSVRVFFESEGIDTGDSSSDVMLNILAIFAQEESHTKSEIMQWSVDNRFARGNFLTPRLFGYNIDPDKPDRYIINEEEAKVVKLVYSMYVTGYSPNEIAVTMTKLNYVSNIKGDRKWTAGVVNNILNNERRCGMIIARKTYTPDFTTHKSRKNINQRNKYQMNEHHEGIVAVELYKEALRIKEMRKHRNYDLIPSLSVIKEGALKGFVPVSVKYSGFTYNNYLFASEFAYTKDKNGNIIKDKIKPIYKNDLSNFDLSDFEKVDSQLFSTVSQPMCWFKYNQMYFNRACIDKMKNTQYIELLFEPTEKLLAIRSCNEYDDYAIKWGVEKNDKLSPITKTSSGISHVLFDCMEWNEDYRYKMIGVRRTKNNDSIVIFDLNNAEAICREELESENPDEVISKITSYYDEYLSDHFGNNFYDDIYTMRLYMMDILKKWNLGAELVPIEDPKEWLIEAKKCVEEHLSKLMEEQLDV

SEQ ID NO: 302 - protein, 613 aa, Unknown
  Description of Unknown: Integrase B303 sequence
  SM00857,G3DSA:1.10.10.2600,IPR036162,PS51737,G3DSA:3.40.50.1390, IPR006119,IPR038109,PF07508,IPR011109,SSF53041, PTHR30461,PS51736,cd00338,PF00239
MYVMSTEEEKQKVRERQKGYRTDEIVVIKAAEPVSLRDTRTELRVCAYCRVSTDNIEQTSSFELQKNYYEEYIAKHDNWKMVDIFADEGISGTSMAKREGFKRMIRECLAGKIDLIVTKSVSRFSRNVVDCIDTIRKLKTMNPPVRVFFESEGIDTGDSSSDVMLNILAIFAQEESHTKSEIMQWSVDNRFARGNFLTPRLFGYNIDPDKPDRYIINEEEAKVVKLVYSMYVTGYSPNEIAVTMTKLNYVSNIKGDRKWTAGVVNNILNNERRCGMIIARKTYTPDFTTHKSRKNINQRNKYQMNDHHEGIVAVELYREALRIKEMRKHRNYDLIPSLSVIKEGALKGFVPVSVKYSGFTYNNYLFASEFAYTKDKNGNIIKDKIKPIYKNDLSNFDLSDFEKVDSQLFSTVSQPMCWFKYNQMYFNRACIDKMKNTQYIELLFEPTEKLLAIRSCNEYDDYAIKWGVEKNDKLSPITKTSSGISHVLFDCMEWNEDYRYKMIGVRRTKNNDSIVIFDLNNAEAICREELESENPDEVISKITSYYDEYLSDHFGNNFYDDIYTMRLYMMDILKKWNLGAELVPIEDPKEWLIEAKKCVEEHLSKLMEEQLDV

SEQ ID NO: 303 - protein, 613 aa, Unknown
  Description of Unknown: Integrase B304 sequence
  PTHR30461:SF3,SM00857,G3DSA:1.10.10.2600,IPR036162,PS51737, G3DSA:3.40.50.1390,IPR006119,IPR038109,PF07508,SSF53041, IPR011109,PTHR30461,Coil,PS51736,cd00338, PF00239
MYDIYNQKPTNRKVVIYARVSTEHEAQLSALENQKDWYKPILQQHPEWDIVKMYVDEGITGTSAKKRPQFMQMIQDASSGDFDLILTREVSRFARNTVDTLQYTRELKSKGVEVFFLNDNIKTFDGDGELRLTIMATLAQDESRKTSVRVKSGQQTSMENGVFYGNGNILGYDRVGKDMVINPEQAKTVRMIFDWYLDGWGMRKIQFELEKAGRLTAMGKSNWHVSNISKILRNSFYCGIITYHKEFTPDFLEQKKIRNFGDMEFTQVRGNHKPIITEEEYNQAQKRINSRRKTLSVDTSGQRMYGEKPPSDVWVKLLECECGHKFNRKMWHNTTEGKQYGYQCYSSIRTGTVRTRLNKGLPIDGICQTPMIAGWKLQMMAKYIFKNYLSDTDQVLSLAESMLEKHIDDEEEVCDNTDIINQKKEELQKLSKRLDNLIEMRADGELTRDIFILKKESTENSISQLKKELAELEPSEIESEIDEVTSKEKITILKYALDQYTNFDSDADIPESVIEAFVEKIIARKDGFDWYLRFNPEESPMGCLVDGKRKRGAKVSSFCSPQHRQLLTKVGNNSFTKMYEYVINLADAKSYLYTYSTKHRIFRWEDINVSIFM

SEQ ID NO: 304 - protein, 613 aa, Unknown
  Description of Unknown: Integrase B305 sequence
  PTHR30461:SF3,SM00857,G3DSA:1.10.10.2600,IPR036162,PS51737, G3DSA:3.40.50.1390,IPR006119,IPR038109,PF07508,IPR011109, SSF53041,PTHR30461,Coil,PS51736,cd00338, PF00239
MYDIYNQKPTNRKVVIYARVSTEHEAQLSALENQKDWYKPILQQHPEWDIVKMYVDEGITGTSAKKRPQFMQMIQDASSGDFDLILTREVSRFARNTVDTLQYTRELKSKGVEVFFLNDNIKTFDGDGELRLTIMATLAQDESRKTSVRVKSGQQTSMENGVFYGNGNILGYDRVGKDMVINPEQAKTVRMIFDWYLDGWGMRKIQFELEKAGRLTAMGKSNWHVSNISKILRNSFYCGIITYHKEFTPDFLEQKKIRNFGDMEFTQVRGNHKPIITEEEYNQAQKRINSRRKTLSVDTSGQRMYGEKPPSDVWVKLLECECGHKFNRKMWHNTTEGKQYGYQCYSSIRTGTVRTRLNKGLPIDGICQTPMIAGWKLQMMAKYIFKNYLSDTDQVLSLAESMLEKHIDDEEEVCDNTDIINQKKEELQKLSKRLDNLIEMRADGELTRDIFILKKESTENSISQLKKELAKLEPSEIESEIDEVTSKEKITILKYALDQYTNFDSDADIPESVIEAFVEKIIARKDGFDWYLRFNPEESPMGCLVDGKRKRGAKVSSFCSPQHRQLLTKVGNSSFIKIYEYDIDISRAKSYLYAYSTKHRILRWEDIHVCIFI

SEQ ID NO: 305 - protein, 613 aa, Unknown
  Description of Unknown: Integrase B306 sequence
  PTHR30461:SF3,SM00857,G3DSA:1.10.10.2600,IPR036162,PS51737, G3DSA:3.40.50.1390,IPR006119,IPR038109,PF07508,IPR011109, SSF53041,PTHR30461,Coil,PS51736,cd00338, PF00239
MNKIPIFEEIDLMLLRKSRSDNIKEPIEITLKRHEEQLQELCIKTTGKPVKEENIYREIVSGGENIKDRPDFLRLLRRLENGNIKRVWCVDPERLSRSGMYGAGDVLKIFDVTNTLIATLDQTYDLKNPMDKKYLEMRMIQSAEYRNYAKDVMNRGRHKSVRDGYYIGSSAPFGYKRKQLHDEQDRFILEPHEEESQTVILMFEMLLEGVGTSNLANHLNKYKYKARKNEYWTPAMVRNIVTSEVYCGYNTWEKFKTVEEIINGEVVKKRKLNDKYYVYKGKHKALISEEEFKNVQEILKSHPSSKLGGNKNASNPLAGVVFCKKCGRHMIRRPYNEKHLKNGFRKYKYDKQELLDFMRSSKEKSNLSLSQIAKKMNISRDTVKGWFPTNIDKFYDGKNLANHWYQLKEVLEIEDSKWDKIITTYNKKVKQNDSLICLTPFCDNVSSELQLVEKRLLQALEIQLNDFRYYVDNYEQEIIKEAKSNAKTLNKIEKQIEDLKKELKNLRRSYNREEFTYDEYVEDKNDIESELKEIEKTKEEILKDTNQDKIIRYKKAIPKLSECLKAYHKLSVQDKNDLLKSIVDKVDYLKTGKNGRWNKKEATTFTLEISLKI

SEQ ID NO: 306 - protein, 613 aa, Unknown
  Description of Unknown: Integrase B307 sequence
  PTHR30461:SF3,SM00857,IPR006118,G3DSA:1.10.10.2600,IPR036162, PS51737,G3DSA:3.40.50.1390,Coil,IPR006119,IPR038109, PF07508,IPR011109,SSF53041,PTHR30461,PS00397, PS51736,cd00338,PF00239
MNDEKKIADVYIRVSTLDQAREGFSLPEQKEKLIEFCKSKGYEIHAIYADEGISAKDDKRPAYQQMINDIKNGTVNVIVALKLDRLTRSVYDVEKLMKLLEKYGCDLDCKDDDSNTLTSTGRMCIRLTTAFSQNEIERCSERTKFGMVGAIKAGHIPNRTPIGFKRIDKKLVPDELTKDIVIRMYDLYLEGKSYQDIANIYNQEEILGRTNWLDSTIQKIMTNELYKGDFVHGKRTKHPQYYEDVVEPIVSKEKWNACQYQTKRNARHYERTATYLFTNKLKCSVCGNFLGGKATTKRKSGKKYYYYKCEKCRTNYKEDTIRDGLLLQLYDLIRKDNLINKYYTPFIKHKQEDITKDYKTELKGLEKQEERIKCAYLNGVVKMNEFDNELKSIRYKIDNINKKIKEIKQCENFNFTTNDLLILEDTETIDTFVNPDIFLTNILNLTNASREEMKRIIGTYIDNIEVNKVGDKIELLNIEYRKSFLTDLVNYHNNYGVPYNFNIFSDEKGFKIPMNHEGKTSFEAKEYFNKLQEVVSKNSLKLNYYETEADSKLKDISFEPNGDYEQILRLIVLSDTKNYNDKTLRLGVITLDLESALYSRLNRKEQPNKLCYI

SEQ ID NO: 307 - protein, 613 aa, Unknown
  Description of Unknown: Integrase B308 sequence
  PTHR30461:SF3,SM00857,G3DSA:1.10.10.2600,IPR036162,PF13408, IPR025827,G3DSA:3.40.50.1390,PS51737,IPR006119,IPR038109, PF07508,IPR011109,SSF53041,PTHR30461,PS51736, cd00338,PF00239
MARAAKQDNNSEIIDGVIYARYSEGPNQTEASIEGQVRECKEYAKRNGIRIINVYSDSKHTGTNDNRAEFQKMLRDSRRGGFSVVVVWKIDRFGRNRAEMAQNKALLKLQGVKVVSAKEYIPDSPEGIILESVLEGMAEYYSANLSQNIKRGMKENALHCKSNGSGKSLGYIVDKDGYFEIEPNEATIVKTIFQKYDEGMKIADIWREIVASGAKTKRGKDFTQYGISRVLSNRAYIGEYRYGDIVTPGGMPRIIDDDLFNRVQERRALSKKTPASRRSNSDVDFLLTGKVFCGHCKGTMRGMSGTSKTGRKFYYYACHDKIFKHNKCTKKNVKKEWLETEVTRITRDDILNKETIEFIADRVVEIQRQEQEDKSMLRYYEQQLRDTQSAINNIMKAIEAGIITSSTKSRLFELEEQKSIIEGEIEREKIITPVIEKEQVIFSLERFFGGDINNKEYQRNIIDMFVNKVILYDNKIIITYNISSQNEISVDVVEQAAFAALDECSSKLSLAPPAGACPCTQSALLYVRRIFYCRSSILSKTQPLFRRGGHFPSSVFVNTQSHRCDNLCVTFTNSGACPCTRSALLYVRRFFYCRSWIIIYKPNFVISPWQTLI

SEQ ID NO: 308 - protein, 613 aa, Unknown
  Description of Unknown: Integrase B309 sequence
  PTHR30461:SF3,cd00338,SM00857,G3DSA:1.10.10.2600,IPR036162, PF13408,PS51737,G3DSA:3.40.50.1390,IPR025827,IPR006119, IPR038109,PF07508,IPR011109,SSF53041,PTHR30461, PS51736,Coil,PF00239
MKITKFPIDLSMLTEEEIDQFRQDPSTLFEGDTDVCLYLRFSSERQREQSIEGQLRDCRAYCKMNRYRITAIYVDRATTARKDVEKRLHFQEMIRDSEKRPWEYVVVWKLDRFARNRTDSALFKFRLRKNGVKVISATENISEKPEGIILEAVLEGMAEFYSADLSQKITRGMRESALKCHSIGGHVPLGYKIEDHKLVINPATAHIVQEAFELYANGETVADICRIFNTKGYRTAKGVEFNRNSFKSMFRNKRYIGVYTYKDIEVEGGVPAIIDKELFETVGHRLSKNAEAPARGKAKVDYLLAGKLFCGHCGGSMNGESGTSRTGAVHNYYTCYTRKRKHACEKKPLKKEWIEYIVAQDAMELLTDDTIQELADMAISQTEQDLRENTRIPELTERMKETESGIANITNAIEKGIASDALMNRLVELEKEKKNLFRLLAEEEKYVCKIERSQIVYWLTEFKGGRIEDERYRRIIIDLMVNSVTVWDEPDGFRITTAYNLTSCKSKTFRINPSGEKGFGFEGSKSTKMKTVRKGGFHFAVGLRESKFIPPCGGNPFRSTKQVLDEHLFLQRRLRREVFALIQNRKAPSWEKSQGGAFSIFLGLVYFLSYAIY

SEQ ID NO: 309 - protein, 613 aa, Unknown
  Description of Unknown: Integrase B310 sequence
  PTHR30461:SF3,SM00857,G3DSA:1.10.10.2600,IPR036162,PS51737, G3DSA:3.40.50.1390,IPR006119,IPR038109,PF07508,IPR011109, SSF53041,PTHR30461,Coil,PS51736,cd00338, PF00239
MYDIYNQKPTSRKVVIYARVSTEHEAQLSALENQKDWYKPILQQHPEWDIVKMYVDEGITGTSAKKRPQFMQMIQDASSGNFDLILTREVSRFARNTVDTLQYTRELKSKGVEVFFLNDNIKTFDGDGELRLTIMATLAQDESRKTSVRVKSGQQTSMENGVFYGNGNILGYDRVGKDMVINPEQAKTVRMIFDWYLDGWGMRKIQFELEKAGRLTAMGKSNWHVSNISKILRNSFYCGIITYHKEFTPDFLEQKKIRNFGDMEFTQVRGNHKPIITEEEYDQAQKRINSRRKTLSVDTSGQRMYGEKPPSDVWVKLLECECGHKFNRKMWHNTTEGKQYGYQCYSSIRTGTVRTRLNKGLPIDGICQTPMIAGWKLQMMAKYIFKNYLSDTDQVLSLAESMLEKHIDDEEEVCDNTDIINQKKEELQKLLKRLDNLIEMRADGELARDIFILKKESTENSISQLKKELAELEPSEIESEIDEVTSKEKITILKYALDQYTNFDSDADIPESVIEAFVEKIIARKDGFDWYLRFNPEESPMGCLVDGKRKRGAKVSAFCSPQHRQLLTKVGNNSFTKMYEYVINLADAKSYLYTYSTKHRIFRWEDINVSIFM

SEQ ID NO: 310 - protein, 613 aa, Unknown
  Description of Unknown: Integrase B311 sequence
  SM00857,G3DSA:1.10.10.2600,IPR036162,PS51737,G3DSA:3.40.50.1390, IPR006119,IPR038109,PF07508,IPR011109,SSF53041, PTHR30461,Coil,PS51736,cd00338,PF00239
MKYNLNDYRIEVDKLGKIIIYLRKSREDIIDGRYASTEETLARHEEQLQQWAEANLGYRIPENHIFKEVVSGEKIKNRPVFKEVLKMTETETIGGILCINVSRLSRGELKDCGTIIDTFSVTDTKILTPQKIYDLQNKYDKRFFKDEILRANDYLEMTKELLQNGRHWSTSIGKFVGSVAPFGYDRVTCKEMKVADEKGFTLRPNADAETVKQIFDMYTDGNGCYKIASHLNSTHTPYIDDKQWDRCIIQRILKNTTYCGFLTYGEITTVEKMIDGEKLTFRRKNNDCPIYKGLHAPVVSKEQFDIVQSKLKLGESPTRRGNETRNPLAGLVKCSVCNRAMVYNADSRESSQKRVHELDKNELLQFLNEHKKKAKLSARKLSEMLNVKKHYCQDWFGGNVGRFHPNSPLFVSKWHEIKKAVNIETDKYDKAVTEFAPVTRETRLVCSGHSCSATSAVLSAVEKLVIDDVKKRFDDYTYFLDNYAVEITKKETAAKKAIKNIEKSIEQKEKQMKNAKIAFEKGIDSIEEYIDRKTELVAELEELKEKKRKAEEANEENDTETIKKSVPILKNVFDSYYELSTGERNTILRTIIESIEYTRIDGGEISLDICWLI

SEQ ID NO: 311 - protein, 613 aa, Unknown
  Description of Unknown: Integrase B312 sequence
  PTHR30461:SF3,SM00857,G3DSA:1.10.10.2600,IPR036162,PS51737, G3DSA:3.40.50.1390,IPR006119,IPR038109,PF07508,IPR011109, SSF53041,PTHR30461,Coil,PS51736,cd00338, PF00239
MYDIYNQKPTSRKVVIYARVSTEHEAQLSALENQKDWYKPILQQHPEWDIVKMYVDEGITGTSAKKRPQFMQMIQDASSGNFDLILTREVSRFARNTVDTLQYTRELKSKGVEVFFLNDNIKTFDGDGELRLTIMATLAQDESRKTSVRVKSGQQTSMENGVFYGNGNILGYDRVGKDMVINPEQAKTVRMIFDWYLDGWGMRKIQFELEKAGRLTAMGKSNWHVSNISKILRNSFYCGIITYHKEFTPDFLEQKKIRNFGDMEFTQVRGNHKPIITEEEYDQAQKRINSRRKTLSVDTSGQRMYGEKPPSDVWVKLLECECGHKFNRKMWHNTTEGKQYGYQCYSSIRTGTVRTRLNKGLPIDGICQTPMIAGWKLQMMAKYIFKNYLSDTDQVLSLAESMLEKHIDDEEEVCDNTDIINQKKEELQKLSKRLDNLIEMRADGELTRDIFILKKESTENSISQLKKELAELEPSEIESEIDEVTSKEKITILKYALDQYTNFDSDADIPESVIEAFVEKIIARKDGFDWYLRFNPEESPMGCLVDGKRKRGAKVSSFCSPQHRQLLTKVGNSSFIKIYEYDIDISRAKSYLYAYSTKHRILRWEDIHVCIFI

SEQ ID NO: 312 - protein, 613 aa, Unknown
  Description of Unknown: Integrase B313 sequence
  PTHR30461:SF3,SM00857,G3DSA:1.10.10.2600,IPR036162,PS51737, G3DSA:3.40.50.1390,IPR006119,IPR038109,PF07508,IPR011109, SSF53041,PF00239,PTHR30461,PS51736,Coil, cd00338
MYDIYNQKPTSRKVVIYARVSTEHEAQLSALENQKDWYKPILQQHPEWDIVKMYVDEGITGTSAKKRPQFMQMIQDASSGNFDLILTREVSRFARNTVDTLQYTRELKSKGVEVFFLNDNIKTFDGDGELRLTIMATLAQDESRKTSVRVKSGQQTSMENGVFYGNGNILGYDRVGKDMVINPEQAKTVRMIFDWYLDGWGMRKIQFELEKAGRLTAMGKSNWHVSNISKILRNSFYCGIITYHKEFTPDFLEQKKIRNFGDMEFTQVRGNHKPIITEEEYDQAQKRINSRRKTLSVDTSGQRMYGEKPPSDVWVKLLECECGHKFNRKMWHNTTEGKQYGYQCYSSIRTGTVRTRLNKGLPIDGICQTPMIAGWKLQMMAKYIFKNYLSDTDQVLSLAESMLEKHIDDEEEVRDNTDIINQKKEELQKLLKRLDNLIEMRADGELARDIFILKKESTENSISQLKKELAELEPSEIESEIDEVTSKEKITILKYALDQYTNFDSDADIPESVIEAFVEKIIARKDGFDWYLRFNPEESPMGCLVDGKRKRGAKVSAFCSPQHRQLLTKVGNNSFTKMYEYVINLADAKSYLYTYSTKHRIFRWEDINVSIFM

SEQ ID NO: 313 - protein, 613 aa, Unknown
  Description of Unknown: Integrase B314 sequence
  SM00857,G3DSA:1.10.10.2600,IPR036162,PS51737,G3DSA:3.40.50.1390, IPR006119,IPR038109,PF07508,IPR011109,SSF53041, PTHR30461,Coil,PS51736,cd00338,PF00239
MKYNLNDYRIEVDKLGKIIIYLRKSREDIIDGRYASTEETLARHEEQLQQWAEANLGYRIPENHIFKEVVSGEKIRNRPVFKEVLKMTEAETIGGILCINVSRLSRGDLKDCGTIIDTFSVTDTKILTPQKIYDLQNKYDKRFFKDEILRANDYLEMTKELLQNGRHWSTSIGKFVGSVAPFGYDRVTCKEMKVADEKGFTLRPNADAETVKQIFDMYTDGNGCYKIASHLNSTHAPYIDEKQWDRCIIQRILKNTTYCGFLTYGEITTVEKMIDGEKLTFRRKNNDCPIYKGLHTPIVSKEQFDIVQSKLKLGESPTRRGNETRNPLAGLVRCSVCNRAMVYNADSRESSQKRVHELDKNELLQFLNEHKKKAKLSARKLSEILNVKKHYCQDWFGGNVGRFHPNSPLFVSKWHEIKKAVNIETDKYDKAVTEFAPVTRETRLVCSGHSCSATSAGLSVVEKLVIDDVKKRFDDYTYFLDNYAVEITKKETAAKKAIKNIEKSIEQKEKQMKNAKIAFEKGIDSIEEYIDRKTELVAELEELKEKKRKAEEANEENDTETIKKSVPILKNVFDSYYELSTGERNTILRTIIESIEYTRIDGGEISLDICWLI

SEQ ID NO: 314 - protein, 612 aa, Unknown
  Description of Unknown: Integrase B315 sequence
  PTHR30461:SF3,SM00857,IPR036162,PF13408,IPR025827, G3DSA:3.40.50.1390,IPR006119,PF07508,IPR011109,SSF53041, PF00239,PTHR30461,Coil,cd00338
MRAAFLIRCSTKKQDYERQVNDLTRLAKKFGYTSSDNMIFGEHITGKDDASKRDRQSIQRLKDAAINKEFDVVLVSEVSRMSRDPMSGRLYVRQLINMDIPVYFRDIDTWTIDPVTGKKVRDAETIIGAAFDAAWKYIKSMKTQIASGRRDELDNNQMSIGQPFFGYKRYGGRDKGKKNSWVINDDAAKVVVDVFEEYVKDGATLKSTALAITAKYGEQFNKKFSIGTIEHILTFEPYCTGIKVVSLTDPDTEDVDEFEVEIPTIITRAMFDKATTKRATNRTARTPYPKQATYILSKLLKCPICEHSLTPQKRGGDKGDKYRLMNGKVAIRWSCMSGINNATDCSSRITISNEKLEAIIWGLIKQELIGFANLNDEDRVAKVEELTDKITNLEMNIANFTSHISNMDRLIERAYSAYMDAPDSVMDIAKDKYYKTLTKCENERAECKDKIEALSVEKLRLENMRTFFNQPTLPKDAIEKAESDPIKMRNLVMELIDKIYPYRITTYVSPATNRIMKNGIVLLEVYTINGIYNVLYDGNQRNNKVAYYISGVYATFQNGRNKFDAYDTGEYFVISNATLVTNTEDVDLLVTFNELIKICMQNGWEIDYTYKM

SEQ ID NO: 315 - protein, 612 aa, Unknown
  Description of Unknown: Integrase B316 sequence
  PTHR30461:SF3,SM00857,IPR036162,PF13408,IPR025827, G3DSA:3.40.50.1390,IPR006119,PF07508,IPR011109,SSF53041, PTHR30461,Coil,cd00338,PF00239
MRAAFLIRCSTKKQDYERQVNDLTRLAKKFGYTSSDNMIFGEHITGKDDASKRDRQSIQRLKDAAINKEFDVVLVSEVSRMSRDPMSGRLYVRQLINMDIPVYFRDIDTWTIDPVTGKKVRDAETIIGAAFDAAWKYIKSMKTQIASGRRDELDNNQMSIGQPFFGYKRYGGRDKGKKNSWVINDDAAKVVVDVFEEYVKDGATLKSTALAITAKYGEQFNKKFSIGTIEHILTFEPYCTGIKVVSLTDPDTEDVDEFEVEIPTIITRAMFDKATTKRATNRTARTPYPKQATYILSKLLKCPICEHSLTPQKRGGDKGDKYRLMNGKVAIRWSCMSGINNATDCSSRITISNEKLEAIIWGLVKQELIGFANLNDEDRVAKVEELTDKITNLEMNIANFTSHISNMDRLIERAYSAYMDAPDSVMDIAKDKYYKTLTKCENERAECKDKIEALSAEKLRLENMRTFFNQPTLPKDAIEKAESDPIKMRNLVMELIDKIYPYRITTYVSPATNRIMRNGIVLLEVYTINGIYNVLYDGNQRNNKVAYYISSVYATFQNGRNKFDAYDTGEYFVISHATLVTETEDVDMLVTFNELIKICMQNGWEIDYTYKM

SEQ ID NO: 316 - protein, 612 aa, Unknown
  Description of Unknown: Integrase B317 sequence
  IPR036162,PS51737,IPR011109,PTHR30461,G3DSA:1.10.10.10, PF00239,IPR036388,G3DSA:1.10.10.2600,IPR006119,SSF53041, PF13412,SSF46785,cd00338,IPR036390,SM00857,IPR025827,IPR038109 ,PS51736,PF13408,G3DSA:3.40.50.1390,PF07508,Coil
MLRAVIYCRCSTEEESQKDALAKQIQEAEECVRKNNWLLTDSYIESRSGTTTKGRTEYNRLLGDLELNKFDIVVIKSQDRLMRNTKDWYLFVDRLVTNSKKLYIYIEQKFYTTDDALITGIKAILAEEYSRELSKKINNAHRNRQKSGSSVILNSNVYGFQKLPDKTIALVEEEAEVKRRMYELCASGYGTRTIETILKNEGIKKRNGKPFIANDILRIIKNPLNKGCVVMGKTHYDFDSKKMIRMPEDQQYVYENLVPHTVSDALWESANEEIAKRRRSSKTDKTSFGRNTGKYELSGKIYCGLCGSPYYRKTRRRYRDEKIIYEWKCRTYLETGRNVGRKDRPQLRKVQLETVEGCDNVHLDEEQLYELLEQNCVKSYQVDKERIVKKMVRFLKLVLQERDLQPEIEQKEQKKRKIKQQMQLLVDKLLDGILSDEVYQEKQRSLEKQLSDITGQLKKLEQKRSKENVLEDRISHIEKSMKNGNLIEKATVAEMLDEIEKILIFPTYMEIYFNLSRMLGLHEMQLPYETSEQGEVLRIEYGNRFNYKEKKEGGREEIIELLRDNPKITAKMIAQKMGIGLSAVHYRMNVLKREGRIRFCGGGGVGYWEILE

SEQ ID NO: 317 - protein, 612 aa, Unknown
  Description of Unknown: Integrase B318 sequence
  PTHR30461:SF3,SM00857,IPR036162,PF13408,IPR025827, G3DSA:3.40.50.1390,IPR006119,PF07508,IPR011109,SSF53041, PTHR30461,Coil,cd00338,PF00239
MRAAFLIRCSTKKQDYERQVNDLTRLAKKFGYTSSDNMIFGEHITGKDDASKRDRQSIQRLKDAAINKEFDVVLVSEVSRMSRDPMSGRLYVRQLINMDIPVYFRDIDTWTIDPVTGKKVRDAETIIGAAFDAAWKYIKSMKTQIASGRRDELDNNQMSIGQPFFGYKRYGGRDKGKKNSWVINDDAAKVVVDVFEEYVKDGATLKSTALAITAKYGEQFNKKFSIGTIEHILTFEPYCTGIKVVSLTDPDTEDVDEFEVEIPTIITRAMFDKATTKRATNRTARTPYPKQATYILSKLLKCPICEHSLTPQKRGGDKGDKYRLMNGKVAIRWSCMSGINNATDCSSRITISNEKLEAIIWGLIKQELIGFANLNDEDRVAKVEELTDKITNLEMNIANFTSHISNMDRLIERAYSAYMDAPDSVMDIAKDKYYKTLTKCENERAECKGKIEALSAEKLRLENMRTFFNQPTLPKDAIEKAESDPIKMRNLVMELVDKIYPYRITTYVSPATNRIMKNGIVLLEVYTINGIYNVLYDGNQRNNKVAYYISGVYATFQNGKNKLDAYDTGEYFVISNATLVTETEDVDLTVTFNELIKICMQNGWEIDYTYKM

SEQ ID NO: 318 - protein, 612 aa, Unknown
  Description of Unknown: Integrase B319 sequence
  SM00857,IPR036162,PF13408,IPR025827,G3DSA:3.40.50.1390, IPR006119,PF07508,IPR011109,SSF53041,PTHR30461, Coil,cd00338,PF00239
MRAAFLIRCSTKKQDYERQVNDLTRLAKKFGYTSSDNMIFGEHITGKDDASKRDRQSIQRLKDAAINKEFDVVLVSEVSRMSRDPMSGRLYVRQLINMDIPVYFRDIDTWTIDPVTGKKVRDAETIIGAAFDAAWKYIKSMKTQIASGRRDELDNNQMSIGQPFFGYKRYGGRDKGKKNSWVINDDAAKVVVDVFEEYVKDGATLKSTALAITAKYGEQFNKKFSIGTIEHILTFEPYCTGIKVVSLTDPDTEDVDEFEVEIPTIITRAMFDKATTKRATNRTARTPYPKQATYILSKLLKCPICEHSLTPQKRGGDKGDKYRLMNGKVAIRWSCMSGINNATDCSSRITISNEKLEAIIWGLVKQELIGFANLNDEDRVARVVELTDKITNLEMNIANFTSHISNMDRLIERAYSAYMDAPDSVMDIAKDKYYKTLTKCENERAECKDKIEALNVEKLRLENMRTFFNQPTLPKDAIEKAESDPIKMRNLVMELVDKIYPYRITTYVSPATNRIMKNGIVLLEVYTINGIYNVLYDGNQRNNKVAYYISGNYATFQNGKNKLDAYDAGEYFVISNATLVTETEDVDLTVTFNELIKICMQNGWEIDYTYKM

SEQ ID NO: 319 - protein, 612 aa, Unknown
  Description of Unknown: Integrase B320 sequence
  PTHR30461:SF3,SM00857,G3DSA:1.10.10.2600,IPR036162,PS51737, G3DSA:3.40.50.1390,IPR006119,IPR038109,PF07508,IPR011109, SSF53041,PTHR30461,PS51736,cd00338,PF00239
MITGEVEAVDRKQKIRDRYKGVDISELEVIPAKIIEDLETSSVIRRVAAYIRVSTDNDEQTSSYELQKNYYTDYIQAQPGWVFVGIYADEGISGTSLEHRKGMQQLIEDCKAGKIDLVLTKSIARFARNIVDCLSVIELLKNLNPPVGVKFEADNIYTLDSNGRMILTILASVAEEESHSKSIIMNWSIDRRFSRGLFLTPALLGYDKDEEGNLVINPEEAQTVKVIYYLYLNGYSLTEIATLLMEYSRKTKLGRVEWNPGTLAGVLANERHCGDVLARKTFTPNFLTHKSKKNNNDRTQYRQKNHHEAIVSREVFNAANHLRASRNYSKKNRPLPVLSVVEDGILRGYVPFDKDWTGFSAEEYREASESVMKEPDVTVTADVKKRLDLTGYEIVRVQYFSTMQNPAMTISNGRLRFNTACLKKFENVEYVELLLNSVERCIAIRPCDKNNPNAIRWGRLKEGRWCASTLGCRGLAKTLFDIMEWDEDLRYRFRGQFLEQGDNKMMLFAFDEPEMIKVEEIVLPPNENTEEDEGETVKKKIYIFPPEWAGTFGQPITSIAQVGILRQEHYAGNWDVFRPATEIEEMNIFTAESLNELLREAEKIMEGWTDYR

SEQ ID NO: 320 - protein, 612 aa, Unknown
  Description of Unknown: Integrase B321 sequence
  SM00857,IPR036162,PF13408,IPR025827,G3DSA:3.40.50.1390, IPR006119,PF07508,IPR011109,SSF53041,PTHR30461, Coil,cd00338,PF00239
MRAAFLIRCSTKKQDYERQVNDLTRLAKKFGYTSSDNMIFGEHITGKDDASKRDRQSIQRLKDAAINKEFDVVLVSEVSRMSRDPMSGRLYVRQLINMDIPVYFRDIDTWTIDPVTGKKVRDAETIIGAAFDAAWKYIKSMKTQIASGRRDELDNNQMSIGQPFFGYKRYGGRDKGKKNSWVINDDAAKVVVDVFEEYVKDGATLKSTALAITAKYGEQFNKKFSIGTIEHILTFEPYCTGIKVVSLTDPDTEDVDEFEVEIPTIITRAMFDKATTKRATNRTARTPYPKQATYILSKLLKCPICEHSLTPQKRGGDKGDKYRLMNGKVAIRWSCMSGINNATDCSSRITISNEKLEAIIWGLVKQELIGFANLNDEDRVARVVELTDKITNLEMNIANFTSHISNMDRLIERAYSAYMDAPDSVMDIAKDKYYKTLTKCENERAECKDKIEALSAEKLRLENMRTFFNQPTLPKDAIEKAESDPIKMRNLVMELIDKIYPYRITTYVSPATNRIMRNGIVLLEVYTINGIYNVLYDGNQRNNKVAYYISSVYATFQNGRNKFDAYDTGEYFVISHATLVTETEDVDMLVTFNELIKICMQNGWEIDYTYKM

SEQ ID NO: 321 - protein, 612 aa, Unknown
  Description of Unknown: Integrase B322 sequence
  SM00857,IPR036162,PF13408,IPR025827,G3DSA:3.40.50.1390, IPR006119,PF07508,SSF53041,IPR011109,PTHR30461, Coil,cd00338,PF00239
MRAAFLIRCSTKKQDYERQVNDLTRLAKKFGYTSNDNLIFGEHITGKDDASKRDRQSIQHLKDAAINKEFDVVLVSEVSRMSRDPMSGRLYVRQLINMDIPVYFRDIDTWTIDPVTGKKVRDAETIIGAAFDAAWKYIKSMKTQIASGRRDELDNNQMSIGQPFFGYKRYGGRDKGKKNSWVINDDAAKVVVDVFEEYVKDGATLKSTALAITAKYGEQFNKKFSIGTIEHILTFEPYCTGIKVVSLTDPDTEDVDKFEVEIPTIITRAMFDKATTKRATNRTARTPYPKQATYVLSKLLKCPICEHSLTPQKRGGDKGDKYRLMNGKVAIRWSCMSGINNATDCSSRITISNEKLEAIIWGLVKQELIGFANLNDEDRVAKVEELTDKITNLEMNIANFTSHISNMDRLIERAYSAYMDAPDSVMDIAKDKYYKTLTKCENERAECKDKIEALNVEKLRLENMRTFFNQPTLPKDAIEKAESDPIKMRNLVMELVDKIYPYRITTYVSPATNRIMKNGIVLLEVYTINGIYNVLYDGNQRNNKVAYYISGNYATFQNGKNKLDAYDVGEYFVISNATLVTETEDVDLTVTFNELIKICMQNGWEIDYTYKM

SEQ ID NO: 322 - protein, 612 aa, Unknown
  Description of Unknown: Integrase B323 sequence
  SM00857,IPR036162,PF13408,IPR025827,G3DSA:3.40.50.1390, IPR006119,PF07508,SSF53041,IPR011109,PF00239, PTHR30461,Coil,cd00338
MRAAFLIRCSTKKQDYERQVNDLTRLAKKFGYTSSDNMIFGEHITGKDDASKRDRQSIQRLKDAAINKEFDVVLVSEVSRMSRDPMSGRLYVRQLINMDIPVYFRDIDTWTIDPVTGKKVRDAETIIGAAFDAAWKYIKSMKTQIASGRRDELDNNQMSIGQPFFGYKRYGGRDKGKKNSWVINDDAAKVVVDVFEEYVKDGATLKSTALAITAKYGEQFNKKFSIGTIEHILTFEPYCTGIKVVSLTDPDTEDVDEFEVEIPTIITRAMFDKATTKRATNRTARTPYPKQATYILSKLLKCPICEHSLTPQKRGGDKGDKYRLMNGKVAIRWSCMSGINNATDCSSRITISNEKLEAIIWGLIKQELIGFANLNDEDRVARVVELTDKITNLEMNIANFTSHISNMDRLIERAYSAYMDAPDSVMDIAKDKYYKTLTKCENERAECKDKIEALSAEKLRLENMRTFFNQPTLPKDAIEKAESDPIKMRNLVMELIDKIYPYRITTYVSPATNRIMKNGIVLLEVYTINGIYNVLYDGNQRNNKVAYYISGVYATFQNGRNKFDAYDTGEYFVISHATLVTKTEDVDMLVTFNELIKICMQNGWEIDYTYKT

SEQ ID NO: 323 - protein, 612 aa, Unknown
  Description of Unknown: Integrase B324 sequence
  PTHR30461:SF3,SM00857,IPR036162,PF13408,IPR025827, G3DSA:3.40.50.1390,IPR006119,PF07508,IPR011109,SSF53041, PTHR30461,Coil,cd00338,PF00239
MRAAFLIRCSTKKQDYERQVNDLTRLAKKFGYTSSDNMIFGEHITGKDDASKRDRQSIQRLKDAAINKEFDVVLVSEVSRMSRDPMSGRLYVRQLINMDIPVYFRDIDTWTIDPVTGKKVRDAETIIGAAFDAAWKYIKSMKTQIASGRRDELDNNQMSIGQPFFGYKRYGGRDKGKKNSWVINDDAAKVVVDVFEEYVKDGATLKSTALAITAKYGEQFNKKFSIGTIEHILTFEPYCTGIKVVSLTDPDTEDVDEFEVEIPTIITRAMFDKATTKRATNRTARTPYPKQATYILSKLLKCPICEHSLTPQKRGGDKGDKYRLMNGKVAIRWSCMSGINNATDCSSRITISNEKLEAIIWGLIKQELIGFANLNDEDRVAKVEELTDKITNLEMNIANFTSHISNMDRLIERAYSAYMDAPDSVMDIAKDKYYKTLTKCENERAECKGKIEALSAEKLRLENMRTFFNQPTLPKDAIEKAESDPIKMRNLVMELIDKIYPYRITTYVSPATNRIMKNGIVLLEVYTINGIYNVLYDGNQRNNKVAYYISGVYATFQNGRNKFDAYDTGEYFVISNATLVTNTEDVDLLVTFNELIKICMQNGWEIDYTYKM

SEQ ID NO: 324 - protein, 612 aa, Unknown
  Description of Unknown: Integrase B325 sequence
  PTHR30461:SF3,SM00857,IPR036162,PF13408,IPR025827, G3DSA:3.40.50.1390,IPR006119,PF07508,IPR011109,SSF53041, PTHR30461,Coil,cd00338,PF00239
MRAAFLIRCSTKKQDYERQVNDLTRLAKKFGYTSSDNMIFGEHITGKDDASKRDRQSIQRLKDAAINKEFDVVLVSEVSRMSRDPMSGRLYVRQLINMDIPVYFRDIDTWTIDPVTGKKVRDAETIIGAAFDAAWKYIKSMKTQIASGRRDELDNNQMSIGQPFFGYKRYGGRDKGKKNSWVINDDAAKVVVDVFEEYVKDGATLKSTALAITAKYGEQFNKKFSIGTIEHILTFEPYCTGIKVVSLTDPDTEDVDEFEVEIPTIITRAMFDKATTKRATNRTARTPYPKQATYILSKLLKCPICEHSLTPQKRGGDKGDKYRLMNGKVAIRWSCMSGINNATDCSSRITISNEKLEAIIWGLVKQELIGFANLNDEDRVAKVEELTDKITNLEMNIANFTSHISNMDRLIERAYSAYMDAPDSVMDIAKDKYYKTLTKCENERAECKDKIEALSAEKLRLENMRTFFNQPTLPKDAIEKAESDPIKMRNLVMELIDKIYPYRITTYVSPATNRIMKNGIVLLEVYTINGIYNVLYDGNQRNNKVAYYISSVYATFQNGRNKFDAYDTGEYFVISHATLVTETEDVDMLVTFNELIKICMQNGWEIDYTYKM

SEQ ID NO: 325 - protein, 612 aa, Unknown
  Description of Unknown: Integrase B326 sequence
  PTHR30461:SF3,SM00857,IPR036162,PF13408,IPR025827, G3DSA:3.40.50.1390,IPR006119,PF07508,IPR011109,SSF53041, PF00239,PTHR30461,Coil,cd00338
MRAAFLIRCSTKKQDYERQVNDLTRLAKKFGYTSSDNMIFGEHITGKDDASKRDRQSIQRLKDAAINKEFDVVLVSEVSRMSRDPMSGRLYVRQLINMDIPVYFRDIDTWTIDPVTGKKVRDAETIIGAAFDAAWKYIKSMKTQIASGRRDELDNNQMSIGQPFFGYKRYGGRDKGKKNSWVINDDAAKVVVDVFEEYVKDGATLKSTALAITAKYGEQFNKKFSIGTIEHILTFEPYCTGIKVVSLTDPDTEDVDEFEVEIPTIITRAMFDKATTKRATNRTARTPYPKQATYILSKLLKCPICEHSLTPQKRGGDKGDKYRLMNGKVAIRWSCMSGINNATDCSSRITISNEKLEAIIWGLVKQELIGFANLNDEDRVAKVEELTDKITNLEMNIANFTSHISNMDRLIERAYSAYMDAPDSVMDIAKDKYYKTLTKCENERAECKDKIEALSAEKLRLENMRTFFNQPTLPKDAIEKAESDPIKMRNLVMELIDKIYPYRITTYVSSATNRIMRNGIVLLEVYTINGIYNVLYDGNQRNNKVAYYISGVYATFQNGRNKFDAYDTGEYFVISHATLVTETEDVDMLVTFNELIKICMQNGWEIDYTYKM

SEQ ID NO: 326 - protein, 611 aa, Unknown
  Description of Unknown: Integrase B327 sequence
  cd03768,PTHR30461:SF3,SM00857,G3DSA:1.10.10.2600,IPR036162, PF13408, PS51737,G3DSA:3.40.50.1390,IPR025827,IPR006119, IPR038109,PF07508,SSF53041,IPR011109,PTHR30461,PS51736, Coil,PF00239
MSTSNTDCDNRKYAIYARKSKFTAKGESINQQIDRCKLHLSSMNVAEEDIIIFEDEGYSGGNTDRPQFKEMMDMCEDNKIQCVICYKLDRISRSVSDFTNTFNNLEKHNIRFISVSDGLNGTNSPMDKAMIQLVAVFAELERNIIAERIIDNMTELAQKGRWLGGTTPTGYKSVETFGSTNKEGKVHYARKLEIVPEEMELVKRIYKLYLKTESLTAVQAILLNDNIKTKMGNEYTRFAIKVILSNPVYAKADNAVLKFFENKGSTIYAEGTEFDGTKGMMVYNKTKQEKNTSHKVKPYNEWIVAIGEHEGVIDGADWVSVQNILDKNKDKNYNRPRSHCALLSGLLRCKCGSIMYPRVAKTYNERGERNFAYACKMMLNSNRQRCNVKRINGNFLDDLVWEQIKVLTSDKSELAKQLKEAQGNFESDEQPVLKELEQMKKRLSDNKQKQKNLINFIANNGSKMSPEMSDDANEQYRKLENSNKEISSKIIKLEEVVAQSEQAFANFKDLATRLSEFSAALDTQTTFEDKRYAVRQVIEHAEWDGENVKLFFTGNRTVELQDIKDELANYKKAHRKWAKTSSDENATLGEDSERDTNALSLPEKVCQRYPL

SEQ ID NO: 327 - protein, 611 aa, Unknown
  Description of Unknown: Integrase B328 sequence
  SM00857,G3DSA:1.10.10.2600,IPR036162,PF13408,IPR025827, G3DSA:3.40.50.1390,PS51737,IPR006119,IPR038109,PF07508, IPR011109,SSF53041,PF00239,PTHR30461,Coil, cd00338
MRTVKAYIYSRVSSLQQVDAFGLDRQISTVLDFLENAKLPAELGYQLDPSNHEVLDSDKGLSGYAGHNFTKGSLGRFKERVRSGEITEGCLLIESVDRFSRKQGYDAIDEFTFLIKRNIDIVEVETGQIYSYKLDHKLSTLSTSIERAYQESKRKARISKKSWQKRKKDSVDTGIALNNNTPDWLSLSQDKKSYELDVQKVQTITKIFELYRDGYGVTQIVNMLNKEGERYNGKGWNTVTVYNKLRDRRLNGYLVGKYPTIPKKDNESTNDAEKRILENIKIKKEANDNAKRIYPVVIEDDLFSRVQSMMDRNVSSKKQKSTTTKQRNLFNGLTKCNECGSPMIVQSMSNGGQYLRCYRQRTKDEKCNSKMLRYFETEKVLLQHIKNLNLDEIYGDEKSTQSLDTLKRLLSDVNGKIALLNEKVQSANDESELFAIMEFKRKRILEKDELIAKINSLENQCEAVTLNYTYDIEQLTNQDNTVIRRKANEHIAKVISSVKCRRIDSSYIGAYYLYDITYHRDILKHILITDNSGKLISEITISEKDNERTYVVREEDQTVFKVESNGNAWVMYASRTKTIDDLLYYINTMMVGREPDDFAYQLNEDHIEWID

SEQ ID NO: 328 - protein, 611 aa, Unknown
  Description of Unknown: Integrase B329 sequence
  PTHR30461:SF3,SM00857,IPR006118,G3DSA:1.10.10.2600,IPR036162, PS51737,G3DSA:3.40.50.1390,IPR006119,IPR038109,PF07508, IPR011109,SSF53041,PF00239,PTHR30461,PS00397, PS51736,Coil,cd00338
MNKENKIAGIYIRVSTEDQAREGFSLGEQEERLREFCKFKRYEIFKVYKDAGISAKSDKRPAYQEMLEDIKSKNINVIVAFKLDRLTRSVYDIEKLMKIVNDLECDIDCLADESNTTTSNGRMVMRIMTSVSQNEIEKCSERTKVGLAGAIKQGHLPSRTTLGYKRENKKLVPNPLTKDIVVRVFDLYLEGKSHQKIANIYNKENVLGKTWRDSTIQKILSNEIYKGDYIHGKRTKHPTYYENVVEPLVNKDKWESCQYQKLRNARHYERTSTYLFTNKLKCSKCGNYFGGKASVKKKLNKKYYYYKCNHCKINLKEDSIEDLILLELLALVYIDDLFNDYYTPFIKSKLDYNKIDYKKELKELDKEKDRIKTAYIKGIVKLDEFDNELKQIEYKRQILEKLEQDSKQYENLNFTMDDLLLIKDKKEIEDYLQPENIINLFVRWNYLDKTNKQKLISKYIDDIEIEKLGTKIEIKKLNLRNSFYYDLIDYHNNYDTPLDLFMFMDEDKFPIPVAHNGFRTRIEIENYVNKLKEMYDVNYYEVIPNKDFTNLSFTPKNDIEKIIRIIPIKDNDKFKSNKLELGIITINLSKIKSPDGTLLYKNIFKTSKLPT

SEQ ID NO: 329 - protein, 611 aa, Unknown
  Description of Unknown: Integrase B330 sequence
  PTHR30461:SF3,SM00857,IPR006118,G3DSA:1.10.10.2600,IPR036162, PS51737,G3DSA:3.40.50.1390,IPR006119,IPR038109,PF07508, IPR011109,SSF53041,PF00239,PTHR30461,PS00397, PS51736,Coil,cd00338
MNKENKIAGIYIRVSTEDQAREGFSLGEQEERLREFCKFKRYEIFKVYKDAGISAKSDKRPAYQEVLEDIKSKNINVIVAFKLDRLTRSVYDIEKLMKIVNDLECDIDCLADESNTTTSNGRMVMRIMTSVSQNEIEKCSERTKVGLAGAIKQGHLPSRTTLGYKRENKKLVPNPLTKDIVVRVFDLYLEGKSHQKIANIYNKENVLGKTWRDSTIQKILSNEIYKGDYIHGKRTKHPTYYENVVEPLVNKDKWESCQYQKLRNARHYERTSTYLFTNKLKCSKCGNYFGGKASVKKKLNKKYYYYKCNHCKINLKEDSIEDLILLELLALVYIDDLFNDYYTPFIKSKLDYNKIDYKKELKELDKEKDRIKTAYIKGIVKLDEFDNELKQIEYKRQVLEKQEQDSKQYENLNFTMDDLLLIKDKKEIEDYLHPENIIDLFVRWNYLDKTNKQKLISKYIDDIEIEKLGTKIEIKKLNLRNSFYYDLIDYHNNYDTPLDLFMFMDEDKFPIPVAHNGFRTRIEIENYVNKLKEMYDVNYYEVIPNKDFTNLSFTPKNDIEKIIRIIPIKDNDKFKSNKLELGIITINLSKIKSPDGTLLYKNIFKTSKLPT

SEQ ID NO: 330 - protein, 611 aa, Unknown
  Description of Unknown: Integrase B331 sequence
  PTHR30461:SF3,SM00857,IPR006118,G3DSA:1.10.10.2600,IPR036162, PS51737,G3DSA:3.40.50.1390,IPR006119,IPR038109,PF07508, IPR011109,SSF53041,PF00239,PTHR30461,PS00397, PS51736,Coil,cd00338
MNKENKIAGIYIRVSTEDQAREGFSLGEQEERLREFCKFKRYEIFKVYKDAGISAKSDKRPAYQEMLEDIKSKNINVIVAFKLDRLTRSVYDIEKLMKIVNDLECDIDCLADESNTTTSNGRMVMRIMTSVSQNEIEKCSERTKVGLAGAIKQGHLPSRTTLGYKRENKKLVPNPLTKDIVVRVFDLYLEGKSHQKIANIYNKENVLGKTWRDSTIQKILSNEIYKGDYIHGKRTKHPTYYENVVEPLVNKDKWESCQYQKLRNARHYERTSTYLFTNKLKCSKCGNYFGGKASVKKKLNKKYYYYKCNHCKINLKEDSIEDLILLELLALVYIDDLFNDYYTPFIKSKLDYNKIDYKKELKELDKEKDRIKTAYIKGIVKLDEFDNELKQIEYKRQVLEKQEQDSKQYENLNFTMDDLLLIKDKKEIEDYLHPENIIDLFVRWNYLDKTNKQKLISKYIDDIEIEKLGTKIEIKKLNLRNSFYYDLIDYHNNYDTPLDLFMFMDEDKFPIPVAHNGFRTRIEIENYVNKLKEMYDVNYYEVIPNKDFTNLSFTPKNDIEKIIRIIPIKDNDKFKSNKLELGIITINLSKIKSPDGTLLYKNIFKTSKLPT

SEQ ID NO: 331 - protein, 610 aa, Unknown
  Description of Unknown: Integrase B332 sequence
  SM00857,G3DSA:1.10.10.2600,IPR036162,PS51737,G3DSA:3.40.50.1390, IPR006119,IPR038109,PF07508,SSF53041,IPR011109, PTHR30461,PS51736,cd00338,PF00239
MISSGAEAADRKQRIRDRYKGVDTSELEVIPAKTVEGLGESTSIRRVAAYVRVSTDNDEQTSSYELQKNYYTDYIKAQPGWEFVGIYDDEGISGTSLEHRKGMQQLIEDCKAGKIDLILTKSIARFARNIVDCLSVIETLKNLDPPVGVKFEADNIYTLDSNGRMILTILASVAEEESHSKSIIMNWSIDRRFSRGLFLTPALLGYDQDEDGSLVVNQDEAQTVKVIYYLYLNGFSFTEIAELLTEYGRKTKLGNTEWNPGTLAGVIANERHCGDVLARKTFTPNFLTHKSKKNNNDRTQYRQRDHHEAIVSREVYNAANHLRASRSYTKKNRPLPVLSVVDDGILRGYVPFDKDWTGFSAEEYREASESVMREKQQDTVEVMNRLDLSGYEVVRAQYFATLQNPAMTISNGKLRFNTACLKKFEDVEYVELLLNSVDRCIAIRPCEKDNPNAIRWGRLKEGRWCASTLGCRGLAKALFDMMEWEEGLKYRFRGQLVGQNDDKLMLFELDEPEMVKVEEIVLPSKEQDEEGKTVKQTIYIFPPEWAGTFGKPITSIAQVGILQLEHYAGNWDVLRPAAEIEEMNTFTADGLNALLHEAEKIMEGWTDTDE

SEQ ID NO: 332 - protein, 610 aa, Unknown
  Description of Unknown: Integrase B333 sequence
  PTHR30461:SF3,SM00857,G3DSA:1.10.10.2600,IPR036162, PF13408,IPR025827,PS51737,G3DSA:3.40.50.1390, IPR006119,IPR038109,PF07508,IPR011109, SSF53041,PTHR30461,Coil,PS51736,cd00338,PF00239
MTAVIYARYSSDNQREESIEGQIRECTAYAEKNGITIVKHYIDRAISAKTDNRPEFQRMIKDSDKKLFDIVLVWKLDRFARNRYDSARYKTQLKKNGVKLMSATEIISEGPEGIILESVLEGYAEYYSADLAEKVVRGQTENILKGRCNGGRGTFGYTLDSERKFHIDPLTSPFVLESFKKYNEGSTMKEIRDWLNENGIKNPVGGAFTYNSVEHMLKNRRYIGELKFRDVVVPDAIPPIVPLELFDDVQEKIAKNKKAPARRKAEDDYLLTTKLFCGYCGALMFGESGTSRTGEVHRYYKCATAKKHKGCKKKTVRKQWLEDLVVNQTMQLVKDDAAMESIIAKVMELQNKENTNIPLYEKQLRDAESGIQNMLNAIQAGILTSSTKERLEQLEETKRELEARIAEEKLAKPKVTEEFIRFWLLRFRKLDMSLKDQRQALVDTFINAIYLYDDKVLITFNYKEGTQTVTFGEATEVASEGNGSDLDCFTAPKNAVRSKDFMAFLFFATQLHGFCTVGARFVFSVLNYVGRGIALQSVPFFAFRSTVQGEAVPSFQGLHLSGAPKARPWRALCSPGQAEFGRWLLVWRRKNFQTFCPAPCGKTAGYGRKC

SEQ ID NO: 333 - protein, 610 aa, Unknown
  Description of Unknown: Integrase B334 sequence
  PTHR30461:SF3,IPR036162,PS51737,IPR011109,PTHR30461, PF00239,G3DSA:1.10.10.2600,IPR006119,PF14287,SSF53041, IPR025378,SM00857,IPR025827,cd03770,IPR038109, mobidb-lite,PS51736,PF13408,G3DSA:3.40.50.1390,PF07508,Coil
MKRPDNNKITALYERLSRDDELNGDSNSIVNQKKMLEKYAKEQGFTNLAHYTDDGYSGTNFDRPDWKRLTADIEEGNIGCVIVKDMSRIGRNYLEVGFYTEVLFREKGVRFIAISNGVDSTHSESNEFAPFLNIMNEWYVRDTSRKIKSVLRNKGMEGKHLTSNAIYGYKKDPEDNNHWLVDEEAAAVVRRIFQLIIEGNGPMQVARILTNEKVERPSYYLAKQGLGTCRGKCDMTRPYSWTATTITDLVSKPEYMGHTVNFRTFKESYKDKHSQYANPEDWLIFRDTQEAIVDEDTWYMVQKIRETKHRPIAQGKANPLTGLMFCADCGAKMFNHRTKGYEKKDKDGNPTGKYTNAQNNYTCSTYSKAKGHFENKCSQHHVRTDVVRDLILTTLQYTASYVKEHEDEFLEKVRKSNVLKQELDTKALTKKIAKSEKRVAELDHLIKRIYEDNVSGKLSDKRFELLSTDYEKEQSELEEFLTSAREQLATAKEEASNVNKFIALVHKYTDFSELTTPMIHEFIDRIEVHEADKSTGERTQEIDIYLKYVGKLDVPMPELTPEELAEEERKRRKRAWNRTYNRRKAEKERAEKEKAALEAATDTDKSKKGA

SEQ ID NO: 334 - protein, 609 aa, Unknown
  Description of Unknown: Integrase B335 sequence
  PTHR30461:SF3,SM00857,G3DSA:1.10.10.2600,IPR036162,PF13408, PS51737,IPR025827,G3DSA:3.40.50.1390,IPR006119,IPR038109, PF07508,SSF53041,IPR011109,PTHR30461,Coil, PS51736,cd00338,PF00239
MRKKFNIDLSMLTPEEQQQFRDDPTTLTKGEVNVALYLRFSSERQKEQSIEGQLRDCIAYCKRKSFRIVAIYVDRATTARKDVEKRVHFQEMISDSAHHLWNFVVVWKLDRFARNREDSAVFKMRLRKNGVRVKSATETISDNPEGIILESVLEGIAEYYSADLSQKITRGLRESAMKGHSVGGHVPLGYKIEDHRLVINPATAHIVQEAFQLYANGESVAEICRIFNGKGYRTAKNSEFNRSSFKSIFKNVRYIGTYIYKDIEKENAIPAIIDKDLFETVQRRLSLAADAPARGKAKVDYLLSGKLFCGHCGATMNGESGTSKTGAIHNYYTCYSRKRRKGCNKNPLKKDFIERVVAQDAMALLTDDVIEELADMAMSQADKDLKENTRIPELSARLTEVEQGINNITKAVEKGIASDALLNRLTELEKEKKDLTSQLREEEKYIYRIDRDQVVFWLTKFQGGDIEDEDCRRRIIDLLVNSVTVWDEPDGYKITTAYNLTSCKTKTFRVSNNADSPSGEGFGFGELSSTSTKKNQQSIAIAGFSLFINALRRSQGALQCEKCRGFTIVFHIMQAHFANKMLTARNDMRKSVLDNVSSFGWGGYLPRLG

SEQ ID NO: 335 - protein, 609 aa, Unknown
  Description of Unknown: Integrase B336 sequence
  SM00857,G3DSA:1.10.10.2600,IPR036162,PF13408,IPR025827, PS51737,G3DSA:3.40.50.1390,IPR006119,IPR038109,PF07508, SSF53041,IPR011109,PTHR30461,Coil,cd00338, PF00239
MAYRKITDIRDTIGMRAVFYARVSTAEEEQLNAIELQIEENRGCIKDHGWKLVGEYIDRSKSGTMVKGRDDYQRLYEDLYEDLFDIVVIKDQERLQRNTLDWYLFINRVVQTGKLLFMYMDGKFYSPDDALITGVRAIIAEEFSRNLSKKLHNYHDHRIEKARQGQEIALQGSGNVYGWDKKDGKYYINPEQAKVRRLMCEGIMARKGSTLIAKELNEAGYRNTVGKPWKPMDIPKFVYDCKNVGTMIINKERHDFESKQTIKLPKEEWVYVENALPPIVTQEEWDLICKIHEERVIATGSDKRGKKTSGYSFSGKLVCGICGAPYWRKQRVSKDEYWVCSTKQTKGRKTRKRDSTMGKAGEINPLGCDNENISYNSLMEIMGIVSERLQANTDTIKQDMINWLTKLRKQLLEANGGHTEADLQRELSRKSKLLDAYLDGILNKQEYQKKAEELDERIIQLKAETEKNKANSGDIAEIDKVLANIDEEVARYVDGNEKLKVEYLLEHLEQVQIFPDKVIVIVPILSDGIVVEKTQYVSREKRCRKIYDHEHYDRLPGSYRGTGADRWTRHFKGAGRSQEEYRLSAGNSAVIYGNDGAGISGIRCRIKRN

SEQ ID NO: 336 - protein, 609 aa, Unknown
  Description of Unknown: Integrase B337 sequence
  PTHR30461:SF3,SM00857,G3DSA:1.10.10.2600,IPR036162,PS51737, G3DSA:3.40.50.1390,IPR006119,IPR038109,PF07508,SSF53041, IPR011109,PTHR30461,PS51736,cd00338,PF00239
MQDDGRREQLRQIYQREDTGEKTFIPAKPKINPNEKDRFFRVCAYCRVSTDNDEQLSSFELQQAHYRQLVQDHPNWDLRHIFADQGISGTSLKNRDQFNEMIEACRRGEYDLILTKSVSRFARNLVDCISLIRMLKGLTPPVGVFFETDNLYTLGENTEFMLSFLATFAQEESVKKSESMNWSLQQRFKDGKLLTPAPLGYDREKDAAGHYVKYAPLLLNESEARIVRFIYDAYLSGWSQENIASFLKDIGCLTKTGSTDWTSSAIGYILTNERYVGNVLTWKTFTADLYEHKHKKNKQDRDQYLYHDRHPAIISVEKFEAVQSLIENRKHHVRGGLPALHVIDEGIFRGYIPINHHWVNDDPNVYYDISNSVAKVLKVKTIDKRSFSAFDLSGYQVVRNQFTQVRYEGPSITLAENRVSFNLFCMRCFESVAYIQLLLHPAERKIAIRPCRERDTHSVRWRPDPDKPVYSKTLNCQHFGNALFRIMEWDPEYIYRVRGTWAKRGAEQIIVFNLVNAIPAMLVPSENADNTARRRTELCPAEWTDDFGEEFYEHILENGFYYLAPDSEWRTTAASVPAPGMEQFDVPTAEQLQLTIDNLTRGNEMPYDG

SEQ ID NO: 337 - protein, 609 aa, Unknown
  Description of Unknown: Integrase B338 sequence
  SM00857,G3DSA:1.10.10.2600,IPR036162, PF13408,IPR025827,G3DSA:3.40.50.1390,PS51737, IPR006119,IPR038109,PF07508,IPR011109, SSF53041,PTHR30461,Coil,PF13412,cd00338,PF00239
MIRAVIYCRCSTEEESQKNALEKQVAEAESSVRQYGWVLVDRYVESRSGTTAKGRNEYKRLFNDLLTDKFDVIVIKSQDRLMRNTKDWYLFVDRLCTEQKKLYMYIENKFYSTDDALITGIKAILAEEYSRELSKKINNAHRNRQRDGGNVMLPGNAYGFKRMPDKSVALVEKEAEIKREMYRLCAAGYGTRTISTIMRNRGIVNRDGKPFTSSYILRMLRNPINKGTAVMGKYHFDFDSKRTIKNPKEKIYIHEDKVPRTVSDELWNAANEQIDKRSVKTKDGEDDIGKNPGKYQLSGKIVCGMCGQPYWRKVHRKHSNHELIYTWACSSYLELGRSDNLRARPNLRKVFLENEKGCDNINIAENEFYAVLEEICSNQYQKNKKKIIEKIMKLLSKSLNNQDGTKEIEKLEREQEDIERKMKFLVDKLIDGVLTDQMYKTKQEELEKKRDQNKKKILELTERTSNTQNIKDRLQEIETRLNDDDLFKKATIDDMLEEVDKIVVYPRYMEIYFSLSSVTGCMDLKIFDGDKKCFRVDYGNRLDYKGRQCDAREVVVDLIRENPRITGKMIAKEIGCSLSGANYKLKVLKKEGRIRFNGAGGKGCWEILE

SEQ ID NO: 338 - protein, 609 aa, Unknown
  Description of Unknown: Integrase B339 sequence
  PTHR30461:SF3,SM00857,G3DSA:1.10.10.2600,IPR036162,PF13408, PS51737,IPR025827,G3DSA:3.40.50.1390,IPR006119,IPR038109, PF07508,IPR011109,SSF53041,PTHR30461,Coil, PS51736,cd00338,PF00239
MAQPEANELAVVYARYSSHSQGEQSIEGQLSNARDYAAAHGYTIVHEYVDRAKSGRTDNRAEFQQMLKDTAKRQFSVIILWKVDRFGRNREEIAINKMKCRKNGVRVEYVAETIPDSPEGVILESVLEGFAEYYSLQLSQNIRRGRAESAEKCQSLGGNRPLGYKTGPDKKFVIDENTAPTVKMIFTMYADGKTVTEIVDKLNEMGLRTLRGGPFTKNSLHSILKNKKYIGIYEYQGHEIKDGVPRIIEDDVFNKVQEMLKINKRAPAKTWSRADYILTDKLFCGKCGALMFGESGTSKTGAKHNYYICSNKKRFRSCDKKAVRQADIEDTVLNATHELLQDDELLDYIVDRTWEYYLAQDNSQEELRNLQRQLAQTDTAISNLIRAIEAGILTEETKKRMDELTQQKADLKASIADREIARGFHLKKSHIAYYLRSLRDADWSDKETQKRLIQTFVNAVFVYDDHITLTYNFSGDKNTITLRDMQRFEDGEEFGCRASRSTIMWRQKDASCEKPDYIGLFCYPNGDFSLYQNTDAKSAFSLMKYAVTVLRCGMARPVQAAPQPPQPAHRGRLCLTNLHFVQIPRWDRPASRRVAARGKKRVDKLPQRW

SEQ ID NO: 339 - protein, 608 aa, Unknown
  Description of Unknown: Integrase B340 sequence
  PTHR30461:SF3,SM00857,G3DSA:1.10.10.2600,IPR036162,PS51737, G3DSA:3.40.50.1390,IPR006119,IPR038109,PF07508,IPR011109, SSF53041,PTHR30461,Coil,PS51736,cd00338, PF00239
MNTAVNEYNYRFKLTDYSLFDRNRARKVAIYGRVSTEHEAQLSALENQLQWYDDQVKYHPNWTVCERYIDEGITGTQAKKRPAFLKMIEDAKQGKFDLIVTREVCRFARNVVDTLVVTRELKGIGVEVFFIDDNIWTMDGDGELRLSLMATLAQEESRKTSERVKAGQKISRDNGVLYGNGNILGYDRVGDTYVINEEQAETVRMIYDLYLQGYGSMKIAKILTERKRKTASGLIKWSVSNIMRAIKNATYTGTKCYNKSRSNNFLEQKRINNLDMSTYEYVEGDFPSIISQEIWDKAQAIRESRVKPVCVSAGKNTHSKRDSRDIWVNKLRCSCGSSYRKNKWHTKLDGKTSYGYQCYNQLNNGIKRKRAEIGLDTEGYCDSRMITDWKLDFMAKALLEHLWTERKESVLIALDLIKYYYKEEKSNETQSDTVTIQAKLDKANSRLTNLIAMRADGEISKDEYQAMRSPVDEEIKKLQKALDEIPQEKSNPKGLDIEGIRSTLNSFIDFSGSTISHDVVNQFVYLITPTSDTTFDWYVNLNGTADVKATFTAEGRKKNCIIKLEEIEKISSVHREKNEDNAHFIKNPHIFTYLHRLLLQSRQNRQRF

SEQ ID NO: 340 - protein, 608 aa, Unknown
  Description of Unknown: Integrase B341 sequence
  PTHR30461:SF3,SM00857,G3DSA:1.10.10.2600,IPR036162,PS51737, G3DSA:3.40.50.1390,IPR006119,IPR038109,PF07508,IPR011109, SSF53041,PTHR30461,PS51736,cd00338,PF00239
MSNYSSREELRQVYQREDQGEKTFIPAKPKADLYGGSHTFRTCAYCRVSTDNDEQLSSFELQQNHYKHLVQDHPNWELKAIYADEGISGTSLKNRDQFNEMIEACKQGQYDLIVTKSVSRFARNLVDCISLIRMLKGLKPPVGVYFETDNLYTLDENKEFMLSFLATFAQEESVKKSESMNWSLQQRFKDGKLLTPAPLGYDRPKDVTGRYIKYAPLEVNEAEAKIVKFIYDAYLSGWSQEEIAAFLTDIGCETKSGAVEWNSGSVGYILTNERYCGNVLTWKTFTADLYEHKHKKNNQDRDQYLYKDRHEAIISVEQFESVQALIENRKHHIRGGLPMMHVIDEGIFRGFIPINHHWVNDDPNTYYDISNSVKRQSKTKVIPKSSFSAFDLQGYQVVRGQFMQVRYEGPTINITNERISFNKFCVQKFENVAYVQLLLHPTERRIAIRPCSSTDAHNIRWRPDPEKAVYSKTLNCQHFGNALYSIMEWNPDYVYKIRGTWAQRGAEQIIVFNLPNATPAVMVAPENGEETKQKRVSLCPEEWADDFGEEFYEHTLENGFYYIAPNTEWNSQAKSVLAPGMMQFATTTPEQLQLSINDLRRGIDEDDG

SEQ ID NO: 341 - protein, 608 aa, Unknown
  Description of Unknown: Integrase B342 sequence
  PTHR30461:SF3,SM00857,G3DSA:1.10.10.2600,IPR036162,PF13408, PS51737,G3DSA:3.40.50.1390,IPR025827,IPR006119,IPR038109, PF07508,SSF53041,IPR011109,PF00239,PTHR30461, PS51736,Coil,cd00338
MARKKNIAAGLDAVIYARYSSHNQREVSIEQQIAECTKHAAALGLRIVGTYEDRAISGKTDNRPRFQQMMRDAEKGKFQAVVAWKSNRIRRNMLQAMVNEAKLDDYGVKVFYAEEDFDDTAAGRFALRNMMNVNQFYSENMAEDITRGLYDNANKCMANGRQPLGYKRGADGKVMLDEPAAAVVREIFTRVAAGDLFVDIARDLNAKGIKTSKGATWNKGSFQSICQNERYKGIYIYGNVRIVDGIPRIVSDELWYKVQEAMRMKKNPVGTRHRVGAEDYLLTGKLRCGHCGSYMTGVSGTSRNGELHYYYTCQKRRTEHACNKKNVRRDVIEPAIAQAIKMYCLTDDVIEWVANRTVEYWEKHDNDLHIEALEQQLEENKKATSNMLKAIEMGIITDATRSRMIELETEQSKLAVQLNAAKADVVKIDRDDLIDELQIFRDMDVNNRSVQAELFKDFLVAAYIYDDNRLKLVFSFMGKDNSIEIPLETGEDPPDGEDSPDAKMFVLTPDCSTRMKALHGNVWCFFVAAKRVRASLTRESAVHGLQEGHRDQNRPGNLHQNESTTRKRVVLFCFICRSPYVPFHEKSVCRSPQAVTNAFYFTVRPSAF

SEQ ID NO: 342 - protein, 608 aa, Unknown
  Description of Unknown: Integrase B343 sequence
  PTHR30461:SF3,SM00857,G3DSA:1.10.10.2600,IPR036162,PS51737, G3DSA:3.40.50.1390,IPR006119,IPR038109,PF07508,IPR011109, SSF53041,PTHR30461,Coil,PS51736,cd00338, PF00239
MNTAVNEYNYRFKLTDYSLFDRNRARKVAIYGRVSTEHEAQLSALENQLQWYDDQVKYHPNWTVCERYIDEGITGTQAKKRPAFLKMIEDAKQGKFDLIVTREVCRFARNVVDTLVVTRELKGIGVEVFFIDDNIWTMDGDGELRLSLMATLAQEESRKTSERVKAGQKISRDNGVLYGNGNILGYDRVGDTYVINEEQAETVRMIYDLYLQGYGSMKIAKILTERKRKTASGLIKWSVSNIMRAIKNATYTGTKCYNKSRSNNFLEQKRINNLDMSTYEYVEGDFPSIISQEIWNKAQAIRESRVKPVCVSAGKNTHSKRDSRDIWVNKLRCSCGSSYRKNKWHTKLDGKTSYGYQCYNQLNNGIKRKRAEIGLDTEGYCDSRMITDWKLDFMAKALLEHLWTERKESVLIALDLIKYYYKEEKSNETQSDTVTIQAKLDKANSRLTNLIAMRADGEISKDEYQAMRSPVDEEIKKLQKALDEIPQEKSNPKGLDIEGIRSTLNSFIDFSGSTISHDVVNQFVYLITPTSDTTFDWYVNLNGTADVKATFTAEGRKKNCIIKLEEIEKISSVHREKNEDNAHFIKNPHIFTYLHRLLSQTSNPHRMY

SEQ ID NO: 343 - protein, 608 aa, Unknown
  Description of Unknown: Integrase B344 sequence
  PTHR30461:SF3,SM00857,G3DSA:1.10.10.2600,IPR036162,PS51737, G3DSA:3.40.50.1390,IPR006119,IPR038109,PF07508,IPR011109, SSF53041,PTHR30461,Coil,PS51736,cd00338, PF00239
MNTAVNEYNYRFKLTDYSLFDRNRARKVAIYGRVSTEHEAQLSALENQLQWYDDQVKYHPNWTVCERYIDEGITGTQAKKRPAFLKMIEDAKQGKFDLIVTREVCRFARNVVDTLVVTRELKGIGVEVFFIDDNIWTMDGDGELRLSLMATLAQEESRKTSERVKAGQKISRDNGVLYGNGNILGYDRVGDTYVINEEQAETVRMIYDLYLQGYGSMKIAKILTERKRKTASGLIKWSVSNIMRAIKNATYTGTKCYNKSRSNNFLEQKRINNLDMSTYEYVEGDFPSIISQEIWDKAQAIRESRVKPVCVSAGKNTHSKRDSRDIWVNKLRCSCGSSYRKNKWHTKLDGKTSYGYQCYNQLNNGIKRKRAEIGLDTEGYCDSRMITDWKLDFMAKALLEHLWTERKESVLIALDLIKYYYKEEKSNETQSDTVTIQAKLDKANSRLTNLIAMRADGEISKDEYQAMRSPVDEEIKKLQKALDEIPQEKSNPKGLDIEGIRSTLNSFIDFSGSTISHDVVNQFVYLITPTSDTTFDWYVNLNGTADVKATFTAEGRKKNCIIKLEEIEKISSVHREKNEDNAHFIKNPHIFTYLHRLLSQTSNPHRMY

SEQ ID NO: 344 - protein, 608 aa, Unknown
  Description of Unknown: Integrase B345 sequence
  PTHR30461:SF3,SM00857,G3DSA:1.10.10.2600,IPR036162,PF13408, IPR025827,G3DSA:3.40.50.1390,PS51737,IPR006119,IPR038109, PF07508,IPR011109,SSF53041,PF00239,PTHR30461, PS51736,Coil,cd00338
MKITKFPIDLSMLTEEEIDQFRQDPSTLFEGDTDVCLYLRFSSERQREQSIEGQLRDCRAYCKMNRYRITAIYVDRATTARKDVEKRLHFQEMIRDSEKRPWEYVVVWKLDRFARNRTDSALFKFRLRKNGVKVISATENISEKPEGIILEAVLEGMAEFYSADLSQKITRGMRESALKCHSIGGHVPLGYKIEDHKLVINPATAHIVQEAFELYANGETVADICRIFNTKGYRTAKGVEFNRNSFKSMFRNKRYIGVYTYKDIEVEGGVPAIIDKELFETVGHRLSKNAEAPARGKAKVDYLLAGKLFCGHCGGSMNGESGTSKTGAVHNYYACYTRKRQHSCDKKPLRKEWIEQIVAQDAMELLTDDTIQEMADMAISQTEKDLRENTRIPELSERMKETESGIANITKAVEKGIASDALMSRLVELEKEKKNLLRLIAEEEKYVCKIDRDQIVYWLTKFKDGNIEDENFKRIIIDLMVNSVTVWDEPDGFRITTAYNLTSCKNKTFRIPSSSDKGFGFEGLESAKKKGMTYGHALLFGARRPECGFPPSSFECLGAAKPLLHNSRPAVGNLRATHRALILLLLAPNHNRLCWGTSHKEVAPGRGP

SEQ ID NO: 345 - protein, 607 aa, Unknown
  Description of Unknown: Integrase B346 sequence
  PTHR30461:SF3,cd00338,SM00857,G3DSA:1.10.10.2600,IPR036162, PF13408,IPR025827,PS51737,G3DSA:3.40.50.1390,IPR006119, IPR038109,PF07508,IPR011109,SSF53041,PTHR30461, PS51736,Coil,PF00239
MRRLPLQHSTLFGYGQAKAPALVRCSAGDNMEYSTKSDKENFMLAGVSIPRSLHMGNRPEGSVIMPRKKSTAADAPRLVAYYRYSGGSRQTEQSIEGQRRDCEAYARAHGMTILREYVDRHISGKTDDRPAFQQLVADSAAHTFDAVICWKTDRLARNRYDSAVYKKKLRDNGVEILYAAESNISGAEGIIIEGLMEALAEYYSAELAEKARRGMRESALKGKALGSSRPLGLTVDADKHYIIEPTGAEAVRYIFEQYAAGLSSSSIVERLNAMGLRTSHGGPFNKSSINRIIQNEMYRGVYVSKKFDVRIEGAIPAIIDNDLWERAQKMFERNRQSRTPHASRADYILSGKLYCGECGCLMKGVCGRSSGNGQMYHYYACPGRSIGRACTRKNIPQDELEAMVVNAVADLLLEPALLEQIADAIVELQQAEAARPDPEKQALEKSLSDVRNKIQNILSAIENGTSSAALSARLADLEQQESTLSYQLSSLDAKKPLTFTRDQILFLLQQFRVSPSERTKAYCRRLVDTFVDHIELTSTELILYFNLSDETVDKNKKAPRSNPSEESSTEKRLVHLAHQQANYSLYAASGYFSLVEHQFSARLWRTA

SEQ ID NO: 346 - protein, 607 aa, Unknown
  Description of Unknown: Integrase B347 sequence
  PTHR30461:SF3,IPR036162,PS51737,IPR011109,PTHR30461, PF00239,G3DSA:1.10.10.2600,IPR006119,SSF53041,cd00338, SM00857,IPR025827,IPR038109,mobidb-lite,PS51736, PF13408,G3DSA:3.40.50.1390,PF07508,Coil
MKKFPIDLSCLAEEEISQFQEDPYTLYNGDQDVALYLRYSSTGQSDQSIEGQLRDCRAFCKANHYRIVAIYVDRATTAHKDVEKRVHLMEMVADSAKQNWEYVIVWKLDRFARNRNDSAIMKMRLRKNGVKVLSATEHLTDSPESIILESVLEGMAEFFSAELSQKVTRGMRESALKCHSVGGHIPLGYKVENHKLVVDPDTAHIVQEAFSLYANGESVADICRKFNSAGYKTAKNTEFNRSSFKAMFRNTRYIGTYTYKDIVIENGIPAIIDKELFETVQRRLSKTATAPARGKAKVDYLLSGKLFCGHCGASMNGESGAGRHGKVYHYYSCYTKKRKLGCDKRPLKKDYIEGIVARDALNLLTDQLIDEIADMAIRQSEQDLINDTHIPQLTAQLSEVEKSIMNITAAIEKGIASETLMNRLVQLEHEKKTLNKEIKAEEKFVYRIDRDQIVFWLSQFKYGNIEDENFRRRLIDLLVNSVTVWDEPDGYKITTAYNLTSCKTKTFRVDKNPAAEEATGFDFGESECTKTLEISTVSRVFVILLKGFRPPAFSTKFRERRRSYYGEENRNSIENRCVRKRSIRGFRGSTNRKRLHRKDNSKLPLTL

SEQ ID NO: 347 - protein, 607 aa, Unknown
  Description of Unknown: Integrase B348 sequence
  PTHR30461:SF3,SM00857,G3DSA:1.10.10.2600,IPR036162,PF13408, IPR025827,PS51737,G3DSA:3.40.50.1390,IPR006119,IPR038109, PF07508,SSF53041,IPR011109,PF00239,PTHR30461, PS51736,Coil,cd00338
MPRKKKLQEVGGLRLVAYYRYSNGGQQTEQSIEGQRRDCEAYAKAHGYKIVHEYIDRHISGKSDSRPAFQQMISDSDSHLFDAVICWKTDRLARSRYDSIIYKTRLRRNGVKILYAAETVVDGPEGIIIEGLMESLAEYYSAELAQKLRRGQRESALKCIALGGNRSFGYDIGPDKHYCINEKQAPAVRYIFEQYAAGATAADIVRELTARGYRTSRGNPFNKNSICRIITNEMYLGVYKYADIRIEGGVPAMIDRELFNRCQTQLAFNRAHGGGKGAPRADYVLVGKLDCGLCGHAMKGASATGHTGSKHYYYTCTQHVEKKCPKTSIEKSYLEQIIVDGVAKYVLTPEKISQIVDCMMELQAKEQEPKGNPEKDALEAELAECRRKQNNILEAIEEGGSARLAARLRALEEQEAQLTFALGEINNAPAPPQFSREALTFMFEQFRREEDEVDEEYRRRILDTFVSSILLYEDRAEVKFNITDQKTGDFERVILPISANKKPPEDDDTTSNSEGSTALRLVEHQGVEPWHRSPGLSHFESLNRLDEAGFVRLSWAVAGIFCASQKWHISAIYRQKSTTFCEVPLEKPPFTRSVRSCISGAVPLDVR

SEQ ID NO: 348 - protein, 607 aa, Unknown
  Description of Unknown: Integrase B349 sequence
  PTHR30461:SF3,SM00857,G3DSA:1.10.10.2600,IPR036162,PS51737, G3DSA:3.40.50.1390,IPR006119,IPR038109,PF07508,IPR011109, SSF53041,PTHR30461,PS51736,cd00338,PF00239
MHNNSREKLREIYQREDNSQKTFIPAKPKVDPNERNRFFRVCAYCRVSTDSDEQLSSYELQQAHYLHLVEDHPNWELRHIYADEGISGTSLKKRDQFVEMIEACKHGEYDLIVTKSVSRFARNLVDCISIIRLLKGLPKPVGVYFETDNLNTLGENNEFMLSFLATFAQEESVKKSEAMNWSLMQRFKDGKLLTPALLGYDRPKDVTGRYIKYAPLKINESEAAIVRFIYDAYLFGWTQEEIANFLTDIGCETKTGGTEWSSGSIGYILTNERYCGNVLTWKTFTADLYEHKHKRNRKDRDQYLYTDRHEAIISPEKFDSVQILIDNRKCHIRGTLPLLHVIDEGIFRGFVPINHHWINDDPSVYYDISNSIDSKLKIRKIDKSHLSAFDLQGYQVVRNQFTQVRYEGPSLTISEEKITFNLFCMKKFDDVGFVQLLLHPTERKIAIRPCQETDVHSIRWRPDPTKQFYSKTLLCQHFGNALYNIMKWNPDFLYKIRGIWAKRLNEQIIVFNLTNAMPAVFVTKDGTENAVKQRVELCPDEWTDDFGEEFYEHTLENGFYYLTPDSDWQTKTQSIPAPGIEQYLIPSAEELQQSMATIKKGTDDKNE

SEQ ID NO: 349 - protein, 607 aa, Unknown
  Description of Unknown: Integrase B350 sequence
  PTHR30461:SF3,SM00857,G3DSA:1.10.10.2600,IPR036162,PF13408, PS51737,G3DSA:3.40.50.1390,IPR025827,IPR006119,IPR038109, PF07508,IPR011109,SSF53041,PTHR30461,Coil, PS51736,cd00338,PF00239
MNVYRTREILKTCSIFDLKLKVAFYARVSTESEDQQVSIHHQDEYYRNFIAQNKNWVFVGAYIDNGISGIRTEKRDEFQRMMADAKTGKIDMIVTKEITRFARNTLDSIKYTRELLMYGVCVWFQNDNINTIDEDSELRLTIMSGIAQDESRKLSNRIKFGHAQSIKNGVVLGSRIYGYIKKDGKLTVDPKTAPMIKEIFEKYSTGEWSTSTIERYLYKKGYRNYKGGKLSRDNIKKIIKNPKYKGYYCGGKVKVVDMFTKKQEFLPEDEWTMYKDDGNHVPQIVDESVWNKANVIMQTRSDAIKSHRTSFKQNNLFTGYIFCGNDGAPYWMKQRTARGREDVRWVCSYRIKNGAQSCNSFGIHEKELKIMLADLINKSGDIQAAIEKYISLVEKNIDFSNDRAEINRLKNMILQLEKKKDKLLDLNLDGIITNSEYLEKNEKFKNEIQDISNKLSELESKEEANKDSHLKLKEIGKILNDLQGIGPEDITKAVLGEFLDKIIVNPKRPQECEILFFLKTGDVKKKSIIERGKQSCSEYFFLTIYPPTDPFCLEVRFPLYPSVSGTPSSFATSYLKRSSAPFASGTTALLEEVLLGIIHFLLGCYLV

SEQ ID NO: 350 - protein, 607 aa, Unknown
  Description of Unknown: Integrase B351 sequence
  PTHR30461:SF3,SM00857,G3DSA:1.10.10.2600,IPR036162,PF13408, PS51737,G3DSA:3.40.50.1390,IPR025827,IPR006119,IPR038109, PF07508,SSF53041,IPR011109,PTHR30461,Coil, PS51736,cd00338,PF00239
MNVYRTREILKTCSIFDLKLKVAFYARVSTESEDQQVSIHHQDEYYRNFIAQNKNWVFVGAYIDNGISGIRTEKRDEFQRMMADAKTGKIDMIVTKEITRFARNTLDSIRYTRELLMYGVCVWFQNDNINTIDEDSELRLTIMSGIAQDESRKLSNRIKFGHAQSIKNGVVLGARIYGYIKKDGKLTIDPKTAPMIKEIFEKYSTGEWSTSTIEKYLYKKGYRNYKGGKLSRDNIKKIIKNPKYKGYYCGGKVKVVDMFTKKQEFLPEDEWTMYKDDGNHVPQIVDESVWNKANVIMQTRSDAIKSHRTSFKQNNLFTGYIFCGNDGAPYWMKQRTARGREDVRWVCSYRIKNGAQSCNSFGIHEKELKIMLADLINKSGDIQAAIERYISLVEKNIDFSNDGAEINRLKNMILQLEKKKDKLLDLNLDGIITNSEYLEKNEKFKNEIQDISNKLSELESKEEANKDSHLKLKEIGKTLNGLQGIDPEDITKSVLGEFLDKIIVNPKRPQECEILFFLKTGDVKKKSIIERDKQSCSEYFFLTIYPPTDPFCLEVRFPLYPSVSGTPSSFATSYLKRSSAPFASGTTALLEEVLLGIIHFLLGCYLV

SEQ ID NO: 351 - protein, 606 aa, Unknown
  Description of Unknown: Integrase B352 sequence
  PTHR30461:SF3,SM00857,G3DSA:1.10.10.2600,IPR036162,PF13408, PS51737,G3DSA:3.40.50.1390,IPR025827,IPR006119,IPR038109, PF07508,IPR011109,SSF53041,PF00239,PTHR30461, PS51736,Coil,cd00338
MARKKKFAPNDNNLAIAYYRFSSHSQNDASIDQQRELAHEWADAHGFKIVQEYEDAAISGTTDARPGFQQMLSEVAKIRPHTLIMWKTDRLGRDKYVLAMAKKKIRDAGCEIHLLAEHIPTEGPEGVLIEGLMEAMAEYYSRQLSQNIQRGMDYNAQHALYNGHKLFGYDVDRSTKKYIPDPNTAPFVQWAFREYASGKPLKTIAEEMNAQGLRTPRNAEFSVNMLNKMLKNRAYIGEYHHGDIVVAGGMPVLVDEATFDRAQRRFAENKRKGSQRAHGMGDAEAPRYWLTGKLYCGECGSTMQGVSGTSKAGRTYYYYYCSAQRRKECHLHKARKRDLEDMVLFALHNIVDDEENVTALALDAAEYYERSHDDTAYLEALEAKRREVEKSLANLVKVIERGVVSDTVTQRLAQLEEQKSALNDAIGTENVRVSLCEDRHSIQAYFDKFLHADVNDPEIRDQVFEYFVDKVYLYDDKLVVSMWFSEDDKQEITWRDWFSLDEYWTDESPFVKGGGVEFDCFPLGSTKKRTCFSAGPFSMKFISAQRAKYLRPEIFAPQMRKAPDASLSAPNALFSARRCIFRAGHTNTLQYPALYGSANAPRIKTN

SEQ ID NO: 352 - protein, 606 aa, Unknown
  Description of Unknown: Integrase B353 sequence
  cd00338,SM00857,G3DSA:1.10.10.2600,IPR036162,PS51737, G3DSA:3.40.50.1390,IPR006119,IPR038109,PF07508,SSF53041, IPR011109,PTHR30461,PS51736,Coil,PF00239
MKIIYKLFVGAVTAVKALNFNFYNKIEIATPLAQGGSHIRRYTISDCSSHIVSFSEQSCKRNCCSVLAVIFIRKIVRRRTYILRKVIHMQYEEYLIYLRKSRSDASLEAMGVDVLERHEQILLDLAKRMNLSIGGIYREVVSGESISARPEMQRLLSEVEAGRWKGVVVMEVERLARGDTIDQGIVQRAFQYSGTQIVTPAKTYNPNNEFDEEYFEFGLFMSRREYKTIRRRMRAGVTAAVKEGKWPFNKAPYGWQRVKLEHARGWVLAPDPEEAPVVKLIFQLYTGPDRIGITNICRYLDNRGVKPRNGDTWTECSIMGILRNIVNDQRVGIGRRKIVKQVQNGSVSKVRPHSDYDFTAPGLQPRLIDHDVFLEAQTHLGKNSHKLPESYGIKNPLAGIVVCSCCGKKMMRRPASKTPGGASYDVLKCNTRNCPTIGSALDLVEREVIQALSDWVAGYQLDPTLEVENKVPEKEQLLSSAISNHDVLLKQNGNLYDLLEQGVYTTEIFLERSHELQKRIKESEAHIEVLKKDLEYEKEKIANIENFIPSCMELLSCYWELSAQDRNKALKMLLENVEYTKTKRNQKGDKDNPTFTLNLKPRIPRI

SEQ ID NO: 353 - protein, 606 aa, Unknown
  Description of Unknown: Integrase B354 sequence
  PTHR30461:SF3,cd00338,SM00857,G3DSA:1.10.10.2600,IPR036162, PS51737,G3DSA:3.40.50.1390,IPR006119,IPR038109,PF07508, SSF53041,IPR011109,PTHR30461,PS51736,Coil, PF00239
MKRKIAIYARVSTEHEAQISALENQIQYYDEILKKHPEWELYERYIDEGITGTSIGKRDSFLRMMSDAKDKCFDLIVTREVSRFARNIVDTLQQTRTLKQYGVEVYFTDDNIWTMNDEDGELRLSIMATLAQNESKKTSMRVKAGQMISFKNGVFYGNGNILGYDREGKNLVINPTQALTVKRIFELYLQGNGIRKIQFIMEQEKRKTSLGKTKWSASNIARILKNPFYCGRIEYRKQYVPDYLTQKKINNHGEIERVITKGTHDPIVSEEDFDKVQEIFKTKTTKKDNKKYGKPLAYNVWVRKLKCKCGHGMNRKINYVSKITGVKTYSFQCHDQIHTGTIKTRLKKGLSINGICDNKSFPEWKLEVQADFIFRKLLLNKQEIYETAIEMLESSVAVDTHIQDKKKKIEDSIKNIDKLKARNDMLLDMCTDGDISRETFKKKTELNNQNIHELEEKIKLIRKQIEENDAQEDLNKRIVLLSEFIKMKAFSKKEKIPETIIEKYVEKIIFYKDDFEWYLRPTIGNVDFLSIDAKNMKKGTHELEKTMCHVPSSTGSDCRRRKIDKRKYFYFTTLIVTRDDVNEYMKYHAEYTKANRFKDIVCKIYI

SEQ ID NO: 354 - protein, 606 aa, Unknown
  Description of Unknown: Integrase B355 sequence
  PTHR30461:SF3,SM00857,IPR036162,PF13408,PS51737, G3DSA:3.40.50.1390,IPR025827,IPR006119,PF07508,IPR011109, SSF53041,PF00239,PTHR30461,Coil,cd00338
MKKVFVYHRVSSDQQLDGSGIARQAELLEAYLKRTNILAEMDDPEPVIITESGGVSAFKGHNMLITSGLGAWMQEVRAAMWDGSHLVYENGDRFSRQNPFTVIGYINDLINHNITIHDATMNIIISRQNSAMLPMVLMNAQRAYDESKYKSDRIRKGWAKKREQAFNKGTIVTNKRPQWIEVEKDKYVLNEKAAVVKEIFALYQTGMGCPTIAKKLQGKEGEQYKFNRPWTGELVHKILTNRRVTGKIFISETIRNHADIENPVTQKKYDMDVYPVVINEEEFELVQELLKSRRPNAGRVTVKKDGQEEVLIKSNLFSGIARCTECGGPMYHNVVRAKRTPKKGDPKIEEYRYIRCLNERDGLCENKAMTYETVERFVVEHLLGMDLITVMKEQEFNPEIEVLRIQIDQVKEQITNYENGIERRKSAGKIITFDMREDLDDAKSELERLLARQASLATVQVDVAVLQDVNVTELYNVNNVDIRTRYENELNKIVSTIRLKRNGTSYTIDISYKQNELKRHVLFVENKKKEQTLISEVIIEDVDGGKFYYTPSFMIRLEDGEIRFQHTNEDLSIVDYSLLLNYVDAVDRNDTVGVWMRNQFNFLTSN

SEQ ID NO: 355 - protein, 606 aa, Unknown
  Description of Unknown: Integrase B356 sequence
  PTHR30461:SF3,SM00857,G3DSA:1.10.10.2600,IPR036162,PF13408, PS51737,G3DSA:3.40.50.1390,IPR025827,IPR006119,IPR038109, PF07508,IPR011109,SSF53041,PF00239,PTHR30461, PS51736,Coil,cd00338
MARKKKFAPNDNNLAIAYYRFSSHSQNDASIDQQRELAHEWADAHGFKIVQEYEDAAISGTTDARPGFQQMLSEVAKIRPHTLIMWKTDRLGRDKYVLAMAKKKIRDAGCEIHLLAEHIPTEGPEGVLIEGLMEAMAEYYSRQLSQNIQRGMDYNAQHALYNGHKLFGYDVDRSTKKYIPDPNTAPFVQWAFREYASGKPLKTIAEEMNAQGLRTPRNAEFSVNMLNKMLKNRAYIGEYHHGDIVVAGGMPVLVDEATFDRAQRRFAENKRKGSQRAHGMGDAEAPRYWLTGKLYCGECGSTMQGVSGTSKTGRTYYYYYCSAQRRKECHLHKARKRDLEDMVLFALHNIVDDEENVTALALDAAEYYERSHDDTAYLEALEAKRREVEKSLANLVKVIERGVVSDTVTQRLAQLEEQKSALNDAIGTENVRVSLCEDRHSIQAYFDKFLHADVNDPEIRDQVFEYFVDKVYLYDDKLVVSMWFSEDDKQEITWRDWFSLDEYWTDESPFVKGGGVEFDCFPLGSTKKRTCFSAGPFSMKFISAQRAKYLRPEIFAPQMRKAPDASLSAPNALFSARRCIFRAGHTNTLQYPALYGSANAPRIKTN

SEQ ID NO: 356 - protein, 606 aa, Unknown
  Description of Unknown: Integrase B357 sequence
  PTHR30461:SF3,IPR036162,PS51737,IPR011109,PTHR30461, PF00239,G3DSA:1.10.10.2600,IPR006119,SSF53041,cd00338, SM00857,IPR025827,IPR038109,PS51736,mobidb-lite, PF13408,G3DSA:3.40.50.1390,PF07508,Coil
MAQQKKAAGAEFDGTPRAVIYARYSSTHQRERSIEDQIADCRAYAERCGLMVVGTYADRAISGKTDERPDFQRMIDDSKKRQFDRVIVWKLDRFARNRYDSALYKHKLKQNGVSVLSAMENIGEGDESIILEAILEASAEYYSRDLRKKVLRGMTTSAKKGLHNTGSVPYGYRLEGESAIPDGDRAEFVKHVFEAYAKGETPAELYREMQRRGLDTKANGRKVSDNIIGSILRNEKYTGRGMWRGIPVEWPRLIDDELFEAARARTEKNRRAPAAYKAAEPFILCGKAFCGYCGAPLMSGGGKGRSGKYYRHYICRTKKRERACGKKTEDKDFLEWYIVEQTCAYVLAPERLEYIADRVVECYKESFDGQRVSVLEARIAKLDRDLDKTTDLLFAAPSAAAVDRINKHVVELEAQKSELETELSGLKIAAAITYTRDEVVAWLKQFCNGDPLEAEFRRRIVETFINSVYVYDDRIVIYFNVRGGKQISYAEMLDSAGDVEPLPPGPESKKSGGPDNGTAASNSKERFLHGKNTEQTAESAVRFCSGLVHQKTLQLVLECFFVYPVREIEPDGAQVLLCAIMERCVFGCILDMKIPPELSEFFLCLL

SEQ ID NO: 357 - protein, 606 aa, Unknown
  Description of Unknown: Integrase B358 sequence
  PTHR30461:SF3,IPR036162,PS51737,IPR011109,PTHR30461, PF00239,G3DSA:1.10.10.2600,IPR006119,SSF53041,SM00857, IPR025827,IPR038109,PS51736,mobidb-lite,cd03768, PF13408,G3DSA:3.40.50.1390,PF07508,Coil
MAKNKDCIAVYSRKSKFTGKGESIGNQVELSREYIRTHYGDAYAESMVVYEDEGFSGGNLNRPDFKRMMKAAHEHKFKAIVVYRLDRISRNVSDFSTLIEELSRLDIAFVSIREQFDTGTPMGRAMMYIASVFSQLERETIAERIRDNMHELAKTGRWLGGTTPTGYASESVKHITVDGKSKKACKLKLVPEEADTIRLIYKIFQESDSLTYTEAELMKRGIKTKNGKYHTRFSIKSILQNPVYVIADDEVYNYLVNKDADIFSDKAAFDGVHGLMVYNRTDQEKGRATRYLSPEEWIVSVGEHPGIIPGREWIRIQESLYRNKSKAYRKPRGNEALLTGLLFCRCGSRMYPKLSKRKTADGKRIYTYVCKIKDRSKHKLCDERNANGNTLDLAIIEQIKMMEDNQGTFIAQLEQSRKFYTGNRTDYEDRLAAARRDKAEAEKKVEALVDSLAAVDDSTAKGLVIKRIEKLSQECRNIDSRIQELEGLTEQYHLSDIEFDVFRQLLTMFKSNIDTMTVEEKRAAIRTLVRKVVWDGTNAHVVLFGVPDEEIEYPDLPTVSGGSDDEDDTDDLEPFADVDYEDEEDDSLGKTQPLSAAKARWGENSK

SEQ ID NO: 358 - protein, 606 aa, Unknown
  Description of Unknown: Integrase B359 sequence
  PTHR30461:SF3,IPR036162,PS51737,IPR011109,PTHR30461, PF00239,G3DSA:1.10.10.2600,IPR006119,SSF53041,cd00338, SM00857,IPR025827,IPR038109,PS51736,mobidb-lite, PF13408,G3DSA:3.40.50.1390,PF07508,Coil
MTVVERLRSRGVTPRAVLYARFSSDNQREESIEAQLRAMHEYCSRNSIVIIHEYCDRAKSATTDDRPEFLKMIAASREGNFDFAIVHKLDRFSRNRYDSAYYKRELKKNGVQLLSVLEQMDDSPESIILESVLEGMSEYYSKNLAREVMKGMRESAMDCRYIGGWIPYGFRVDPQTHRYIINDYEAEAVRMIFRDVADGCGYNVVLNKLNSMGYRTRLGNTFSKETLYEMLRNEKYNGVYVFSRAASKDELGRRNNHLDKPIEDQIRIPGGMPKIVDDETFARVQAILTSRKRHGRRDGKRKYLLTGMVFCGLCGHRYCGDSMQTGGEKNRSVIGTYFCNNRKNHGAHACSNSNIHQEPLEELVLRKIEEIVFDESRIPGIVQAYRELCQQEDGEDKEKIRTLRQNLKTVEQKIANIVNIIANTGSAALVTQLTQLEREKELLDVQIQEEERDTKENDLDEEAIRAAFRQAQKMFHSGTLPQMEQIINLYLDKVLVYPDYVEIHLNNVPTNLLNPSQTKDEPALGGLHTFYIEKMCEKNAPQNRTRKNGQYGYNILVKLNRKEQKKAKSRRKGQKETRAQDGLDSSKTGGLDKSKSEIVAVLFSPL

SEQ ID NO: 359 - protein, 606 aa, Unknown
  Description of Unknown: Integrase B360 sequence
  PTHR30461:SF3,SM00857,G3DSA:1.10.10.2600,IPR036162,PF13408, PS51737,IPR025827,G3DSA:3.40.50.1390,IPR006119,IPR038109, PF07508,IPR011109,SSF53041,PTHR30461,Coil, PS51736,cd00338,PF00239
MRKKFNIDLSMLTPEEQQQFHDDPTTLTKGEVDVALYLRFSSERQKEQSIEGQLRDCIAYCKRKSFRIVAIYVDRATTARKDVEKRVHFQEMISDSAHHLWNFVVVWKLDRFARNREDSAVFKMRLRKNGVRVKSATETISENPEGIILESVLEGIAEYYSADLSQKITRGLRESAMKGHSVGGHVPLGYKIEDHRLVINPATAHIVQEAFQLYANGESMAEICRIFNSKGYRTAKNSEFNRSSFKSMFKNVRYIGTYIYKDIKKENAIPAIIDKDLFETVQRRLSLAADAPARGKAKVDYLLSGKLFCGHCGATMNGESGTSKTGAIHNYYTCYSRKRRKGCDKKPLKKDFIERIVAQDAMALLTNDVIEELADMAMSQADRDLKENTCIPELSTRLTEVEQGINNITKAIEKGIASDTLLNRLTELEKEKKDLTSQLREEEKYICRIDRDQIIFWLTKFQGGNIEDEDCRRRIIDLLVNSVTVWDEPDGYKITTAYNLTSCKTKTFRVSNTGSPSSEGFGFGELSSTKKRTCFSAGPFSMKFISAQRAKYLRPEIFAPQMGKAPDASHSAPNALFFCTPVHFSRRTYKHPALCDSANVPRIKTN

SEQ ID NO: 360 - protein, 605 aa, Unknown
  Description of Unknown: Integrase B361 sequence
  PTHR30461:SF3,cd00338,SM00857,IPR006118,G3DSA:1.10.10.2600, IPR036162,PS51737,G3DSA:3.40.50.1390,IPR006119,IPR038109, PF07508,SSF53041,IPR011109,PTHR30461,PS00397, PS51736,Coil,PF00239
MNEERKVAGIYIRVSTEDQVREGFSLGEQEEKLKQLCKYKDYKIYKIYKDAGISAKNMSGRPAFQQMLEDMRAGKINYIVAYKLDRVTRSVRDLEVLISELEEHHCYLVCDRDDVNTSTANGRFFVRMLTVLSQLEIEIVSERTKFGLTGAIKSGHIPGTCPLGYKRDTSKKMVIDETTKDIVIRIFNLYLQGKSYQTIANILNEEKVLEPKKWDDSTIEKILNNKIYVGDYERFKRVAKEQGKEPVIYSNVVEPIITRAMFEDIQLQKEKNQRAYCRDRVYIFMQKMKCPKCGKLMGSKGTGGKKKKYMYYHCSDCKIYLREDLIEEQVMPMIMDLIEYDMTVKKYFYPVLADKKEKNTDKLDKEINTLRNQKSRIKEAYLKEIVDVEEFSKEYKAIDEKLELLEQKRIETIDLNKQSFSQQHLMADRDVEKEKLIRSNKFYDMLMTEWKSKDKEEKQEFISKFLESITVEKDSKGNYKLVNLKLRKTFINQIFKLMQNGMFDMTIADEKDKEVRTTVMMDKRELEEYIERLNEYYEVSYYEVARLDEQKKGYQKKYLTIDETNDNEEKLFKLVELVTDDKKYPQKKVNRIVGAIRVKEREKVS

SEQ ID NO: 361 - protein, 604 aa, Unknown
  Description of Unknown: Integrase B362 sequence
  PTHR30461:SF3,SM00857,IPR006118,G3DSA:1.10.10.2600,IPR036162, PS51737,G3DSA:3.40.50.1390,IPR006119,IPR038109,PF07508, IPR011109,SSF53041,PF00239,PTHR30461,PS00397, PS51736,Coil,cd00338
MCEEEIKNAGIYIRVSTDDQARAGFSLPEQKEKLLSLCEFKGYNVFKVYEDAGISAKDMEHRPKFQEMLNDVKTGKINYIVAYKLDRVTRSVRDLEELINILEKYNCYLVCDRDDVNTSTANGRFFVRMLTVLSQLEIEIVSERTKFGLNGAIKSGHLPGVVPLGYKKDGSKKTIIDETTRHIIERIFNLYLEGNSYQQISNIFNKEKVLNKSWHDTDIEKIINNRIYMGDYEQYKRIAKKIGRDTVIYMNVVEPIITRAMWEECQTQKLANQRTYTRTRTYLFFQKLVCPKCGRIMKCKGSGGKKKKYIYYNCEFCHFNLREDYVEEYMIKAIYEFLEFEQMCNSFFLPILADKKDKNTDLNLDKEIEGYIKQKERIKKAYLTGIVELKDFEEDLKKINEKLEILNNKKQELNELDVHTFTIEKVMARRDIEKISIDNGYKEKEFYKFEWDIKTKEEKQQFISKYIDNIVIDKTDTGSLDIKQINFRSSFIDKAVKLTQVGAYDYKLPFEVNHKQEMVLVSSPMKRKQVNKYLGYLREYFEIEYREDKGDRTENGMAVFDSAIPDNYELLKVIPIIDINLFKGKDITFGLVFRPTIKEIINEK

SEQ ID NO: 362 - protein, 604 aa, Unknown
  Description of Unknown: Integrase B363 sequence
  SM00857,IPR006118,G3DSA:1.10.10.2600,IPR036162,PS51737, G3DSA:3.40.50.1390,Coil,IPR006119,IPR038109,PF07508, IPR011109,SSF53041,PTHR30461,PS00397,PS51736, cd00338,PF00239
MIKIIGYARVSTTKQDLSRQKLKIKEFCENNNYELIEIIEDFGISGVVADRKGYIELQSKTYKDADMIVISELSRLSRQEDVTETVYNIQQIINKGLSVILLDSPSKIYEANKLLDITEILILTIKAWAAAQERLDIKKKNQDGKQALFQAYPYAVVDQKIPYGYKAVPNPNGKRPKYILEEVPEEVENIKRLFALVNSGKTLGAVARYFNERNITFRGYYSTVAILSNYIHSDIYRGIRRRTQRLGREEPYTIEVRIKPIISEEDFMKAQELIKNNYKNTPTGKVNHNPLKGIIRCRCGRAMTVKDKKPAAGISKLTYRCSCVDRKSHPDFCKYNIDEVSYDLTNEILYSLFKSMHTAEYINFFRNQTDNRVTELQEEIAGIEKRLSALYLDKENLSNESQDNANKFLLTTNPTLLNIIQEKQNQLDEKIKSIDKEIIRYKKSQSKKMADIERIKDNNGKEKLQNLSIEEQGELYHNYLERVNYIPVTTMQGYYIVQFLNGIKFYIAITKVRSIAMASLLLDNWTIDEKGIITANYDTLKSSDMKNFSIEMIRKTKTMTLQEYLKSDLAKERALHLDLSYRERYLEELHKAGLDGRLRPLKKE

SEQ ID NO: 363 - protein, 604 aa, Unknown
  Description of Unknown: Integrase B364 sequence
  PTHR30461:SF3,SM00857,IPR006118,G3DSA:1.10.10.2600,IPR036162, PS51737,G3DSA:3.40.50.1390,IPR006119,IPR038109,PF07508, IPR011109,SSF53041,PF00239,PTHR30461,PS00397, PS51736,Coil,cd00338
MNKENKIAGIYIRVSTEDQAREGFSLGEQEERLREFCKFKRYEIFKVYKDAGISAKSDKRPAYQEMLEDIKSKNINVIVAFKLDRLTRSVYDIEKLMKIVNDLECDIDCLADESNTTTSNGRMVMRIMTSVSQNEIEKCSERTKVGLAGAIKQGHLPSRTTLGYKRENKKLVPNPLTKDIVVRVFDLYLEGKSHQKIANIYNKENVLGKTWRDSTIQKILSNEIYKGDYIHGKRTKHPTYYENVVEPLVNKDKWESCQYQKLRNARHYERTSTYLFTNKLKCSKCGNYFGGKASVKKKLNKKYYYYKCNHCKINLKEDSIEDLILLELLALVYIDDLFNDYYTPFIKSKLDYNKIDYKKELKELDKEKDRIKTAYIKGIVKLDEFDNELKQIEYKRQVLEKQEQDSKQYENLNFTMDDLLLIKDKKEIEDYLHPENIIDLFVRWNYLDKTNKQKLISKYIDDIEIEKLGTKIEIKKLNLRNSFYYDLIDYHNNYDTPLDLFMFMDEDKFPIPVAHNGFRTRIEIENYVNKLKEMYDVNYYEVIPNKDFTNLSFTPKNDIEKIIRIIPIKDNDRFKSNQLELAIITINLSNIKGINGAPLYKQIK

SEQ ID NO: 364 - protein, 604 aa, Unknown
  Description of Unknown: Integrase B365 sequence
  PTHR30461:SF3,IPR036162,PS51737,IPR011109,PTHR30461, PF00239,G3DSA:1.10.10.2600,IPR006119,SSF53041,cd00338, SM00857,IPR025827,IPR038109,mobidb-lite,PS51736, PF13408,G3DSA:3.40.50.1390,PF07508,Coil
MARKKNIAAGQNAVIYARYSSHNQREVSIEQQVRECMKHAAELGLHVVGTYEDRAISGKTDKRPNFQRMMRDAEKGKFQAVVAWKSNRIGRNMLQAMVNEAKLEDCGVKVFYAEEDFDDTAAGRFALRNMMNVNQFYSENMAEDITRGLYDNASKCMANGRQPLGYKRGEDGRVVLDEANAAVVREIFTRVAAGDLFVDIARDLNAQGIKTSKGANWNKGSFQSICQNERYRGIYIYGDVRVADGIPRIVSDDLWYRVQEAMRMKKNPVGTRHRVGAEDYLLTGKLRCGHCGSYMTGVSGTSRNGELHYYYTCQKRRTEHACDKKNIRRDVIEPAVAQAIKMYCLTDDVIEWMADRTVEYWEKHDNDLQIEALEQQLEENKKATSNMLKAIEMGIITEATRTRMVELETEQSRLSVQLNAAKEDVVKIDREQIISYLELLQQGDIHDRDFQMELFKNFLVAVYVYDDNRMKLVFSCMGDQNSVEIPLETGEDPPDGGLSPDAKMFVLTPDSSTRSERHHTLCGAFFVLHCSRKTQKNFCPLPQPARNGLFCARMADHGRRNLCYNIKKQGSRRNRGCSNEPADGDRGRQQAGCRTVETAAEKGI

SEQ ID NO: 365 - protein, 604 aa, Unknown
  Description of Unknown: Integrase B366 sequence
  SM00857,IPR006118,G3DSA:1.10.10.2600,IPR036162,PS51737, PS00397,G3DSA:3.40.50.1390,IPR006119,IPR038109,PF07508, IPR011109,SSF53041,PTHR30461,Coil,PS51736, cd00338,PF00239
MIKIIGYARVSTTKQDLSRQKLKIKEFCENNNYELIEIIEDFGISGVVADRKGYIELQSKTYKDADMIVISELSRLSRQEDVTETVYNIQQIINKGLSVILLDSPSKIYEANKLLDITEILILTIKAWAAAQERLDIKKKNQDGKQALFQAYPYAVVDQKIPYGYKAVPNPNGKRPKYILEEVPEEVENIKRLFALVNSGKTLGAVARYFNERNITFRGYYSTVAILSNYIHSDIYRGIRRRTQRLGREEPYTIEVRIKPIISEEDFMKAQELIKNNYKNIPTGKVNHNPLKGIIRCRCGRAMTVKDKKPAAGISKLTYRCSCVDRKSHPDFCKYNIDEVSYDLTNEILYSLFKSMHTAEYINFFRNQTDNRVTELQEEIAGIEKRLSALYLDKENLSNESQDNANKFLLTTNPTLLNIIQEKQNQLDEKIKSIDKEIIRYKKSQSKKMADIERIKDNNGKEKLQNLSIEEQGELYHKYLERVNYIPVTTMQGYYIVQFLNGIKFYIAITKVRSIAMASLLLDNWTIDEKGIITANYDTLKSSDMKNFSIEMIRKTKTMTLQEYLKSDLAKERALHLDLSYRERYLKELHKAGLDGRLRPLKKE

SEQ ID NO: 366 - protein, 604 aa, Unknown
  Description of Unknown: Integrase B367 sequence
  PTHR30461:SF3,SM00857,G3DSA:1.10.10.2600,IPR036162,PS51737, G3DSA:3.40.50.1390,IPR006119,IPR038109,PF07508,IPR011109, SSF53041,PF00239,PTHR30461,PS51736,Coil, cd00338
MKRKVAIYARVSTEHEAQINALENQIQYYNNILAQHPEWELVGRYVDEGITGTSVKKRKNFLRMMEDAKNGMFSLILTREVSRFARNTVDTLQETRKLKSYGVEVYFTEDNIRTSDDTDGELRLTLMATLAQNESKKTSVRVKAGQKISFENGVLYGNGNILGYDRVGRELVVNPEQAETVKMIFNMYHDGMGCKQIAYELEKRGRITSTGLTHWQPGTISRLLRNSFYCGKIVYRKQYVPDYLEQKKINNYDEVDKIEIMGKHEPIISEELFNDCQRRLDAKTVNRLRGKHAINPPKSAYARILKCQCGSNFERRKWHKYKDGRIRYGFECYKQKNHGSYRTRLKKGLDTTGCCTTKMFPEWKLKIVAHWLFNDLWKERDKIINRAIEMLNATIKDENVVDYTDEVKELNKKRKKYEEKLSNLVELRVEGDISKEVYEEKKGAFKKQIEYIDSELLKRDVKNSAIVSNVKTQIQLLTDLLEKKYDVISGDIPEDIVETFIDQIVVHDDYFEWRLRTSTEPVLCKVEGNAKDNTIIFLENDSHKVATQYRQRLRIRQNNLIHAIDSIELGNFVITKDYLAKYKETDENMKKVNKWNDIKIKVTI

SEQ ID NO: 367 - protein, 604 aa, Unknown
  Description of Unknown: Integrase B368 sequence
  PTHR30461:SF3,IPR036162,PS51737,IPR011109,PTHR30461, PF00239,G3DSA:1.10.10.2600,IPR006119,SSF53041,cd00338, SM00857,IPR025827,IPR038109,PS51736,mobidb-lite, PF13408,G3DSA:3.40.50.1390,PF07508,Coil
MARKKNIAAGQNAVIYARYSSHNQREVSIEQQVRECMKHAAELGLHVVGTYEDRAISGKTDKRPNFQRMMRDAEKGKFQAVVAWKSNRIGRNMLQAMVNEAKLDDYGVKVFYAEEDFDDTAAGRFALRNMMNVNQFYSENMAEDITRGLYDNASKCMANGRQPLGYKRGEDGRVVLDEANAAVVREIFTRVAAGDLFVDIARDLNAQGIKTSKGANWNKGSFQSICQNERYRGIYIYGDVRVADGIPRIVSDDLWYRVQEAMRMKKNPVGTRHRVGAEDYLLTGKLRCGHCGSYMTGVSGTSRNGELHYYYTCQKRRTEHACDKKNIRRDVIEPAVAQAIKMYCLTDDVIAWIADRTVEYWEKHDNDLQIEALEQQLEENKKATSNMLKAIEMGIITEATRTRMVELETEQSRLSVQLNAAKEDVVKIDREQIISYLELLQQGDIHDRDFQMELFKNFLVAVYVYDDNRMKLVFSCMGDQNSVEIPLETGEDPPDGGLSPDAKMFVLTPDSSTRSERHHTLCGAFFVLHCSRKTQKNFCPLPQPARNGLFCARMADHGRRNLCYNIKKQGSRRNRGCSYEPADGDRRRQQAGCRTVETAAEKGI

SEQ ID NO: 368 - protein, 604 aa, Unknown
  Description of Unknown: Integrase B369 sequence
  SM00857,G3DSA:1.10.10.2600,IPR036162,PF13408,PS51737, G3DSA:3.40.50.1390,IPR025827,IPR006119,IPR038109,PF07508, IPR011109,SSF53041,PTHR30461,Coil,PS51736, cd00338,PF00239
MKKVFVYHRVSSDQQLDGSGIARQAELLEGYLERTGICFEMDDPIPVVLSDQGVSAFKGLNISEGELGAWMEEVRKGMWDSSILVVESIDRFSRQNPFDVMGYINALMAHNVAIHDVMANIVISRSNSKDLPFVMMNAQRAYDESKYKSDRIRKGWAKKREQAFNKGTIVTNKRPQWIDVEDDKYILNHKAAVIKEIFELYKTGLGCPTIAKELQKKEGEQYKFNRAWTGELVHKILTNRRVTGKIFISETIRNHDDLDNPVTQKKYQMNVYPIVVNEDEFELVQDLLKSRRPNAGRITIKKTDNEEVLIKSNLFSGIARCMDCGGPMYHNVVRAKRTPKKGDPKVEEYRYIRCLSERDGLCNNKAMTYETVERFVVEHLIGMDISTVIKEQEFNPELEIIRIQIDQVKDQIANYENGIERRKSVGKVISFEMREELDDARLQLEELLARQASLATVNVDIPVLKNVDVNELFNVNNVDIRTRYENELNKIVSTVRLKRVDDSYIIDIKYKNNDLKRHVIFVEHKKKEQKLIGDVIIENIDGTILYSTSSFWIRVKDGAIRFQPTKDDLSIIDYHLLLNYVDGLERDNMVAVWMRHNINFLFDK

SEQ ID NO: 369 - protein, 604 aa, Unknown
  Description of Unknown: Integrase B370 sequence
  SM00857,IPR006118,G3DSA:1.10.10.2600,IPR036162,PS51737, G3DSA:3.40.50.1390,PS00397,IPR006119,IPR038109,PF07508, IPR011109,SSF53041,PTHR30461,Coil,PS51736, cd00338,PF00239
MIKIIGYARVSTTKQDLSRQKLKIKEFCENNNYELIEIIEDFGISGVVADRKGYIELQSKTYKDADMIVISELSRLSRQEDVTETVYNIQQIINKGLSVILLDSPSKIYEANKLLDITEILILTIKAWAAAQERLDIKKKNQDGKQALFQAYPYAVVDQKIPYGYKAVPNPNGKRPKYILEEVPEEVENIKRLFALVNSGKTLGAVARYFNERNITFRGYYSTVAILSNYIHSDIYRGIRRRTQRLGREEPYTIEVRIKPIISEEDFMKAQELIKNNYKNTPTGKVNHNPLKGIIRCRCGRAMTVKDKKPAAGISKLTYRCSCVDRKSHPDFCKYNIDEVSYDLTNEILYSLFKSMHTAEYINFFRNQTDNRVTELQEEIAGIEKRLSALYLDKENLSNESQDNANKFLLTTNPTLLNIIQEKQNQLDEKIKSIDKEIIRYKKSQSKKMADIERIKDNNGKEKLQNLSIEEQGELYHKYLERVNYIPVTTMQGYYIVQFLNGIKFYIAITKVRSIAMASLLLDNWTIDEKGIITANYDTLKSSDMKNFSIEMIRKTKTMTLQEYLKSDLAKERALHLDLSYRERYLEELHKAGLDGRLRPLKKE

SEQ ID NO: 370 - protein, 604 aa, Unknown
  Description of Unknown: Integrase B371 sequence
  PTHR30461:SF3,SM00857,IPR006118,G3DSA:1.10.10.2600,IPR036162, PS51737,G3DSA:3.40.50.1390,IPR006119,IPR038109,PF07508, IPR011109,SSF53041,PF00239,PTHR30461,PS00397, PS51736,Coil,cd00338
MCEEEIKNAGIYIRVSTDDQARAGFSLPEQKEKLLSLCEFKGYNVFKVYEDAGISAKDMEHRPKFQEMLNDVKTGKINYIVAYKLDRVTRSVRDLEELINILEKYNCYLVCDRDDVNTSTANGRFFVRMLTVLSQLEIEIVSERTKFGLNGAIKSGHLPGVVPLGYKKDGSKKTIIDETTRHIIERIFNLYLEGNSYQQISNIFNKEKVLNKSWHDTDIEKIINNRIYMGDYEQYKRIAKKIGRDTVIYMNVVEPIITRAMWEECQTQKLANQRTYTRTRTYLFFQKLVCPKCGRIMKCKGSGGKKKKYIYYNCEFCHFNLREDYVEEYMIKAIYEFLEFEQMCNSFFLPILADKKDKNTDLNLDKEIEGYIKQKERIKKAYLTGIVELKDFEEDLKKINEKLEILNNKKQELNELDVHTFTIEKVMARRDIEKISIDNGYKEKEFYKFEWDIKTKEEKQQFISKYIDNIVIDKTDTGSLDIKQINFRSSFIDKAVKLTQVGAYDYKLPFEVNHKQEMVLVSSPMKRKQVNKYLGYLREYFEIEYREDKGDRTENGMAVFDSAIPDNYELLKVIPIIDLNLFKGKDITFGLVFRPTIKEIINEK

SEQ ID NO: 371 - protein, 603 aa, Unknown
  Description of Unknown: Integrase B372 sequence
  PTHR30461:SF3,IPR036162,PS51737,IPR011109,PTHR30461, PF00239,G3DSA:1.10.10.2600,SSF144091,IPR006119,SSF53041, G3DSA:1.20.1540.10,PF01694,cd00338,IPR035952,SM00857,IPR025827 ,IPR022764,IPR038109,PS51736,PF13408,G3DSA:3.40.50.1390,
  CONT. FROM ABOVE: PF07508,Coil
MYEDIKTACLYVRFSSHNQTEQSIEGQTRVCRDFCKRHNIRIVEIYADRATSASKDIEKRVQFLKMIKDSEKGLFDAVIVYKLDRFARSRYDSATYKYRLKRNGVQLISATENISNDPEGIILESVLEGMAEFYSAELSQKINRGMRESAYKHNSIGGAIPLGYKIEDKKLVIDPKTAPIVKEAFEKYADGETVAEICRQFNARGYKTSKGTAFGKSSFTKIFRNERYIGVYTFHDYRAEDAIPAIIDKDLWDRVQLRVGKIKNAPARNKAKVVYLLSGKIFCGHCGSKMNGNCNAGNYCYYQCYGKKNGNVDCKKKNIRKEFIERLVAQDALSLLTDEYIEQIATIACEKNQHEIELDSALPTIRDRIHQVDLSLNHLLKAIESGSAPDMLVKRMGELEKEKKDLQAQAKKESEDIVELDKAQVIYWLEQFRGGSIEDEEFCRMLIDLFVNSVTVWDEDDNTYKVTVAYNLTSLPTKTYRLNKGGTLSDFASNAPPLEERYGSRTLLSGILMTALVSGILQCVLFPTSALLGASGIVFMLIMLSSLAGSKNGGIPITFILVGVLYLSQQVYSILFIQDNVANFMHIVGGICGTAFGFAVRKR

SEQ ID NO: 372 - protein, 602 aa, Unknown
  Description of Unknown: Integrase B373 sequence
  PTHR30461:SF3,SM00857,G3DSA:1.10.10.2600,IPR036162,PF13408, PS51737,G3DSA:3.40.50.1390,IPR025827,IPR006119,IPR038109, PF07508,IPR011109,SSF53041,PF00239,PTHR30461, PS51736,Coil,cd00338
MKKKFSSVPDPDIQDAVIYARYSSHSQRDCSIEQQVADCELFAQQNGLRVVKIYADRHLSGTTDNRPQFQQMLKDAAHGHWPFVICWKIDRFARNRYDSATYKYKLKKAGVRVLYAKESIPDGPEGILLESVLEGSAEYYSASLAQNIRRGMRFNAENCKVNSGSIPFGYCKGPDGRFAIHETNAEIVRDIFRKAAAGVPFVDIATELNNKGLKTSRGGRWNKNSFVLLKNESYIGVYHFSDIRIEGGMPAIIDPGTFLAANERMNANRRVRGRHHDGGDYLLTGKLKCAHCGSYMVGFSGTAKNGESHYYYGCQKRRRERACKKANVPREWIEKVVVKAALDYVLQPDVMEWITDAVMEYQEREAASSQLAALTAELEENQKATNNVMKAIEAGIITATTKQRLLDLETKAKDLKRAIELEKLSHVRLEREQILYWLEQFQGGSLQSQEFRRKVIDTFVSVVYLSDDHLRIAFNYSGQNRSEADFNLIMDAETASADYPINSLSLPLCPPHKKNPNLFPSGKGSDFFVCRISYRVIFISSLSSAAFFSMPPAYPVRLPFVPTTRWQGMMIEITLCPTAPPTACADIRERPRSAASCLASAP

SEQ ID NO: 373 - protein, 602 aa, Unknown
  Description of Unknown: Integrase B374 sequence
  SM00857,G3DSA:1.10.10.2600,IPR036162,PS51737,G3DSA:3.40.50.1390, IPR006119,IPR038109,PF07508,IPR011109,SSF53041, PF00239,PTHR30461,PS51736,Coil,cd00338
MYITVTLDPNGIYDAYLRKSRADMELEKLKKFDTLKQHEKFLKDRANQLGIKIRKIYREVVSGESIQERPEMQEVLKNVETGTIDGILVVEVERLTRGDAKDQGTVTQAFKYSNTKIITLNKIYDPNSDEDEEYFEFGLFMSRREYKTINRRMQRARIANVLDGKYCASEPPFGYKKVRVKYGKGYTLEPVSEEAEIVKEMYQKRADGMGYDIICNWLNTLDFKPKKSDVWTPATIKGMLSNPIYIGKIRWNSNKQKKILINGQIIKKRKKGNNEDLILVEGLHPAIISNELFDIVQGIKPNKASTKHNTELQNPLATLVKCADCGRSMQRRPYYDNKKQEPKLRRKYDIDKEKLRLCLREHKGEYSLRDIATALKVRKHCVDHWFASNQSKFTMPYADKWEELKKLLNINTTEFDKAITTYESNLIEPHEDTLICPKAHCTNIGSNLALVEQETIKALQEYISSQKELLATYNPAEEDDNVMFVSLSKELDKYNKQLDKAYELVEQGIYTPQEFTKRTKTIKDKITNTEKELNKYQLKLNKDRIEKLLPKIEKVIDSYYKVTSVEKKNKLLKSVISYIEYKKEKGGRGYESNFSIIIHPKF

SEQ ID NO: 374 - protein, 602 aa, Unknown
  Description of Unknown: Integrase B375 sequence
  PTHR30461:SF3,cd00338,SM00857,G3DSA:1.10.10.2600,IPR036162, PF13408,IPR025827,G3DSA:3.40.50.1390,PS51737,IPR006119, IPR038109,PF07508,SSF53041,IPR011109, PTHR30461,PS51736,Coil,PF00239
MKKKFSSVPDPDIQDAVIYARYSSHSQRDCSIEQQVADCELFAQQNGLRVVKIYADRHLSGTTDNRPQFQQMLKDAAHGHWPFVICWKIDRFARNRYDSATYKYKLKKAGVRVLYAKESIPDGPEGILLESVLEGSAEYYSASLAQNIRRGMRFNAENCKVNSGSIPFGYCKGPDGRFAIHETNAEIVRDIFRKAAAGVPFVDIATELNNKGLKTSRGGRWNKNSFVLLKNESYIGVYHFSDIRIEGGMPAIIDLGTFLAANERMNANRRVRGRHHDGGDYLLTGKLKCAHCGSYMIGFSGTAKNGESHYYYGCQKRRRERACKKANVPREWIEKVVVKAALDYVLRPDVMEWITDAVMEYQEREAASSQLAALTAELEENQKATDNVMKAIEAGIITATTKQRLLDLETKAKDLKRAIELEKLSHVRLEHEQILYWLEQFQGGNLQSQEFRRKVIDTFVSVVYLSDDHLRIAFNYSGQNRSEADFNLIMDAETASADYPINSFSLPLCPPHKKNPNLFPSGKGSDFFVCRISYRVIFISSLSSAAFLSMPPAYPVRLPFVPTTRWQGMMIEITLCPTAPPTACADIRERPRSAASCLASAP

SEQ ID NO: 375 - protein, 602 aa, Unknown
  Description of Unknown: Integrase B376 sequence
  PTHR30461:SF3,IPR036162,PS51737,IPR011109,PTHR30461, PF00239,G3DSA:1.10.10.2600,PF14287,IPR006119,SSF53041, IPR025378,SM00857,IPR025827,cd03770,IPR038109, PS51736,mobidb-lite,PF13408,G3DSA:3.40.50.1390,PF07508,Coil
MKQSDNTKITALYERLSRDDELNGESNSIVNQKKMLEKYALEQGFTNLRHYSDDGWSGTNFERPDWKRLLDDIENGLVGTVIVKDMSRIGRNYLQVGFYTDVFFREKGVRFIAISNGVDNTRSDSNEFAPFLNIMNEWYVRDTSRKIKEVIHAKGMDGKHLTSTAIYGYKKDPEDSNHWIIDEEAANVVRRIFNLVLEGKGPMQIARILYNDKVERPSYYLAMRGLGTCRGSCDMNEPYTWTASTISDLLRKPEYMGHTVNFRNYKDSYKDKNSKRADKKDWVIFENTQEAIVDENTWNIVQKIRETKHRPTVKGDFSPLTGLVICSDCGRPLYHHQTWGYEKKDKDGNPTGKWTNAQDYYRCSTYGLSSGKFATKCSGHYIRTAVLNELILDTIKYTCKYAKENKEEFAKKVEDSFNLRRVSSLKGIKSNITKKEKRSMELNNLIKKIYEDNVNGKLSDKRFQMMLSDYEKEQDEVDNAILALNEELEKYQTDSMRTENFMELVHKYTDFTELTAPMIYEFVDKIIVHEADKSTGERIQQVDVYLKYIGKLDVPMPELTPEERKEQERLRKKRAQSRNYRQRQKLKKQAEKEAREKANSEA

SEQ ID NO: 376 - protein, 602 aa, Unknown
  Description of Unknown: Integrase B377 sequence
  SM00857,G3DSA:1.10.10.2600,IPR036162,PS51737,G3DSA:3.40.50.1390, IPR006119,IPR038109,PF07508,IPR011109,SSF53041, PF00239,PTHR30461,PS51736,Coil,cd00338
MYITVTLDPNGIYDAYLRKSRADMELEKLKKFDTLKQHEKFLKDRANQLGIKIRKIYREVVSGESIQERPEMQEVLKNVETGTIDGILVVEVERLTRGDAKDQGTVTQAFKYSNTKIITLNKIYDPNSDEDEEYFEFGLFMSRREYKTINRRMQRARIANVLDGKYCASEPPFGYKKVRVKYGKGYTLEPVSEEAEIVKEMYQKRADGMGYDIICNWLNTLDFKPKKSDVWTPATIKGMLSNPIYIGKIRWNSNKQKKILINGQIIKKRKKGNNEDLILVEGLHPAIISNELFDIVQGIKPNKASTKHNTELQNPLATLVKCADCGRSMQRRPYYDNKKQEPKLRRKYDIDKEKLRLCLREHKGEYSLRDIATVLKVRKHCVDHWFASNQSKFTMPYADKWEELKKLLNINTTEFDKAITTYESNLIEPHEDTLICPKAHCTNIGSNLALVEQETIKALQEYISSQKELLATYNPAEEDDNVMFVSLSKELDKYNKQLDKAYELVEQGIYTPQEFTKRTKTIKDKITNTEKELNKYQIKLNKDRIEKLLPKIEKVIDSYYKVTSAEKKNKLLKSVISYIEYKKEKGGRGYESNFSIVIHPKF

SEQ ID NO: 377 - protein, 601 aa, Unknown
  Description of Unknown: Integrase B378 sequence
  PTHR30461:SF3,cd00338,SM00857,G3DSA:1.10.10.2600,IPR036162, PF13408,PS51737,G3DSA:3.40.50.1390,IPR025827,IPR006119, IPR038109,PF07508,IPR011109,SSF53041, PTHR30461,PS51736,Coil,PF00239
MARKKNIAAGQDAVIYARYSSHNQREVSIEQQVSECMKHAAELGLHVVGTYEDRAISGKTDNRPRFQQMMRDAEKGKFQAVVSWKSNRIGRNMLQAMVNEAKLDDYGVKVFYAEEDFDDTAAGRFALRNMMNVNQFYSENMAEDITRGLYDNASKCMANGRQPLGYKRGEDGRVVLDEANAAVVREIFTRVAAGDLFVDIARDLNAQGIKTSKGANWNKGSFQSICQNERYRGIYIYGDVRVADGIPRIVSDDLWYRVQEAMRMKKNPVGTRHRVGAEDYLLTGKLRCGHCGSYMTGVSGTSRNGELHYYYTCQKRRTEHACDKKNIRRDVIEPAVAQAIKMYCLTDDVIAWIADRTVEYWEKHDNDLQIEALEQQLEENKKATSNMLKAIEMGIITEATRTRMVELETEQSRLSVQLNAAKEDVVKIDREQIISYLELLQQGDIHDRDFQMELFKNFLVAVYVYDDNRMKLVFSCMGDQNSVEIPLETGEDPPDGGLSPDAKMFVLTPDSSTKKALYFVGSTVLFFLLKLVFGGCIASPAPFLGFCRRFLYNPQLLTLHRFQKGMFAGRFSAGCCIIPFNVRRKVELESNVELMPTININ

SEQ ID NO: 378 - protein, 601 aa, Unknown
  Description of Unknown: Integrase B379 sequence
  PTHR30461:SF3,cd00338,SM00857,G3DSA:1.10.10.2600,IPR036162, PF13408,IPR025827,G3DSA:3.40.50.1390,PS51737,IPR006119, IPR038109,PF07508,IPR011109,SSF53041,PTHR30461, PS51736,Coil,PF00239
MKDVEVIKARNTLSPRARTNFEKRLRVAAYCRVSTDTEDQLNSYKSQVEYYTELIKSKPEWSLAGIYADEAITGTQVKKREDFQRLINDCMNGDVDMVITKSISRFARNTLDTLKYVRMLKDKGVAVFFEEENINTLTMDGELLLVILSSVAQQEVENISANVKKGLKMKMQRGELVGFQGCLGYDYNPEDKTLTVNEEEAAVVRYIFQRYTEGAGGSVIAKELENLGYKTKRGSPKWADSTVIGIIKNEKYKGDILLGKTFTVDPISKRRLYNFGEEDQFYIREHHEPIISEEVFEAAQEILRRRAKPRSLNVDGKREKFSRKYAFSCMIECGFCGGTLTRRSWHSSSQYNKAIWQCVVSTKKGKKFCPESKGVDERTIERAFVESYRLLCQNNKDVLDEFMKRTEEALSESNAGKRLAKAEKDIHALEVKKNKLVDMRLEDTIDKETYDRKYLDLSSQIEQLQKECESLQDAAETESTMRKRVATFRQTLEQNEVLDTFDRHIFESIVEKVIVGGYDSNGNKDPYMIVFVYKTGFKNSVDGKNFKPLRKNSKENHSPAVLCSHASNEAESMCSDSSDDTCGVHHGICPHESLIFDVFKV

SEQ ID NO: 379 - protein, 601 aa, Unknown
  Description of Unknown: Integrase B380 sequence
  PTHR30461:SF3,SM00857,G3DSA:1.10.10.2600,IPR036162,PF13408, IPR025827,G3DSA:3.40.50.1390,PS51737,IPR006119,IPR038109, PF07508,SSF53041,IPR011109,PTHR30461,Coil, PS51736,cd00338,PF00239
MAKRTSVENSIITGVIYARYSSHSQKEESIEQQIEECTAFAVTNGISVVGIYADKAISGRTDRRNEFQRLMRDAEKRKFDVVIAYKSNRISRNMLNALQYESRLDSFGIKTLYAKEEFGNTAAGRFALRTMMNVNQFYSENMAEDIRRGLKDNAAECKVNGSLPYGYKKGEDGKYAIDEPRAAIVREIFSKVVDDVPYADIIRSLNDRGILTKTRKPFNKNSFNRMLRNERYIGIYEHSGVRVVGGVPAIISEEVFYAVQRKLQEGLNSDGAKRKSNSDYLLTGKLYCGECGSPMVGYAGTSRNGTLHYYYTCKSRGNDGCTKHNVRRDFIEQFVVDLTRACLSRADVTDWLVSGYIELKKQAQETSDVPVMEEELSSRKKALDNIMKAIEAGIFNETTSARMRELETEIHDLERSIALGKAMFEEPVDGERMRFYLEKLRNGMPDNQAYRKELLRTMVKAIRLWDDRIEIEYNFTGTDGDGNNYRVVTEFLKGDSGSASGVHTEPPQPHQIKETSMRMSLLFGVKTVVDSNRGRLETCRGKSAMPLLEADKGMALFPQPQLLQGYANADLQKLNAARWFCFNPRRPARRQANVPTPLRET

SEQ ID NO: 380 - protein, 601 aa, Unknown
  Description of Unknown: Integrase B381 sequence
  SM00857,G3DSA:1.10.10.2600,IPR036162,PS51737,G3DSA:3.40.50.1390, IPR006119,IPR038109,PF07508,IPR011109,SSF53041, PTHR30461,Coil,PS51736,cd00338,PF00239
MLNIIKLDPNGIYDAYLRKSRADMELERLKKFDTLKQHEKFLKDRAKQLGIKIRNTYKEVVSGESIQDRPEIQKLLKEVETGTVDGILVVEVERLTRGDAKDQGIVSQTLKYSNTKVITLNKIYDPNSEEDEEYFEFGLFMSRREYKTINRRMQRGRMANILDGKYCASEPPFGYRKIKLKQTKGFTLEPIPEEASVVKEMFKKRANGLGHDIICNWLNTLDFKPKKSDVWTPATIKGMLSNPIYLGKIRWNSNKTEKKLVNGQIVKTRKRNNSDIILVEGLHEAIVDQETFDIVQKIKPKNASTKRGMELQNPLATILKCAYCGRSMQRRPYYENKKQKPKLRRVYEIDKEKLRLCLREHKGNFSLNDIARELNVSKNCVDHWFASKQEKFSMPHADKWESLKELLNIKTSEFDKAIMTYEENIIEPHEDTLVCPKNHCINIGANLASVEAEIINGLQEYVSTQKTLLATYNPAEEGDNIMVVSLSKDLEKYNKQLDRAYELVEQGIYSSEEFSKRTKVIKDKINSTNKELNKYQSKLNKTRIEKLLPKIEEVIKSYYKVDSAEKKNKLLKSVVSYIEYKKDKGGRGYENNFSIVIHPKL

SEQ ID NO: 381 - protein, 600 aa, Unknown
  Description of Unknown: Integrase B382 sequence
  PTHR30461:SF3,cd00338,SM00857,G3DSA:1.10.10.2600,IPR036162, PF13408,PS51737,IPR025827,G3DSA:3.40.50.1390,IPR006119, IPR038109,PF07508,IPR011109,SSF53041, PTHR30461,PS51736,Coil,PF00239
MARKKNIAAGQNAVIYARYSSHNQREVSIEQQIAECTKHAAALGLRIVGTYEDRAISGKTDNRPRFQQMMRDAEKGKFQAVVAWKSNRIGRNMLQAMVNEAKLDDYGVKVFYAEEDFDDTAAGRFALRNMMNVNQFYSENMAEDITRGLYDNASKCMANGRQPLGYKRGEDGRVVLDEANAAVVREIFTRVAAGDLFVDIARDLNAQGIKTSKGANWNKGSFQSICQNERYRGIYIYGDVRVADGIPRIVSDDLWYRVQEAMRMKKNPVGTRHRVGAEDYLLTGKLRCGHCGSYMTGVSGTSRNGELHYYYTCQKRRTEHACDKKNIRRDVIESAVAQAIKMYCLTDDVIAWIADRTVEYWEKHDNDLQIEALEQQLEENKKATSNMLKAIEMGIITEATRTRMVELETEQSRLSVQLNAAKEDVVKIDREQIISYLELLQQGDIHDRDFQMELFKNFLVAVYVYDDNRMKLVFSCMGDQNSVEIPLETGEDPPDGGLSLDAKMFVLTPDSSTKKALYFVGSMVLFFLLKPVFGGLHCFACAVFRLLQAVPIQPPTFDFTPFSKRNVCRPFLADSCIIPFNVRRKIKVAFSGTIFVRLRS

SEQ ID NO: 382 - protein, 600 aa, Unknown
  Description of Unknown: Integrase B383 sequence
  cd00338,SM00857,IPR036162,PF13408,IPR025827, G3DSA:3.40.50.1390,IPR006119,PF07508,SSF53041,IPR011109, PTHR30461,Coil,PF00239
MAQKLYSYQRWSSAVQADGTTKARQTKSAEEYAQKNGLEIEEIVDAGVSGFKSANTNENGALGQFLRAVDEGLIACNSVLYVEALDRITRSEIDTALELFLGILRRGITVVTGMDNKVYTREAIKGNPVDLLTSILMFSRAHEESKTKQNRTNGNALALIDRFLKQGLPVNIKSVGSHPWWIDDSGSMYEAVKPHPVLWACAQLAMDKFMEGISVFKVTQMLNERFPHYYKGKAWAMANVRKLRLNKAVYGVREISVGGKTYVLPDYYPALISEGQFLRLQQIRTTTKYIGKVGEGRVVTDSEGNSKVIAERNNINLLSGMKLFRCGHCGGTMMAMRHGDTIRYLCEKGRGYHHDCKTWSLPGILVEHTLMLVTTIAYIELQQKGQGAKADYTQQINAMESTINGYSTQINKATKLAIALDDVDVDELAETIKELKAKRDNAIIELEVLQRKQLLANDSTFETIMMDFFTYAQYGVLQNPVHEYRSKLRDVVYSAISDVRAWKHDRRLFISFQIKGNDEYYNFSAGNTPYEWGCYVGALPFSQQELEVADGDVPEEVLERVRERYAELHAANMMMLHQAKELLSHVGYPELDSKMFWPRK

SEQ ID NO: 383 - protein, 600 aa, Unknown
  Description of Unknown: Integrase B384 sequence
  PTHR30461:SF3,cd00338,SM00857, G3DSA:1.10.10.2600,IPR036162,PF13408,IPR025827, G3DSA:3.40.50.1390,PS51737,IPR006119,IPR038109, PF07508,IPR011109,SSF53041,PTHR30461,PS51736,Coil,PF00239
MIDNCVRAVFYARVSTQEEEQLKALPKQVEECKDIIASKGWRLIDGYVDEGKSGTKKDGRKAYIKLLEDMQEDKFDIVVVKSQDRLQRNTFDWYKFTDLLNKNNKRLYLYMDNKFYEPSEDALITGIKAILAEEYSRDLSKKLNNSNKRRIEKARAGEEVSAMGNGQTYGYQIVNGKWVVDESQREVVRRMYELYTELHSVRKVRDALNEQGYRNQRGNLFTDENISRIVKNVMHKGWVILNRHHRDFDSKEIIEKSEEEWVIVKNDHEPIVSEELWDAVNNEIQSHRNRGNSGSRGKRGGTDPLSGKMICNCCGRVLWKHASQGSYKSKEGRKYTYKRYTQWYCSGKMGRGELACTDPATISGVKLQKYLVEMSDMFLDYSTVEYSKNLLKKRTISWLEDLRDKLTTPNDNGKIEQDLKALEGKKGKLIDLYTDELISKEEFKSRSVDLDAEIEKKRALLVPVEENPDIKAIEDTIANIDAEIEVLFEDEAMVEEKKVQFIQEHIKKIYVSKNSDVFIVLDNVAGAFLFIDKEDTRIEVVPVAEYNPEELSEEGITENDFVPFDRESMPQHHGPKHFHPSGSQTAPRCCFRDRFSCDQP

SEQ ID NO: 384 - protein, 600 aa, Unknown
  Description of Unknown: Integrase B385 sequence
  SM00857,IPR036162,PF13408,IPR025827,G3DSA:3.40.50.1390, IPR006119,PF07508,SSF53041,IPR011109,PF00239, PTHR30461,Coil,cd00338
MAQKLYSYQRWSSAVQADGTTKARQTKAAEEYAQKNGLEIEEIVDAGVSGFKSANTDESGALGQFLQAVDQGLIASNAVLFVESLDRITRDEIDTALELFLGILRRGITIVTGMDNKVYTREAIKGNPVDLLTSILMFSRAHEESKTKQNRTNGNAVALIDRFLKQGLPVNIKSIGSHPWWIDDSGSMYEAVKPHPVLWACAQLAMDNFMEGVSVFKVTQMLNERFPHYYKGKAWAMANVRKLRLNKAVYGVRELSVGGKSYVLPNYYPALISEGQFLRLQQIRTTTKYIGKVGEGRVVTDEEGNSKVIAERNNINLLAGMKLFRCGHCGGTMMAMRHGDTIRYLCEKGRGYHHDCKTWSLPGILVEHTLMLVTTIAYIELQQKGQGDKADYTQQINAMESTINSYSTKINKATKLAIALDDIDVDELAETIKELNANRDNAIIELEVLQRKQLLANDSTFETIMMDFFTYAQYGVLQDPVHEYRSKLRDVVYSAIGDVRAWKHDRRLFISFQIKGNDEYYNFSAGNTPYEWGCYVGALPFSQQELEIADGEVPDEVLERVRERYAELHAANMMMLHQAKELLSHVGYPELDSRMFWPRK

SEQ ID NO: 385 - protein, 600 aa, Unknown
  Description of Unknown: Integrase B386 sequence
  IPR036162,PS51737,IPR011109,PTHR30461 ,PS00397,PF00239,G3DSA:1.10.10.2600, IPR006119,SSF53041,cd00338,SM00857,IPR025827,IPR038109 ,PS51736,IPR006118,PF13408,G3DSA:3.40.50.1390,PF07508,Coil
MRCGVYVRVSTDDQRDNGYSIDSQLRMIKEYCEKNEYDIVDVYNDAGHSGKDLMRPEMQRLLKDIKSKKIDKLIAIKVDRLTRNNYDGFWLLNYCEEHDVKIELILEPYDVSTANGEMIFGMNLVFGQRERKEIGARTKRAMEEMALERIHPSKAPYGYIRNKETGHLEVEPIEAEVVKEIFELCKQGNSTRSIATIMKDNNAYLKQGKWKSDRVYKILTNSIYIGIFEYGKYKRKSQDILRVENYCEPIIDEVTWNATRNVLVKNKHSNYGEYIHLFSGLVKCPICGEIMSSSESFKYPSGKQKVYYHLRCKNHNCSGFGLHYNTEKIETKLKQVLEELTLFMLSMDNEIITCNSTKSDDVKDIEKAIEKLKLQEKRLVDLYLSSNLDVETINHKNDVIKKEIDKLNQKKVRLDPDNNSKEYTVELVKKLGCTEKNNTLFFTNIKNIGFAFLYDLLSRESKRDMIHRLISMIEIKRDKNYNIEIKDIKFTDEFITKSCKEYLKYLNTIINDNNIGIKFHKEINEIELKNMESNYDILSIKKMKNKEYSNKFLEEFISKSQEHLYIDGIVSCPYTEGNVIKDILILVPRLVPKNELINTI

SEQ ID NO: 386 - protein, 599 aa, Unknown
  Description of Unknown: Integrase B387 sequence
  PTHR30461:SF3,IPR036162,PS51737,IPR011109,PTHR30461, PF00239,G3DSA:1.10.10.2600,IPR006119,SSF53041,cd00338, SM00857,IPR025827,IPR038109,mobidb-lite,PS51736, PF13408,G3DSA:3.40.50.1390,PF07508,Coil
MIDNCVRAVFYARVSTQEEQQLKALPKQIQENRDKIREKGWVLVDGYVDEGKSGTVIKRRDEYQRLLEDMELNKFDVVVVKDQERLQRNTRDWYNFIDRLVQNKLKLYFYLDNTFYSPDNALITGIKAIMAEEYSRNLSKKMNNSNKRRIEKARAGEEVSAMGNGQTYGYSIVNGKWVVDESQRELVKKMYEFYTELHSIRKVRDALNEQGYRNQRGNLFTDENIGRIVKNVMHKGWVILNRHHREFDSKETIEKLEDEWVIVKNDHEAIVSEELWDAVNDEIQSHRNKGNSGTRGKRGGTDTLSGKMVCNCCGRVLWKHASQGSYKSKEGRKYTYKRYTQWYCSGKMGRGELACTDPATISGVKLQKYLVEMADMFLDYSTVEYSKNLLKRRTISWLEDLRDKLTTPTDNGKIEQDLKALEGKRGKLIDLYTDELISKEEFKSRSVDLDAEIEKKKTLLVPVEENPDIKAIEDTIANIDAEIEALFEDEAMVEEKKVQFIQEHIKKIYVSKNSDVFIVLDNVAGAFLFIDKEDTRIEVVPVAEYNPKELSEEGITENDFVPFDRESMPQHHGPKHLHPSGPQTAPRCCFRDRFSCDQP

SEQ ID NO: 387 - protein, 599 aa, Unknown
  Description of Unknown: Integrase B388 sequence
  PTHR30461:SF3,IPR036162,PS51737,IPR011109,PTHR30461, PF00239,G3DSA:1.10.10.2600,IPR006119,SSF53041,cd00338, SM00857,IPR025827,IPR038109,PS51736,mobidb-lite, PF13408,G3DSA:3.40.50.1390,PF07508,Coil
MIDNCVRAVFYARVSTQEEQQLKALPKQIQENRDKIREKGWVLVDGYVDEGKSGTVIKRRDEYQRLLEDMELNKFDVVVVKDQERLQRNTRDWYNFIDRLVQNKLKLYFYLDNTFYSPDNALITGIKAIMAEEYSRNLSKKMNNYHEHRIEKARAGEEVPAMGNGQTYGYQLINGKWVVDESQRELVRKMYELYTDLHSVRKVRDALNEQGYRNQRGNLFTDENIGRIVKNVMHKGWVILNRHHKEFDSKETIKKLEDEWVIVKNDHEAIVSEELWDAVNDEIQSHRNKGNSGTRGKRGGTDPLSGKMVCNCCGRVLWKHASQGSYKSKEGRKYTYKRYTQWYCSGKMGRGELACTDPATISGVKLQKYLVEMADMFLDYSTVEYSKNLLKRRTISWLEDLRDKLTTPNDNGKIEQDLKALEGKRGKLIDLYTDELISKEEFKSRSVDLDAEIEKKRALLVPVEENPDIKAIEDTIANIDAEIEVLFEDEAMVEEKKVQFIQEHIKKIYVSKNSDVFIVLDNVAGAFLFIDKEDTRIEVVPVAEYNPEELSEEGITENDFVPFDRESMPQHHGPKHLHPSGPQTAPRCCFRDRFSCDQP

SEQ ID NO: 388 - protein, 599 aa, Unknown
  Description of Unknown: Integrase B389 sequence
  PTHR30461:SF3,SM00857,G3DSA:1.10.10.2600,IPR036162,PF13408, PS51737,IPR025827,G3DSA:3.40.50.1390,IPR006119,IPR038109, PF07508,IPR011109,SSF53041,PF00239,PTHR30461, PS51736,Coil,cd00338
MNVYRTREILKTCSIFDMKLKVAFYARVSTESEDQQVSIHHQDEYYRNFIAQNKNWVFVGAYIDNGISGIRTEKRDEFQRMMADAKTGKIDMIVTKEITRFARNTLDSIRYTRELLMYGVCVWFQNDNINTIDEDSELRLTIMSGIAQDESRKLSNRIKFGHAQSIKNGVVLGARIYGYIKKDGKLTIDPKTAPMIKEIFEKYSTGEWSTSTIEKYLYKKGYRNYKGGKLSRDNIKKIIKNPKYKGYYCGGKVKVVDMFTKKQEFLPEDEWTMYKDDGNHVPQIVDESVWNKANVIMQTRSDAIKSHRTSFKQNNLFTGYIFCGNDGAPYWMKQHTIRGREDARWVCSYRIKNGAQSCNSFGIREKELRIMLADLINESGDIQTAIEKYISLVEKNMDFSNDGVEISRLKNMILQIEKKKDRLLDLNLDGIITNSEYLEKNEKFKNEIQDISNKLSELESKEEANKDSHLKLKEIGKILNDLQGVGPEDITKTVLGEFLDKIVINPKHPQECEILFFLKTGDVKKKSIIERDKQSCSEYFFLNKFSERHAVFYRKIYFRINSTASTYIRALIFFSFALPVIRLMATYVIIPMEIPSEML

SEQ ID NO: 389 - protein, 599 aa, Unknown
  Description of Unknown: Integrase B390 sequence
  PTHR30461:SF3,IPR036162,PS51737,IPR011109,PTHR30461, PS00397,PF00239,G3DSA:1.10.10.2600,IPR006119,SSF53041, cd00338,SM00857,IPR025827,IPR038109,PS51736, IPR006118,PF13408,G3DSA:3.40.50.1390,PF07508,Coil
MSTNKELREGVADKAKTCFLYVRVSTKMQVENGESIEAQLYDLRDYAKRNNLRILHEYIDDGYSGKNITGRPHFQEMMEEIKSGVRVNYVLVFKLSRFGRNAADALSSLQLMQDYGTNLVCVKDGINSEAQMGKMMIAFMSAFAEMERENILVQTMAGREQKAREGKWNGGQAPYGYKLVKDEKGKGHLEIDEDEAEIVRIIFHEYTKKGKGVMALASWLNAQGYRKNVRGNGKYEHFVPTFLKNVLCNPVYVGKIAYGRRRTTPVKGKRNEYRMIKQSDYDVYDGEHEAIIDEATWNAAQERMAEESHPFPEAKTGEHVHLLTGMLICPVCGRKMIANVSHGKRKKDGTVGKSTYAYACKYSKKQFGPSCTFTRQFKQEYINREVIEVIARTAYSDIFEERVRDELDAAVDIEKLEADVERIGKALDNNKAARRMLSRKLDSLDVSDRSYERKYEDMQARLDKLYDECADIEAAFGNAESKLESAKEKQVTTARIYEMLDEFREHFDEYDPVRKKEILRQVVDSVEINPDANPKKGDTIVTRVRFRCPVSFYPTLPEEAYDALGIKEFNRLETTEYVSENNSRVDEDTVETVAILGRR

SEQ ID NO: 390 - protein, 599 aa, Unknown
  Description of Unknown: Integrase B391 sequence
  PTHR30461:SF3,SM00857,G3DSA:1.10.10.2600,IPR036162,PF13408, IPR025827,G3DSA:3.40.50.1390,PS51737,IPR006119,IPR038109, PF07508,IPR011109,SSF53041,PTHR30461,Coil, PS51736,cd00338,PF00239
MNIYYVREKLRNCSIYDIELNVAYYARVSTEKVEQQASIKHQEEHFEELIHSNNRWKFAGSYIDDGISGIHADKREEFQRMLRDAKLGKIDMIITKEISRFARNTLDSIQYTRELLSYGVCVWFQNDGINTIDEDSELRLTIMAGVAQDEIRKLSSRIKFGHAQSIKNGVVLGHRMYGYSNHQGKLELIPEEADMVRMVFRDYASGMSTPRIEKKLWNMGYRSFKGGKISRDVIKNIIRNPKYKGYYCGGKVKVVDMFTKKQEFLPQSEWIMFKDDGSRVPQIIDETTWEKANAYLRERGEAIKSRRTSFKNENIFTGKLFCANDGAPYWMKQHYIRGKEDVRWVCSYKIKNGAASCDSFGLAESELKEVIAELINKSSENIDSILEEYFEILQSSIKNIPDNKNEISRLEKQIDLLKQKREKILEYNLDGKISDDEFISRNKEYVKQIKQIESHILEIQNTKSPEPVEIQLSAIKEQLEKFKGVNPKDINRQIVNELFEKITVEPLAATCATLTFQLRSGSIEKWGFPLRRSDDMIFTIYPPTLPFCLEVRFPLYPSVSGTPSSFATSNLKRFNAPFASGTAALLEEVLFDIIIFLLG

SEQ ID NO: 391 - protein, 599 aa, Unknown
  Description of Unknown: Integrase B392 sequence
  PTHR30461:SF3,cd00338,SM00857,G3DSA:1.10.10.2600,IPR036162, PF13408,PS51737,G3DSA:3.40.50.1390,IPR025827,IPR006119, IPR038109,PF07508,SSF53041,IPR011109,PTHR30461, PS51736,Coil,PF00239
MSSVETTAVVYARYSSHGQTEQSIEGQIAAAQKYAEQHGYTIIHIYADRAMTGRNDDREEFQKMLSDTATRQFGVILLWKIDRFGRNREEIAFNRYRCKKNGVRVERVAEDVPDGPEGVILDSVLEGMAEYYSLQLAQNVRRGQRESAKKSQTVGGCKIIGYNVNSDTKRYEVDPKTAPFVTEVFKRYANGETISEIVAWLNAQGVRTTRGGEFTVNSLHRLLKNEKYTGVYIFHDIRNEGGMPALIDRATFDKAQEMLKVNRRAPARVWSKTEYLLTDKLFCGHCGTMMVGESGHGRNGTKHNYYTCWNRKKKKTCDKKPIRQDVIEPLVLRAIGKLLENPATLENIADQVWAAYERSDTSGDTIKALDKQIADVDRALSNVMKAIEMGIINEMTKARMDELTDQKQALSAARAEAGLAGGFKLTRDMILFFLQDMAALDRSNRDSQKRLIKTFVNAIYLYDDHFNIAFNYTDNGKMTVRMQEIDDAASGDVFGRCAQSPAKDRQCKADGLFVFIYRKISGKQVGQTANTVLPVLCMCCVLLMGLPVGVSLLSHQNTLADVVAVLRYAGSGDNCRGEHCSPASLTELLLFRDGYSRKK

SEQ ID NO: 392 - protein, 599 aa, Unknown
  Description of Unknown: Integrase B393 sequence
  PTHR30461:SF3,SM00857,G3DSA:1.10.10.2600,IPR036162,PS51737, G3DSA:3.40.50.1390,IPR006119,IPR038109,PF07508,IPR011109, SSF53041,PTHR30461,PS51736,cd00338,PF00239
MNIQKTAPTPKLVTMIPADPQMTERDLRKKHLRVAPYCRVSTDKEEQLSSYEAQIEYYTEKIDANPDWTMVRLYADEGISGTSLEHRKGMQQLIEDCKAGKIDLVLTKSIARFARNIVDCLSVIELLKNLNPPVGVKFEADNIYTLDSNGRMILTILASVAEEESHSKSIIMNWSIDRRFSRGLFLTPALLGYDKDEEGNLVINPEEAQTVKVIYYLYLNGYSLTEIATLLMEYSRKTKLGRVEWNPGTLAGVLANERHCGDVLARKTFTPNFLTHKSKKNNNDRTQYRQKNHHEAIVSREVFNAANHLRASRNYSKKDRPLPVLSVVEDGILRGYVPFDKDWTGFSAEEYREASESVMKEPDVTVTADVKKRLDLTGYEIVRVQYFSTMQNPAMTISNGRLRFNTACLKKFENVEYVELLLNSVERCIAIRPCDKNNPNAIRWGRLKEGRWCASTLGCRGLAKTLFDIMEWDEDLRYRFRGQFLEQGDNKMMLFAFDEPEMIKVEEIVLPPKENTEEDEGETVKKKIYIFPPEWAGTFGQPITSIAQVGILRQEHYAGNWDVFRPATEIEEMNIFTAESLNELLREAEKIMEGWTDYR

SEQ ID NO: 393 - protein, 598 aa, Unknown
  Description of Unknown: Integrase B394 sequence
  PTHR30461:SF3,IPR036162,PS51737,IPR011109,PTHR30461, PF00239,G3DSA:1.10.10.2600,IPR006119,PF14287,SSF53041, IPR025378,SM00857,IPR025827,cd03770,IPR038109, mobidb-lite,PS51736,PF13408,G3DSA:3.40.50.1390,PF07508,Coil
MQSDKKQKQLTGITALYCRLSRDDNTDRESNSIANQKKMLQAYAKENHMGSTKFYVDDGYTGTNFNRPGFQELLDDIEMGYVSTIIVKDMSRFGREYLQVGYYTENYFPDHNVRFIAINDNVDCVDGATDMDDFIPIKNIMNELYAKDISRKVRSAHNTRGRAGEPLSQPPYGYVKDPQDKKRWIIDPEAAAVVREIFKLYLDGNGEDTIARIMQDEQHLNCTAYWASKGINRGGKKSQPNPYKWKSSTIHGILTRQEYCGDVLNFKTHSKSFKNHRRIDNPKEDWMVFEDRHEAIVERDTYIKVQKRLKSTHQRAPKEANGPKSIFCDILRCADCGSKMWYHTNTQNKDIHYFSCSNYVKDYRGTCLTRHYIRADAVEAVVEMELRRLAEYLVADENRFAEILARKSNKQYESEKKAAASELRKSEMRIEMIPKLLKSLYEDKVDGKTTEENYSILSSEYADEREQLKKKILKLRKKLAEMGEKENEREEFIRAIRKFMEMRTLTKQVLNELIDHIDVYETQGTGKNKTQRIVIYYKFVGYLDIDPTQCHPNYTADIREGVAVEYVSCEPSDGQKELFPEQYGVEDDSFEEEETEQA

SEQ ID NO: 394 - protein, 598 aa, Unknown
  Description of Unknown: Integrase B395 sequence
  PTHR30461:SF3,cd00338,SM00857,G3DSA:1.10.10.2600,IPR036162, PF13408,PS51737,IPR025827,G3DSA:3.40.50.1390,IPR006119, IPR038109,PF07508,IPR011109,SSF53041,PTHR30461, PS51736,Coil,PF00239
MEIIKIPKKEGIIDRTTGKVLNRKLRVAAYARVSTMGAEQLNSYESQKKYYYEKINNNPEWQYVDIYADEGISGTTDYRRASFMKMIQDALSGKIDLILTKSISRFGRNTMDVLKNVRLLRDNNVAVLFEENNLNTLDTKTSEMLLTTLSAVAQQESENISEHVKLGLQMKMNRGELIGFNRCYGYRNENDKLEIIDEEAEVVKFIFDKYCDGHGANGIAKMLTEQGIKSPKGNNKWNDSTIRGILRNEKYKGDVLQGKTYTADPLSHKRYKNLGEADQFYVSEHHEPIISPERFDMVQEILKERCGARANGRRIGNVGRKFAFSSRIRCGFCGNCFTRRTVVGKDREKIPSWSCTSFAKNGKENCTDSKTIREEMIKEAFVDSYKLLSSNTNFETDEFLNLMQDTMNENNKQDELERYKKEFSNIKSKKSKLIDLMVEDKISENDYNEKVEKYNRKLEILENKIEQLKLLAEDKKSISEGLQKVKELLNSKDIMDQFDQEIFNAIVDYIIVGGYDENGLIDPYLIRFILKREFDLSVPKDVSDEVVIQNNKIDLNSNNVLVDFINTRKYFSYERDENGKLNKVLRNGLRIRVECDIT

SEQ ID NO: 395 - protein, 597 aa, Unknown
  Description of Unknown: Integrase B396 sequence
  PTHR30461:SF3,SM00857,G3DSA:1.10.10.2600,IPR036162,PF13408, IPR025827,G3DSA:3.40.50.1390,PS51737,IPR006119,IPR038109, PF07508,SSF53041,IPR011109,PTHR30461,Coil, PS51736,cd00338,PF00239
MGKKQKATGGNAVIYARYSSHNQRDVSIEQQVEACRKHAAELGLTVTATYEDRAISGKTDKRPSFQRMMRDAEQHKFAYVLAWKSNRIGRNMMQALVNESRLVDCGVKVFYAEEDFDDNAAGRFALRSMMNVNQFYIENMAEDVKRGLYDNAKKGLVNGSLPLGYKRGADGKPEIDEPKAAIVREIYTRVAAGELFASIAADLNARGIRTARGREWNKGSFHVLCHNDRYRGIYMYGDIRIPGGMPRIISDELFYDAQEAYGMKKDNRYGRARHGAENYLLTGKLYCGHCGSYMVGISGTSKTGEMHYYYACQKHRLEHTCEKKAIRRDVIENAVARVIMMYCLDDETIDFIVDSTIAYFKQKDHELHIEAMENELAAVQQAISNLMKAIEAGIITPTTRTRLLDLEEQQAKLSAKINTAKAERVEIDRDDLIAGLQLFRTGDIKNKKFLAKLFNTFLLAVYLYDDNRLKIVFSFTGNHNNIEIPLELDNDCPDSESGPYETEVRMSHLECRKNSGTPPSSGGAEKGDGCSGGRFVRTAPLPPHQLTSGPFRPEVLFYPDAVQRRISWSTPSVKWQRCWAFRHPPCATMTRKVCCPL

SEQ ID NO: 396 - protein, 597 aa, Unknown
  Description of Unknown: Integrase B397 sequence
  SM00857,G3DSA:1.10.10.2600,IPR036162,PF13408,PS51737, IPR025827,G3DSA:3.40.50.1390,IPR006119,IPR038109,PF07508, SSF53041,IPR011109,PTHR30461,Coil,cd00338, PF00239
MAYRKITDIRDTIGMRAVFYARVSTAEEEQLNAIELQIEENRGCIKDHGWKLVGEYIDRSKSGTMVKGRDDYQRLYEDLYEDLFDIVVIKDQERLQRNTLDWYLFINRVVQTGKLLFMYMDGKFYSPDDALITGVRAIIAEEFSRNLSKKLHNYHDHRIEKARQGQEIALQGSGNVYGWDKKDGKYYINPEQARVRRLMCEGIMARKGSTLIAKELNDAGYRNTVGKPWKPMDIPKFVYDCKNVGTMIINKERHDFESKQTIKLPKEEWVYVENALPPIVTQEEWDLICKIHEERVIATGSDRRGKKTSGYSFSGKLVCGICGAPYWRKQRVSKDEYWVCSTKQTKGRRTRKRDSTMGKAGEINPLGCDNKNISYNSLMEIMGVVSERLQANTDTIKQDMINWLTKLRKQLLEANGGHTEADLQRELSRKSKLLDAYLDGILNKQEYQKKAEELDERIIQLKTETEKNKANSGDIAEIDKVLANIDEEVARYVDGNEKLKVEYLLEHLEQVQIFPDKVIVIVPILSEGIVVEKTQYVSREKRSRQNDLFENDLWSVQPNGRRIFYFWIQRKGACTGSLACRLSDRGTGHLSKYDGER

SEQ ID NO: 397 - protein, 597 aa, Unknown
  Description of Unknown: Integrase B398 sequence
  cd00338,SM00857,IPR036162,PF13408,IPR025827, G3DSA:3.40.50.1390,IPR006119,PF07508,SSF53041,IPR011109, PTHR30461,Coil,PF00239
MKQKLYSYQRWSSAVQSDGTTKARQTFAAEEYAKRNDLEVVEIVDAGISGFKSINSKSGALAKFLEAVDEGLIPNNAYLFVESLDRITRDEIDVALELFMGILRRGITIVTGMDNKVYTHAGIKGNPIDLLTSILLFTRAHEESKTKQNRTNGNALAMIRRFQSGLPTTIKAVGSHPWWIDCSTDKFEAVRRHPTLWQPAQDAINMFMEGVSVFKVVQYLNEKYPHAYKGKAWKTANIRKLRFNKAVYGLREITVDGTDYALPNYFPSLITEGQFLRLEKIRETTKYIGKVGEGKTVTDEEGNSKVIAERNNINLLAGMKLFRCGHCGGTMMAMRHGDTIRYLCEKGRGHQNDCKTWSLPGILVEHTLMLVTTIAYINIQRKGGVDKEDYTAQISSTEKLIEDISKKISNGTSLVLAGLGDVDEVIEQLQELKDTRSNLVLELEVLQRKQLLAEDQTFEGLMMDFFTYAQYGVLQDPVHEYRSKLRDIVYSSIGDVRAWKVDRRLMISFQIKGDDEYYTFSAGDEPYNYIFYYGSPVQLGEDLSPQGNYELPEEVKQRIREHSDVYEDSMKLLGTANALLSVVHYPDLDGRLFWPRK

SEQ ID NO: 398 - protein, 597 aa, Unknown
  Description of Unknown: Integrase B399 sequence
  PTHR30461:SF3,IPR036162,PS51737,IPR011109, PTHR30461,PS00397,PF00239,G3DSA:1.10.10.2600, IPR006119,SSF53041,SM00857,IPR025827,IPR038109, PS51736,cd03768,IPR006118,PF13408,G3DSA:3.40.50.1390,PF07508,Coil
MPKKRGSNEEFLNPGARRFRPPEVMPRKLKAAIYVRVSTRYQVDKDSLPFQKEELINYIKYALNIEDYEIFEDAGYSAKNTSRPKFQEMMSRIRNNEFTHLVVYKIDRISRNLLDFAQMYEELQKHNCSFVSKVEQFDTSTAMGEAMTRIVLVFAELERKMTGERVTAIMFSRAEKGLWNGAPIPIGYKWSEEKKYPVVDPEEAKVVRYIFDRYISLESALKVSYDLAANSVKTKRGGEWTSKTVRDVIRNPFYKGTYRYNHKTQTGTEKPLSEQIIIECNHEPIISEEVWSRANAIMDTNAERSVAHLRNNIKYTHIFSKMLKCWYCGMTMGAGLDRPRSDGYRPSKYYCTSHNRKQGCPNRYISDIIIGPFVLNYLANMVQAAQSVSKRTRADTLEKMLLRGKFFSNVDHIEREGLLTTFNNMVYGVARADFDPKKDQQDEPNNAELDLLASEREKYIRALDRLQSLYLFSDDGISEKDYIVQKGELEDKLESVNRRIAEIQGEAPEDDADLLQKATRFYIQNELVKKRSLDFKKAVSVFDKESLKDFFSSVIDTMTVKDGRVKAIRFKNGLTNVFVYKDETGPEEHESAVEASE

SEQ ID NO: 399 - protein, 596 aa, Unknown
  Description of Unknown: Integrase B400 sequence
  IPR036162,PS51737,IPR011109,PTHR30461,PS00397, PF00239,G3DSA:1.10.10.2600,IPR006119,SSF53041,cd00338, SM00857,IPR025827,IPR038109,PS51736,IPR006118, PF13408,G3DSA:3.40.50.1390,PF07508,Coil
MRCGIYVRVSTDDQRDNGYSIDSQLRMIKEYCEKNEYDIVDVYNDAGHSGKDLMRPEMQRLLKDIKSKKIDKLVAIKVDRLTRNNYDGFWLLNYCEEHDVKIELILEPYDVSTANGEMIFGMNLVFGQRERKEIGARTKRAMEEMALERIHPSKAPYGYIRNKENGHLEVEPIEAEVVKEIFELCKKGHSTRSIATIMKENNAYLKQGKWKSDRVYKILTNSIYIGIFEYGKYKRKPQDVLRVENYCEPIIDEVTWNATRNVLVKNKHSNYGEYIHLFSGLVKCPICGEIMSSSESFKYPNGKQKVYYHLRCKNHNCNGVGLHYNTEKIEAKLKQVLEELTIFILSMDNQIITCNSTKSDDVKDIEKAIEKLKLQEKRLVDLYLSSNLDVETINHKNDVIKKEIDKLNQKKIRLDPDNSSKEYTVELVKKLDCTEENDTLFFTNIKNIGFTFLYDLLSREAKRDMIHRLISMIEIKRDKNYNIEIKDIKFTDEFITKSSKEYLKYLNTIINDNNIGIKFHKEINESELKNMKSSYDILSIMKMKNKGYSDEFLEDFITKSQEHLYIDGIVSCPYIEENVIKDILILVPKNELINAI

SEQ ID NO: 400 - protein, 596 aa, Unknown
  Description of Unknown: Integrase B401 sequence
  PTHR30461:SF3,IPR036162,PS51737,IPR011109,PTHR30461, PS00397,PF00239,G3DSA:1.10.10.2600,IPR006119,SSF53041, cd00338,SM00857,IPR025827,IPR038109,PS51736, IPR006118,PF13408,G3DSA:3.40.50.1390,PF07508,Coil
MPKIAIKKVAIYIRVSTVHQVDKFSLPMQRRDLSTYSELILGIPDYEIFEDAGYSGGNTDRPAYQNMMTRIRKGEFSHLLVWKLDRISRNLLDFAAMYEELQRLGVAFVSKTEQFDTSTAMGVAMMQIIMVFATLERRTTAERVTATMLSRAHSGQWNGGRVPYGYNYDADTKTFSINEDEAKNCRTIFNTYLKEKSIVVVTQYMNSLGAKTRNGIDWTPGTVWKILSNPFYAGIYRYNRYSGTKNRIINDKNEWILVKNHHPAIITQDAYEQAATTLLENGTQRNTLGRLHHAKQPYVFRDLIYCGLCKTRMVASPGNKNAHGARIPIYTCPLRRTSSCDNQSTNEYAIGEFVLNYIINMLWAKKEFSSIKSPTELEKRLLRGSSFCKIAYIEPDGLNDFYNLLTHYKRGSSFIFTASKPHKKKAPENSEVAALRKEQEQQERALSRLQNLYLYDESAISEKDFILRKHDIMAKLDEINRKLGMMNTAAVATLSDSDFVAKASYLLISKELQSKKYIYYRDFAESVSPDVLKTYMRSIIDSIFLVYGHVTAITFKNGLTHRFAYSAPLSPRFSHKSGYNLDKQKQAEQENHQNTE

SEQ ID NO: 401 - protein, 596 aa, Unknown
  Description of Unknown: Integrase B402 sequence
  cd00338,SM00857,IPR006118,G3DSA:1.10.10.2600,IPR036162, PS51737,G3DSA:3.40.50.1390,IPR006119,IPR038109,PF07508, IPR011109,SSF53041,PTHR30461,PS00397,PS51736, Coil,PF00239
MRCGIYVRVSTDEQRDNGYSIDSQLRMIKEYCEKNEYDIVDVYNDAGHSGKDLMRPEMQRLLKDIKSKKIDKLVAIKVDRLTRNNYDGFWLLNYCEEHDVKIELMLEPYDVSTANGEIIFGMNLVFGQRERKEIGARTKRAMEEMALERIHPSKAPYGYIRNKETGHLEVEPIEAEVVKEIFELCKQGNSTRSIANIMKDNNAYLKQGKWKSDRVYKILTNSIYIGIFEYGKYKRKSQDILRVENYCEPIIDEVTWNATRNVLVKNKHSNYGEYIHLFSGLVKYPICGEIMSSSESFKYPSGNQKVYYHLRCKNHNCSGFGLHYNTEKIETKLKQVLEELTLFMLSMDNEIITCNSTKSDDVKDIEKAIEKLKIQEKRLVDLYLSSNLDVETINHKNDVIKKEIDKLNQKKERLDPDNNSKEYTIELVKKLDCTEKNNTLFFTNIKNIGFVFLYDLLSREAKRDMIHRLISMIEIKRGKNYNIEIKDIKFTDEFITKSSKEYLKYLNTIMNDNNIGIKFHKEIDEIQLKNMESNYDILSIKKMKHKEYSNKFLEEFITKSQEHLYIDGIVSCPYIEKNVIKDILILVPKKKLINTI

SEQ ID NO: 402 - protein, 596 aa, Unknown
  Description of Unknown: Integrase B403 sequence
  PTHR30461:SF3,SM00857,G3DSA:1.10.10.2600,IPR036162,PF13408, PS51737,IPR025827,G3DSA:3.40.50.1390,IPR006119,IPR038109, PF07508,IPR011109,SSF53041,PF00239,PTHR30461, PS51736,Coil,cd00338
MKKFPIDLSCLTEEEISQFQEDPYTLYNGDQDVALYLRYSSTGQSDQSIEGQLRDCRAFCKANHYRIVAIYVDRATTARKDVEKRVHLMEMVADSAKQNWEYVIVWKLDRFARNRNDSAIMKMRLRKNGVKVLSATEYLTDSPESIILESVLEGMAEFFSAELSQKVTRGMRESALKCHSVGGHIPLGYKVENHKLVVNPDTAHIVQEAFSLYANGESVADICRKFNSAGYKTAKNTEFNRSSFKAMFRNTRYIGTYTYKDIVIENGIPAIIDKELFETVQRRLSKTATAPARGKAKVDYLLSGKLFCGHCGASMNGESGAGRHGKVYHYYSCYTKKRKLGCDKRPLKKDYIEGIVARDALNLLTDQLIDEIADMTIRQSEQDLINDTHIPQLTAQLSEVEKSIMNITAAIEKGIASETLMNRLVQLEHEKKTLNKEIKAEEKFVYRIDRDQIVFWLSQFKYGNIEDENFRRRLIDLLVNSVTVWDEPDGYKITTAYNLTSCKTKTFRVDKNPAAEEATGFDFGESECTSKKPVFSKNTGFSVFLRSFPRFVSAHITPQAGEISGYFYHYYQFLAAVRMPLTVFTAWIWVSLVTWA

SEQ ID NO: 403 - protein, 596 aa, Unknown
  Description of Unknown: Integrase B404 sequence
  PTHR30461:SF3,cd00338,SM00857,G3DSA:1.10.10.2600,IPR036162, PF13408,PS51737,G3DSA:3.40.50.1390,IPR025827,IPR006119, IPR038109,PF07508,IPR011109,SSF53041,PTHR30461, PS51736,Coil,PF00239
MCAKKKPAMLEPDMQDAVIYTRYSSHNQRDCSIEQQVADCEIFARQNNLRVVKVYADRHLSGTTDNRPQFQQMLKDAAHGHWAYVICWKIDRFARNRYDSATYKFRLKKAGVRVLYAKESIPDGPEGILLESVLEGSAEYYSAALAQNIRRGMKFNAEQCKVNSGSIPFGYCKGPDGRFAIHEANAEVVREIFRKAAAGMPFVDIANDLNSRGLKTSRGGRWNKGSFRLLMNEAYIGVYHFSDTRIEGGMPALIDQGTFWAANERLKANSSVRGRHQDGGDYLLTGKLKCAHCGSYMIGFSGTGKSGELHYYYGCQKRRRERACKKANVPREWIERVVVKAALDYVLRPDVMEWIADAVMEYQEREAASAQLAALTAELEENQKATDNVMKAIEAGIITSTTKQRLLDLEAKAQDLKRAIELEKLSHVRLERDQVLFWLDRFRGGSLQSQEFRRKVIDAFVSVVYLSDDHLRIAFNYSGGSNAEADFDLVMDAEAAAGELSKKFAQGHVTSTNLPHRFVRCGVFYAQKNFGRPCRAPNPEVGCEPGGVIHVLFENPSISRLFLCILQSAAGKRIAFMPPFRKFLQKFPRHRRLIQP

SEQ ID NO: 404 - protein, 596 aa, Unknown
  Description of Unknown: Integrase B405 sequence
  PTHR30461:SF3,SM00857,G3DSA:1.10.10.2600,IPR036162,PF13408, PS51737,IPR025827,G3DSA:3.40.50.1390,IPR006119,IPR038109, PF07508,IPR011109,SSF53041,PF00239,PTHR30461, PS51736,Coil,cd00338
MKKFPIDLSCLTEEEISQFQEDPYTLYNGDQDVALYLRYSSTGQSDQSIEGQLRDCRTFCKANHYRIVAIYVDRATTARKDVEKRVHLMEMISDSAKQNWEYVIVWKLDRFARNRNDSAIMKMRLRKNGVKVLSATEHLTDSPESIILESVLEGMAEFFSAELSQKVTRGMRESALKCHSVGGHIPLGYKVENHKLVVDPDTAHIVQEAFSLYANGESVAAICRKFNSAGYKTAKNTEFNRSSFKAMFRNTRYIGTYTYKDIVIENGIPAIIDKELFETVQRRLSKTATAPARGKAKVDYLLSGKLFCGHCGASMNGESGAGRHGKVYHYYSCYTKKRKLGCDKRPLKKDYIEGIVARDALNLLTDQLIDEIADMAIRQSEQDLINDTHIPQLTAQLSEVEKSITNITAAIEKGIASETLMNRLVQLEHEKKTLNKEIKAEEKFVYRIDRDQIVFWLSQFKYGNIEDEDFRRRLIDLLVNSVTVWDEPDGYKITTAYNLTSCKTKTFRVEKNPAAEEATGFDFGESECTSKKPVFSKNTGFSVFLRSFPRFVSAHITPQAGEISGYFYHYYQFLAAVRMPLTVFTAWIWVSLVTWA

SEQ ID NO: 405 - protein, 596 aa, Unknown
  Description of Unknown: Integrase B406 sequence
  cd00338,SM00857,G3DSA:1.10.10.2600,IPR036162,PF13408, IPR025827,PS51737,G3DSA:3.40.50.1390,IPR006119,IPR038109, PF07508,IPR011109,SSF53041,PTHR30461,PS51736, Coil,PF00239
MYNTNDFAPFERENIMNIYHTREKLRTCSIHDLPLRVAFYARVSTESDDQQVSIEHQVQYYGDFIKTHKNWTFVKGYVDNGISGIQTKHRQRFKEMLDDAQNGKFDMLITKEITRFARNTLDSIQYTRQMLSWGVCVWFQNDNINTIDEDSELRLTIMAGVAQDEVRKLSNRIKFGHKQSIKNGVVLGNSRLYGYDKKDGRLTINEVEAEMVRMIFRDYASGEWSTPRLEDKLYEMGYRNYKGGKINRGVIQHIIKNPKYKGVYAGGKVKIVDMFTKRQEFLPESEWVMFKDDGSRVPQIIDDETWEKANEYLRKRGEIVKSRRTSIKKADNLFTGLIFCGNDGATYWLKQRTLRGREDVKWVCSKKIKDGASSCDSFYVDDRELRETLAKLICESSGDIDRIADDFISIYHTVTSQTDASSEISQLEKQISIAERKSDKLLEYNLDGAISDSVFLEKNKSIEEQIKKCKDRIAQLRSAEKSVLPIEENIRMIAKSVKELDGVTPEDITRPVLETFLDKIVVYPIEGRIDEKEARLVFYLKNGITTEMPLEIKKKLRCSDNIFLNMFPERNTIFYRKSGTSIGHEQEIKYSYRFAL

SEQ ID NO: 406 - protein, 596 aa, Unknown
  Description of Unknown: Integrase B407 sequence
  PTHR30461:SF3,IPR036162,PS51737,IPR011109,PTHR30461, PS00397,PF00239,G3DSA:1.10.10.2600,IPR006119,SSF53041, cd00338,SM00857,IPR025827,IPR038109,PS51736, IPR006118,PF13408,G3DSA:3.40.50.1390,PF07508,Coil
MPKIAIKKVAIYIRVSTVHQVDKFSLPMQRRDLSTYSELILGIPDYEIFEDAGYSGGNTDRPAYQNMMTRIRKGEFSHLLVWKLDRISRNLLDFAAMYEELQRLGVAFVSKTEQFDTSTAMGVAMMQIIMVFATLERRTTAERVTATMLSRAHSGQWNGGRVPYGYNYDADTKTFSINEDEAKNCRTIFNTYLKEKSIVVVTQYMNSLGAKTRNGIDWTPGTVWKILSNPFYAGIYRYNRYSGTKNRIINDKNEWILVKNHHPAIITQDAYEQAATTLLENGTQRNTLGRLHHAKQPYVFRDLIYCGLCKTRMVASPGNKNAHGARIPIYTCPLRRTSSCDNQSTNEYAIGEFVLNYIINMLWAKKEFSSIKSPTELEKRLLRGSSFCKIAYIEPDGLNDFYNLLTHYKRGSSFIFTASKPRKKKAPENSEVAALRKEQEQQERALSRLQNLYLYDESAISEKDFILRKHDIMAKLDEINRKLGMMNTAAVATLSDSDFVAKASYLLISKELQSKKYIYYRDFAESVSPDVLKTYMRSIIDSIFLVYGHVTAITFKNGLTHRFAYSAPLSPRFSHKSGYNLDKQKQAEQENHQNTE

SEQ ID NO: 407 - protein, 596 aa, Unknown
  Description of Unknown: Integrase B408 sequence
  PTHR30461:SF3,IPR036162,PS51737,IPR011109,PTHR30461, PS00397,PF00239,G3DSA:1.10.10.2600,IPR006119,SSF53041, cd00338,SM00857,IPR025827,IPR038109,PS51736, IPR006118,PF13408,G3DSA:3.40.50.1390,PF07508,Coil
MPKIAIKKVAIYIRVSTVHQVDKFSLPMQRRDLSTYSELILGIPDYEIFEDAGYSGGNTDRPAYQNMMTRIRKGEFSHLLVWKLDRISRNLLDFAAMYEELQRLGVAFVSKTEQFDTSTAMGVAMMQIIMVFATLERRTTAERVTATMLSRAHSGQWNGGRVPYGYNYDADTKTFSINEDEAKNCRTIFNTYLKEKSIVVVTQYMNSLGAKTRNGIDWTPGTVWKILSNPFYAGIYRYNRYSGTKNRIINDKNEWILVKNHHPAIITQDAYEQAATTLLENGTQRNTLGRLHHAKQPYVFRDLIYCGLCKTRMVASPGNKNAHGARIPIYTCPLRRTSSCDNQSTNEYAIGEFVLNYIINMLWAKKEFSSIKSPTELEKRLLRGSSFCKIAYIEPDGLNDFYNLLTHYKRGSSFIFTASKPRKKKAPENSEVAALRKEQEQQERALSRLQNLYLYDESAISEKDFILRKHDIMAKLDEINRKLGMMNTAAVATLSDSDFVAKASYLLISKELQSKKYIYYRDFAESVSPDVLKTYMRSIIDSIFLVYGHVTAITFKNGLTHRFVYSAPLSPRFSHKSGYNLDKQKQAEQENHQNTE

SEQ ID NO: 408 - protein, 596 aa, Unknown
  Description of Unknown: Integrase B409 sequence
  cd00338,SM00857,G3DSA:1.10.10.2600,IPR036162,PF13408, IPR025827,PS51737,G3DSA:3.40.50.1390,IPR006119,IPR038109, PF07508,IPR011109,SSF53041,PTHR30461,PS51736, Coil,PF00239
MYNTNDLAPFERENIMNIYHTREKLRTCSIHDLPLRVAFYARVSTESDDQQVSIEHQVQYYGDFIKTHKNWTFVKGYVDNGISGIQTKHRQRFKEMLDDAQNGKFDMLITKEITRFARNTLDSIQYTRQMLSWGVCVWFQNDNINTIDEDSELRLTIMAGVAQDEVRKLSNRIKFGHKQSIKNGVVLGNSRLYGYDKKDGRLTINEVEAEMVRMIFRDYASGEWSTPRLEDKLYEMGYRNYKGGKINRGVIQHIIKNPKYKGVYAGGKVKIVDMFTKRQEFLPESEWVMFKDDGSRVPQIIDDETWEKANEYLRKRGEIVKSRRTSIKKADNLFTGLIFCGNDGATYWLKQRTLRGREDVKWVCSKKIKDGASSCDSFYVDDRELRETLAKLICESSGDIDRIADDFISIYHTVTSQTDASSEISQLEKQISIAERKSDKLLEYNLDGAISDSVFLEKNKSIEEQIKKCKDRIAQLRSAEKSVLPIEENIRMIAKSVKELDGVTPEDITRPVLETFLDKIVVYPIEGRIDEKEARLVFYLKNGITTEMPLEIKKKLRCSDNIFLNMFPERNTIFYRKSGTSIGHEQEIKYSYRFAL

SEQ ID NO: 409 - protein, 596 aa, Unknown
  Description of Unknown: Integrase B410 sequence
  cd00338,SM00857,G3DSA:1.10.10.2600,IPR036162,PF13408, IPR025827,PS51737,G3DSA:3.40.50.1390,IPR006119,IPR038109, PF07508,IPR011109,SSF53041,PTHR30461,PS51736, Coil,PF00239
MYNTNDLAPFERENIMNIYHTREKLRTCSIHDLPLRVAFYARVSTESDDQQVSIEHQVQYYGDFIKTHKNWTFVKGYVDNGISGIQTKHRQRFKEMLDDAQNGKFDMLITKEITRFARNTLDSIQYTRQMLSWGVCVWFQNDNINTIDEDSELRLTIMAGVAQDEVRKLSNRIKFGHKQSIKNGVVLGNSRLYGYDKKDGRLTINEAEAEMVRMIFRDYASGEWSTPRLEDKLYEMGYRNYKGGKINRGVIQHIIKNPKYKGVYAGGKVKIVDMFTKRQEFLPESEWVMFKDDGSRVPQIIDDETWEKANEYLRKRGEIVKSRRTSIKKADNLFTGLIFCGNDGATYWLKQRTIRGREDVKWVCSKKIKDGANSCDSFYVDDRELRETLAKLICESSGDIDRIAEEFISIYHAVTSQTDASSEISQLEKQISIAERKSDKLLEYNLDGAISDSVFLEKNKSIEEQIKKCKDRIAQLRSAEKSVIPIEKNIRMIAKSVKELDGITPEDITRPVLETFLDKIVVYPIEGRIDEKEARLVFYLKNGITTEMPLEIKKKLRCSDNIFLNMFPERNTIFYRKSGTSIGHEQEIKYSYRFAL

SEQ ID NO: 410 - protein, 596 aa, Unknown
  Description of Unknown: Integrase B411 sequence
  PTHR30461:SF3,IPR036162,PS51737,IPR011109,PTHR30461, PS00397,PF00239,G3DSA:1.10.10.2600,IPR006119,SSF53041, cd00338,SM00857,IPR025827,IPR038109,PS51736, IPR006118,PF13408,G3DSA:3.40.50.1390,PF07508,Coil
MPKIAIKKVAIYIRVSTVHQVDKFSLPMQRRDLSTYSELILGIPDYEIFEDAGYSGGNTDRPAYQNMMTRIRKGEFSHLLVWKLDRISRNLLDFAAMYEELQRLGVAFVSKTEQFDTSTAMGVAMMQIIMVFATLERRTTAERVTATMLSRAHSGQWNGGRVPYGYNYDADTKTFSINEDEAKNCRTIFNTYLKEKSIVVVTQYMNSLGAKTRNGIDWTPGTVWKILSNPFYAGIYRYNRYSGTKNRIINDKNEWILVKNHHPAIITQDAYEQAATTLLENGTQRNTLGRLHHAKQPYVFRDLIYCGLCKTRMVASPGNKNAHGARIPIYTCPLRRTSSCDNQSTNEYAIGEFVLNYIINMLWAKKEFSSIKSPTELEKRLLRGSNFCKIAYIEPDGLNDFYNLLTHYKRGSSFIFTASKPRKKKAPENSEVAALRKEQEQQERALSRLQNLYLYDESAISEKDFILRKHDIMAKLDEINRKLGMMNTAAVATLSDSDFVAKASYLLISKELQSKKYIYYRDFAESVSPDVLKTYMRSIIDSIFLVYGHVTAITFKNGLTHRFAYSAPLSPRFSHKSGYNLDKQKQAEQENHQNTE

SEQ ID NO: 411 - protein, 596 aa, Unknown
  Description of Unknown: Integrase B412 sequence
  PTHR30461:SF3,IPR036162,PS51737,IPR011109,PTHR30461, PS00397,PF00239,G3DSA:1.10.10.2600,IPR006119,SSF53041, cd00338,SM00857,IPR025827,IPR038109,PS51736, IPR006118,PF13408,G3DSA:3.40.50.1390,PF07508,Coil
MPKIAIKKVAIYIRVSTVHQVDKFSLPMQRRDLSTYSELILGIPDYEIFEDAGYSGGNTDRPAYQNMMTRIRKGEFSHLLVWKLDRISRNLLDFAAMYEELQRLGVAFVSKTEQFDTSTAMGVAMMQIIMVFATLERRTTAERVTATMLSRAHSGQWNGGRVPYGYNYDTDTKTFSINEDEAKNCRTIFNTYLKEKSIVVVTQYMNSLGAKTRNGIDWTPGTVWKILSNPFYAGIYRYNRYSGTKNRIINDKNEWILVKNHHPAIITQDAYEQAATTLLENGTQRNTLGRLHHAKQPYVFRDLIYCGLCKTRMVASPGNKNAHGARIPIYTCPLRRTSSCDNQSTNEYAIGEFVLNYIINMLWAKKEFSSIKSPTELEKRLLRGSNFCKIAYIEPDGLNDFYNLLTHYKRGSSFIFTASKPRKKKAPENSEVAALRKEQEQQERALSRLQNLYLYDESAISEKDFILRKHDIMAKLDEINRKLGMMNTAAVATLSDSDFVAKASYLLISKELQSKKYIYYRDFAESVSPDVLKAYMRSIIDSIFLVYGHVTAITFKNGLTHRFAYSAPLSPRFSHKSGYNLDKQKQAEQENHQNAE

SEQ ID NO: 412 - protein, 595 aa, Unknown
  Description of Unknown: Integrase B413 sequence
  PTHR30461:SF3,SM00857,G3DSA:1.10.10.2600,IPR036162,PF13408, IPR025827,G3DSA:3.40.50.1390,PS51737,IPR006119,IPR038109, PF07508,IPR011109,SSF53041,PF00239,PTHR30461, PS51736,Coil,cd00338
MYEDIKTACLYVRFSSHNQTEQSIEGQTRVCRDFCKRHNIRIVEIYADRATSASKDIEKRVQFLKMIKDSEKGLFDAVIVYKLDRFARSRYDSATYKYRLKRNGVQLISATENISNDPEGIILESVLEGMAEFYSAELSQKINRGMRESAYKHNSIGGAIPLGYKIEDKKLVIDPKTAPIVKEAFEKYADGETVAEICRQFNARGYKTSKGTAFGKSSFTKIFRNERYIGVYTFHDYRAEDAIPAIIDKDLWDRVQLRVGKIKNAPARNKAKVVYLLSGKIFCGHCGSKMNGNCNAGNYCYYQCYGKKNGNVDCKKKNIRKEFIERLVAQDALSLLTDEYIEQIATIACEKNQHEIELDSALPTIRDRIHQVDLSLNHLLKAIESGSAPDMLVKRMGELEKEKKDLQAQAKKESEDIVELDKAQVIYWLEQFRGGSIEDEEFCRMLIDLFVNSVTVWDEDDNTYKVTVAYNLTSLPTKTYRLNKGGTLSDFASNAPDRKTHKDCIVVLHVVPLHGNLRTGSRIVHLNRAAGFLVHPVQIGFRIRHLRLNLKDVRADCLCQRLGNLCGHAGRRKICYKFITHCVLPHQSFHFLHSA

SEQ ID NO: 413 - protein, 595 aa, Unknown
  Description of Unknown: Integrase B414 sequence
  PTHR30461:SF3,IPR036162,PS51737,IPR011109,PTHR30461, PF00239,G3DSA:1.10.10.2600,IPR006119,PF14287,SSF53041, IPR025378,SM00857,IPR025827,cd03770,IPR038109, mobidb-lite,PF13408,G3DSA:3.40.50.1390,PF07508,Coil
MSVKQTEEKITALYERLSRDDELAGESNSILNQKAYLETYAAQHGYTTIAHYTDDGWSGGNFERPDWKRMIADIEAGRVCRVIVKDMSRAGRDYLQTGFYTEVFFRQHGVHFIAIANGVDSEDQNSNEFAPFLNIMNEWYLRDQSRKVSAAYKIKGNSGKHTSTHAIYGYKKDPEDKNHWLIDEEAAAIVRRIFQMSIEGHGGYEIAQILTREKVESPSYYLASRGLYKNRKDMSRPYDWYGNSVNVLLSKPEYMGHTVNFRTSKKSYKDKRIMNPPEEWLIFENTHEAIVDPETWHLAQQTRKTVHRIDTTGEANPLTGLMYCADCGAKMYNHRSFKTKSDGTRTAVDNYNCANYTLTLQRETHKCCSHSVTTKAIRGILLDTIRGVSKYAISNEEEFRDKVMEASRLKQESDAKDLKKRLKAAQKRCQELDILIQKLYESYAVGKITEHRFDLLSTQYEKEQAELSAVIDSNRVELADFETDTSRAKQFLALAKKYTDFSELTTPMINEFIEKIIVHAPEKINGERTMEIEIYLKFIGKFEVEPTPEEIAVAEAERNRRAVERQKYLRKKAQQEQKRMEAQLEQTDAPTQETA

SEQ ID NO: 414 - protein, 595 aa, Unknown
  Description of Unknown: Integrase B415 sequence
  PTHR30461:SF3,SM00857,G3DSA:1.10.10.2600,IPR036162,PF13408, IPR025827,G3DSA:3.40.50.1390,PS51737,IPR006119,IPR038109, PF07508,IPR011109,SSF53041,PF00239,PTHR30461, PS51736,Coil,cd00338
MYEDIKTACLYVRFSSHNQTEQSIEGQTRVCRDFCKRHNIRIVEIYADRATSASKDIEKRVQFLKMIKDSEKGLFDAVIVYKLDRFARSRYDSATYKYRLKRNGVQLISATENISNDPEGIILESVLEGMAEFYSAELSQKINRGMRESAYKHNSIGGAVPLGYKIEDKKLVIDPKTAPIVKEAFEKYADGETVAEICRQFNARGYKTSKGTAFGKSSFTKIFRNERYIGVYTFHDYRAEDAIPAIIDKDLWDRVQLRVGKIKNAPARNKAKVVYLLSGKIFCGHCGSKMNGNCNAGNYCYYQCYGKKNGNVDCKKKNIRKEFIERLVAQDALSLLTDEYIEQIATIACEKNQHEIELDSALPTIRDRIHQVDLSLNHLLKAIESGSAPDMLVKRMGELEKEKKDLQAQAKKESEDIVELDKAQVIYWLEQFRGGSIEDEEFCRMLIDLFVNSVTVWDEDDNTYKVTVAYNLTSLPTKTYRLNKGGTLSDFASNAPDREAHKNCVVVLHVVPLYGNLWTGNRIVHLNRAAGFLVHPVQISFRVRHLRLNLKDVRADCLCQRLGNLCGHAGRRKIRYKFLTHCVLPHQSFHFLHSA

SEQ ID NO: 415 - protein, 595 aa, Unknown
  Description of Unknown: Integrase B416 sequence
  PTHR30461:SF3,SM00857,G3DSA:1.10.10.2600,IPR036162,PS51737, G3DSA:3.40.50.1390,IPR006119,IPR038109,PF07508,IPR011109, SSF53041,PTHR30461,Coil,PS51736,cd00338, PF00239
  MOD_RES (567)..(570): Any amino acid
MYDIYNQKPTSRKVVIYARVSTEHEAQLSALENQKDWYKPILQQHPEWDIVKMYVDEGITGTSAKKRPQFMQMIQDASSGNFDLILTREVSRFARNTVDTLQYTRELKSKGVEVFFLNDNIKTFDGDGELRLTIMATLAQDESRKTSVRVKSGQQTSMENGVFYGNGNILGYDRVGKDMVINPEQAKTVRMIFDWYLDGWGMRKIQFELEKAGRLTAMGKSNWHVSNISKILRNSFYCGIITYHKEFTPDFLEQKKIRNFGDMEFTQVRGNHKPIITEEEYDQAQKRINSRRKTLSVDTSGQRMYGEKPPSDVWVKLLECECGHKFNRKMWHNTTEGKQYGYQCYSSIRTGTVRTRLNKGLPIDGICQTPMIAGWKLQMMAKYIFKNYLSDTDQVLSLAESMLEKHIDDEEEVCDNTDIINQKKEELQKLLKRLDNLIEMRADGELARDIFILKKESTENSISQLKKELAELEPSEIESEIDEVTSKEKITILKYALDQYTNFDSDADIPESVIEAFVEKIIARKDGFDWYLRFNPEESPMGCLVDGKRKRGAKVSAFCSPQHRQLXXXXETKKRGKSFRILFTAAQAAIAEKNA

SEQ ID NO: 416 - protein, 595 aa, Unknown
  Description of Unknown: Integrase B417 sequence
  PTHR30461:SF3,cd00338,SM00857,G3DSA:1.10.10.2600,IPR036162, PF13408,IPR025827,G3DSA:3.40.50.1390,PS51737,IPR006119, IPR038109,PF07508,IPR011109,SSF53041,PTHR30461, PS51736,Coil,PF00239
MFEDVKTACLYVRFSSHNQTEQSIEGQTRVCQEFCQRHNIKIVEIYADRATSASKNTEKRVSFLKMIKDSEKGLFDAVVVYKLDRFARSRYDSATYKYRLKKNGVQLISATENITNSPEGIILESVLEGMAEFYSAELSQKINRGMRESAYKHNSIGGALPLGYKTVDKKLVIDEKTAPIVREAFTMYAEGHSVAEICRIFNARGYKTSKGTEFGKNSFSKIFRNERYIGTYTYHDYRAEDAIPAIIDRDLWDRVQLRLKKVKNSPGRNKAKRVYLLSGKLFCGHCGESMNGNCNGNKYAFYECYGKKSKYNGCQKRNLRKEYIERLIAQDALSLLTDENIEHLATVACERNDYEIETGSPIPVIRNRIHQTEVSINNLTKAIETGATPDALVKRMVELEREKKDLSTQLKKEEELIVPLEKEQVIFWLEKFKDGDIEDEEFCRLLIDLFVNSVTVWDEDNDMLKVTIAYNLTSLPTKTYRLTKDGTLSDFTGNAPDREAHKNCVVVRHVVPLRGNLRTGSRIVHLNRAAGVLVHPVQISFRIRHLRLNLKDVRADCLCQRLGNLCGHAGRRKKCYKFITHCVLPHQSFHFLHSA

SEQ ID NO: 417 - protein, 595 aa, Unknown
  Description of Unknown: Integrase B418 sequence
  PTHR30461:SF3,IPR036162,PS51737,IPR011109,PTHR30461, PS00397,PF00239,G3DSA:1.10.10.2600,IPR006119,SSF53041, cd00338,SM00857,IPR025827,IPR038109,PS51736, IPR006118,PF13408,G3DSA:3.40.50.1390,PF07508,Coil
MARKNPKTLDAARLLSCVLYIRVSTKLQVEKGESIDAQRFELTRYAENHDMRVLGEYVDAGFSGKNVQGRPQFRQMMDDIIKAQPSKRPAYVLVFKLSRFGRNAADTWNSLQTLQDYGVELCCVKDGIDSGTSMGKAMLSIAAVFAEMERDNIRTQTMSGREEKARKGYWNGGQAPFGYRLVDKGNKFKELEVDEDEAKVVRRIFEMYACENKGSMAIATWLNNHGIKKKPRGNARMDTFSSGTVQRMITNPVYIGKIAYGRRRTETIEGTRGETHVVKSDGYEMHDGQHDAIIDDATWAAAQALVGTRKPNMKTHDDGHVNMLNGLLVCPVCGRKMSSKPNRGKLKKDGTRGKTTWAYYCPHTSKARGASCTFKSQYPQECVDAEVVQLVSLASRSDAFVDALRRRIDDATDIEQLKEDIERIEGEKAANDKRMRMLMTQIDSLDPADRSYERKFNDLQRRLDDLYDRDAGLSDALEEAQAKMTTAEKRMDGERRLLEELDRIPELLEGADEQTRFDLIHEAVSEVHILPDKNPRKERVVANVTFKCPVRFFWEEIPGVANAYTPMTPDSLGENDFRDDEAHVETIVLLQRETL

SEQ ID NO: 418 - protein, 594 aa, Unknown
  Description of Unknown: Integrase B419 sequence
  PTHR30461:SF3,cd00338,SM00857,G3DSA:1.10.10.2600,IPR036162, PS51737,G3DSA:3.40.50.1390,IPR006119,IPR038109,PF07508, IPR011109,SSF53041,PTHR30461,PS51736,Coil, PF00239
MNITQRMYFGQFPLDKDRDRRIVFYGRVSTQHEAQVDALGNQMQWYDDQLRYHPNWQVINRYIDEGITGTSAKKRPAFMQMISDAKRGKFDLIVTREVCRFARNTVDTLQLTRELRNFGVEVFFVSDNIWTMDGDGELRLSIMATMAQEESRKISERVLAGQKISRQNGVLYGSGNIIGYDRDKVNRTYVINEEQAATIRMVFTLYSQGYGEKAIVNELSRLGRKDGHGNVSWSCTKISRILRNATYMGYICYNKSKVNNYLEKKRINNLDEASFVYVKGNFEPIVSENLWHECERIRKSRISSLRLPDGETRRKGARTTKNLWVSKLRCRCGSSYRIFNWRKLKDGTPVFGYQCNMRTVNPTRSFVLEHNMTQQLSCDAISIPEWKLELMAKKIFEKVWGNQNKAILRACKMIESCQNGKATARMSAAPIQSKIEKIKKRKLNYAAMRADGELPREEYQALCKQADDEIARLEQELKALSPAPEPQTVSSDMKAIYDFLSQKVDVHGACLAPELIEQFVEVVTPIADYSYRWKLNTGCKKSKEERTDLMAVSEKPILTFTIDFETAKRYREANKMPHQFRRAAWTDLTVEVYL

SEQ ID NO: 419 - protein, 594 aa, Unknown
  Description of Unknown: Integrase B420 sequence
  SM00857,G3DSA:1.10.10.2600,IPR036162,PS51737,G3DSA:3.40.50.1390, IPR006119,IPR038109,PF07508,SSF53041,IPR011109, PF00239,PTHR30461,PS51736,Coil,cd00338
MEISGTNKLILPKDIILADRERERIIVYYGRVSTEHEAQLSALENQLQWYDDQSKYHPNWKVLRKYIDEGITGTQAKKRPAFLKMLEDAKNGQFDLIVTREVCRFARNTVDTLVTTRELKKIGVEVYFVEDNIWTMDGDGELRLTIMATLAQEESRKTSERVRAGQKISRDNGVLYGNGNILGYDRVGDTYVINEEQAETVRLIYNLYSQGLGFKKIINELVSQHRKDSYGLVRWECTKISRILHNATYKGYMGYLKSFRNNYLEQKSIINRDESTHLYIKGKFEPIVSEELWEKCRQIRESKAMKIKSYGGKERVVGFKPSNDIWVKKMKCRCGSSFRRCKWHKNKSGELIYGYQCYNQLNNGSKKIRESAGISTEGYCDMGTIGDWKIDMMAQKIFQGLCGEQRECINRSYSIYENNFRAKGNNSNNQKEVLLSKIEKSKVKLNNLTNMRMEGEISKEEYQECRQKVTDEIATFQKKLKALVEEKKEPDPAVIKMSLDEFAAILIEKIDFNAPIIDRGIIEQFVEKIVPRNTLEFDWYLNLIPHIFEDNSSTGYNEVWTFVINFDEAEKYRKLRGGFLRKNQWRDLTVHVFV

SEQ ID NO: 420 - protein, 594 aa, Unknown
  Description of Unknown: Integrase B421 sequence
  PTHR30461:SF3,cd00338,SM00857,G3DSA:1.10.10.2600,IPR036162, PF13408,IPR025827,G3DSA:3.40.50.1390,PS51737,IPR006119, IPR038109,PF07508,SSF53041,IPR011109, PTHR30461,PS51736,Coil,PF00239
MARKKNIAAGLDAVIYARYSSHNQREVSIEQQIAECTKHAAALGLRIVGTYEDRAISGKTDNRPRFQQMMRDAEKGKFQAVVAWKSNRIGRNMLQAMVNEAKLDDYGVKVFYAEEDFDDTAAGRFALRNMMNVNQFYSENMAEDITRGLYDNANKCMANGRQPLGYKRGADGKVMLDEPAAAVVREIFTRVAAGDLFVDIARDLNAKGIKTSKGATWNKGSFQSICQNERYKGIYIYGNVRIVDGIPRIVSDELWYKVQEAMRMKKNPVGTRHRVGAEDYLLTGKLRCGHCGSYMTGVSGTSRNGELHYYYTCQKRRTEHACNKKNVRRDVIEPAIAQAIKMYCLTDDVIEWVANRTVEYWEKHDNDLHIEALEQQLEENKKATSNMLKAIEMGIITDATRSRMIELETEQSKLAVQLNAAKADVVKIDRDDLIDELQIFRDMDVNNRSVQAELFKDFLVAAYIYDDNRLKLVFSFMGKDNSIEIPLETGEDPPDGEDSPDAKMFVLTPDCSTKKALYFAGSTVLFFFTEANFWGLRCFACTIFRLLQAVPIHPPIFDFTSFSKRNVCRPAVQQTAASSPSMYGVRSKLNVILS

SEQ ID NO: 421 - protein, 594 aa, Unknown
  Description of Unknown: Integrase B422 sequence
  PTHR30461:SF3,cd00338,SM00857,G3DSA:1.10.10.2600,IPR036162, PF13408,PS51737,G3DSA:3.40.50.1390,IPR025827,IPR006119, IPR038109,PF07508,IPR011109,SSF53041,PTHR30461, PS51736,Coil,PF00239
MARKKNIAAGLDAVIYARYSSHNQREVSIEQQIAECTKHAAALGLRIVGTYEDRAISGKTDNRPRFQQMMRDAEKGKFQAIVAWKSNRIGRNMLQAMVNEAKLDDYGIKVFYAEEDFDDTAAGRFALRNMMNVNQFYSENMAEDITRGLYDNASKCMANGRQPLGYKRGEDGRVVLDEANAAVVREIFTRVAAGDLFVDIARDLNAQGIKTSNGANWNKGSFQSICQNERYRGIYIYGDVRVADGIPRIVSDDLWYRVQEAMRMKKNPVGTRHRVGAEDYLLTGKLRCGHCGSYMTGVSGTSRNGELHYYYTCQKRRTEHACDKKNIRRDVIEPAVAQAIKMYCLTDDVIAWIADRTVEYWEKHDNDLQIEALEQQLEENKKATSNMLKAIEMGIITEATRTRMVELETEQSRLSVQLNVAKEDVVKIDREQIISYLELLQQGDIHDRDFQMELFKNFLVAVYVYDDNRMKLVFSCMGDQNSVEIPLETGEDPPDGGLSPDAKMFVLTPDSSTKKALYFVGSTVLFFFAEAGFWGLHRFACTVFRFLQAVPIQPPTFDFTPFSKRNVCRPVFQQAAASSPSMYGVRSKLKGMLS

SEQ ID NO: 422 - protein, 594 aa, Unknown
  Description of Unknown: Integrase B423 sequence
  PTHR30461:SF3,cd00338,SM00857,G3DSA:1.10.10.2600,IPR036162, PF13408,PS51737,G3DSA:3.40.50.1390,IPR025827,IPR006119, IPR038109,PF07508,SSF53041,IPR011109,PTHR30461, PS51736,Coil,PF00239
MARKKNIAAGLDAVIYARYSSHNQREVSIEQQIAECTKHAAALGLRIVGTYEDRAISGKTDNRPRFQQMMRDAEKGKFQAVVAWKSNRIGRNMLQAMVNEAKLDDYGVKVFYAEEDFDDTAAGRFALRNMMNVNQFYSENMAEDIIRGLYDNANKCMANGRQPLGYKRGADGKVMLDEPAAAVVREIFTRVAAGDLFVDIARDLNAKGIKTSKGAAWNKGSFQSICQNERYKGIYIYGNVRIVDGIPRIVSDELWYRVQEAMRMKKNPVGTRHRVGAEDYLLTGKLRCGHCGSYMTGVSGTSRNGELHYYYTCQKRRTEHACNKKNVRRDVIEPAIAQAIKMYCLTDDVIEWMADQTVQYWEKHDNDLQIEALEQQLAENKKATSNMLLAIEMGIITEATRSRMVELETENSKLTAQLSAAKRDVVKINREDLIDELHILRSKDIQDREVQAELFKDFLVAAYIYDDNRLKMVFSFMGKDNSVEIPLETGEDPPDGEDSPDAKMFVLTPDCSTKKALYFVESMVLFFLRKPVFGGCIASPAPVSGFLQAVPIQPPTFDFTPFSKKNVCRPFFQQAAASSPSMYGVRSKLKVMLS

SEQ ID NO: 423 - protein, 594 aa, Unknown
  Description of Unknown: Integrase B424 sequence
  PTHR30461:SF3,SM00857,G3DSA:1.10.10.2600,IPR036162,PF13408, PS51737,G3DSA:3.40.50.1390,IPR025827,IPR006119,IPR038109, PF07508,SSF53041,IPR011109,PTHR30461,cd00338, PF00239
MDIYNVANQMKLERKTIFDLNIRVTFYARVSTTRDEQENSIENQIAYFTEMIKGNKNWEYVEGYVDRIRGESAENRTEFMQMINDGKGGKFDLIITKEVSRFARDTVDSLNYTRDLLRCGVGVFFQNDNICTVDTDSELRLTIMASIAADEVRKLSERIRWGHRRSIESGNVLGNNRIFGYDLYDKKLHINEREAEMVKLIFELYSSGHYSVRKIEQKLYDEGFRGRNGNRIHHNTISGIIQNPKYKGYFCGGKVKITDFRTRQQRFLPEEEWIMHKDLTGETVPAIVSEDLWDRCNQIFKERSEIVKSKERSIKDRSVFTGKIWCAVDGKAYWRTSYSNSKQKGKSIYQWICSEKKRINAKACPSFSILESELYQMVGEFFQSVVPSIESYVDNFISIYQKNDSAAVIRKQLREIEDKIGREKSKKDKLFELYLDEIITKNEFKKRNDDSDSLIASLGNNARELKRESSSDKTIETIKEITAYIKDVYNPGEPMPKELVDDLVETIIDRIDVEPVNDNSMRVSIKLRTGEKQDYKYSNSGRRLRNNEIGNRCSSGIMSLVMFPEQQWSFPRVYITRPASKRGTEVLFLVSAGV

SEQ ID NO: 424 - protein, 593 aa, Unknown
  Description of Unknown: Integrase B425 sequence
  IPR036162,PS51737,IPR011109,PTHR30461,PS00397, PF00239,G3DSA:1.10.10.2600,IPR006119,SSF53041,SM00857, IPR025827,IPR038109,PS51736,cd03768,IPR006118, PF13408,G3DSA:3.40.50.1390,PF07508,Coil
MAYAAMRKAGLVPEAAPDLRTVALYVRVSTGYQVDKDSLPFQKKELKNYCEHVLHIDKNRIEVFEDAGKSGKNTNRPGFERMMKKVRAGQISHVIVYKIDRISRNLVDFSLMYDDFKYNRVTFISLNEQFDTSSAIGEAVLKIILVFAELERKLTSERVKDVMIGRALSGQWNGARVPFGWEWDEEAKFPKHSETEAVFARLMYDLYEETRSTCKVRDYCNTHDVPTKRGGEWTSKTVADFIRNPMNRGDYRYNYRESARGRKKPEEEVVYIEGVFPPLVPVEQWDRCSAIMDHNAAVRCTPGVPHKKKHVHPFAGLLVCGACGAPYQVIKQDKPRENGFSPSLYRCGNRYRKRSCTAAGCSDVVIGPFVFNYISSMVRAANLRTKIKTPEELERLLLSGPEFQNVAGIASEGLNATFALLSGRPAASGPSYAPDLLTAPAGSVNAGEVEEIRQQITRLERAAERLKKAYLFDENAMSEKEYLETKIALDTERVQAENRLKDLSEATFSTDAGELSFIKSASSFLLAHRIQSGDHIVYSDFAPLVGNETMRDFLNLIIEKIVIRNGRPEEITFKNGLTHIFLYRDEMAENVPK

SEQ ID NO: 425 - protein, 593 aa, Unknown
  Description of Unknown: Integrase B426 sequence
  PTHR30461:SF3,cd00338,SM00857,G3DSA:1.10.10.2600,IPR036162, PF13408,PS51737,G3DSA:3.40.50.1390,IPR025827,IPR006119, IPR038109,PF07508,SSF53041,IPR011109,PTHR30461, mobidb-lite,Coil,PF00239
MPRKPAKHPAKPKRGKKLEVEEPGVLYGRYSSHNQKDISVEQQFEKGYELAAEYGIRIIDTYADRAVSGRTDKRRDFQRMMTDAAKGKFRYVIAWKSNRMGRNMLEALINEARLQDLGVRVLYVEEDFDDTAAGRFAARSMMNVNQFYSENMAEDIKRGLYDNAANCMVANGHLPYGYKADETLHYAIDEPKAAVIREIFTRVSCGEAFVDIMASLNARGIKTSYGRPWGRSSFQRILSNERYRGIYIYGDVRKEGGIPRIVSDELYFKVQEVITTKKNPQGRHRVNGDYLLTGKLFCGHCKSPMTGISGTSRSGNLHYYYVCQKRRTEKTCEKKNLRRDDIELQVAKAIKRRTLDDDTINWIADSVVEYSQHQESASGIGLLEDQLKDTQRSIKNLMAAIEQGIITPTTKARLMELEKEQSDIDRKITMAKADVIPVNRDQLVGWLKKLQAGDVHDKKYQAELFDTFLIAVYVYDNPDGQDYMKVVFNYAGSKNTVEIPLDPSVIDNVENIETGAVRLSSAQVHQRGITRTFLLCRRLCRHNMVQVIPTEKNGYSHLLRVSVLSLCPADCPRTVRGQSADSHRMQLFSLTVQ

SEQ ID NO: 426 - protein, 593 aa, Unknown
  Description of Unknown: Integrase B427 sequence
  PTHR30461:SF3,SM00857,G3DSA:1.10.10.2600,IPR036162,PF13408, IPR025827,PS51737,G3DSA:3.40.50.1390,IPR006119,IPR038109, PF07508,SSF53041,IPR011109,PTHR30461,PS51736, cd00338,PF00239
MAQVEIIAANLKEKNNNITIANKKKRVCAYGRVSTDDEEQITSYNSQIKYYTEKIKSNPDWEFVGIYADEGISGTQVKNRTEFQRMIDDALNGKIDIILAKSISRFARNTLDTLKYCRELRDKKVDVYFEKENIHTIDLDSEMFLTLYSAFAQAESESTSQNVKLGLKAMMKRGEYVGSPDCYGYDWNKETKQLDINEEQAEVVRMIFNWYIDGLGSRRIIRKLEELNIPTYKGNKRWAESSIMGIIHQEKYVGDLIQNKSYTVSPITHKTVINRGEKEKYYVKDHHTPIISREVWDKAQEIANKRKEAHTINKQGYSSRLTNKYAFSGKIKCAFCGTNFTRRKSSKSKTHPNYNVYWTCYRKRMFAEDCPDSVGISETKLEETFVMIYNNIIKNKHKTKEVLLKAIKDVVNDNDYQDKLNSLLTEKETIEKRLSKIIDMELDDDFDRKALFIQKEKELLEELNTVKNRISHYEMLLAENKGLSKQLKEIDKYFDNFKELKKFNREAFENMIECIIVGDYDENGNKLPRVARFVLKTGKEYKFELSNNSNDNNSDNTKNELVPFDTGRLSCFNCTSKSNLCSLACSFNFLLAN

SEQ ID NO: 427 - protein, 593 aa, Unknown
  Description of Unknown: Integrase B428 sequence
  PTHR30461:SF3,SM00857,G3DSA:1.10.10.2600,IPR036162,PS51737, G3DSA:3.40.50.1390,IPR006119,IPR038109,PF07508,IPR011109, SSF53041,PTHR30461,PS51736,cd00338,PF00239
MQTTQQQLYFGSMNLDRNRDRRMVFHGRVSTQHEQQKDALSNQMQWYDDQLKYHANWQLVGRYIDEGITGTLAKKRPSFMRMLDDARNGKFDLIVTREVCRFARNTVDTLSITRELRGIGVEVYFVSDNIWTLDSDGELRLSIMSSLAQEESRKISERVLAGQMISRQNGVLYGNGNILGYDLDKAHNTYTINEEQAKVVRFVFDMYSSGYGQSLICNELTRLGYKDSQGNVKWSCIKVSKMLRNATYMGYIGYNKSKTTNYIDKVRVKNLDEDSIQLVKGNFPPLISEELWHECDRIRKQKIATYRMPDGSTRRAGYLGPMHLWTQKLRCRCGGGFNRFKWRVLKDGTPVYGYQCNYRTVNVSRSFVVEHNLQGQSSCDAISICEWKLELMAKLIFDRIWGDQNAAVKKAVAMIDSVSSRAAPACSVASSSAQISKLRNRKLRLAQMYADGDLGRDEYKELCAKTEQEISALQHPPAEMAAQQKAAATPSMKELTAALNRIVDLSAPKLPDSLIQEFVEVVTPIKDNLYRWKLNFGPQVPHAERTDLTKIEQNPLLKFRINFETARQYRQKNGMPSQFRRCSWTDLRVEVYV

SEQ ID NO: 428 - protein, 593 aa, Unknown
  Description of Unknown: Integrase B429 sequence
  PTHR30461:SF3,SM00857,G3DSA:1.10.10.2600,IPR036162,PF13408, IPR025827,PS51737,G3DSA:3.40.50.1390,IPR006119,IPR038109, PF07508,IPR011109,SSF53041,PF00239, PTHR30461,PS51736,Coil,cd00338
MKKFPIDLSCLTEEEISQFQEDPYTLYNGDQDVALYLRYSSTGQSDQSIEGQLRDCRAFCKANHYRIVAIYVDRATTARKDVEKRVHLMEMVADSAKQNWEYVIVWKLDRFARNRNDSAIMKMRLRKNGVKVLSATEYLTDSPESIILESVLEGMAEFFSAELSQKVTRGMRESALKCHSVGGHIPLGYKVENHKLVVNPDTAHIVQEAFSLYANGESVADICRKFNSAGYKTAKNTEFNRSSFKAMFRNTRYIGTYTYKDIVIENGIPAIIDKELFETVQRRLSKTATAPARGKAKVDYLLSGKLFCGHCGASMNGESGAGRHGKVYHYYSCYTKKRKLGCDKRPLKKDYIEGIVARDALNLLTDQLIDEIADMAIRQSEQNLINDTHIPQLTAQLSEVEKSIMNITAAIEKGIASETLMNRLVQLEHEKKTLNKEIKAEEKFVYRIDRDQIVFWLSQFKYGNIEDENFRRRLIDLLVNSVTVWDEPDGYKITTAYNLTSCKTKTFRVDKNPAAEEATGFDFGESECTKSPRNRLISRTFAFHKLSFLDTAFFLTQTLTPTGAGSGKHQTARDRILPMVWAAFSWASVVTWA

SEQ ID NO: 429 - protein, 593 aa, Unknown
  Description of Unknown: Integrase B430 sequence
  PTHR30461:SF3,IPR036162,PS51737,IPR011109,PTHR30461, PS00397,PF00239,G3DSA:1.10.10.2600,IPR006119,SSF53041, cd00338,SM00857,IPR025827,IPR038109,PS51736, IPR006118,PF13408,G3DSA:3.40.50.1390,PF07508,Coil
MARKNPKTLDAAHPLSCVLYIRVSTKLQVEKGESIDAQHFELTRYADNHDMRVLGEYVDAGFSGKNVQGRPQFRQMMDDIIKAQPSKRPAYVLVFKLSRFGRNAADTWNSLQTLQDYGVELCCVKDGIDSGTSMGKAMLSIAAVFAEMERDNIRTQTMSGREEKARKGYWNGGQAPFGYRLVDKGNKFKELEVDEDEAKVVRRIFEMYAYENKGSMAIATWLNNHGIKKKPRGNARMDTFSSGTVQRMITNPVYIGKIAYGRRRTETIEGTRGETHVVKSDGYEIHDGQHDAIIDDATWAAAQALVGTRKPNMKTHDDGHVNMLNGLLVCPVCGRKMSSKPNRGKLKKDGTRGKTTWAYYCPHTSKARGASCTFKSQYPQECVDAEVVQLVSLASRSDAFVDALRRRIDDATDIEQLKEDIERIEGEKAANDKRMRMLITQIDSLDTADRSYERKFNDLQRRLDDLYDRDAGLSEALDETQAKMTTAEKRMDGERRLLEELDRIPELLEVADEQTRFDLIHEAVSEVHILPDKNPRKERVVANVTFKCPVRFFWEEIPGVANGYTPMTPDSLGQNNFRDDEAHVETVAILGRR

SEQ ID NO: 430 - protein, 593 aa, Unknown
  Description of Unknown: Integrase B431 sequence
  PTHR30461:SF3,cd00338,SM00857,G3DSA:1.10.10.2600,IPR036162, PF13408,PS51737,G3DSA:3.40.50.1390,IPR025827,IPR006119, IPR038109,PF07508,IPR011109,SSF53041,PTHR30461, PS51736,Coil,PF00239
MYEDIKTACLYVRFSSHNQTEQSIEGQTRVCRDFCKRHNIRIVEIYADRATSASKDIEKRVQFLKMIKDSEKGLFDAVIVYKLDRFARSRYDSATYKYRLKRNGVQLISATENISNDPEGIILESVLEGMAEFYSAELSQKINRGMRESAYKHNSIGGAVPLGYKIEDKKLVIDPKTAPIVKEAFEKYADGETVAEICRQFNTRGYKTSKGTAFGKSSFTKIFRNERYIGVYTFHDYRAEDAIPAIIDKDLWDRVQLRVGKIKNAPARNKAKVVYLLSGKIFCGHCGSKMNGNCNAGNYYYYQCYGKKNGNVDCKKKNIRKEFIERLVAQDALSLLTDEYIEQIATIACEKNQHEIELDSALPTIRDRIHQVDLSLNNLLKAIESGSAPDMLVKRMGELEKEKKDLQVQAKKESEDIVELDKAQVIYWLEQFRGGNIEDEEFCRMLIDLFVNSVTVWDEDDNTYKVTVAYNLTSLPTKTYRLNKGGTLSDFTSNAPLQVAEVLCSGRVCVLDRISIGQMAGGADRTGENVGHTVETVAARQADLQDSVNTDVVLDLLHLHGAGIIQQNDDLAAVGRLGSDGGIDEVALVVGQA

SEQ ID NO: 431 - protein, 592 aa, Unknown
  Description of Unknown: Integrase B432 sequence
  PTHR30461:SF3,SM00857,G3DSA:1.10.10.2600,IPR036162,PF13408, IPR025827,G3DSA:3.40.50.1390,PS51737,IPR006119,IPR038109, PF07508,IPR011109,SSF53041,PF00239,PTHR30461, PS51736,Coil,cd00338
MIDNCVRAVFYARVSTQEEQQLKALPKQIQENRDKIREKGWVLVDGYVDEGKSGTVIKRRDEYQRLLEDMELNKFDVVVVKDQERLQRNTRDWYNFIDRLVQNKLKLYFYLDNTFYSPDNALITGIKAIMAEEYSRNLSKKMNNSNKRRIEKARAGEEVSAMGNGQTYGYSIVNGKWVVDESQRELVKKMYELYTELHSVRKVRDALNEQGYRNQRGNLFTDENIGRIVKNVMHKGWVILNRHHREFDSKETIEKLEDEWVIVKNDHEAIVSEELWDAVNDEIQSHRNKGNSGTRGKRGGTDLLSGKMVCSCCGRVLWKHASQGSYKSKEGRKYTYKRYTQWYCSGKMGRGELACTDPATISGVKLQKYLVEMADMFLDYSTVEYSKNLLKRRTISWLEDLKDKLTTPNDNGKIEQDLKALEGKRGKLIDLYTDELISKEEFKSRSVDLDAEIEKKRALLVPVEENPDIKAIEDTIANIDAEIEALFEDEAMVEEKKVQFIQEHIKKIYVSKNSDVFIVLDNVAGAFLFIDKEDTRIEVVPVAEYNPEELSEEGITENDFVPFDRESMPVNSCPKFFHPSGEHPWSCRPVCH

SEQ ID NO: 432 - protein, 592 aa, Unknown
  Description of Unknown: Integrase B433 sequence
  SM00857,G3DSA:1.10.10.2600,IPR036162,PS51736,PS51737, G3DSA:3.40.50.1390,PF13408,IPR025827,IPR006119,IPR038109, PF07508,IPR011109,SSF53041,PF00239,PTHR30461, mobidb-lite,Coil,cd00338
MGGGKSLARKKKFELNDNNIAIAYYRFSSHSQNEASIDQQRELAHAWADAHGFKIVKEYEDAAISGTTENRPGFQQMLSEVAKIRPRVLIMWKTDRLGRDKYVLAMAKRTIRDAGCEIRLLAENIPTDGPEGVLIEGLMDAMAEYYSRQLSQNIQRGMDYNAQHALYNGHKLFGYGVDKSTKRYIVDPDTAPFVQRMFAEYAEGKAMQTICDELNAQGLRTTRGAKFGVKTMNKMLQNRAYIGEYRHGDIVVEGGMPALVDEETFDKVQRKFAENKRKGSQRARGMDENDAPRYWLTGKVYCGKCGSTLQGVSGTSGTGRTYYYYYCSAQRRKQCTLKKVRKEKLEDAVTMILRSILHNSENLMSLAVDAAAYYEKNYRDTGYLDGLEAKRREVEKSLANLVKVIESGLISETVTERLVQLEEQKRALNEAIEAENIRAALCEDEHTIKAYFEKFLHADFDNPETRDQVLEYFVDKIYLTDDGLVVTSWYSEDRTEVTWDMLYGEDGNPFVKGEAVKFDCFPFGSTKKHPGRRAVRGAFMLFTLRGCISGPTGRWRRIPASGPGPFPSGNTPPAAASRYTARGGQVRPLPAP

SEQ ID NO: 433 - protein, 592 aa, Unknown
  Description of Unknown: Integrase B434 sequence
  PTHR30461:SF3,SM00857,G3DSA:1.10.10.2600,IPR036162,PF13408, PS51737,G3DSA:3.40.50.1390,IPR025827,IPR006119,IPR038109, PF07508,IPR011109,SSF53041,PTHR30461,PS51736, cd00338,PF00239
MRKINKIEPLMPTLPSRKKVAAYARVSMETERLQHSLSAQVSYYSELIQSNPEWEYAGVYADDGITGTKSTRAEFQRLLRDCEDGKIDIILTKSISRFARNTVDLLETVRHLKELGIEVRFEKERINSLSGDGEVMLTLLASFAQEEIVSLSNNVKWATQKRFQQGLHNGRFQIYGYRWEGDQLVIHEEEAAIVRLIYDNFLNGLSAESTEKQLAEMGVKAYKGGHFGNGSIRQILSNITYTGNLLFQKEYTVDPVSKKSKINRGELPQYFVENTHEAIIPMEVYQAVQDEKARRRELGVFANWSIQTTCFTSKIKCPHCGCSYVHNKRTKNGNVQEYWNCGSKKKKKVGDGCPVGGTISQKSLLKACTEVLGLTEFNEDVFLDQVDHIDVPEKYTLVFYLKDGTTVTKEAPNTGHQDCWTAEYRAKVSKRRMGKNHNKKHLNPFTGYFRCPDCGANFRRQTHKYKDGTMRIYWHCPDAPRCGNQAKPNEDTMKNLLAELLGLPEFDEATFKETVSHIDLTGNYEATVYYKAGGTDIITWEPVPKKSYPHTEEYKELMRERMNEYWTDERKAEMSTRVKKLRSEKHWSSKRK

SEQ ID NO: 434 - protein, 592 aa, Unknown
  Description of Unknown: Integrase B435 sequence
  PTHR30461:SF3,SM00857,G3DSA:1.10.10.2600,IPR036162,PF13408, PS51737,IPR025827,G3DSA:3.40.50.1390,IPR006119,IPR038109, PF07508,IPR011109,SSF53041,PTHR30461,Coil, cd00338,PF00239
MARTATKHPAKPKRGKKLEAEEPGVLYGRYSSHNQKDISVEQQFEKGYGLAGEYGIRIVETYADRAVSGRTDKRKDFQRMMADAAKGKFRYVIAWKSNRMGRNMLEALVNEAKLQELGVRVLYVEEDFDDTAAGRFAARSMMNVNQFYSENMAEDIKRGLYDNASNCMVANGHLPYGYKRDDTLHYVIDEAKAAVIREIFVRVSCGEPLVDIYDSLNARGIKTSYGRPWGRSSFQKILSNERYRGIYIYGDVRKEGGIPRIVSDELYFKVQEVLKTKKNPQGRHRVNGDYLLTGKLFCGNCKSPMIGISGTGRTGKLHYYYVCQKKRSEKTCDKKNVRRDEVEYQIAKAIFDNALQDQVIEWIADSTIAYNDRKEAEGHIGILEDQLADVQRSLKNIMSAIEQGIVTETTKSRLLELESERSEIEGKIAAAKADIVPVNREQLIEWLLSLREGDIHDKKYQARLFDTFLIAAYLYDDGTAKLVFSFAGDKNTVTVPLAEAVDSVEENTAEGSFKLCLAPPCEKPPLVGGFSHAETEWREKSCGFDRMQSAAFTRPLRETQLEEYSLQFHQKSIIILIKLRRLLCCTAFSWMV

SEQ ID NO: 435 - protein, 592 aa, Unknown
  Description of Unknown: Integrase B436 sequence
  PTHR30461:SF3,IPR036162,PS51737,IPR011109,PTHR30461, PF00239,G3DSA:1.10.10.2600,IPR006119,SSF53041,cd00338, SM00857,IPR025827,IPR038109,mobidb-lite,PS51736, PF13408,G3DSA:3.40.50.1390,PF07508,Coil
MKKRINTNSAARAVIYARYSSANQRDCSIEQQVEKCRELAAREGVTVIEIYADRAVSGKTDRRPNFQRMMKDASLRQFDVVLAWKSNRMGRNMLQAMMNEEQLRSNGIRTIYAEEDFDDTAAGRFALRNMMNVNQFYSENMAEDISRGLMDNASKCMSNGSLPLGYKTGKDQKVVLDEAEAAIVQEIFTRVSCYEPFIDIARDLNRRGIKTKKGAEWGRSSFHTICRNERYRGIYIYRDIRVEGGMPRIVSDELFYKVQEVLKVKKNPQGRRKRSGYEEYLLTGKLYCGHCGSPMTGIAGTSKTGAMHYYYTCQKRRTDHSCDKKAVRRDQIEKAVAIAIQQQLLTDENIQMMADETMAYNARTEIKYRLQSLQQQLYSNETSTANIMKAIEMGIITDTTKARLLALEQEHGQLLAKIDTAKAEMVPINREDFVSLLDIYRTGDVNNKKYLAALFDTFLVRVDLYDDHFKITFDPTGGKMPVDIPIGAEDFPESPGDSPESSDFEASPQDAEKFVLALHNRTKILERLFGDFFVLMICLGCQASPPCGTGGSRFSAIDTATAPVLHWNRGCTILHPLYAMKSGRGLPSFSHW

SEQ ID NO: 436 - protein, 591 aa, Unknown
  Description of Unknown: Integrase B437 sequence
  PTHR30461:SF3,cd00338,SM00857,G3DSA:1.10.10.2600,IPR036162, PF13408,IPR025827,G3DSA:3.40.50.1390,PS51737,IPR006119, IPR038109,PF07508,IPR011109,SSF53041,PTHR30461, PS51736,Coil,PF00239
MIDNCARAVFYARVSTQEEEQLKALPKQVEECKDIIASKGWRLIDGYVDEGKSGTKKDGRKAYIKLLEDMQEDKFDIVVVKSQDRLQRNTFDWYKFTDLLNKNNKRLYLYMDNKFYEPSEDALITGIKAILAEEYSRDLSKKLNNSNKRRIEKAKAGEEISAMGNGQTYGYSIVNGKWVVDESQREVVRRMYELYTELHSVRKVRDALNKQGYRNQRGNLFTDENIGRIVKNVMHKGWVILNRHHRDFASKEIIEKSEEEWVIVKNDHEAIVSEELWDAVNDEIQSHRNKGNSGTRGKRGGTDLLSGKMVCSCCGRVLWKHASQGSYKSKQGRKYTYKRYTQWYCSGKMGRGELACTDPATISGVKLQKYLVEMADMFLDYSTVEYSKNLLKRRTISWLEDLKDKLTTPNDNGKIEQDLKALEGKRGKLIDLYTDELISKEEFKSRSVDLDAEIEKKRALLVPVEENPDIKAIEDTIANIDAEIEALFEDEAMVEEKKVQFIQEHIKKVYVSKNSDVFIVLDNVAGAFLFIDKEDTRIEVVPVAEYNSEELSEEGITENDFVPFDRESMPQHHGAECLCPSGGGSEPGRLF

SEQ ID NO: 437 - protein, 591 aa, Unknown
  Description of Unknown: Integrase B438 sequence
  PTHR30461:SF3,cd00338,SM00857,G3DSA:1.10.10.2600,IPR036162, PF13408,IPR025827,G3DSA:3.40.50.1390,PS51737,IPR006119, IPR038109,PF07508,IPR011109,SSF53041,PTHR30461, PS51736,Coil,PF00239
MIDNCVRAVFYARVSTQEEEQLKALPKQVEECKDIIASKGWRLIDGYVDEGKSGTKKDGRKAYIKLLEDMQEDKFDIVVVKSQDRLQRNTFDWYKFTDLLNKNNKRLYLYMDNKFYEPSEDALITGIKAILAEEYSRDLSKKLNNSNKRRIEKAKAGEEVSAMGNGQTYGYSIVNGKWVVDESQREVVRRMYELYTELHSVRKVRDALNEQGYRNQRGNLFTDENIGRIVKNVMHKGWVILNRHHRDFASKEIIEKSEEEWVIVKNDHEAIVSEELWDAVNDEIQSHRNKGNSGTRGKRGGTDTLSGKMVCSCCGRVLWKHASQGSYKSKEGRKYTYKRYTQWYCSGKMGRGELACTDPATISGVKLQKYLVEMADMFLDYSTVEYSKNLLKKRTISWLEDLRDKLTTPTDNGKIEQDLKALEGKRGKLIDLYTDELISKEEFKSRSVDLDAEIEKKRALLVPVEENPDIKAIEDTIANIDAEIEALFEDEAMVEEKKVQFIQEHIKKIYVSKNSDVFIVLDNVAGAFLFIDKEDTRIEVVPVAEYNPEELSEEGITENDFVPFDRESMPFPNVRIRIKRHGGTAWLDRTI

SEQ ID NO: 438 - protein, 591 aa, Unknown
  Description of Unknown: Integrase B439 sequence
  PTHR30461:SF3,SM00857,G3DSA:1.10.10.2600,IPR036162,PF13408, IPR025827,G3DSA:3.40.50.1390,PS51737,PS51736,IPR006119, IPR038109,PF07508,SSF53041,IPR011109,PTHR30461, mobidb-lite,cd00338,PF00239
MAKITRVEQAVPTIKTKKKVAAYARISMESERMNHSLSAQISYYSSLIQKNPDWQYAGVFADDGISGTGIAKRDEFKRMIEAADNGEIDIILTKSIQRFARNTVDLLETVRHLKDIGVEVRFEKEHINSMSGDGELMLTILASFAQEESRSLSENCKWGIRKRFEKGIPNGHFRVYGYRWEDDELVIVQEEAEVVRRIFQNFLDGKSRLETEREFAAEGITTREGCRWVDSNIKVVLTNVTYTGNLLLQKEFISDPISKQRKKNKGQLPQYYVEDTHPAIIDKATFDYVQSEIARRKELGPRANKSLNLTCFSGKLKCPFCGISYAHNKRTDRGFMEYWACGSRKKKGGRCPVGGSINHENLKKACAEVLGLDEFDEDAFSDMVDYINVPEREMLEFHLKSGEVITKDCPNTGHKDCWTAEYRAKTSEKRRKKPNCKGSSVMTGKIKCVGCGCNFRRATQPSSTAESGKAYYWRCAERDGCGTVGLREDVLKPFIAETLGIDEFDDAEFEKQIDHIDVLSATEMVFHFKDGRTVSRTWEQPKRVGRPWTDEQRAKFKESIKGRYTPEVRQRMSEHMKQLRKERGKAWRKEK

SEQ ID NO: 439 - protein, 591 aa, Unknown
  Description of Unknown: Integrase B440 sequence
  PTHR30461:SF3,cd00338,SM00857,G3DSA:1.10.10.2600,IPR036162, PF13408,IPR025827,G3DSA:3.40.50.1390,PS51737,IPR006119, IPR038109,PF07508,IPR011109,SSF53041,PTHR30461, PS51736,Coil,PF00239
MYEDIKTACLYVRFSSHNQTEQSIEGQTRVCRDFCKRHNIRIVEIYADRATSASKDIEKRVQFLKMIKDSEKGLFDAVIVYKLDRFARSRYDSATYKYRLKRNGVQLISATENISNDPEGIILESVLEGMAEFYSAELSQKINRGMRESAYKHNSIGGAVPLGYKIEDKKLVIDPKTAPIVKEAFEKYADGETVAEICRQFNARGYKTSKGTAFGKSSFTKIFRNERYIGVYTFHDYRAEDAIPAIIDKDLWDRVQLRVGKIKNAPARNKAKVVYLLSGKLFCGHCGSKMNGNCNAGNYCYYQCYGKKNGNVDCKKKNIRKEFIERLVAQDALSLLTDEYIEQIATIACEKNQNEIELDSALPTIRDRIHQVDLSLNNLLKAIESGSAPDMLVKRMGELEKEKKDLQAQAKKESEDIIELDKAQVIYWLEQFRGGSIEDEEFCRMLIDLFVNSVTVWDEDDSTYKVTVAYNLTSLPTKTYRLNKGGTLSDFASNAPDREPNKDGVVFVHVITLGGDDRARGRIAHFDSAAGFLIHPVQIGFSVRNFRLNLKNVCTDGICQIFSNFCGNTAGRKIGDKSFVHGNALPLDDFV

SEQ ID NO: 440 - protein, 591 aa, Unknown
  Description of Unknown: Integrase B441 sequence
  PTHR30461:SF3,SM00857,G3DSA:1.10.10.2600,IPR036162,PF13408, IPR025827,G3DSA:3.40.50.1390,PS51737,IPR006119,IPR038109, PF07508,SSF53041,IPR011109,PF00239,PTHR30461, PS51736,Coil,cd00338
MAKKKKPAGGNAIIYARYSSHNQRDVSIEQQIEACRKHAAELGLTITDTYEDRAISGRTDNRPAFQRMMRDAEGGKFQYVLAWKSNRMGRNMMQAMVNESRLMDCGVKVFYAEEDFDDSAAGRFALRSMMNVNQFYSDNLAEDVRRGLMDNASKCMANGRQPLGYKRGEDGKVVVDEPAAAIVREIYTRIASGEMFMDIARDLNRRGIKTQSGSEWNKSSFKVLCRNERYRGIYIYGDTRIEGGIPPIVDDVLWYKVQEVLKVKKSKNRHHCPSDEDYLLTGKLRCGKCGGYMIGMSGRSKTGDVHHYYACQNRRVGHTCDKKNIRRDVVEPAVAQAIKQYCLTDDAIEWITDQTIAYWEDEDRKLQIDSIENDLSAVQSSISNVMKAIEMGVITETTRDRLIELERQQTDLKSKLALAKEEIVHVDRKDLISSLLAFRHGNVHDRAYQEKLFNAFLIAVYVYDDDHLKLVFNSFGKDDTVNIALDLGENDDNSGLSDVSKSSPILSNGQPKKNQSNLFGWFFFLFVSYFRLHPFSVWMGSGNAPLDIRGAHSISFRRQSSNLQHIPPGGFKIPGVPWGCPIAVAAGVIYL

SEQ ID NO: 441 - protein, 591 aa, Unknown
  Description of Unknown: Integrase B442 sequence
  SM00857,G3DSA:1.10.10.2600,IPR036162,PF13408,IPR025827, PS51737,PS51736,G3DSA:3.40.50.1390,IPR006119,IPR038109, PF07508,SSF53041,IPR011109,PTHR30461,Coil, mobidb-lite,cd00338,PF00239
MEELDTRPVADILARYSTDNQNPVTIDVQVEKCREWCERNGYQVGKIFSDEAVSGMKETRAGYEACMMHLGMGGAQLVVVYDQSRMFREFTEWFQFRKDVDMLGARVASVTQPMVGGDLKDPAVFINEAATAMLNHAQVLITRQKTIDALKHNAREGKSSGGKPPLGYDLDKDKKYVVNEHEAEAVRLVFQLFARGFSYGEIIDELNSRGYLTKRGQPFGKNSIFDLLKNEKYIGRLVYGATKAQADGRWNSHAKSKEDAIVVENGVPAIIEQELWEQVQSRIRTRKGAGGRYSAKREYLLTGRVFCGDCGASMVVMGSKASGYQYYECNNKRRTHTCKMKNVRTEWLEQTVAASIKQMLTEPANIEMLVDVARDQERQITTEYDTRRAGLASRYTRVCRQLENGVNALLEGVVSAELKEKVRRLEEEKAEIEAETAELNQYKGYVGLDDATIRRCVENVAKVDIDTPEGLKLILSVVSRVNIHTDTIEIKTLISTDGTDPDPTKSRPQNLELFPSEGLSGEKYHTTPENGSGHQTRQIRTLRQLATGSDLLFLSIDWSQKKWHRIFLCHSLPKKVTYRWPFSRIGGGNAV

SEQ ID NO: 442 - protein, 591 aa, Unknown
  Description of Unknown: Integrase B443 sequence
  PTHR30461:SF3,SM00857,G3DSA:1.10.10.2600,IPR036162,PF13408, PS51737,G3DSA:3.40.50.1390,IPR025827,IPR006119,IPR038109, PF07508,SSF53041,IPR011109,PF00239,PTHR30461, PS51736,Coil,cd00338
MKKFPIDLSCLTEEEISQFQEDPYTLYNGDQDVALYLRYSSTGQSDQSIEGQLRDCRTFCKANHYRIVAIYVDRATTARKDVEKRVHLMEMISDSAKQNWEYVIVWKLDRFARNRNDSAIMKMRLRKNGVKVLSATEHLTDSPESIILESVLEGMAEFFSAELSQKVTRGMRESALKCHSVGGHIPLGYKVENHKLVVDPDTAHIVQEAFSLYANGESVADICRKFNSAGYKTAKNTEFNRSSFKAMFRNTRYIGTYTYKDIVIENGIPAIIDKELFETVQRRLSKTATAPARGKAKVDYLLSGKLFCGHCGASMNGESGAGRHGKVYHYYSCYTKKRKLGCDKRPLKKDYIEGIVARDALNLLTDQLIDEIADMAIRQSEQDLINDTHIPQLTAQLSEVEKSITNITAAIEKGIASETLMNRLVQLEHEKKTLNKEIKAEEKFVYRIDRDQIVFWLSQFKYGNIEDENFRRRLIDLLVNSVTVWDEPDGYKITTAYNLTSCKTKTFRVEKNPAAEEATGFDFGESECTKTKDMLMSFVLFYLLFSLSKEQRTGHPYGSLCVVFIFSWSYSCFRACSRSISSASPHRRSKS

SEQ ID NO: 443 - protein, 591 aa, Unknown
  Description of Unknown: Integrase B444 sequence
  SM00857,IPR006118,G3DSA:1.10.10.2600,IPR036162,PS51737, G3DSA:3.40.50.1390,PS00397,IPR006119,IPR038109,PF07508, IPR011109,SSF53041,PTHR30461,Coil,PS51736, cd00338,PF00239
MRCGVYVRVSTDDQKDNGYSIDSQLRMIKEYCEKKNYDIIDVYNDAGHSGKDLMRPEMQRLLKDIKSKKIDKLVAIKVDRLTRSNYDGFWLLNYLEEHDVKLELILEPFDVSTANGEMIYGMNLVFGQRERKEIGARTKRAMEEMAMEHIHPSKAPYGYTRNKETGHLEIEPIEAEVVKEIFELCKERHSTRNIATIMKDNDAYLKQGKWKADRVYKILTNSIYIGIFEYGKYKRKPEDILKVENYCEPIIDLKTWNITRKNLEKNKHPNYGEHIHLFTSLIKCPECGNILSSTISYKYSGTPNKKEYYHLTCKNVNCKAKGLHYSSDKIEKKLGRVLNELTRYMYDMNNEIIVSNSTKSKDISDIDKAIEKLKIQEKKLVDLYLSSNLNVDAINHKNEVIKKEIEKLNKKKQLLDPNDDFKEYTVELLKKLDYKKEDDYLLFNKLGFSFMWDSLNRKAKRDILNKLVSQIEITRDKNYNIEIKNIKFTDEFISRSCKEYLEYLNDILKNNNIGIKYQELITTDELNDYSKNYYVLSLQKLEKNEYSSDERKILLTLASEHFYYDGIIQCPLYSNETIIDQIMLIPKTEIC

SEQ ID NO: 444 - protein, 591 aa, Unknown
  Description of Unknown: Integrase B445 sequence
  SM00857,IPR006118,G3DSA:1.10.10.2600,IPR036162,PS51737, G3DSA:3.40.50.1390,Coil,IPR006119,IPR038109,PF07508, IPR011109,SSF53041,PTHR30461,PS00397,PS51736, cd00338,PF00239
MRCGVYVRVSTDDQKDNGYSIDSQLRMIKEYCEKKKYDIIDVYNDAGHSGKDLMRPEMQRLLKDIKSKKIDKLVAIKVDRLTRSNYDGFWLLNYLEEHDVKLELILEPFDVSTANGEMIYGMNLVFGQRERKEIGARTKRAMEEMAMEHIHPSKAPYGYTRNKETGHLEIEPIEAEVVKEIFELCKERHSTRNIAIIMKDNNAYLKQGKWKADRVYKILTNSIYIGIFEYGKYKRKPEDILKVENYCEPIIDLKTWNITRKNLEKNKHPNYGEHIHLFTSLIKCPECGNILSSTISYKYSGTPNKKEYYHLTCKNVNCKVKGLHYSSDKIEKKLGRVLNELTRYMYDMNNEIIVSNSTKSKDISDIDKAIEKLKIQEKKLVDLYLSSNLNVDAINHKNEVIKKEIEKLNKKKQLLDPNDDFKEYTVELLKKLDYKKEEDYLLFNKLGFSFMWDSLNRKAKRDILNKLVSQIEITRDKNYNIEIKNIKFTDEFISRSCKEYLEYLNDILKNNNIGIKYQELITTDELNDYSKNYYVLSLQKLEKNEYSNDERKILLTLASEHFYYDGIIQCPLYSNETIIDQIMLIPKTEIC

SEQ ID NO: 445 - protein, 591 aa, Unknown
  Description of Unknown: Integrase B446 sequence
  PTHR30461:SF3,IPR036162,PS51737,IPR011109,PTHR30461, PS00397,PF00239,G3DSA:1.10.10.2600,IPR006119,SSF53041, cd00338,SM00857,IPR025827,IPR038109,PS51736, IPR006118,PF13408,G3DSA:3.40.50.1390,PF07508,Coil
MTRKAKTCFIYVRVSTKMQVENGESIEAQLYDLRQYAKRENLRILHEYIDDGYSGKNITGRPHFQEMMEEIKSGVHVDYVLVFKLSRFGRNAADALSSLQFMQDYGTNLVCVKDGINSEAQMGKMMIAFMSAFAEMERENILVQTMAGREQKAREGKWNGGQAPFGYRLVKDEKGKGHLEIDEDEAEIVRIIFREYTKNGKGANAIASWLNTQGYRKKIRGNSKYEHFAPGTVKNIIRNPVYAGKIAFGRRRTTPVKGERNVYHMVKQDNFDIYEGEHDAIIDEATWNAAQKRLAEDSHPFPEAKPDGHTHLLTGMLVCPVCGRNMIANVSRGKRKKDGTIGKTTYAYTCKYSKRQFGHDCTFTRQFKQEYIDREVIEVISRAAHSAVFEERVREELDAAVDIEKLEADVARIGKALENNGAARRMLSRQLDALDASDRSYERKYEDMQARLDKLYDESADIEEALDEAEAKLESAKEKQVTTARVYEMLDEFQEKFDTYDPAKQKEILQQVVERVEIDPDANPKKGDAIVKRVRFKCPVSFYRTLPEEAYDVLGINEFNRLETTEYTPDGNSRVDGNHDETVVLMSRKEK

SEQ ID NO: 446 - protein, 590 aa, Unknown
  Description of Unknown: Integrase B447 sequence
  PTHR30461:SF3,SM00857,G3DSA:1.10.10.2600,IPR036162,PF13408, PS51737,G3DSA:3.40.50.1390,IPR025827,IPR006119,IPR038109, PF07508,IPR011109,SSF53041,PF00239,PTHR30461, PS51736,Coil,cd00338
MRVSVNLNAQKPDTTTNAVIYARYSSHGQTEQSIEGQLAKGHEYAAAQGYTVVHEYIDRAMTGRNDNREAFQKMLSDTGKHQFQVVIVWKVDRFGRNREEIAFNKHTCKKNGVRVEYVAESLPNSPEAVILESVLEGMAEYYSIQLSQNIRRGQLESAKKCQCVGGSVPLGYTLDSDKHFVIDPQTAPVVKKIFDLYAEGATISEITGQLNEQGIRTIRKQLFTKNSLTKLLKNEKYIGVYTYKDIVRVEGGVPAIVDKSTFDRVQELLKINRRAPSHTWTKVEYLLTDKLFCGHCGSPMVGESGFSHTGAKYSYYGCIKRRREKACDKKPVRQDWIEALVLDETVKLLHDDELMEYIIDRTWEYYQVTDKVQEEKAVLEAQLAEVDKAINNLVRAIEAGIFNAATKSRMDELDAQKAALTASLADLELTSGIRITRDHIEYFLLRLRDLDVKDRECQKRLVQTFVNAVFIYDDGRVKITYNYSGQSSTITLNQIASAEKGKGFVCCLPCSTFSPRFRVGNRGIFCFWGKQDANILPISAVLCYNGSENGGGGTENEKAACCVPDGARLLGLRGVRGRNAGRRYGHVRAI

SEQ ID NO: 447 - protein, 590 aa, Unknown
  Description of Unknown: Integrase B448 sequence
  PTHR30461:SF3,SM00857,G3DSA:1.10.10.2600,IPR036162,PF13408, PS51737,IPR025827,G3DSA:3.40.50.1390,IPR006119,IPR038109, PF07508,IPR011109,SSF53041,PF00239,PTHR30461, PS51736,Coil,cd00338
MRVSVNLNAQKPDTTTNAVIYARYSSHGQTEQSIEGQLAKGHEYAAAQGYTVVHEYIDRAMTGRNDNREAFQKMLSDTGKHQFQVVIVWKVDRFGRNREEIAFNKHTCKKNGVRVEYVAESLPNSPEAVILESVLEGMAEYYSIQLSQNIRRGQLESAKKCQCVGGSVPLGYTLDSDKHFVIDPQTAPVVKKIFDLYAEGATISEITGQLNEQGIRTARKQLFTKNSLTKLLKNEKYIGVYTYKDIVRVEGGVPAIVDESTFDRVQELLKINRRAPSHTWTKVEYLLTDKLFCGHCGSPMVGESGFSHTGAKYSYYGCIKRRREKACDKKPVRQDWIEALVLDETVKLLHDDELMEYIIDRTWEYYQVTDKVQEEKAVLEAQLAEVDKAINNLVRAIEAGIFNAATKSRMDELDAQKAALTASLADLELTSGIRITRDHIEYFLLRLRDLDVKDRECQKRLVQTFVNAVFIYDDGRVKITYNYSGQSSTITLNQIASAEKGKGFVCCLPCSTSSPRFPRGVAALFLFWGKSGANQLPISTVLCYNGSENGRGGMENEKAACCVPDGARLLGLRGVRGRNAGWRYGHFRAV

SEQ ID NO: 448 - protein, 590 aa, Unknown
  Description of Unknown: Integrase B449 sequence
  PTHR30461:SF3,SM00857,G3DSA:1.10.10.2600,IPR036162,PF13408, IPR025827,PS51737,mobidb-lite,G3DSA:3.40.50.1390,IPR006119, IPR038109,PF07508,IPR011109,SSF53041,PTHR30461, PS51736,cd00338,PF00239
MKTVEKIERKLPVLKTRKRVAAYARVSMESERMQHSLSAQVSYYSALIQKNPEWEYAGVFADYGISGTGTKKREEFNRMLAECEAGNIDIILTKSIQRFARNTVDLLNTVRHLKDLGIEVRFEKENINSLSGDGELMLSILASFAQEESRSISENVKWGTIKRFKQGIPNGKFSIFGYEWQDDKLVIVPEEAEIIRWMYAEYMKGASRIEIGRALMDRGIYTRQGKPWVDSNVKVILTNITYTGNMLFQKEYCEDPITKHRRKNYGEMPQYFVEDTHEAIIPMDEWQAVQAEFKRRRDLGPFGNKSLKLSAFSTKITCGCCRKHYRHSGKRNTAGEVYYIWICQTKSQKGVSACPSKNIPEKMLQNTAAEVLGLDKFDEDVFSQQIEEVIVIGDDTLTFRFYDGHEVTTKWQSTAKTDWWTDERRKLWGERHKRKDTNPNRNTFYEFTGFIKCGCCGANYRCQSGKRKDGTPTRSWYCTGPRSECRNPAIRDETMKRLVTEILGLDEFDEAAMDAQIESATILDHMVTFHFRDGHIESRDFLDKRHGTPWTEERREKAKKSMKAAWTDERREAMSERIKKIRSEKKWPNP

SEQ ID NO: 449 - protein, 590 aa, Unknown
  Description of Unknown: Integrase B450 sequence
  PTHR30461:SF3,IPR036162,PS51737,IPR011109,PTHR30461, PS00397,PF00239,G3DSA:1.10.10.2600,IPR006119,SSF53041, SM00857,IPR025827,IPR038109,PS51736,cd03768, IPR006118,PF13408,G3DSA:3.40.50.1390,PF07508,Coil
MQGLSLCIWENIMARRKTALRGASVSTRITKVAIYIRVSTVHQVDKDSIPMQKKDLIAYCQLILGTDNYEIFEDAGYSGKNTDRPAFQDMMGRIRKGEFTHVLVWKIDRISRNLLDFAEMYEELQALRVTFVSKNEQFDTSTAIGEAMLKIVLVFAELERNMTSERVTATMISNNGQWNGGRIPFGYSYDSSTSQFSIREDEAVICRRLKDLYLDNKSLVYTARALNADGYKTRAGVDWTPTAVWIIASSPFYAGIYRYNRYKGTENRTLNPEEEWVMISDHHPAIFTLEEHEAMKSSLKTNARYVDNPVGKPHTTANVHIFQGIAYCGKCGNKMVSTPGRKHADGYRPSNYSCPLHRRSKKCDNATVNDMIVGEFAINYILNMLNAKKTFSRIDTPKELQRHLLTGSTFSDISSIEEDGLNDFFNLLSRYGSDNSYVFAIKTPRKKKASVNPELAALRKEKEKQERALQRLQDLYLYSDKSMSEKDFILRKSEISDRLKNINAQLGLITQNPDSLLSDEEFIKQASHLLIQKELKGRKYIYYKSLATSVDPEILRTYMETILDSVYITDGHVSSIVFKNGLTHKFIYKN

SEQ ID NO: 450 - protein, 590 aa, Unknown
  Description of Unknown: Integrase B451 sequence
  PTHR30461:SF3,cd00338,SM00857,G3DSA:1.10.10.2600,IPR036162, PF13408,PS51737,G3DSA:3.40.50.1390,IPR025827,IPR006119, IPR038109,PF07508,IPR011109,SSF53041,PTHR30461, PS51736,Coil,PF00239
MIDNCARAVFYARVSTQEEQQLKALPKQIQENRDRIREKGWVLVDGYVDEGKSGTVIKRRDEYQRLLEDMELNKFDVVVVKDQERLQRNTRDWYNFIDRLVQNKLKLYFYLDNTFYSPDNALITGVKAIMAEEYSRNLSKKMNNSNKRRIEKARAGEEVSAMGNGQTYGYSIVDGKWVVDESQREVVRRMYELYTELHSVRKVRDALNEQGYRNQRGNLFTDENISRIIKNVMHKGWVILNRHHRDFDTKEIIEKSEEEWVIVKNDHEAIVSEELWDAVNDEIQSHRNKGNSGTRGKRGGTDTLSGKMVCSCCGRVLWKHASQGSYKSKEGRKYTYKRYTQWYCSGKMGRGELACTDPATISGVKLQKYLVEMADMFLDYSTVEYSKNLLKRRTISWLEDLKDKLTTPNDNGKIEQDLKALEGKRGKLIDLYTDELISKEEFKSRSVDLDAEIEKKRSLLVPVEENPDIKAIEDTIANIDAEIEALFEDEAMVEEKKVQFIQEHIKKIYVSKNSDVFIVLDNVAGAFLFIDKEDTRIEVVPVAEYNPEELSEEGITENDFVPFDRESMPFPHGRIHIKRYSNKTWYCRSV

SEQ ID NO: 451 - protein, 590 aa, Unknown
  Description of Unknown: Integrase B452 sequence
  PTHR30461:SF3,cd00338,SM00857,G3DSA:1.10.10.2600,IPR036162, PF13408,PS51737,IPR025827,G3DSA:3.40.50.1390,IPR006119, IPR038109,PF07508,IPR011109,SSF53041,PTHR30461, PS51736,Coil,PF00239
MRVSVNLNAQKPDTTTNAVIYARYSSHGQTEQSIEGQLAKGHEYAAAQGYTVVHEYIDRVMTGRNDNREAFQKMLSDTGKHQFQVIIVWKVDRFGRNREEIAFNKHTCKKNGVRVEYVAESLPNSPEAVILESVLEGMAEYYSIQLSQNIRRGQLESAKKCQCVGGSVPLGYTLDSDKHFVIDPQTAPVVKKIFDLYAEGATISEITGQLNEQGIRTIRKQLFTKNSLTKLLKNEKYIGVYTYKDIVRVEGGVPAIVDKSTFDRVQELLKINRRAPSHTWTKVEYLLTDKLFCGHCGSPMVGESGFSHTGAKYSYYGCIKRRREKACDKKPVRQDWIEALVLDETVKLLHDDELMEYIIDRTWEYYQVTDKVQEEKAVLEAQLAEVDKAINNLVRAIEAGIFNAATKSRMDELDAQKAALTASLADLELTSGIRITRDHIEYFLLRLRDLDVKDRECQKRLVQTFVNAVFIYDDGRVKITYNYSGQSSTITLNQIASAEKGKGFVCCLPCSTFSPRFRVGNRGIFCFWGKQDANILPISAVLCYNGSENGGGGTENEKAACCVPDGARLLGLRGVRGRNAGRRYGHVRAI

SEQ ID NO: 452 - protein, 590 aa, Unknown
  Description of Unknown: Integrase B453 sequence
  PTHR30461:SF3,SM00857,G3DSA:1.10.10.2600,IPR036162,PF13408, IPR025827,PS51737,G3DSA:3.40.50.1390,IPR006119,IPR038109, PF07508,SSF53041,IPR011109,PTHR30461,Coil, PS51736,cd00338,PF00239
MNDVQVIKANRNENRIRGRKVEILRVAAYCRVSTDSEDQLNSYKSQVMYYTDLIKKKPEWSLADIYADEAITGTQVTKREDFQRMINDCMNGDIDMVITKSISRFARNTLDTLKYVRMLKEKGIAVFFEDENINTLTMDGELLLVVLSSVAQQEVENISSNVKKGLKMKMQRGELVGFQGCLGYDYHKDTKSISVNEKEAEIVRYIFNRYIEGAGCTVIANELENLGYKTKYGSSRWVQSTVIGIIKNEKYKGDLLLGKTFTVDPISKRRLENFGEEDKFYIRDHHEAIISEEIFEEAQKILAKRNVNRGVHQEGQKRNKFSRKYAFSCMIKCGFCGGTLSRRNWHSSSAYTKTIWHCVTATKHGKKNCPHCKGIPEEVIENAFVKSYQLLCSDQHEVVSEFLQKVEDILKDDASLKRLPKIEKEMTDLQRRKEKLLDLRLDNNIDRDIYDKKNQELSEQLKKLQAEQLQLVELSKNQESTKTRIKEFRKNLNSGELLENFDRVVFESVVERIIIGGYNDEGVADPLKITFVYKTGIHSNLNAKDFKPKRKNAAAVHTDAELCSYASVEDDKLCLHSSSDTCGNSLFIIT

SEQ ID NO: 453 - protein, 590 aa, Unknown
  Description of Unknown: Integrase B454 sequence
  PTHR30461:SF3,SM00857,G3DSA:1.10.10.2600,IPR036162,PF13408, PS51737,G3DSA:3.40.50.1390,IPR025827,IPR006119,IPR038109, PF07508,IPR011109,SSF53041,PF00239,PTHR30461, PS51736,Coil,cd00338
MRVSVNLNAQKPDTTTNAVIYARYSSHGQTEQSIEGQLAKGHEYAAAQGYTVVHEYIDRAMTGRNDNREAFQKMLSDTGKHQFQVVIVWKVDRFGRNREEIAFNKHTCKKNGVRVEYVAESLPNSPEAVILESVLEGMAEYYSIQLSQNIRRGQLESAKKCQCVGGTVPLGYTLDSDKHFVIDPQTAPIVKKIFDLYAEGATISEITGQLNEQGIRTARKQLYTKNSLTKLLKNEKYIGIYAYKDVVRVEGGVPAIVDKSTFDRVQELLKINRRAPSHTWTKVEYLLTDKLFCGHCGSPMVGESGFSHTGAKYSYYGCIKRRREKACDKKPVRQDWIEALVLDETVKLLHDDELMEYIIDRTWEYYQVTDKVQEEKAVFEAQLAEIDKAINNLVRAIEAGIFNAATKSRMDELDAQKAALTASLADLELTSGIRITREHIEYFLLRLRDLDVKDRECQKRLVQTFVNAVFVYDDGRVKITYNYSGKSSTITLNQIDGAEKGKGFVCCLPCSTSSPRFPRGVAALFLFWGKSGANQLPISTVLCYNGSENGRGGMENEKAACCVPDGARLLGLRGVRGRNAGWRYGHFRAV

SEQ ID NO: 454 - protein, 590 aa, Unknown
  Description of Unknown: Integrase B455 sequence
  PTHR30461:SF3,cd00338,SM00857,G3DSA:1.10.10.2600,IPR036162, PF13408,IPR025827,G3DSA:3.40.50.1390,PS51737,IPR006119, IPR038109,PF07508,IPR011109,SSF53041,PTHR30461, PS51736,Coil,PF00239
MKRVAVYSRKSKFTGKGDSIENQIEMCKEYITNNISKDVEFTIYEDEGFSGGNLDRPKFKKLIAAIKNKKFDILVCYRLDRISRNVADFSSTLEVLQSNNCSFVSIKEQFDTSSPMGRAMIYIASVFAQLERETIAERVKDNMIEIAKNGKWTGGKIPVGFNSEKIEYVDENGLTRVAPNLVINNKEMELVKFLYEKYLELGSLHKLEVYIHENNIRSRNDILYEKSSLKTILQNPIYVKANNAVINYLKNSKWNVYGDPDNIHSLLTYNKTEQIKKDGKYTKSKKDLSERFAAVSSIKGYIEPDLWLAVQRQFEKNKNTFPRLGKTHNALLVGKLRCGKCKEYMLVSHGRISKVTGQKLFYYTCSLKRKSHKKLCNNGNAKAGDIENLVLLSLKQLSLNKKKFILNLRNRYKSNASDENMDLEKLSLLKSLKEKKSQINNLVTKLSLCDSIDDILLHRIKLLKDECIAIEKNINNLESKALNLKNSLLNLDLIDELLDKCAIIDTLDRSQQKLIIDNLIDTIYWYSDNTGKGNIEIKFVGIEDEQKEFKFTSEEMKQLMLHFYSDSTCKINDNLLSFRKIKKDTRTRTC

SEQ ID NO: 455 - protein, 590 aa, Unknown
  Description of Unknown: Integrase B456 sequence
  SM00857,G3DSA:1.10.10.2600,IPR036162,PF13408,IPR025827, G3DSA:3.40.50.1390,PS51736,PS51737,IPR006119,IPR038109, PF07508,IPR011109,SSF53041,PTHR30461,mobidb-lite, cd00338,PF00239
MKTVEKIERKLPVLKARKRVAAYARVSMESERMQHSLSAQVSYYSALIQKNPEWEYAGVFADYGISGTGTKKRDEFNHMLTECEAGNINIILTKSIQRFARNTVDLLNTVRHLKELGIEVRFEKEKINSLSGDGELMLSILASFAQEESRSISENVKWGTIKRFKQGIPNGKFSIFGYEWQDDKLVIVPEEAEIIRWMYAEYMKGASRIEIGRALMDRGIYTRQGKPWVDSNVKVILTNITYTGNMLFQKEYCEDPITKHRRKNYGEMPQYFVEDTHEAIIPMDEWQAVQAEFKRRRDLGPFGNKSLKLSAFSTKITCGCCRKHYRHSGKRNTAGEVYYIWICQTKSQKGVSACPSKNIPEKMLQNTAAEVLGLDEFDEDVFSQQIEEVIVIGDDTLTFRFYDGHEVTTKWQSTAKTDWWTDERRKLWGERHKRKDTNPNRNTFYEFTGFIKCGCCGANYRCQSGKRKDGTPTRSWYCTGPRSECRNPAIRDETMKRLVTEILGLDEFDEAAMDAQIESATILDHMVTFHFRDGHIESRDFLDKRHGTPWTEERREKARESMKAAWTDERREAMSERIKKIRSEKKWPNP

SEQ ID NO: 456 - protein, 590 aa, Unknown
  Description of Unknown: Integrase B457 sequence
  PTHR30461:SF3,cd00338,SM00857,G3DSA:1.10.10.2600,IPR036162, PS51737,G3DSA:3.40.50.1390,IPR006119,IPR038109,PF07508, SSF53041,IPR011109,PTHR30461,PS51736,Coil, PF00239
MKRKIAIYARVSTEHEAQISALENQIQYYDEILKKHPEWELYERYIDEGITGTSIGKRDSFLRMMSDAKDKCFDLIVTREVSRFARNIVDTLQQTRTLKQYGVEVYFTDDNIWTMNDEDGELRLSIMATLAQNESKKTSMRVKAGQMISFKNGVFYGNGNILGYDREGKNLVINPTQALTVKRIFELYLQGNGIRKIQFIMEQEKRKTSLGKTKWSASNIARILKNPFYCGRIEYRKQYVPDYLTQKKINNHGEIERVITKGTHDPIVSEEDFDKVQEIFKTKTTKKDNKKYGKPLADNVWVRKLKCKCGHGMNRKINYVSKITGVKTYSFQCHDQIHTGTIKTRLKKGLSIDGICDNKSFPEWKLEVQADFIFRKLLSNKQEIYETAIEMLESSVAVDTHIQDKKQKIENHIQSIDKLRARNDMLLDMCTDGDISRETFKKKTELNNQNIHELEEKIKLIRKQIKENDTQEDLNKRIECLSAFLKMKCFSKKEKIPESIIEKYVEKIIFYKDDFEWYLRPTIGNVDFLSIDAKNMKKGTHELEKTMCYVPSSTGSDKHETLIKNPFITGQRLLSSFRAKVSASEKSKFT

SEQ ID NO: 457 - protein, 590 aa, Unknown
  Description of Unknown: Integrase B458 sequence
  cd00338,SM00857,IPR006118,G3DSA:1.10.10.2600,IPR036162, PS51737,G3DSA:3.40.50.1390,IPR006119,IPR038109,PF07508, SSF53041,IPR011109,PTHR30461,PS00397,PS51736, Coil,PF00239
MLPINPRADIVKPQTSLIISYALFFRKGLFYMSKTVAIYVRVSTGKQADRDSIPFQIQECSNYVKHFLKTENFEVFKDAGRSGKNTHRPEYQRMIEKVKAGMISHVVVYKIDRISRNLVDFSIMYNDFKEHKVAFISLNEQFDTSSAIGEAVLKIILVFAELERKLTGERVRDIMMNRALEGKWNGARVPYGWDWDTKKQCPVHSDTEAEYARMMYRLYDESHSTCVVRDYCNAHDIPTKRGGEWTSKTVADFLRNPMNVGDYRYNYRKSARGKKNDPSEVVYVKDVFPPLIDRELYERVTHQMDANARGIGKDGRKIVSKRTHVFGGLIVCGLCGAFYHSDSDAPRADGFLPSQYRCGAHNKKIHCKAKGTSDVKLGPFIFNYISNLVKASKSRKLLHSVSDLEQMLLTGPEFEQVAGIADAGLDVTFDTIMHGFKPKRYTAAPYTVIRSGDSDALTAKRDKTIRALERLKKLFLFEDDAMSEKEYLMSKRELEGTLSDIENELSALEADTADGKYDDMSFISTASGFLIAHQISSGEHINYRELACAVDAKVLKDFANSVIERIVLLDGRVASIEFKNGLVHEFLYRE

SEQ ID NO: 458 - protein, 590 aa, Unknown
  Description of Unknown: Integrase B459 sequence
  PTHR30461:SF3,SM00857,G3DSA:1.10.10.2600,IPR036162,PF13408, IPR025827,PS51737,G3DSA:3.40.50.1390,IPR006119,IPR038109, PF07508,IPR011109,SSF53041,PTHR30461,Coil, PS51736,cd00338,PF00239
MKITAPARSARAVSLEAFVDNLNLANVVIYARYSSAGQNDQSIDGQLAKCREYAQQRGYRVVGEYCDRALSGRYAETRPEFQRMISDSAKHAFDFVLVWKLDRFSRDRYDSAIYKKKLRANGVRVLSVTEGVGDSSESVLLEAILEAMAEEYSRQLAQNVRRGMRQNAEKGLSLGGLAPLGYRVVNKQYEINEDEARIVRFIHEQYADGAGQKQIVADCARLGYRNQRGNPLTLASVKRILANERYVGRYDYLGEIVIEDAFPAIVSKDLKKRVRARLKANSKAPGHAKAKVEYLLHGKLFCGECGAPMIGECGRGRHGATYYYYTCAARKKQHTCKKRNERKDELEASIVDYIGSCVLTDSWIDGAAERVVAEYQKSYDASGIKPLEKQIRDADKEIDQLVDALISATAEAARRRINERIETAEARKRALEADLASLRIASRVQIRKEDIVVWLNQFRTGDRSDLEYRKKVIDLFVNAIYLYDDSFKLFLNVADSAQVTYADALALAPPSVSDFGASGVPEKQLISFWNQLLFFFCAALPQEHKTAPLICKGSRWCVRLSACSDHPIGWQKPDQLLTVNFAESSSWLPM

SEQ ID NO: 459 - protein, 590 aa, Unknown
  Description of Unknown: Integrase B460 sequence
  PTHR30461:SF3,SM00857,G3DSA:1.10.10.2600,IPR036162,PF13408, IPR025827,G3DSA:3.40.50.1390,PS51737,PS51736,IPR006119, IPR038109,PF07508,IPR011109,SSF53041,PTHR30461, mobidb-lite,cd00338,PF00239
MRTIRKIERSIPNLKKRKKVAAYARVSVDSERMHHSLSAQVSYYNSLIQKNPEWEYAGVYADYGISGTRIKKRQEFLRMLEDAEAGKIDIILTKSIQRFARNTVDLLRTVRHLKELGIEVWFEKENIHTMSGDGELMMTILASFAQEESRSISENVRWRIKKQFEQGNPNGRFRVYGYRWEGDKLVVVPEEAAVVRRIFQNFLDGKSRLETEREFAAEGITTRNGCRWMDSNIKVVLTNITYTGNMLLQKEYVTDPILKKRKKNRGELPQYYVENTHEPIIDKKTFDYVQQEMARRKELGALANKSLNTTCFTGKIKCGICGRSYMHNLRTDRGFEEFWDCGSHKLKGRNCGAKGSIPHAVLIKECTEALGLDNFDEQAFLDQVEKIVVPEYHVMVFCMKNGQKLIRHWVSTAKKDCWTDEYKERQRDWMRNYMASGKGTRFSPFTTRVRCAVCGHAFRRCKQKKKQGISVHWRCGQGGKCSSLSVREEELMKIAADAMGLEAFDGDRFREEIDFMEAGAEERITIHFKDGRIQTVPWTKPKKQGTRHTETYKEYMSQLGKKRWTPERKQRMSEQMKALRKERGENWQRQ

SEQ ID NO: 460 - protein, 589 aa, Unknown
  Description of Unknown: Integrase B461 sequence
  PTHR30461:SF3,IPR036162,PS51737,IPR011109,PTHR30461, PS00397,PF00239,G3DSA:1.10.10.2600,IPR006119,SSF53041, cd00338,SM00857,IPR025827,IPR038109,PS51736, IPR006118,PF13408,G3DSA:3.40.50.1390,PF07508,Coil
MTRKAKTCFIYVRVSTKMQVENGESIEAQLYDLRQYAKRENLRILHEYIDDGYSGKNITGRPHFQEMMEEIKSGVHVDYVLVFKLSRFGRNAADALSSLQFMQDYGTNLVCVKDGINSEAQMGKMMIAFMSAFAEMERENILVQTMAGREQKAREGKWNGGQAPFGYRLVKDEKGKGHLEIDEDEAEIVRIIFREYTKNGKGANAIASWLNTQGYRKKIRGNSKYEHFAPGTVKNIIRNPVYAGKIAFGRRRTTPVKGERNVYHMVKQSDFDVYEGEHDAIIDEATWETAKQRAADESRPFPEAKPDSHTHLLTGMLVCPVCGRSMIANVSRGKRKKDGTIGKTTYAYTCKYSKRQFGHDCTFTRQFKQEYIDREVIEVISRAAHSAVFEERVREELDAAVDIEKLEADVARIGKALENNSAARRMLSRQLDALDASDRSYERKYEDMQARLDKLYDESADIEDALDEAEAKLESAKEKQVTTARVYEMLDEFQEKFDTYDPAKQKEILQQVVERVEIDPDANPKKGDAIVKRVRFKCPVSFYRTLPEEAYDVLGINEFNRLETTEYTTDGNSRVAGNHDETVVLMSKK

SEQ ID NO: 461 - protein, 589 aa, Unknown
  Description of Unknown: Integrase B462 sequence
  PTHR30461:SF3,SM00857,IPR036162,PF13408,IPR025827, G3DSA:3.40.50.1390,IPR006119,SSF53041,PTHR30461,Coil, PS51736,cd00338,PF00239
MSAHVTILRNTVLPVKFNTMNRPRLYSYIRYSSERQGKGSSIERQKSYIAEMAKQIATEYDLEIFEEYQDLGVSAYKGKNVQEGALSDFIDQVESGLIPKGSFLLIESLDRFSRQNAMQAVNLFTSLLLNGITVITGIDKQVYRQTEVNTETLQQLMFSVMLFSRANEESSTKSHRTIASALSKIRRHQERKPGDPVVAIKELGSDKWWTDSSTGYVNPHPVLFPIAKKIIQLKQDGWSNRMILQHLKNNYDGPVIGNKKSKGIWNMQHCSRILEPAIYGRKVITVNNAEYVLDDYYPAIISKDEYEALKLQVGNKGFAPNRESNPEIPLLSGIGILHCAHCSCYMVKAKSTLKNHPHAYRYQCASRDLHQDCNKWGFRASTLERTILQLIADRIFLQTKYQPSGLEGKIADIQSQIENYVLAIGSAKSPEIINSLTSQIDQLEQEKQSLIVEKRLYDESIVQMNTEGWDKFRKFDIDDALNPLRTKIRANIKTVIMRVDCSRIDKKHNLFTITYRDQHKQRIVIENNSGWKKGKIYVEAQTINDIQILESEGLILHDHIDILINRDKFMTEAKKRLDHPRTLIDELTE

SEQ ID NO: 462 - protein, 589 aa, Unknown
  Description of Unknown: Integrase B463 sequence
  SM00857,G3DSA:1.10.10.2600,IPR036162,PF13408,PS51737,IPR025827, mobidb-lite,G3DSA:3.40.50.1390,IPR006119,IPR038109,PF07508, IPR011109,SSF53041,PTHR30461,PS51736,cd00338,PF00239
MTKTIRRIEAQIPITTKKKRVAAYARVSLDTERLENSLSAQISYYSAFIQRNPSWEYAGVFADNGISGTSTDRTEFQRLMAECEAGHIDIILTKSISRFARNTLDTLTAVRRLRELGIEVQFEKEHIHTLSDKGELLLTLLASFAQEESRSISENVKWGVRKRMKKGIPNGRFRILGYRWQGDKLVIVPEEAAVVRRIYQDFLDGKSRLETERALNAEGIRTINGCRFQDSSLKVILTNVTYTGNLLLQKEYITDPINGKRRKNHGELPQYYVENTHEAIIDQATFDYVQQEMTRRKALGAQANKSLNLTCFSGKIKCPYCHVSYMHNPHRRKSNIDYWICGSRKKKKVGDGCPVKGAMSEVALKKCCAEVLGIEEFDEIVFAEKIEHLEVPEKGHLTFFMRDGSVFTRECRNTGHQDCWTKEHRAVASEYRLKHSSERSGSTCFTGKIKCGFCSMNYQRATQSNAGKKTRYWRCPSKGEPDKKGLREDHLRELCAEVLHIDTFDEAAFTQAIDHITVSPDAVLEFQFNDGHAEIHNWSYERHGHKWTAAQRARFSETMKRHYTPERRQTMSEKMKQIRKERGAQWRKE

SEQ ID NO: 463 - protein, 589 aa, Unknown
  Description of Unknown: Integrase B464 sequence
  SM00857,G3DSA:1.10.10.2600,IPR036162,PF13408,IPR025827, PS51736,PS51737,G3DSA:3.40.50.1390,IPR006119,IPR038109, PF07508,SSF53041,IPR011109,PTHR30461,Coil, mobidb-lite,cd00338,PF00239
MFLTLEQYIESIQAINTSGEKDKKIEALLEYYEKYNKRIKAAPGMFYAVIYARYSSHGQREESIEGQVREALEYAARNNMIVIGVYIDKALTGKTDTRDGFQRMIKDAAKKKWQYVICWKLDRFARNRYDSARYKAKLKEYNIRVVSAREYIPDGPEGILLEGALESQAEFYSASLRENVKRGMTDNALECISNGGNIPFGFKTEKKRYVLDTEKAPVVKRIYQMYNTGSTIQELVKYLDGLGIRSTKGNKITINGINSILRNPKYMGVYKYKDTYVEGAIPQIVEKELFEAVQKKLNDRASKKRLKKNDVEFLLTTKLYCGKCGMGMTGMSGTGKLGAKYYYYSCVGRRRDHNCDKDNVGKDWIENIVISETVNTVLNDDVIKRIADGVIDFQRREQNNQVLSGLKNRLVEVEKSIENIIRAIEQGIITPSTKSRMETLEAEKVAIEHGITEESLKNPIVTREQVIFFLEKFKGGDIADQEYRRKLVDTFVNSVYVYDDHILISYNFTSSGDRTKLEEISKGYEKAEETANTSRFSHFFMGSPLLPNGPPLETQTNTQDEHPRRTPRTQPACIFFLPGTFVLVIKFVK

SEQ ID NO: 464 - protein, 589 aa, Unknown
  Description of Unknown: Integrase B465 sequence
  PTHR30461:SF3,cd00338,SM00857,G3DSA:1.10.10.2600,IPR036162, PS51736,PS51737,G3DSA:3.40.50.1390,IPR006119,IPR038109, PF07508,IPR011109,SSF53041,PTHR30461,mobidb-lite, Coil,PF00239
MKSVFKTLDRSRPRKMVFYGRVSTEHEAQLAALKNQMQWYDDQERYHPNWTVVDRYIDEGITGTQAKKRPAFMKMLEDARQGKFDLIVTREVCRFARNTVDALVSVRELKKLDIEVYFVEDNIWTLDGDGELRLTIMATLAQEESRKISERVLAGQAISRQNGVLYGTGNIIGYDRVGSTYVINEPQAEIIRLIYSMYLDGYGEKAIVNELTRRGCQNGRGEVKWDCSKVGRILKNATYKGYIGYNKSVTVDFLEHRRITNHDTSQHTLIKGDFPAIISEEDWNRCAEIRESRIQSMPQLGGGTRKFGRNPSKFLWSKKLRCSCGCSFQRFHWRTNKRDGKEVYGYQCYSHRNGASLQYMVDNGLTDEHTCQIRSICDWKLDLMAKTVLENVWIDRRAAVIEACKILAQCGKESHQEEHQEHKRLEARAQKLKTRLQNLIEMRADGELSKEEFMSQKSEIAEQLQAIESQRTTVPVQKQPVLNIEKIRDTLNCLIDFTQPKLDEMLLDKVVDRVIPITNDHFRWELNLLSGEHNAVECSIKGRKNKASVSIEETVRSDTLSNISSEKIAPTGGPPRRPPSRIPAKGEHL

SEQ ID NO: 465 - protein, 588 aa, Unknown
  Description of Unknown: Integrase B466 sequence
  PTHR30461:SF3,cd00338,SM00857,G3DSA:1.10.10.2600,IPR036162, PF13408,IPR025827,G3DSA:3.40.50.1390,PS51737,IPR006119, IPR038109,PF07508,IPR011109,SSF53041,PTHR30461, PS51736,Coil,PF00239
MKKENEIRAVVYARYSSHSQTEQSIEGQISAAQVYAKAKGYTIVKEYVDRAKTGKNDNREAFQQMLSDTAKHEFSVIIVWKVDRFGRNREEITFNKYRCKKNDVRVEYIAEAVPDSPEGVILESVLEGMAEYYSLQLAQNIRRGIRASAEKCQAIGGHCSLGYAIDPKTKKYVIDPDTAPTVQLIFDKYAEGYTGMDIVRLLNEKGLRTVRGKPFTKNSLWTILKNERYAGVYLFKDEVRVEGGIPALVSRETFDKVQEMLEINHRSPVNTWNRATYLLTDKLFCGHCGSKMVGECGTSRTGATYNYYICAGKKRERNCSKKAVRQDWIEKVVLQQIRRVLFDQEFLEFIAHKAYTYYLEEKKKLDQSAAIKAQLSSVESSIDNLIRAMEAGIFSASTKSRLDDLENQKAALTRTLAEIKLSEESFDLTEDRILFFLESMRGLDMDDVDSRKRLVKTFVNAVYLYDDKITLAFNFTDSCEKPEIIELADIADGVVEKFVHRASCSTKKALYFVGSTVLFFFTEADFGGCIASPAPFLGFCRRSSYAPAIPRYATNERHLRLGTAQTETPLFSFLNDIIRSRWAGWAGR

SEQ ID NO: 466 - protein, 588 aa, Unknown
  Description of Unknown: Integrase B467 sequence
  PTHR30461:SF3,SM00857,G3DSA:1.10.10.2600,IPR036162,PF13408, IPR025827,G3DSA:3.40.50.1390,PS51737,IPR006119,IPR038109, PF07508,IPR011109,SSF53041,PF00239,PTHR30461, PS51736,Coil,cd00338
MNIYTLIEKMTLEHKTIFDMQLRVAFYARVSTTKEVQLNSRDNQIQTFTELIQKNSNWTLIKGYVDTVRGETAANRNNFMRMIDDAKLGKFDLIVCKEISRFSRDLIDSISYTRELFKNNVGVYFTSDNLCTIDRDSELRLGIMASIAQQEVARLSERIKFGHKKAIENGVVMGNSRIFGYIKNDGKLVVDPYESKLVEKIFQMYSTGDYSLRNISEDLYKMGYKNHSGNMIAHTTIKAIIKNPKYKGYYCGNKVKVLDYRTKEQKFLPEESWIVYKDETGEKVPAIISEEIWDRCNAMLKTRCTGTKGNIGGKRFTSPLSSKIFCTHCGKNYHHDSYGHKNGKDNVQWHWICSEKKKRSSNCPSFSIKDDDMLKIIKNFLVSFIGDMDKYIEKYLTVYKSQFSNNKIQETLKSIETEIKKYQNKKDKLLDLYTDEIISKEDFKIKNEKIQAHLDELNREKESLCGGKHSIEKSISQLKDIKEYFNNSNVTVDNMSDTFAYELSKTIIKRIEIEPIDKITANIVFYTNFSDNFKMSIAKECRGKANCSGMTNGHIFLIMIPLVTMKFTYSFLRNQPSITKTLNLKLKM

SEQ ID NO: 467 - protein, 588 aa, Unknown
  Description of Unknown: Integrase B468 sequence
  cd03768,PTHR30461:SF3,SM00857,G3DSA:1.10.10.2600,IPR036162, PF13408,IPR025827,G3DSA:3.40.50.1390,PS51737,IPR006119, IPR038109,PF07508,IPR011109,SSF53041,PTHR30461, PS51736,Coil,PF00239
MAKKRLAAALDEKKAAIYKRVSTQYQVDRASLPVQESELINYCKYALGIDNYEIFEDAGYSAKNTDRPDYQRMMARIRTGEFTHLVVWKIDRISRNLLDFAAMYSELKDLGVTFVSKNEQFDTSNAMGEAMLKIILVFAELERNMTSERVTQVLMSRAKDGIWNGGRPPYAYSYDKPSNTFSVVEDEKKVVLFVYDTYEATESLLLTTKAVNEKGIVSRNGKPWSPTTIRNLLANPFYSGTLRYNYRDITRSKTVYIKPEDEWVLVEDHHEAIVSKERQARVMSILESKRRGGGKLGLTYQRKNVHIFGGLLKCGCCGSSMVCTVDTRERKNGVKPSIYACSRRRRFNDCQNKYITDLTIGPFIFNFIANMIKASNSFGKTTSMDTLQKKLLRGEALADVDHIGEAGLSELYNHFRSGFDGSPFEATKVAQVQAATDLSEREILLSERRRLDRALSRLKTLYLYSEEAMAEKDYVLERKELTDRLEETDQRLSELDAQIAAATPMSDEEFMAKASYFILSQELQGKREVDYPKFITNADPQILKNFIKNVTTNFCIKNGRVTSILFKNGIELQFFYKPSKDDKSPETA

SEQ ID NO: 468 - protein, 588 aa, Unknown
  Description of Unknown: Integrase B469 sequence
  PTHR30461:SF3,cd00338,SM00857,G3DSA:1.10.10.2600,IPR036162, PF13408,PS51737,G3DSA:3.40.50.1390,IPR025827,IPR006119, IPR038109,PF07508,IPR011109,SSF53041,PTHR30461, PS51736,Coil,PF00239
MYEDIKTACLYVRFSSHNQTEQSIEGQTRVCRDFCKRHNIRIVEIYADRATSASKDIEKRVQFLKMIKDSEKGLFDAVIVYKLDRFARSRYDSATYKYRLKRNGVQLISATENISNDPEGIILESVLEGMAEFYSAELSQKINRGMRESAYKHNSIGGAIPLGYKIEDKKLVIDPKTAPIVKEAFEKYADGETVAEICRQFNARGYKTSKGTAFGKSSFTKIFRNERYIGVYTFHDYRAEDAIPAIIDKDLWDRVQLRVGKIKNAPARNKAKVVYLLSGKIFCGHCGSKMNGNCNAGNYCYYQCYGKKNGNVDCKKKNIRKEFIERLVAQDALSLLTDEYIEQIATIACEKNQHEIELDSALPTIRDRIHQVDLSLNHLLKAIESGSAPDMLVKRMGELEKEKKDLQAQAKKESEDIVELDKAQVIYWLEQFRGGSIEDEEFCRMLIDLFVNSVTVWDEDDNTYKVTVAYNLTSLPTKTYRLNKGGTLSDFASNAPDRESDKDGVVFVHVITLGSDGRARGRIAHFDGAAGFLVHPVQIGLGVRNFRLNLKNVCTDSIGKIFSNLCGNAAGGEVSNKSFAHDKCTSFD

SEQ ID NO: 469 - protein, 587 aa, Unknown
  Description of Unknown: Integrase B470 sequence
  PTHR30461:SF3,IPR036162,PS51737,IPR011109,PTHR30461, PS00397,PF00239,G3DSA:1.10.10.2600,IPR006119,SSF53041, SM00857,IPR025827,IPR038109,PS51736,cd03768, IPR006118,PF13408,G3DSA:3.40.50.1390,PF07508,Coil
MTSQKSSIERKLSEQRAALYIRVSTHWQIDKDSLPVQREDLINYAKYALGIDKYEIFEDAGYSAKNTDRPAFQQMMSRLRTGEFSHLLVWKIDRISRNLLDFAEMYSEIKKLGITFVSKNEQFDTSNAMGEAMLKIILVFAELERNMTSERVTAVMLSRASNGQWNGGKVPFGYNYDKQTREFTINESEASVINLIYDTYEANNSLTLVARTLNEKGIYPRSGTPWNPATVSTILKNPFYTGAYRYNYHDESKSGGNTSSKHIKDRSEWVYIENHHPAIIDAERQSRILAILESNRRSNHRSSKTYIRKNVHIFAGLLYCGYCGSQMQSTIDRERADGYRPSIYACSRKRRFNDCKNKYVSDVTLAPFVLNYIANIIKAQNNFGKSTPIDTFERKLLRGEIFADVDHIEPVGLTEMYNMLKRGNLSDAVFSSARIQDAEADKMAADERDLLASERRKKERALDRLKSLYLYNDEAISERDYLVEKKSLTDSIDKIDKRLEEIERNSSHHFTLTDEEFMAKASVFIVTNQLQGKRFIDAEKLLRQIDTRVVKEFLNSVVQKIVIKDGRVLSIRFKNGLEHKFLYKDAE

SEQ ID NO: 470 - protein, 587 aa, Unknown
  Description of Unknown: Integrase B471 sequence
  PTHR30461:SF3,IPR036162,PS51737,IPR011109,PTHR30461, PS00397,PF00239,G3DSA:1.10.10.2600,IPR006119,SSF53041, SM00857,IPR025827,IPR038109,PS51736,cd03768, IPR006118,PF13408,G3DSA:3.40.50.1390,PF07508,Coil
MSRSKASLESKLSERKAALYIRVSTHWQIDKDSLPVQREDLINYAKYALGIDKYEIFEDAGYSAKNTDRPAFQQMMSRLRTGEFSHLLVWKIDRISRNLLDFAEMYSEIKKLGITFVSKNEQFDTSNAMGEAMLKIILVFAELERNMTSERVTAVMLSRASNGQWNGGRIPFGYDYDKEMRTFSINEAEAAVINLIYDTYEETNSLLYVARALNEKGIRPRSGLPWNPTTISTMLKNPFYTGAYRYNYHDETASGGNTSGKHLKDKSEWIFIENHHPAIIPSERQALVLETLEQNRRSNKRSSKTYTRKNTHIFAGLLYCHYCGKQMQSTVDRIRADGYRPSIYACVQKRKFNSCPNKYVSDVTVAPFVLNYIANILKAQNNFGKSTPLDTFERKLLRGDMFASVDHIEPAGLTEMYDMLKRGNLSDAVFSSARIQDAETDQMAADERDLLASERRKKERALDRLKSLYLYNDEAISERDYLVEKKSLTDSIDKIDKRLEEIERNSSHHFTLTDEEFMAKASVFIVTNQLQGKRFIDAEKLLRQIDTHVVKEFLNSVVQKIVIKDGRVLSIRFKNGLEHKFLYKDPE

SEQ ID NO: 471 - protein, 587 aa, Unknown
  Description of Unknown: Integrase B472 sequence
  PTHR30461:SF3,IPR036162,PS51737,IPR011109,PTHR30461, PS00397,PF00239,G3DSA:1.10.10.2600,IPR006119,SSF53041, SM00857,IPR025827,IPR038109,PS51736,cd03768, IPR006118,PF13408,G3DSA:3.40.50.1390,PF07508,Coil
MGKIADKLKQIRVAIYVRVSTHYQIDKDSLPVQKEELIAYAKYVLNADSYEIFEDAGFSAKNTDRPGFQQMMSRIREGEFSHVLVWKLDRISRNLLDFAAMYDELKRLGVTFVSKNEQFDTSSAMGEAMLKIILVFAELERKMTAERVIAVMISRAGNGQWNGGRIPFGYNYDKNAETFSVNETEAAVVLKMFDLYEETHSLLQVAKALNASGSRHRSGKEWTPATVSIILKSPFYTGAYRYNYYDMSKRNSRQDVKPEGEWVIVEDHHPAIIDPVRWKNVVELLERNRRGWQSAGKTYTRKNIHVFAGLLTCGVCGSIMSATSNARAHKDGYRPSNYACMSHRKNNGCTNKYITDTKIGPFVLNYISNLIRAKESFGKTTSPETLQKKLLRGDMFKDIVRIKEPGLMELYNLYRSQLPGVKYASKVAERSGSSDTASEKDILLSERRRLERALSRLKSLYLYSEEDMSERDYVIEKNRLTESLDKVNERLDKLNDGLSSQFSISDEELLAKASYFIMSQKLLDRRFVDYRRLLKETDPRILKEFINSVSSNFCIKNGRIESITFKNGIIHEFVYADEEPVAEASEG

SEQ ID NO: 472 - protein, 587 aa, Unknown
  Description of Unknown: Integrase B473 sequence
  SM00857,G3DSA:1.10.10.2600,IPR036162,PF13408,PS51737, G3DSA:3.40.50.1390,IPR025827,IPR006119,IPR038109,PF07508, IPR011109,SSF53041,PTHR30461,Coil,PS51736, cd00338,PF00239
MAYRKVKSLVDTIGLRAVFYARVSTAEEEQLNAIELQIEENRNCIHKNKWKKVDEYIDRSKSGTMVKGRDEYQRLYEDLLTDKFDIVVIKDQERLMRNTKDWYLFIDRLVQTGKLLYMYLDNKFYNPDDALITGIRAIIAEEFSRNLSKKLHNYHDGRIEKARQGKEIDLQGSGNVFGWDKKDGRYYINPEQAKIRRLMCEGIMARKGSTQIAKELNDAGYRNTVGKEWKPMDIPKFVYDCKNVGTMIINKERQDFESKQIIKLPESEWVYVKNAFPPIVTEEEWELICKIHDERVVATGSDKRGKGKKVSGYSFSGKLVCGICGAPYWRKQRSTKEEYWVCSTKQQKGRKTRKRDSVNGKAGEFNEAGCDNNNISYNSLMEIMTIISERLEANTELVKADMISKLNSMKKRILEANRGATEEDLQKELSRKDKLLDALLDGILTKEEYTRKAESIESKITELRQEIEDNKTQFEDIAEIDRVLANIDREIAIYLDVNKKLKSEYILEHLDRVEIYPDKVIVIVSLFDVGFIVDKEQYVSREKRSRKNYNDWLYSKYNRQRQRNGKVVWKRNDRRRYKYAGKNRCCL

SEQ ID NO: 473 - protein, 587 aa, Unknown
  Description of Unknown: Integrase B474 sequence
  IPR036162,PS51737,IPR011109,PTHR30461,PS00397, PF00239,G3DSA:1.10.10.2600,IPR006119,SSF53041,SM00857, IPR025827,IPR038109,PS51736,cd03768,IPR006118, PF13408,G3DSA:3.40.50.1390,PF07508,Coil
MTSQKSSIERKLSEQRAALYIRVSTHWQIDKDSLPVQREDLINYAKYALGIDKYEIFEDAGYSAKNTDRPAFQQMMSRLRTGEFSHLLVWKIDRISRNLLDFAEMYSEIKKLGITFVSKNEQFDTSNAMGEAMLKIILVFAELERNMTSERVTAVMLSRASNGQWNGGKVPFGYNYDKQTREFTINESEASVINLIYDTYEANNSLTLVARTLNEKGIYPRSGTPWNPTTVSTMLKNPFYTGAYRYNYHDESKSGGNTSSKHIKDRSEWVYIENHHPAIIDAERQSCILEILESNRRSNHRSSKTYIRKNVHIFAGLLYCGYCGSQMQSTIDRERADGYRPSIYACSRKRRFNDCPNKYVSDVTLAPFVLNYIANIIKAQNNFGKSTPLDTFERKLLRGEIFADVDHIEPVGLTEMYNMLKRGNLSDAVFSSARIQDAETDQMAADERDLLASERRKKERALDRLKSLYLYNDEAISERDYLVEKKSLTDSIDKIDKRLEEIERNSSHHFTLTDEEFMAKASVFIVTNQLQGKRFIDAEKLLRQIDTHVVKEFLNSVVQKIVIKDGRVLSIRFKNGLEHKFLHKDAE

SEQ ID NO: 474 - protein, 587 aa, Unknown
  Description of Unknown: Integrase B475 sequence
  cd03768,SM00857,IPR006118,G3DSA:1.10.10.2600,IPR036162, PS51737,G3DSA:3.40.50.1390,IPR006119,IPR038109,PF07508, IPR011109,SSF53041,PTHR30461,PS00397,PS51736, Coil,PF00239
MAKRELMKTLMSDSFRRVAIYIRVSTHYQVDKDSLPLQREELINYCKYVLGIEDFEIFEDAGFSAKNTDRPGYQKMMKMVRAGLFSHVLVWKLDRISRNLLDFAYMYEELKKLDVAFISKNEQFDTSTAMGEAMLKIILVFAELERKTTSERVAATMISRAASGKWNGGRVPYGYSYDYEQKEFSINPEEQKVALLMCDLYEASNSLVFVSRKLNEMGYRSRAGNLWSPVQVRKVLVNPFNTGKYVYNQTSLSTGTQLPNKEEDFIVFENHHASLFPIERQEKLIARLNRNARSKSTANNTVNRKNIHVFSGLIYCENCGNMLTSSVGKKLAGDGWRPSIYLCPSKRRHVSEGCRDTTDSSIGEFVLNFIMNMLNAQRNFQLVQSAADLQRLLLYGKVFDAVDHLDQDSLNDMYTVLSSNLPQNVKAGMKKKMRKPSANPEVTKLSKEKQRLERAMERLKRLYMYSEDSMTEQEYITEKNRIAEAYSEAEARLVEITNYERMERSISDEDFVRQATAFILSKKLSGSSYINYRKLAVSTDPLILKEFFNSILDSITINTDGKIGSIVFKNGLRHEFIYSEDSNSQEN

SEQ ID NO: 475 - protein, 587 aa, Unknown
  Description of Unknown: Integrase B476 sequence
  PTHR30461:SF3,IPR036162,PS51737,IPR011109,PTHR30461, PS00397,PF00239,G3DSA:1.10.10.2600,IPR006119,SSF53041, SM00857,IPR025827,IPR038109,PS51736,cd03768, IPR006118,PF13408,G3DSA:3.40.50.1390,PF07508,Coil
MGKIADKLKQIRVAIYVRVSTHYQIDKDSLPVQKEELIAYAKYVLNADSYEIFEDAGFSAKNTDRPGFQQMMSRIREGEFSHVLVWKLDRISRNLLDFAAMYDELKRLGVTFVSKNEQFDTSSAMGEAMLKIILVFAELERKMTAERVIAVMISRAGNGQWNGGRIPFGYNYDKNTETFSVNETEAAVVLKMFDLYEETHSLLQVAKALNASGSRHRSGKEWTPTTVSIILKSPFYTGAYRYNYYDMSKRNSRQDVKPEGEWVIVEDHHPAIIDPVRWKNVVELLERNRRGWQSAGKTYTRKNIHVFAGLLTCGVCGSIMSATSNARAHKDGYRPSNYACMSHRKNNGCTNKYITDTKIGPFVLNYISNLIRAKESFGKTTSPETLQKKLLRGDMFKDIVRIKEPGLMELYNLYRSQLPGVKYASKVAERSGSSDTASEKDILLSERRRLERALSRLKSLYLYSEEDMSERDYVIEKNRLTESLDKVNERLDKLNDGLSSQFSISDEELLAKASYFIMSQKLLDRRFVDYRRLLKETDPRILKEFINSVSSNFCIKNGRIESITFKNGIIHEFVYADEEPVAEASEG

SEQ ID NO: 476 - protein, 587 aa, Unknown
  Description of Unknown: Integrase B477 sequence
  PTHR30461:SF3,SM00857,G3DSA:1.10.10.2600,IPR036162,PF13408, PS51737,G3DSA:3.40.50.1390,IPR025827,IPR006119,IPR038109, PF07508,IPR011109,SSF53041,PF00239,PTHR30461, PS51736,Coil,cd00338
MKKFPIDLSCLTEEEISQFQEDPYTLYNGDQNVAIYLRYSSTGQSDQSIEGQLRDCRTFCKANHYRIVAIYVDRATTARKDVEKRVHLMEMISDSAKQNWEYVIVWKLDRFARNRNDSAIMKMRLRKNGVKVLSATEHLTDSPESIILESVLEGMAEFFSAELSQKVTRGMRESALKCHSVGGHIPLGYKVENHKLVIDPDTAHIVQEAFSLYANGESVADICRKFNSAGYKTAKNTEFNRSSFKAMFRNTRYIGTYTYKDIVIENGIPAIIDKELFETVQRRLSKTATAPARGKAKVDYLLSGKLFCGHCGASMNGESGAGRHGKVYHYYSCYTKKRKLGCDKRPLKKDYIEGIVARDALNLLTDQLIDEIADMAIRQSEQDLINDTHIPQLTAQLSEVEKSITNITAAIEKGIASETLMNRLVQLEHEKKTLNKEIKAEEKFVYRIDRDQIVFWLSQFKYGNIEDEDFRRRLIDLLVNSVTVWDEPDGYKITTAYNLTSCKTKTFRVEKNPAAEEATGFDFGESECAKGKGHPQGCPFPLASGCREWVSPRQFQISAGRCGLRFHSCYFWAAPVSRGRVIVFFFK

SEQ ID NO: 477 - protein, 587 aa, Unknown
  Description of Unknown: Integrase B478 sequence
  PTHR30461:SF3,IPR036162,PS51737,IPR011109,PTHR30461, PS00397,PF00239,G3DSA:1.10.10.2600,IPR006119,SSF53041, SM00857,IPR025827,IPR038109,PS51736,cd03768, IPR006118,PF13408,G3DSA:3.40.50.1390,PF07508,Coil
MGKITDKLDQVRVAIYVRVSTHYQVDKDSLPVQKEELVAYAKYVLNANSYEIFEDAGFSAKNTDRPDFQQMMARVREGEFSHVLVWKLDRISRNLLDFAAMYDELKRLGVTFVSKNEQFDTSSAMGEAMLKIILVFAELERKMTAERVTAVMISRAGNGQWNGGRIPFGYSYDKSTETFSVNETEASVVLRMYDLYEETHSLLQVAKSLNASGIKHRSGKDWTPTTVGIVLKSPFYTGAYRYNYYDMSKRNSRQDIKPEGEWVIVEDHHPAIIDPVRWKNVVELLERNRRGWQSAGKTYTRKNIHVFAGLLTCGVCGSIMSATSNARAHKDGYRPSNYACMSHRKNNGCTNKYITDTKIGPFVLNYISNLIRAKESFGKTTSPETLQKKLLRGNMFKDIVRIKEPGLMELYNLYRSQVSGVKYESKTAERSGSSDTASERDVLLAERRRLERALSRLKSLYLYSEEDMSERDYVIEKNRLSESLGKVNDRLDKLNDGLSSQFSISDEELLAKASYFIMSQKLLDKRFVDYKRLLKETDPRILKEFINSVSSNFCIKNGRIQSVTFKNGIIHEFVYDDEEPAPEHKED

SEQ ID NO: 478 - protein, 587 aa, Unknown
  Description of Unknown: Integrase B479 sequence
  PTHR30461:SF3,IPR036162,PS51737,IPR011109,PTHR30461, PS00397,PF00239,G3DSA:1.10.10.2600,IPR006119,SSF53041, cd00338,SM00857,IPR025827,IPR038109,PS51736, IPR006118,PF13408,G3DSA:3.40.50.1390,PF07508,Coil
MGYVTKKVAQRFEEKKVAIYVRVSTQYQVDRASLPVQREELIAYCKYVLGIDSFEVFEDPGYSAKNTDRPDYQRMINRVRTGEFSHILVWKIDRISRNLLDFAAMYAELKKLGVTFVSKNEQFDTSSAMGEAMLKIILVFAELERNMTSERVSAIMLSRANGGVWNGGKIPFGYSYDKEQKVFHVLDSEAKVVLYIYDFYESIQSLTTVAKQLNEKGIRSRTGKPWNPVTVRTMLTNPFYAGTYRYNYRDESSRTYSVKPKDEWVMVEDHHPAIVTRERQNHIAGILEKHRRSNFDGRTYQRKNTHIFGGLLRCGYCGSLMSATSDRARSDGWRPSQYLCTRRRRFDDCTNKYIIDTTIGPFVFNFIANMIRASKSFGKSTSIETLEKKLLRGEALASVDHIGRPGLEELYNHLRSGFSEMPFDAPSAAAAESAANIQERELLLSEKRRLERALNRLRTLYLYSDDSMPEKDYIVERKQLMDSLDEVDAKLEAAEKVAADAISLSDEEFMAKASYFILSQQLQDKRFIDYERFIRKIDPKIIKDFLNSIATNFCIKDGLTTSILFRNGLELQFFYKTAETAKSPKTF

SEQ ID NO: 479 - protein, 587 aa, Unknown
  Description of Unknown: Integrase B480 sequence
  PTHR30461:SF3,IPR036162,PS51737,IPR011109,PTHR30461, PS00397,PF00239,G3DSA:1.10.10.2600,IPR006119,SSF53041, SM00857,IPR025827,IPR038109,PS51736,cd03768, IPR006118,PF13408,G3DSA:3.40.50.1390,PF07508,Coil
MSRSKASLENKLSERKAALYIRVSTHWQIDKDSLPVQREDLINYAKYALGIDKYEIFEDAGYSAKNTDRPAFQQMMSRLRTGEFSHLLVWKIDRISRNLLDFAEMYSEIKKLGITFVSKNEQFDTSNAMGEAMLKIILVFAELERNMTSERVTAVMLSRASNGQWNGGRIPFGYDYDKETRTFSINEAEAAVINLIYDTYEETNSLIYVARTLNEKGIRPRSGLPWNPTTISTMLKNPFYTGAYRYNYHDETASGGNTSGKHLKDKTEWIFIKDHHPAIIPSERQAHILETLEQNRRSNQRSSKTYSRKNVHIFAGLLFCHYCGKQMQSTVDRIRTDGYRPSIYACIQKRKFNSCPNKYVSDVTVAPFVLNYIANILKAQNNFGKSTPLDTFERKLLRGEMFSDVSHIEPVGLTEMYDMLKRGNLSDAVFSSARIQDAETDQMAADERDLLASERRKKERALDRLKSLYLYNDEAISERDYLVEKMSLTDAIDKIDKRLEEIEHNSSHHFTLTDEEFMAKASVFIVSNKLQGKRFIDTQKLLRQVDSKVIKEFLNSVIQKIIIKDGRVLSIRFKNGLEHKFVYKSSV

SEQ ID NO: 480 - protein, 587 aa, Unknown
  Description of Unknown: Integrase B481 sequence
  PTHR30461:SF3,IPR036162,PS51737,IPR011109,PTHR30461, PS00397,PF00239,G3DSA:1.10.10.2600,IPR006119,SSF53041, SM00857,IPR025827,IPR038109,PS51736,cd03768, IPR006118,PF13408,G3DSA:3.40.50.1390,PF07508,Coil
MGKIADKLKQIRVAIYVRVSTHYQIDKDSLPVQKEELIAYAKYVLNADSYEIFEDAGFSAKNTDRPGFQQMMSRIREGEFSHVLVWKLDRISRNLLDFAAMYDELKRLGVTFVSKNEQFDTSSAMGEAMLKIILVFAELERKMTAERVIAVMISRAGNGQWNGGRIPFGYNYDKNTETFSVNETEAAVVLKMFDLYEETHSLLQVAKALNASGSRHRSGKEWTPTTVSIILKSPFYTGAYRYNYYDMSKRNSRQDVKPEGEWVVVEDHHPAIIDPVRWKNVVELLERNRRGWQSAGKTYTRKNIHVFAGLLTCGVCGSIMSATSNARAHKDGYRPSNYACMSHRKNNGCTNKYITDTKIGPFVLNYISNLIRAKESFGKTTSPETLQKKLLRGDMFKDIVRIKEPGLMELYNLYRSQLPGVKYASKVAERSGSSDTASEKDILLSERRRLERALSRLKSLYLYSEEDMSERDYVIEKNRLTESLDKVNERLDKLNDGLSSQFSISDEELLAKASYFIMSQKLLDRRFVDYRRLLKETDPQILKEFINSVSSNFCIKNGRIESITFKNGIIHEFVYADEEPVAEASEG

SEQ ID NO: 481 - protein, 587 aa, Unknown
  Description of Unknown: Integrase B482 sequence
  IPR036162,PS51737,IPR011109,PTHR30461,PS00397, PF00239,G3DSA:1.10.10.2600,IPR006119,SSF53041,SM00857, IPR025827,IPR038109,PS51736,cd03768,IPR006118, PF13408,G3DSA:3.40.50.1390,PF07508,Coil
MTARKAISKRTAEILDALNTLKIAIYIRVSTHWQIDKESLPLQRSDLINYCKLILGTDNYVVFEDAGYSAKNFERPDFQRMMSRVRAGEFSHILVWKIDRISRNLLDFATMYKELKELGVTFVSKNEQFDTSTAIGEAMLKIILVFAELERNMTSERVTAAMLSRASDGKWNGGRVPYGYTYDKEAKEFVIAEAEARVVKLMYDLYDEKRSLLAVSKELNTRGYRSRKGVAWSPVTVGNIMRSPFYIGTFRYNYRQENGQSWSFKPESDWIMTEGHHPQLVTHEQWNRVVATMKSQRRGQPGHGKTFNRGNVHIFAGLMTCGYCGGTMTATKDRERKNGWRPSIYSCSSKRRNNDCPNKYISDMIIGPFVLNYIANMIRARKSFGASTSVETLQKKLLRGETFSDVLYIGRPGLEELYQHFKGVQDQEQNFMASPGSTAASEEQERDILLAEKRRKERALSRLKALYLYSEEEQAISEAEYIVERKKLIDSLETIDTRLAEIDEALAQRINLSDDEFIAKASYFIMAQQLTDKRYIDYERFVKTVDPQIVKDFVNSVCANFCIKSGRVASIRFKNGIEHQFFYRDKE

SEQ ID NO: 482 - protein, 587 aa, Unknown
  Description of Unknown: Integrase B483 sequence
  PTHR30461:SF3,IPR036162,PS51737,IPR011109,PTHR30461, PS00397,PF00239,G3DSA:1.10.10.2600,IPR006119,SSF53041, SM00857,IPR025827,IPR038109,PS51736,cd03768, IPR006118,PF13408,G3DSA:3.40.50.1390,PF07508,Coil
MTSQKSSIERKLSEQRAALYIRVSTHWQIDKDSLPVQREDLINYAKYALGIDKYEIFEDAGYSAKNTDRPAFQQMMSRLRTGEFSHLLVWKIDRISRNLLDFAEMYSEIKKLGITFVSKNEQFDTSNAMGEAMLKIILVFAELERNMTSERVTAVMLSRASNGQWNGGKVPFGYNYDKQTREFTINESEASVINLIYDTYEANNSLTLVARTLNEKGIYPRSGTPWNPTTVSTMLKNPFYTGAYRYNYHDESKSGGNTSSKHIKGRSEWVYIENHHPAIIDAERQSRILAILESNRRSNHRSSKTYIRKNVHIFAGLLYCGYCGSQMQSTIDRERADGYRPSIYACSRKRRFNDCQNKYVSDVTLAPFVLNYIANIIKAQNNFGKSTPLDTFERKLLRGKIFADVDHIEPAGLTEMYNMLKRGNLSDAVFSSARIQDAETDQMASDERDLLASERRKKERALDRLKSLYLYNDDAISERDYLVEKKSLTDSIDKIDKRLEEIERNSSHHFTLTDEEFMAKASVFIVTNQLQGKRFIDAEKLLRQIDTHVVKEFLNSVVQKIVIKDGRVLSIRFKNGLEHKFLYKYAE

SEQ ID NO: 483 - protein, 587 aa, Unknown
  Description of Unknown: Integrase B484 sequence
  IPR036162,PS51737,IPR011109,PTHR30461,PS00397, PF00239,G3DSA:1.10.10.2600,IPR006119,SSF53041,SM00857, IPR025827,IPR038109,PS51736,cd03768,IPR006118, PF13408,G3DSA:3.40.50.1390,PF07508,Coil
MKKGIALRTVKKTAEELLNTIKVAIYIRVSTHWQVDKESLPVQRQDLISYCKLILNTDNYVIFEDPGYSAKNTDRPDFQRMMARVRTGEFTHILVWKIDRISRNLLDFAAMYQELKELGVTFVSKNEQFDTSTAIGEAMLKIILVFAELERHMTSERVTAAMLSRATNGKWNGGKVPFGYKYDKGAQEFVIDEAEARVVKLMYDLYDEQRSLLVVSKELNDRGYRSRKGSLWSPVTVGNLMRSPFYIGVMRYNYRDESGATFTFKPEDEWIMIEEHHPQIVTHEQWNRVVDTMKSQRRGQPGHGKSFNRGNVHIFAGLVTCGYCGSLMRATKDRVRADGSRPSIYNCASKRTGSDCPNKYISDLTIGPFVLNYIANIIRARKSFGVSTSIETLEKKLLRGDTFKDVIHIGRPGLEELYRHFQGTRGVEQNFMASPGATASNTEEERDLLLAEKHRKERALNRLKALYLYSEEEQAMSEAEYIVERKRLLDSLEGIDARLAEIDEALAQQIKLSDEEFIQKASYFIMAQQLTEKRQIDYTRFMRKADPQIVKNFIQNVCANFCIKSGRVTSIRFKNGIEHQFFYRDPE

SEQ ID NO: 484 - protein, 587 aa, Unknown
  Description of Unknown: Integrase B485 sequence
  IPR036162,PS51737,IPR011109,PTHR30461,PS00397, PF00239,G3DSA:1.10.10.2600,IPR006119,SSF53041,SM00857, IPR025827,IPR038109,PS51736,cd03768,IPR006118, PF13408,G3DSA:3.40.50.1390,PF07508,Coil
MKSSVTLRSLKKTAEELVNTIKVAIYIRVSTHWQVDKESLPVQRRDLISYCKLILNTENYVIFEDPGYSAKNTDRPDFQKMMARVRTGEFTHILVWKIDRISRNLLDFAAMYQELKELGVTFVSKNEQFDTSTAIGEAMLKIILVFAELERHMTSERVTAAMLSRATNGKWNGGKVPFGYRYDKDAQEFLIDEDEAKVVKLMYDLYDEQRSLLAVSKELNERGYRSRKGALWSPVTVGNLMRSPFYIGVMRYNYRDESGTTFSFKPESEWIMFEEHHPQIVTHEQWSRVVTTMQSQRRGQPGHGKTFNRGNVHIFAGLVTCGYCGSLMRATKDRVRSDGSRPSIYTCASKRTGNSCPNKYISDLTIGPFVLNYIANIIRARKSFGASTSIEVLERKLLRGDTFRDVAHIGRPGLEELYRHFQGTQGVEQNFMASPGATASNEEEERELLLAEKHRKERALNRLKALYLYSEEEQAMSEAEYIVERKRLMDSLEAIDSRLKEIDVALAQQIKLSDEEFIQKASYFIMAQQLTEKRHIDYTRFMRRADPQIVKNFVQNVCANFCIKSGRVTSIRFKNGIEHQFFYKDSE

SEQ ID NO: 485 - protein, 587 aa, Unknown
  Description of Unknown: Integrase B486 sequence
  IPR036162,PS51737,IPR011109,PTHR30461,PS00397, PF00239,G3DSA:1.10.10.2600,IPR006119,SSF53041,SM00857, IPR025827,IPR038109,PS51736,cd03768,IPR006118, PF13408,G3DSA:3.40.50.1390,PF07508,Coil
MTSQKSSIDRKLSEQRAALYIRVSTHWQIDKDSLPVQRGDLINYAKYALGIDKYEIFEDAGYSAKNTDRPAFQQMMSRLRTGEFSHLLVWKIDRISRNLLDFAEMYSEIKKLGITFVSKNEQFDTSNAMGEAMLKIILVFAELERNMTSERVTAVMLSRASNGQWNGGKVPFGYNYDKQTREFTINESEASVINLIYDTYEANNSLTLVARALNEKGIYPRSGTPWNPATVSTILKNPFYTGAYRYNYHDESKSGGNTSSKHIKDRSEWVYIENHHPAIIDAERQSRILAILESNRRSNHRSSKTYIRKNVHIFAGLLFCGYCGSQMQSTIDRERADGYRPSIYACSRKRRFNDCPNKYVSDVTLAPFVLNYIANIIKAQNNFGKSTPLDTFERKLLRGEIFADVDHIEPVGLTEMYNMLKRGNLSDAVFSSARIQDTETDQMASDERDLLASERRKKERALDRLKSLYLYNDEAISERDYLVEKKSLTDSIDKIDKRLEEIERNSSHHFTLTDEEFMAKASVFIVTNQLQGKRFIDAEKLLRQIDTHVVKEFLNSVVQKIVIKDGRVLSIRFKNGLEHKFLYKDAE

SEQ ID NO: 486 - protein, 587 aa, Unknown
  Description of Unknown: Integrase B487 sequence
  PTHR30461:SF3,IPR036162,PS51737,IPR011109,PTHR30461, PS00397,PF00239,G3DSA:1.10.10.2600,IPR006119,SSF53041, cd00338,SM00857,IPR025827,IPR038109,PS51736, IPR006118,PF13408,G3DSA:3.40.50.1390,PF07508,Coil
MGYVTKKVAQRFEEKKVAIYVRVSTQYQVDRASLPVQREELIAYCKYVLGIDSFEVFEDPGYSAKNTDRPDYQRMINRVRTGEFSHILVWKIDRISRNLLDFAAMYAELKKLGVTFVSKNEQFDTSSAMGEAMLKIILVFAELERNMTSERVSAIMLSRANGGVWNGGKIPFGYSYDKEQKVFHVLDGEAKVVLYIYDFYESIQSLTTVAKQLNEKGIRSRTGKPWNPVTVRTMLTNPFYAGTYRYNYRDESSRTYSVKPKDEWVMVEDHHPAIVTRERQNHIAGILEKHRRSNFDGRTYQRKNTHIFGGLLRCGYCGSLMSATSDRARSDGWRPSQYLCTRRRRFDDCTNKYIIDTTIGPFVFNFIANMIRASKSFGKSTSIETLEKKLLRGEALASVDHIGRPGLEELYNHLRSGFSEMPFDAPSAAAAESAANIQERELLLSEKRRLERALNRLRTLYLYSDDSMPEKDYIVERKQLMDSLDEVDAKLEAAEKVAADAISLSDEEFMAKASYFILSQQLQDKRFIDYERFIRKIDPKIVKDFLNSIVTNFCIKDGLTTSILFRNGLELQFFYKTAETAKSPKTF

SEQ ID NO: 487 - protein, 587 aa, Unknown
  Description of Unknown: Integrase B488 sequence
  PTHR30461:SF3,IPR036162,PS51737,IPR011109,PTHR30461, PS00397,PF00239,G3DSA:1.10.10.2600,IPR006119,SSF53041, cd00338,SM00857,IPR025827,IPR038109,PS51736, IPR006118,PF13408,G3DSA:3.40.50.1390,PF07508,Coil
MGYVTKKVAQRFEEKKVAIYVRVSTQYQVDRASLPVQREELIAYCKYVLGIDSFEVFEDPGYSAKNTDRPDYQRMINRVRTGEFSHILVWKIDRISRNLLDFAAMYAELKKLGVTFVSKNEQFDTSSAMGEAMLKIILVFAELERNMTSERVSAIMLSRANGGVWNGGKIPFGYSYDKEQKVFHVLDSEAKVVLYIYDFYESIQSLTTVAKQLNEKGIRSRTGKPWNPVTVRTMLTNPFYAGIYRYNYRDESSRTYSVKPKDEWVMVEDHHPAIVTRERQNHIAGILEKHRRSNFDGRTYQRKNTHIFGGLLRCGYCGSLMSATSDRARSDGWRPSQYLCTRRRRFDDCTNKYIIDTTIGPFVFNFIANMIRASKSFGKSTSIETLEKKLLRGEALASVDHIGRPGLEELYNHLRSGFSEMPFDAPSAAAAESAANIQERELLLSEKRRLERALNRLRTLYLYSDDSMPEKDYIVERKQLMDSLDEVDAKLEAAEKVAADAISLSDEEFMAKASYFILSQQLQDKRFIDYERFIRKIDPKIIKDFLNSIATNFCIKDGLTTSILFRNGLELQFFYKTAETAKSPKTF

SEQ ID NO: 488 - protein, 586 aa, Unknown
  Description of Unknown: Integrase B489 sequence
  PTHR30461:SF3,cd00338,SM00857,IPR006118,G3DSA:1.10.10.2600, IPR036162,PS51737,G3DSA:3.40.50.1390,IPR006119,IPR038109, PF07508,IPR011109,SSF53041,PTHR30461,PS00397, PS51736,Coil,PF00239
MPFKKAIETMPNCCHRAAIYIRVSTNHQIDRDSLPLQREELINYAKYALGIENYEVFEDAGFSAKNTDRPDYQRMMKMIRSGLFSHVLVWKLDRISRNLLDFAAMYEELKRLNVTFVSKNEQFDTSTAMGEAMLKIILVFAELERKMTSERVTATMLSRAASGKWNGGRIPYGFSYDYDRREFSICTEEQNITLLMCDFYESSHSLLYVSRKLNELGHRTRAGNLWSPVQVRKILVNPFSVGDYVYNQTSLSTGTQIPNKEEDYIVFEGHHPALFPKERQQKIVSQLSRNSRLKSGSNVSVKRKNIHVFSGMIFCENCGQMLTSSTGKALSGDGWRPSIYLCPSKRKHISEGCHDTTDSTVGEFTINFILNMLNAQRNFALIRTPEDLQRLLLYGKVFDDVDHLGEEGLNEMFTVLSENLPANTKSGLKKKAKKPVTNPEITKLKKEQKKLERAMERLKRLYMYSEDSMSEHDYITERNRISEAYEDIETRLSEISTCEHTERSISDQDFIQQATAFVLSKKLSGSSYINYRRLAASTDAQILKDFFNSIIDSITINTDGQVGSIVFKNGLLHRFIYSSAEKSQGS

SEQ ID NO: 489 - protein, 586 aa, Unknown
  Description of Unknown: Integrase B490 sequence
  PTHR30461:SF3,IPR036162,PS51737,IPR011109,PTHR30461, PF00239,G3DSA:1.10.10.2600,IPR006119,SSF53041,cd00338, SM00857,IPR025827,IPR038109,mobidb-lite,PS51736, PF13408,G3DSA:3.40.50.1390,PF07508,Coil
MAQQKKAAVAAFDGTPRAVIYARYSSTHQRERSIEDQIADCRAYAERCGLMVVGIYADRAISGKTDERPDFQRMIDDSKKRQFDRVIVWKLDRFARNRYDSALYKHKLKQNGVSVLSAMENIGEGDESIILEAILEASAEYYSRDLRKKVLRGMTTSAKKGLHNTGSVPYGYRLEGESAVPDGDRAEFVKHVFEAYAKGETPAELYREMQRRGLDTKANGRKVSDNIIGSILRNEKYTGRGMWRGIPVEWPRLIDDELFKAARARTEKNRRAPAAYKVAEPFILCGKAFCGYCGAPLMSGGGKGRSGKYYRHYICRTKKRERACGKKTEDKDFLEWYIVEQTCAYVLAPERLEYIADRVVECYKESFDGQRVSALEARIAKLDRDLDKTTDLLFSAPSAAAVDRINKHVVELEAQKSELEAELSWLKIAAAITYTRDEVVAWLKQFCNGDPLEAEFRRRIVETFINSVYVYDDRIVIYFNVRGGKQISYAEMLDSAGDVEPLPPGPENEKSGGPDNGTAASNGKERFLHGKNIEQTAESAVRFCSGLVHQKMLPSLGWGVFLVLPCEESNRTAARRRQKTIQRIVF

SEQ ID NO: 490 - protein, 586 aa, Unknown
  Description of Unknown: Integrase B491 sequence
  PTHR30461:SF3,SM00857,G3DSA:1.10.10.2600,IPR036162,PF13408, PS51737,IPR025827,G3DSA:3.40.50.1390,IPR006119,IPR038109, PF07508,IPR011109,SSF53041,PF00239,PTHR30461, PS51736,Coil,cd00338
MARKKNIAAGQNAVIYARYSSHNQREVSIEQQVRECMKHAAELGLHVVGTYEDRAISGKTDKRPNFQRMMRDAEKGKFQAVVAWKSNRIGRNMLQAMVNEAKLEDCGVKVFYAEEDFDDTAAGRFALRNMMNVNQFYSENMAEDITRGLYDNASKCMANGRQPLGYKRGEDGRVVLDEANAAVVREIFTRVAAGDLFVDIARDLNAQGIKTSKGANWNKGSFQSICQNERYRGIYIYGDVRVADGIPRIVSDDLWYRVQEAMRMKKNPVGTRHRVGAEDYLLTGKLRCGHCGSYMTGVSGTSRNGELHYYYTCQKRRTEHACDKKNIRRDVIEPAVAQAIKMYCLTDDVIAWIADRTVEYWEKHDNDLQIEALEQQLEENKKATSNMLKAIEMGIITEATRTRMVELETEQSRLSVQLNVAKEDVVKIDREQIISYLELLQQGDIHDRDFQMELFKNFLVAVYVYDDNRMKLVFSCMGDQNSVEIPLETGEDPPDGGLSPDAKMFVLTPDSSTKKALYFAGSTVLFFFTEANFGGLYCFACTVFIAVCAFNAQATSANCISQRCRFAQTILQQTAFHLRCVRFSRT

SEQ ID NO: 491 - protein, 586 aa, Unknown
  Description of Unknown: Integrase B492 sequence
  PTHR30461:SF3,IPR036162,PS51737,IPR011109,PTHR30461, PF00239,G3DSA:1.10.10.2600,IPR006119,SSF53041,cd00338, SM00857,IPR025827,IPR038109,mobidb-lite,PS51736, PF13408,G3DSA:3.40.50.1390,PF07508,Coil
MPRAAQAAGAVFDGTPRAVIYARYSSTHQRERSIEDQIADCRAYAERCGLMVVGIYADRAISGKTDERPDFQRMIDDSKKRQFDRVIVWKLDRFARNRYDSALYKHKLKQNGVSVLSAMENIGEGDESIILEAILEASAEYYSRDLRKKVLRGMTTSAKKGLHNTGSVPYGYRLEGESAIPDGDRAEFVKHVFEAYAKGETPAELYREMQRRGLDTKVNGRKVSDNIIGSILRNEKYTGRGMWRGIPVEWPRLIDDELFEAARARTEKNRRAPAAYKAAEPFILCGKAFCGYCGAPLMSGGGKGRSGKYYRHYICRTKKRERACGKKTEDKDFLEWYIVEQTCAYVLAPERLEYIADRVVECYKESFDGQRVSVLEARIAKLDRDLDKTTDLLFAAPSAAAVDRINKHVVELEAQKSELEAELSGLKIAAAITYTRDEVVAWLKQFCNGDPLEAEFRRRIVETFINSVYVYDDRIVIYFNVRGGKQISYAEMLDSAGDVEPLPPGPESKKSGGPDNGTAASNSKERFLHGKNTEQTAESAVRFCSGLVHQKMLPSLGWGVFLVLPCEESNRTAARRRQKAILRIVF

SEQ ID NO: 492 - protein, 586 aa, Unknown
  Description of Unknown: Integrase B493 sequence
  IPR036162,PS51737,IPR011109,PTHR30461,PS00397, PF00239,G3DSA:1.10.10.2600,IPR006119,SSF53041,SM00857, IPR025827,IPR038109,PS51736,cd03768,IPR006118, PF13408,G3DSA:3.40.50.1390,PF07508,Coil
MTAKKLSSIKKTAEELINTIKVAIYIRVSTHWQVDKESLPVQRKDLISYCNLILNTDNYVIFEDPGYSAKNTDRPDFQKMMARVRTGEFTHILVWKIDRISRNLLDFAAMYQELKELGVTFVSKNEQFDTSTAIGEAMLKIILVFAELERHMTSERVTAAMLSRATNGKWNGGKVPFGYKYDKDAQEFVIEEAEARVVKLMYDLYDEQRSLLVVSKELNDRGYRSRKGSLWSPVTVGNLMRSPFYIGVMRYNYRDESGATFTFKPEDEWIMIEEHHPQIVTHEQWNRVVDTMKSQRRGQPGHGKSFNRGNIHIFAGLVTCGYCGSLMRATKDRVRADGSRPSIYICASKRTGSSCPNKYISDLTIGPFILNYIANIIRARKSFGVSTSIETLEKKLLRGDTFKNVEHIGRPGLEELYHHFQGTRGVEQTFTATPGATATNEEEERELLLAEKHRKERALNRLKALYLYSEEEQAMSEAEYIIERKRLLDSLETINGRLKEIDEALAQQIKLSDEEFIQKASYFIMAQQLTDKRYIDYTRFMRKADPQIVKNFVQNVCSNFCIKSGRVTSIRFKNGIEHQFFYHDEE

SEQ ID NO: 493 - protein, 586 aa, Unknown
  Description of Unknown: Integrase B494 sequence
  PTHR30461:SF3,IPR036162,PS51737,IPR011109,PTHR30461, PF00239,G3DSA:1.10.10.2600,IPR006119,SSF53041,cd00338, SM00857,IPR025827,IPR038109,mobidb-lite,PS51736, PF13408,G3DSA:3.40.50.1390,PF07508,Coil
MSTDSEDQLNSYKSQVEHYTTLIKNNNEWIFAGIYADEGITGTQILKRDDFIRLMDECMKGNVDMIITKSISRFARNTLDTLKYVRKLKERGIAVYFEEEGINTLSMESEMALVLLSSVAQQEVENISAHVKKGLKMKALRGEMIGAQECLGYDYSVEKGNIIINAEEVDIVRYIFRRYLEGAGATVIGHELDEMGCATKRGNKQWNSSTVLGILKNEKYRGDVLMGKTYTVDPISKRRMHNYGEEDQYRIANHHEPIISLEEFEAAQQILEKRGRAQRLGIDGEREKLSRKYAFSSMLRCGFCGKVLLRRSWHASSCYQKTIWQCERWARYGKENCPECKGIEERVIEQAFLDSYRYLQKDNDDVLNEFVDRVLKVLKEEEAGSTDAKVEKELRQAVARRKKLVDLRLDETLEPEAFQAKYEELTAQINRLNQRAERFAKLRHDREDLEKRVSDIRKQLKSGVVLENFNRNVFESIVDRVVVGGYDEKGKPDPYLLTFVYKAGGNKSMDGRRYRQSRRKVHDDGKDGDLCPNADDEEEPVCPNCVVDGGRDRRAVGAGKTGLSAEDGRISFCISAAGAFMMESSR

SEQ ID NO: 494 - protein, 586 aa, Unknown
  Description of Unknown: Integrase B495 sequence
  PTHR30461:SF3,cd00338,SM00857,IPR006118,G3DSA:1.10.10.2600, IPR036162,PS51737,G3DSA:3.40.50.1390,IPR006119,IPR038109, PF07508,IPR011109,SSF53041,PTHR30461,PS00397, PS51736,Coil,PF00239
MPFKKAIETMPNCCHRAAIYIRVSTNHQIDRDSLPLQREELINYAKYALGIENYEVFEDAGFSAKNTDRPDYQRMMKMIRSGLFSHVLVWKLDRISRNLLDFAAMYEELKRLNVTFVSKNEQFDTSTAMGEAMLKIILVFAELERKMTSERVTATMLSRAASGKWNGGRIPYGFSYDCDRREFSICTEEQNITLLMCDFYESSHSLLYVSRKLNELGHRTRAGNLWSPVQVRKILVNPFSVGDYVYNQTSLSTGTQIPNKEEDYIVFEGHHPALFPKERQQKIVSQLSRNSRLKSGSNVSVKQKNIHVFSGMIFCENCGQMLTSSTGKALSGDGWRPSIYLCPSKRKHISEGCHDTTDSTVGEFTINFILNMLNAQRNFALIRTPEDLQRLLLYGKVFDDVDHLGEEGLNEMFTVLSENLPANTKSGLKKKAKKPVTNPEITKLKKEQKKLERAMERLKRLYMYSEDSMSEHDYITERNRISEAYEDIETRLSEISTCEHTERSISDQDFIQQATAFVLSKKLSGSSYINYRRLAASTDAQILKDFFNSIIDSITINTDGQVGSIVFKNGLLHRFIYSSAEKSQGS

SEQ ID NO: 495 - protein, 586 aa, Unknown
  Description of Unknown: Integrase B496 sequence
  PTHR30461:SF3,SM00857,G3DSA:1.10.10.2600,IPR036162,PF13408, IPR025827,PS51737,G3DSA:3.40.50.1390,IPR006119,IPR038109, PF07508,IPR011109,SSF53041,PF00239,PTHR30461, PS51736,Coil,cd00338
MAKKKKPAGGNAIIYARYSSHNQRDVSIEQQIEACRKHAAELGLTITDTYEDRAISGRTDNRPAFQRMMHDAENGKFSYVLAWKSNRMGRNMMQAMVNESRLMDCGIKVYYAEEDFDDSAAGRFALRSMMNVNQFYSDNLAEDVRRGLMDNASKCMANGKQPLGYKRGEDGKVVVDEPAAAIVREVYTRVASGELFTDIARDLNRRGIKTADKGEWNKNSFHRLCSNEKYRGIYIYGDVRIEGGIPTIIDDTLWYKVQEALRVKKLKRNGRHRPGDEDYLLTGKLRCGKCGGYMIGMSGRSKTGDIHYYYACQNRRVGRTCDKKNIRRDVIEPAVAQAIKDYCLTDDAIEWIADKTVEYWEKADRNLQLDSIEGDLAAVQSSISNVMKAIEMGVVTETTRDRLIELEKQRTDLKSKLALAKEEVVHVDRKKLISSLLLFRNGNIHDRQYQEDLFKTFLISVYVYDDDDNGHLKIVFNAFGDNNTVDLPIDFGETDNQSGFSDGAEKFDYALHRSAIHLLYQRGDLFRQADGLRQQFPCPPEQPLAVDCRAALIKGILPGIQHRADGCLHRLRAAAPGVAVQTANAL

SEQ ID NO: 496 - protein, 586 aa, Unknown
  Description of Unknown: Integrase B497 sequence
  PTHR30461:SF3,cd00338,SM00857,G3DSA:1.10.10.2600,IPR036162, PF13408,PS51737,IPR025827,G3DSA:3.40.50.1390,IPR006119, IPR038109,PF07508,SSF53041,IPR011109,PTHR30461, PS51736,Coil,PF00239
MSSVDKIAVVYARYSSHGQTEQSIEGQIAAAQKYAEQHGYTIIHVYADRAMTGRNDDREQFQKMLSDTAMHQFGVILLWKIDRFGRNREEIAFNRYRCKKNGVRVERVAEDVPDGPEGVILDSVLEGMAEYYSLQLAQNVRRGQRESAKKSMSIGGNKMLGYIVNPETKRYESDPKTASYVTEIFKRYANGETISEIVAWLNAQGIRTTRGSEFTVNSLHRLLKNEKYTGVYIFHDIRNEGGMPALTDRTTFDKVQEMLKVNRRAPARVWSKTEYLLTDKLFCGHCGAMMVGESGHGRNGIKHSYYTCLNRKKKKSCDKKPVRQDVIESLVLRAIGKLLENPATLENIADQVWAAYERSDTSGDAIKALDKQIADVDRALSNVMKAIEMGIINEMTKTRMDELTNQKQALSTARAEAGLAEGFKLTRDMILFFLQEISALDMADRDSQKRLIKTFVNAIYLYDDHFDIAFNYTDNGNVVVRMREINDAARGEMFGRCAQCPTKKNPQLRLRVLFCAGAGRIRTGRPSADGKKQSCGLFFRPRLANPPAPTKKLWHKCVTAFFVVSLKNDELISPFFQTFFTVLSNT

SEQ ID NO: 497 - protein, 586 aa, Unknown
  Description of Unknown: Integrase B498 sequence
  PTHR30461:SF3,IPR036162,PS51737,IPR011109,PTHR30461, PF00239,G3DSA:1.10.10.2600,IPR006119,SSF53041,cd00338, SM00857,IPR025827,IPR038109,mobidb-lite,PS51736, PF13408,G3DSA:3.40.50.1390,PF07508,Coil
MAQQKKAAGAEFDGTPRAVIYARYSSTHQRERSIEDQIADCRAYAERCGLMVVGIYADRAISGKTDERPDFQRMIDDSKKRQFDRVIVWKLDRFARNRYDSALYKHKLKQNGVSVLSAMENIGEGDESIILEAILEASAEYYSRDLRKKVLRGMTTSAKKGLHNTGSVPYGYRLEGESAVPDGDRAEFVKHVFEAYAKGETPAELYREMQRRGLDTKVNGRKVSDNIIGSILRNEKYTGRGMWRGIPVEWPRLIDDELFEAARARTEKNRRAPAAYKAAEPFILCGKAFCGYCGAPLMSGGGKGRSGKYYRHYICRTKKRERACGKKTEDKDFLEWYIVEQTCAYVLAPERLEYIADRVVECYKESFDGQRVSALEARIAKLDRDLDKTTDLLFAAPSAAAVDRINKHVVELEAQKSELEAELSGLKIAAAITYTRDEVVAWLKQFCNGDPLEAEFRRRIVETFINSVYVYDDRIVIYFNVRGGKQISYVEMLDSVGDVEPLPPGPENKKSGGPDNGTAASNSKERFLHGKNTEQTTESAVRFCSGLVHQKMLPSLGWGVFLVLPCEESNRTAARRRQKTILRIVF

SEQ ID NO: 498 - protein, 586 aa, Unknown
  Description of Unknown: Integrase B499 sequence
  PTHR30461:SF3,cd00338,SM00857,G3DSA:1.10.10.2600,IPR036162, PF13408,PS51737,G3DSA:3.40.50.1390,IPR025827,IPR006119, IPR038109,PF07508,IPR011109,SSF53041,PTHR30461, PS51736,Coil,PF00239
MEVEIIKAKGAGEDTSTGRKIDRLRVAAYCRVSTDDEDQIKSYNSMVRYYTDLIKSNKQWVFAGVFADKAITGTKTDKREEFQLLIQECLSGNIDLVIAKSIPRFARNTLDTLKYVRMLRERNIAVYFEVEKINTLKDGEFLLTILSSVAQQEVENTSAYVKKGLKMKMKRGELVGFQGCLGYDYDVVTKSLSINEEGAETVRYIFDRYVAGAGSTMIARELNEQGISTIKGNPWTSSSVMGIINNEKYKGDILLGKTFTVDPISKRRLENLGEEDRFYIKNHHEPIVSEETFARAQEIRERRNGGRKKGVAPGKREKFSRQYAFSCMLECGFCGANLSRRRWHSSSKYTKTIWQCVESTKHGKRFCPDSKGIPEQVIEDAFIESYRMLCTDHKDVLEEFIRRVEKTLSEDSIEDKIEKLNISVYNIQYKRKKLLENYLEGVVAKDIYEETDVGYEKKLSEAKAQLSMLEQQYDNEGSLQRRLADFRKALSKNQILEEFDRGIFESIIEKVIVGGYDENGEKDPYKIIFIYKTGFKNEIGNAKERFGKKSKAVEKAKEMCSHIVDEVKDVCSYVSDNTRRNRVSTF

SEQ ID NO: 499 - protein, 586 aa, Unknown
  Description of Unknown: Integrase B500 sequence
  PTHR30461:SF3,cd00338,SM00857,G3DSA:1.10.10.2600,IPR036162, PS51737,G3DSA:3.40.50.1390,IPR006119,IPR038109,PF07508, IPR011109,SSF53041,PTHR30461,PS51736,Coil, PF00239
MINSDFVKKRVVIYARVSTEHEAQISALENQMDWYKPILAARPEWTLVGQYVDEGITGTSAAKRPQFMKMIADAKKKQFDMIITREVSRFARNTVDTLQYTRQLKSLGVEVFFINDNIKTFDGDGELRLTIMATLAQDESRKTSVRVKSGQQTSMNNGVIYGNGNILGYKRVAKIVDDNKKEVEWTVDPEQAKTVKMIYAMYLDGMGLMQIKDELERRGRKTSAGLDRWYCTVISHILKNSFYCGIITYHKEYTPDYLTQKKVKNYGEIEFTKVQGSHEALVSVADYERVQIIMESKRSKCKNLDTGRKATGKRPRTTVWGKLLICECGHKFSMRVWDRKDRVANAAYQCYSSVHTGSYESRKKRGLSLDGICQTPMIPEWRLQMMANYIFRNYLTEKDKVLALANSMLEAHIGDTESREDHTETLRCKRAELEKLNTKLDNFIEMRAEGEISKELFKKKTSELELTMQKLDSEIKELESKQEPEIQIEDYAEKLTVLQYALEQYTNWDDKDVPESVIEAFVVKIVASKDGFDWYLRFSGNPDDPLHCTVGGKRKSTAKISVAGECSPAIHKGDTGSYQGTAPIKS

SEQ ID NO: 500 - protein, 586 aa, Unknown
  Description of Unknown: Integrase B501 sequence
  PTHR30461:SF3,IPR036162,PS51737,IPR011109,PTHR30461, PF00239,G3DSA:1.10.10.2600,IPR006119,SSF53041,cd00338, SM00857,IPR025827,IPR038109,mobidb-lite,PS51736, PF13408,G3DSA:3.40.50.1390,PF07508,Coil
MAQQKKAAGSEFDGTPRAVIYARYSSTHQRERSIEDQIADCRAYAERCGLMVVGIYADRAISGKTDERPDFQRMIDDSKKRQFDRVIVWKLDRFARNRYDSALYKHKLKQNGVSVLSAMENIGEGDESIILEAILEASAEYYSRDLRKKVLRGMTTSAKKGLHNTGSVPYGYRLEGESAVPDGDRAEFVKHVFEAYARGETPAELYREMQRRGLDTKVNGRKVSDNIIGSILRNEKYTGRGMWRGIPVEWPRLIDDELFEAARARTEKNRRAPAAYKAAEPFILCGKAFCGYCGAPLMSGGGKGRSGKYYRHYICRTKKRERACGKKTEDKDFLEWYIVEQTCAYVLAPERLEYIADRVVECYKESFDGQRVSVLEARIAKLDRDLDKTTDLLFAAPSAAAVDRINKHVVELEAQKSELDAELSGLKIAAAITYTRDEVVAWLKQFCNGDPLEAEFRRRIVETFINSVYVYDNRIVIYFNVRGGKQISYAEMLDSAGDVEPLPPGPENEKSGGPDNGTAASNSKERFLHGKNTEQTAESAVRFCSGLVHQKMLPSLGWGVFLVLPCEESNRTAARRRQKTILRIVF

SEQ ID NO: 501 - protein, 585 aa, Unknown
  Description of Unknown: Integrase B502 sequence
  PTHR30461:SF3,cd00338,SM00857,IPR006118,G3DSA:1.10.10.2600, IPR036162,PS51737,G3DSA:3.40.50.1390,IPR006119,IPR038109, PF07508,SSF53041,IPR011109,PTHR30461,PS00397, PS51736,Coil,PF00239
MAFKKTIDTMPTLCRRVAIYIRVSTNHQIDRDSLPLQREELINYAKYALNIEDYEVFEDAGFSAKNTDRPDYQRMMKMIRSGLFSHVLVWKLDRISRNLLDFAAMYEELKRLNVTFVSKNEQFDTSTAMGEAMLKIILVFAELERKMTSERVTATMLSRAASGKWNGGRIPYGFSYDYDTREFSICSEEQKVVLLMCDFYESSHSLLYVSRILNELGHRTRAGNLWSPVQVHKILVNPFSVGDYVYNQTSLSTGTQIPNKEEDFIVFENHHPALFPKERQQKIVSQLSRNSRLKSGSNVSVKRKNIHVFSGMIFCENCGQMLTSSTGRALSGDGWRPSIYLCPSKRRHISEGCHDTTDSTVGEFTINFILNMLNAQRNFALIRTQEDLQRMLLYGKVFDNVDHLGEEGIKEMFTVLSENLPENTKSGLKKKSRKPAANPEVTKLKKEQQKLERAMERLKRLYMYSEDSISEQEYITERNRISEAYEDIEMRLSEISTCERTERSITDQDFIRQATAFIISKKLSGSSYINYRRLAANTDVQILKDFFNSIIDSITINSNGQIGSIVFKNGLLHRFIYSSVDKSQE

SEQ ID NO: 502 - protein, 585 aa, Unknown
  Description of Unknown: Integrase B503 sequence
  PTHR30461:SF3,IPR036162,PS51737,IPR011109,PTHR30461, PS00397,PF00239,G3DSA:1.10.10.2600,IPR006119,SSF53041, SM00857,IPR025827,IPR038109,PS51736,cd03768, IPR006118,PF13408,G3DSA:3.40.50.1390,PF07508,Coil
MAYAALRKAGLVPAAAPDLRTVALYVRVSTGYQVDKDSLPFQKKELKNYCKHVLHIDESRIEIFEDAGKSGKNTNRPAFERMMKKVRAGQISHVIVYKIDRISRNLVDFSLMYDDFKYNRVTFISLNEQFDTSSAIGEAVLKIILVFAELERKLASERVMDIMIGRALSGQWNGARVPFGWDWDEEAKFPKHSEVEAVFGRLMYDMYEETRSTCKVRDYNNTHDIPTKRGGEWTSKTVADFIRNPINRGDYRYNYRESARGRKKPEEEVIYLEGVFPPLVPPEQWDRCNAIMDENAAKKRSAGFSHKRIHVHAFAGLLVCGDCGAFFQVIKKDKTRENGFSPSLYRCGARYRKRACNSPGCSDVVLGPFVFNYISGMVRVASMRSKISSPEELEQLLLTGPEFEAVAGIASEGLNATFALLSGRPATGGAAYVPDLLAAPSGCINTGEVEELKQKITRIERALERLKKAFLFDDQAMGEKEYLETKLALETERIAAENRMKDLNEATFSTDAGELAFIKSASSFLLAHQIQTGEHIQYSDFAPLVGDETMKEFLNLVIERIVIQNGRPVEITFKNGLTHKFLYRD

SEQ ID NO: 503 - protein, 585 aa, Unknown
  Description of Unknown: Integrase B504 sequence
  PTHR30461:SF3,cd00338,SM00857,IPR006118,G3DSA:1.10.10.2600, IPR036162,PS51737,G3DSA:3.40.50.1390,IPR006119,IPR038109, PF07508,IPR011109,SSF53041,PTHR30461,PS00397, PS51736,Coil,PF00239
MAFKKTIDTMPTLCRRVAIYIRVSTNHQIDRDSLPLQREELINYAKYALNIEDYEVFEDAGFSAKNTDRPDYQRMMKMIRSGLFSHVLVWKLDRISRNLLDFAAMYEELKRLNVTFVSKNEQFDTSTAMGEAMLKIILVFAELERKMTSERVTATMLSRAASGKWNGGRIPYGFSYDYDTREFSICSEEQKVVLLMCDFYESSHSLLYVARKLNELGHRTRAGNLWSPVQVHKILVNPFSIGDYVYNQTSLSTGTQIPNKEEDFIVFENHHPALFPKERQQKIVSQLSRNSRLKSGSNVSVKRKNIHVFSGMIFCENCGQMLTSSTGKALSGDGWRPSIYLCPSKRRHISEGCHDTTDSTVGEFTINFILNMLNAQRNFALIRTQEDLQRMLLYGKVFDNVDHLGEEGIKEMFTVLSENLPENTKSGLKKKSRKPVANPEVTKLKKEQQKLERAMERLKRLYMYSEDSISEQEYITERNRISEAYEDIEMRLSEISTCERTERSITDQDFIRQATAFIISKKLSGSSYINYRRLAANTDVQILKDFFNSIIDSITINSNGQIGSIVFKNGLLHRFIYSSVDKSQE

SEQ ID NO: 504 - protein, 585 aa, Unknown
  Description of Unknown: Integrase B505 sequence
  SM00857,G3DSA:1.10.10.2600,IPR036162,PF13408,IPR025827, G3DSA:3.40.50.1390,PS51737,IPR006119,IPR038109,PF07508, SSF53041,IPR011109,PTHR30461,Coil,mobidb-lite, cd00338,PF00239
MAYRKITDIKDTIGMRAVFYARVSTAEEEQLNAIELQIEENRGCIKDHGWKLVGEYIDRSKSGTMVKGRDDYQRLYEDLYEDLFDIVVIKDQERLQRNTLDWYLFINRVVQTGKLLFMYMDGKFYSPDDALITGVRAIIAEEFSRNLSKKLHNYHDHRIEKARQGQEIALQGSGNVYGWDKKDGKYYINPEQAKVRRLMCEGIMARKGSTLIAKELNDAGYRNTVGKPWKPMDIPKFVYDCKNVGTMIINKERHDFESKQTIKLPKEEWVYVENALPPIVTQEEWDLICKIHEERVIATGSDRRGKKTSGYSFSGKLVCGICGAPYWRKQRVSKDEYWVCSTKQTKGRRTRKRDSTMGKAGEINPLGCDNENISYNSLMEIMGVVSERLQANTDTIKQDMINWLTKLRKQLLEANGGHTEADLQRELSRKSKLLDAYLDGILNKQEYQKKAEELDERIIQLKAETEKNKANSGDIEEIDKVLANIDEEVSRYVDGNEKLKVEYLLEHLEQVQIFPDKVIVIVPILSEGIVVEKTQYVSREKRCGKNNDAAHYFRAFKERRRRSVAGRRADDKKYSEAEKPDRLCA

SEQ ID NO: 505 - protein, 585 aa, Unknown
  Description of Unknown: Integrase B506 sequence
  PTHR30461:SF3,cd00338,SM00857,IPR006118,G3DSA:1.10.10.2600, IPR036162,PS51737,G3DSA:3.40.50.1390,IPR006119,IPR038109, PF07508,IPR011109,SSF53041,PTHR30461,PS00397, PS51736,Coil,PF00239
MAFKKTIDTMPTLCRRVAIYIRVSTNHQIDRDSLPLQREELINYAKYVLNIEDYEVFEDAGFSAKNTDRPDYQRMMKMIRSGLFSHVLVWKLDRISRNLLDFAAMYEELKRLNVTFVSKNEQFDTSTAMGEAMLKIILVFAELERKMTSERVTATMLSRAASGKWNGGRIPYGFSYNYDTREFSICSEEQKVVLLMCDFYESSHSLLYVSRKLNELGHRTRAGNLWSPVQVHKILVNPFSIGDYVYNQTSLSTGTQIPNKEEDFIVFENHHPALFPKERQQKIVSQLSRNSRLKSGSNVSVKRKNIHVFSGMIFCENCGQMLTSSTGRALSGDGWRPSIYLCPSKRRHISEGCHDTTDSTVGEFTINFILNMLNAQRNFALIRTQEDLQRMLLYGKVFDNVDHLGEEGIREMFTVLSENLPENTKSGLKKKSKKSAANPEVTKLKKEQQKLERAMERLKRLYMYSEDSISEQEYITERNRISEVYEDIEMRLSEISTCERTERSITDQDFIRQATAFIISKKLSGSSYINYRRLAANTDVQILKDFFNSIIDSITINSNGQIGSIVFKNGLLHRFIYSSVDKSQE

SEQ ID NO: 506 - protein, 585 aa, Unknown
  Description of Unknown: Integrase B507 sequence
  PTHR30461:SF3,cd00338,SM00857,G3DSA:1.10.10.2600,IPR036162, PF13408,PS51737,G3DSA:3.40.50.1390,IPR025827,IPR006119, IPR038109,PF07508,IPR011109,SSF53041,PTHR30461, PS51736,Coil,PF00239
MARKKNIAAGLDAVIYARYSSHNQREVSIEQQIAECTKHAAALGLRIVGTYEDRAISGKTDNRPRFQQMMRDAEKGKFQAVVAWKSNRIGRNMLQAMVNEAKLDDYGVKVFYAEEDFDDTAAGRFALRNMMNVNQFYSENMAEDITRGLYDNANKCMANGRQPLGYKRGADGKVMLDEPAAAVVREIFTRVAAGDLFVDIARDLNAKGIKTSKGAAWNKGSFQSICQNERYKGIYIYGNVRIVDGIPRIVSDELWYRVQEAMRMKKNPVGTRHRVGAEDYLLTGKLRCGHCGSYMTGVSGTSRNGELHYYYTCQKRRTEHACNKKNVRRDVIEPAIAQAIKMYCLTDDVIEWMADQTVQYWEKHDNDLQIEALEQQLAENKKATSNMLKAIEMGIITEATRSRMVELETENSKLTAQLSAAKRDVVKINREDLIDELHILRSKDIHDRDVQAELFKDFLVAAYIYDDNRLKLVFSFMGKDNSVEIPLETGEDPPDGKNSPDAKMFVLTPDCSTRTKSTTQKCVVLFVSAKRVRVQFTRESAVHGLQEGHRDLNRPGNLHQKEKHCTEMCGAYLLSACHAKQLMIR

SEQ ID NO: 507 - protein, 585 aa, Unknown
  Description of Unknown: Integrase B508 sequence
  PTHR30461:SF3,SM00857,G3DSA:1.10.10.2600,IPR036162,PS51737, G3DSA:3.40.50.1390,IPR006119,IPR038109,PF07508,SSF53041, IPR011109,PF00239,PTHR30461,PS51736,Coil, cd00338
MDIYEARRTMQTQRKNIFDLNLRVTFYARVSTTRDEQENSIENQIIHFENMIKENKNWTYVSGYADRIRGESAANRVEFQKMVDDAKAGAFDLVLTKEVSRFARNTIDSLTYTRDLLQCGVGVFFQNDNICTIDPDSELRLTIMSSIAADEVRKLSERIKFGHKRAAESGRLLGNSRIFGYTKVNCKLIIDEKEAEMVRLIFNLYETGSWSTRSIATELEKRGYLGRNGTPIHHNTVSGIIQNPKYKGYYCANKVTITDYRTKAQRFNPEEEWIMYKDETGETVPAIVSEDQWNACNVIFKERSSAIKARTRSIKSQSPLSGKIKCSEHGTYWRTSYSNSVSQGKPIYQWICREKKRQTASCCKSFALMESEIYKILNDVYKSIISDIDEWVSEFLKIYESVTTTESGKSKIAVLESNIQKLKVKQDRLLDLYMDEAITKSEYSDKASELNAKLDDAKSELESLKNPDNGESIIDPAKRIKTYIQEICGPESRDMTIDELNDISRVVLDFINVIPVDRQTMKLEIKLKSSELKSVDVSSHRSGRCNCCSGHITKKISPEQQYQFVRSGIKNGMSLYLVYIVCVGF

SEQ ID NO: 508 - protein, 585 aa, Unknown
  Description of Unknown: Integrase B509 sequence
  PTHR30461:SF3,IPR036162,PS51737,IPR011109,PTHR30461, PS00397,PF00239,G3DSA:1.10.10.2600,IPR006119,SSF53041, SM00857,IPR025827,IPR038109,PS51736,cd03768, IPR006118,PF13408,G3DSA:3.40.50.1390,PF07508,Coil
MAYAKLQKSGHLPDPAANMQIVALYVRVSTGYQVERDSLPFQKKELLNYCKHVLHIPPDRIEIFEDAGRSGKNTKRPAYERMMKKVREGLVSHVIVYKIDRITRNLVDFSLMYDDFKYTRVAFISLCEQFDTSSAIGEAVLKIILVFAELERKMTSERVKDIMINRAHEGKWNGARVPYGWEWDTENQFPKHHEVEAVFGRLMYDMYKDTHSTCKVRDYNNTHDVPTKRGGEWTSKTVADFIRNPMNRGDLRYNYRESARGRKKPENEVVYLEGVFPPLVDPVLWDECNEIMDANNRRKFSNSFFTIRSNCNIFAGLLICGECGANFQVTKKDRRRKNGFQPSLYACGAKHQKRSCTAAGCSDVTLGPFVLNYIAAMVQSTNERSNIHTPEELESLLLSRPEFAHIAGIASEGLNNTFAMLSGRPAAAGGSYSPSLFSSSAPSASAADIEELKQKLARITRAQERLKNVYLFDDNAMSEKEYLETKTALDLSRIETENIIQDLLSGTCCSEDDDTEFLKSASSFLLAHEIQNGQHIKYSDFAACVEEEVLKDFVNLVIDHIVIAGGRPIELVFKNGLSHKFLYRD

SEQ ID NO: 509 - protein, 585 aa, Unknown
  Description of Unknown: Integrase B510 sequence
  PTHR30461:SF3,IPR036162,PS51737,IPR011109,PTHR30461, PS00397,PF00239,G3DSA:1.10.10.2600,IPR006119,SSF53041, cd00338,SM00857,IPR038109,mobidb-lite,PS51736, IPR006118,G3DSA:3.40.50.1390,PF07508,Coil
MAFKKTIDTMPTLCRRVAIYIRVSTNHQIDRDSLPLQREELINYAKYALNIEDYEVFEDAGFSAKNTDRPDYQRMMKMIRSGLFSHVLVWKLDRISRNLLDFAAMYEELKRLNVTFVSKNEQFDTSTAMGEAMLKIILVFAELERKMTSERVTATMLSRAASGKWNGGRIPYGFSYNYDTREFSICSEEQKVVLLMCDFYESSHSLLYVSRKLNELGHRTRAGNLWSPVQVHKILVNPFSIGDYVYNQTSLSTGTQIPNKEEDFIVFENHHPALFPKERQQKIVSQLSRNSRLKSGSNVSVKRKNIHVFSGMIFCENCGQMLTSSTGKALSGDGWRPSVYLCPSKRRHISEGCHDTTDSTVGEFTINFILNMLNAQRNFALIRTQEDLQRMLLYGKVFDNVDHLSEEGLSEMFTVLSENLPSSTKSGLKKKSKKPAANPEVTKLKKEQQKLERAMERLKRLYMYSEDSISEQEYITERNRISEAYEDIEMRLSEISTCERTERSITDQDFIRQATAFVISKKLSGSSYINYRRLAANTDVQILKDFFNSIIDSITINSNGQIGSIVFKNGLLHRFIYSSVEKSQE

SEQ ID NO: 510 - protein, 585 aa, Unknown
  Description of Unknown: Integrase B511 sequence
  PTHR30461:SF3,IPR036162,PS51737,IPR011109,PTHR30461, PS00397,PF00239,G3DSA:1.10.10.2600,IPR006119,SSF53041, SM00857,IPR025827,IPR038109,PS51736,cd03768, IPR006118,PF13408,G3DSA:3.40.50.1390,PF07508,Coil
MAYAAMRRAGLVPAAAPDLRIVALYVRVSTGYQVDKDSLPFQKKELKNYCEHVLHIPADRIEIFEDAGKSGKNTKRPGFERMMKKVKAGQVSHVLVYKIDRISRNLVDFSLMYDDFRESRVTFISLNEQFDTSSAIGEAVLKIILVFAELERKLTSERVTDIMINRALAGEWNGARVPYGWDWDEEGKKPVHSETEAVFARLMYELYDKTRSTCKVRDYCNTHSIPTKRGGEWTSKTVADFIRNPLNRGDYRYNYRGSARGKKKPESEVVYVPGIFPPLVDPEVWDRCNKIMTENAAKRHCIGVSHQRKHVHPFASLLYCGACGAAFQVAKTDKPRLNGFRPVMYRCGARYRKNTCDAPGCSDVTVGPFVFNYVSAMVRAAGQRRKIETPAELEKLLLSDPVFENVAGIATEGLDATFALLSGRPAAAGASFVPDLLTVSSGATDTSELDELRQKVTRLDRALDRLKKLFLFDETAMDEKEYLESKMQLTVERTAAENRIRELEDLSFTTSSSELSFIRSASSFLLAHELQAGAHIQYSDFAPLIGNETLKEFLNLVIGRVTIRDGRVSEITFANGLTHVFLYRD

SEQ ID NO: 511 - protein, 585 aa, Unknown
  Description of Unknown: Integrase B512 sequence
  PTHR30461:SF3,cd00338,SM00857,IPR006118,G3DSA:1.10.10.2600, IPR036162,PS51737,G3DSA:3.40.50.1390,IPR006119,IPR038109, PF07508,IPR011109,SSF53041,PTHR30461,PS00397, PS51736,Coil,PF00239
MAFKKTIDTMPTLCRRVAIYIRVSTNHQIDRDSLPLQREELINYAKYVLNIEDYEVFEDAGFSAKNTDRPDYQRMMKMIRSGLFSHVLVWKLDRISRNLLDFAAMYEELKRLNVTFVSKNEQFDTSTAMGEAMLKIILVFAELERKMTSERVTATMLSRAASGKWNGGRIPYGFSYNYDTREFSICSEEQKVVLLMCDFYESSHSLLYVSRKLNELGHRTRAGNLWSPVQVHKILVNPFSIGDYVYNQTSLSTGTQIPNKEEDFIVFENHHPALFPKERQQKIVSQLSRNSRLKSGSNVSVKRKNIHVFSGMIFCENCGQMLTSSTGRALSGDGWRPSIYLCPSKRRHISEGCHDTTDSTVGEFTINFILNMLNAQRNFALIRTQEDLQRMLLYGKVFDNVDHLGEEGIKEMFTVLSENLPENTKSGLKKKSRKPAANPEVTKLKKEQQKLERAMERLKRLYMYSEDSISEQEYITERNRISESYEDIEIRLSEISTCERTERSISDQDFIRQATAFIISKKLSGSSYINYRRLAANTDVQILKDFFNSIIDSITINSNGQIGSIVFKNGLLHRFIYSSVDKSQE

SEQ ID NO: 512 - protein, 585 aa, Unknown
  Description of Unknown: Integrase B513 sequence
  PTHR30461:SF3,cd00338,SM00857,IPR006118,G3DSA:1.10.10.2600, IPR036162,PS51737,G3DSA:3.40.50.1390,IPR006119,IPR038109, PF07508,SSF53041,IPR011109,PTHR30461,PS00397, PS51736,Coil,PF00239
MAFKKTIDTMPTLCRRVAIYIRVSTNHQIDRDSLPLQREELINYAKYALNIEDYEVFEDAGFSAKNTDRPDYQRMMKMIRSGLFSHVLVWKLDRISRNLLDFAAMYEELKRLNVTFVSKNEQFDTSTAMGEAMLKIILVFAELERKMTSERVTATMLSRAASGKWNGGRIPYGFSYNYDTREFSICSEEQKVVLLMCDFYESSHSLLYVSRKLNELGHRTRAGNLWSPVQVHKILVNPFSIGDYVYNQTSLSTGTQIPNKEEDFIVFENHHPALFPKERQQKIVSQLSRNSRLKSGSNVSVKRKNIHVFSGMIFCENCGQMLTSSTGRALSGDGWRPSIYLCPSKRRHISEGCHDTTDSTVGEFTINFILNMLNAQRNFALIRTQEDLQRMLLYGKVFDNVDHLGEEGIREMFTVLSENLPENKKSGLKKKSKKPAANPEVTKLKKEQQKLERAMERLKRLYMYSEDSISEQEYITERNRISEVYEDIEMRLSEISTCERTERSITDQDFIRQATAFIISKKLSGSSYINYRRLAANTDVQILKDFFNSIIDSITINSNGQIGSIVFKNGLLHRFIYSSVDKSQE

SEQ ID NO: 513 - protein, 585 aa, Unknown
  Description of Unknown: Integrase B514 sequence
  PTHR30461:SF3,IPR036162,PS51737,IPR011109,PTHR30461, PS00397,PF00239,G3DSA:1.10.10.2600,IPR006119,SSF53041, SM00857,IPR025827,IPR038109,PS51736,cd03768, IPR006118,PF13408,G3DSA:3.40.50.1390,PF07508,Coil
MKQSKKVSDKLSNQKCALYVRVSTHWQIDKDSLPVQREDLINYSKYALNIDKYEIFEDAGYSAKNTDRPAFQQMMARLRTGEFSHLVVWKIDRISRNLLDFAEMYAEIKKLGITFVSKNEQFDTSNAMGEAMLKIILVFAELERNMTSERVTAVMLSRASNGQWNGGRVPYGYNYDKETGLFSINEAEASVINMIYDTYERVHSLLVVARTLNEKGILPRSGTPWSPTTISTILKNPFYTGAYRYNYHDESKSGGNTSSKFLKPKADWISVQEHHPAIVSAERQERVCAILEDNRRSNKRSSKTYVRKNIHIFAGILYCGYCGNQMQSTIDRERADGYRPSIYACSRKRRFDDCENKYISDVVVAPFVLNYIANVIKAQNNFGKSTSIETFERKLLRGPTFSEVEHIEQVGLQEMYDMLRSGISDAVYTSRTLSDIAGAEELADERDLLLAEHRKKERALARLKSLYLYNDEAISESDYIIERKNLSDSIASIDKRLEEIEKHSSRQFTLSDDEFLAKASMFIMTHHLQDKRYVDFEKLIRKVEPIIIKEFINSVTQKIVIKQGRIISIRFKNGIEHKFLYKTQE

SEQ ID NO: 514 - protein, 585 aa, Unknown
  Description of Unknown: Integrase B515 sequence
  PTHR30461:SF3,cd00338,SM00857,IPR006118,G3DSA:1.10.10.2600, IPR036162,PS51737,G3DSA:3.40.50.1390,IPR006119,IPR038109, PF07508,IPR011109,SSF53041,PTHR30461,PS00397, PS51736,Coil,PF00239
MALKKTIDTMPTLCRRVAIYIRVSTNHQIDRDSLPLQREELINYAKYALNIEDYEVFEDAGFSAKNTDRPDYQRMMKMIRSGLFSHVLVWKLDRISRNLLDFAAMYEELKRLNVTFVSKNEQFDTSTAMGEAMLKIILVFAELERKMTSERVTATMLSRAASGKWNGGRIPYGFSYNYDTREFSICSEEQKVVLLMCDFYESSHSLLYVSRRLNELGHRTRAGNLWSPVQVHKILVNPFSIGDYVYNQTSLSTGTQIPNKEEDFIVFENHHPALFPKERQQKIVSQLSRNSRLKSGSNVSVKRKNIHVFSGMIFCENCGQMLTSSTGKALSGDGWRPSIYLCPSKRKHISEGCHDTTDSTVGEFTINFILNMLNAQRNFALIRTQEDLQRMLLYGKVFDNVDHLGEEGIREMFTVLSENLPENTKSGLKKKSRKPAANPEVTKLKKEQQKLERAMERLKRLYMYSEDSISEQEYITERNRISEAYEDIEMRLSEISTCERTERSITDQDFIRQATAFIISKKLSGSSYINYRRLAANTDVQILKDFFNSIIDSITINSSGQIGSIVFKNGLLHRFIYSSVDKSQE

SEQ ID NO: 515 - protein, 585 aa, Unknown
  Description of Unknown: Integrase B516 sequence
  cd03768,SM00857,IPR006118,G3DSA:1.10.10.2600,IPR036162, PS51736,PS51737,G3DSA:3.40.50.1390,IPR006119,IPR038109, PF07508,SSF53041,IPR011109,PTHR30461,PS00397, mobidb-lite,Coil,PF00239
MKDIVAYLRVSTEAQDFERQRVDIDNWCRINEWKLNNTFTDKLSGFVEEREGLSELKEYLITNNIKNVIVWELSRLGRDKFNLMTLFKWFVDNQINIFFYTQNFWLLDVNGNLSSNVSLQIMILSNYAETEALMIKERMKSGKERAKKEGRWVHGAVAIGYKLSDDKRVYIDEENAKYVRQAFQLYANGDTSIKQLAVYCIKNNFPSSFGNYQSLRFILKNMIYTGQLNYVNIPAIIDIELYMKVQSIMEEKHTNKNKEYNNNKFLLEKLVTCPKCGAKYGGGGGHRYSCVNRVSSSAKVKCKSSSFDVRVLDAIVWYITKQIAAAQELYVQSNEEQIKDFEQQKELLNNKLETLEKKKKKQNTKFDLDAISIDEYKVIIKNLNSQINLIKNEIESLNIKINQSNFEMQNNNRATRVANNMDALNKLRDLETMRNLMKIIFKSIHVYKYHNNFNIIELETRMNYIYCFYNSHSSRNKTFTTNIALKQCWDDENKLLNDKNIDAEFYRDGIPIEIISDYKYKVKSQETIDKKRAQARERERRYRENRREEYNKHARELRHKRNELKKEAEERRNNISISKPKSKPD

SEQ ID NO: 516 - protein, 585 aa, Unknown
  Description of Unknown: Integrase B517 sequence
  PTHR30461:SF3,IPR036162,PS51737,IPR011109,PTHR30461, PF00239,G3DSA:1.10.10.2600,IPR006119,SSF53041,cd00338, SM00857,IPR025827,IPR038109,mobidb-lite,PS51736, PF13408,G3DSA:3.40.50.1390,PF07508,Coil
MAKKKKPAGGNAIIYARYSSHNQRDVSIEQQIEACRKHAAELGLTITDTYEDRAISGRTDNRPAFQRMMRDAEDGKFQYVLAWKSNRMGRNMMQAMVNESRLMDCGVKVFYAEEDFDDSAAGRFALRSMMNVNQFYSDNLAEDVRRGLMDNASKCMANGRQPLGYKRGEDGKVVVDEPAAAIVREIYTRIASGEMFMDIARDLNRRGIKTQSGSEWNKSSFKVLCRNERYRGIYIYGDTRIEGGIPPIVDDVLWYKVQEVLKVKKSKNRHHCPSDEDYLLTGKLRCGKCGGYMIGMSGRSKTGDVHHYYACQNRRVGHTCDKKNIRRDVVEPAVAQAIKQYCLTDDAIEWITDQTIAYWEDEDRKLQIDSIENDLSAVQSSISNVMKAIEMGVITETTRDRLIELERQQTDLKSKLALAKEEIVHVDRKDLISSLLAFRHGNVHDRAYQEKLFNAFLIAVYVYDDDHLKLVFNSFGKDDTVNIALDLGENDDNSGLSDVSKSSPILSNGQPKKNQSNMFGWFFFLFVSPMNRSAPLSRFTASVQKPQIETAEHFILWFCETLFKQQNQDRPFNASPFGRGGIAKQ

SEQ ID NO: 517 - protein, 585 aa, Unknown
  Description of Unknown: Integrase B518 sequence
  PTHR30461:SF3,IPR036162,PS51737,IPR011109,PTHR30461, PS00397,PF00239,G3DSA:1.10.10.2600,IPR006119,SSF53041, SM00857,IPR025827,IPR038109,PS51736,cd03768, IPR006118,PF13408,G3DSA:3.40.50.1390,PF07508,Coil
MKQSKNVSDKLSNQKCALYVRVSTHWQIDKDSLPVQREDLINYAKYALNIDKYEIFEDAGYSAKNTDRPAFQQMMARLRTGEFSHLVVWKIDRISRNLLDFAEMYAEIKKLGITFVSKNEQFDTSNAMGEAMLKIILVFAELERNMTSERVTAVMLSRASNGQWNGGRVPYGYNYDKETGLFSINEAEASVINMIYDTYERVHSLLVVARTLNEKGILPRSGTPWSPTTISTILKNPFYTGAYRYNYHDESKSGGNTSSKFLKPKADWISVQEHHPAIVSAERQERVCAILEDNRRSNKRSSKTYVRKNIHIFAGILYCGYCGNQMQSTIDRERADGYRPSIYACSRKRRFDDCENKYISDVVVAPFVLNYIANVIKAQNNFGKSTSIETFERKLLRGPTFSEVEHIEQVGLQEMYDMLRSGISDAVYTSRTLSDIAGAEELADERDLLLAEHRKKERALARLKSLYLYNDEAISESDYIIERKNLSDSIASIDKRLEEIEKHSSRQFTLSDDEFLAKASMFIMTHHLQDKRYVDFEKLIRKVEPIIIKEFINSVTQKIVIKQGRIISIRFKNGIEHKFLYKTQE

SEQ ID NO: 518 - protein, 585 aa, Unknown
  Description of Unknown: Integrase B519 sequence
  PTHR30461:SF3,cd00338,SM00857,G3DSA:1.10.10.2600,IPR036162, PF13408,IPR025827,G3DSA:3.40.50.1390,PS51737,IPR006119, IPR038109,PF07508,SSF53041,IPR011109,PTHR30461, mobidb-lite,Coil,PF00239
MPRKPAKHPAKPKRGKKLEIEEPGVLYGRYSSHNQKDISVEQQFEKGYELAAEYGIRIIDTYADRAVSGRTDKRRDFQRMMTDAAKGKFRYVIAWKSNRMGRNMLEALINEARLQDLGVRVLYVEEDFDDTAAGRFAARSMMNVNQFYSENMAEDIKRGLYDNAANCMVANGHLPYGYKADETLHYAIDEPKAAVIREIFTRVSCGEAFVDIMASLNARGIKTSYGRPWGRSSFQKILSNERYRGIYIYGDVRKEGGIPRIVSDELYFKVQEVITTKKNPQGRHRVNGDYLLTGKLFCGHCKSPMTGVSGTGRSGNLHYYYVCQKRRTEKTCDKKNVRRDEIELQVAQAIKDYALKDDVIEWIADSTVAYNERKEAESKVGILEDQLAGTEHGIKNIMSAIEQGIITETTKSRLVELESERATIKAKIAAARADIVTVSRDDIISGLEMFRDGDVHDKKYQARLFDTFLVAVYAYDDDLRLVFSFSGNKNTIQIPIESAVNAVENNEAECSFKLCSAPPKIPIVLLDGRYFSLRGRWSRSLSPSGEIHLPPPKIPITRLGGRYFLCLLPAGTVGPCAAFSSRRRC

SEQ ID NO: 519 - protein, 584 aa, Unknown
  Description of Unknown: Integrase B520 sequence
  PTHR30461:SF3,SM00857,G3DSA:1.10.10.2600,IPR036162,PF13408, PS51737,IPR025827,G3DSA:3.40.50.1390,IPR006119,IPR038109, PF07508,IPR011109,SSF53041,PF00239,PTHR30461, PS51736,Coil,cd00338
MARKKNIAAGQNAVIYARYSSHNQREVSIEQQVRECMKHAAELGLHVVGTYEDRAISGKTDKRPNFQRMMRDAEKGKFQAVVAWKSNRIGRNMLQAMVNEAKLEDCGVKVFYAEEDFDDTAAGRFALRNMMNVNQFYSENMAEDITRGLYDNASKCMANGRQPLGYKRGEDGRVVLDEANAAVVREIFTRVAAGDLFVDIARDLNAQGIKTSKGANWNKGSFQSICQNERYRGIYIYGDVRVADGIPRIVSDDLWYRVQEAMRMKKNPVGTRHRVGAEDYLLTGKLRCGHCGSYMTGVSGTSRNGELHYYYTCQKRRTEHACDKKNIRRDVIEPAVAQAIKMYCLTDDVIAWIADRTVEYWEKHDNDLQIEALEQQLEENKKATSNMLKAIEMGIITEATRTRMVELETEQSRLSVQLNVAKEDVVKIDREQIISYLELLQQGDIHDRDFQMELFKNFLVAVYVYDDNRMKLVFSCMGDQNSVEIPLETGEDPPDGGLSPDAKMFVLTPDSSTKKALYFVGSMVLFFLLKLVFGGCIASPAPFLGFCRRFLYNPQLLTLHRFQKGMFAGRFFSRLLHHPLQCTA

SEQ ID NO: 520 - protein, 584 aa, Unknown
  Description of Unknown: Integrase B521 sequence
  PTHR30461:SF3,SM00857,G3DSA:1.10.10.2600,IPR036162,PF13408, PS51737,IPR025827,G3DSA:3.40.50.1390,IPR006119,IPR038109, PF07508,IPR011109,SSF53041,PTHR30461,PS51736, cd00338,PF00239
MRCLPLQHSTLFGYGQAKAPALVRCSAGDNMECSTKPDKENFMLAGVSIPRSLHMGNRPEGSVIMPRKKSTAADAPRLVAYYRYSGGSRQTEQSIEGQRRDCEAYARAHGMTILREYVDRHISGKTDDRPAFQQLVADSAAHTFDAVICWKTDRLARNRYDSAVYKKKLRDNGVEILYAAESNISGAEGIIIEGLMEALAEYYSAELAEKARRGMRESALKGKALGSSRPLGLTVDADKHYIIEPTGAEAVRYIFEQYAAGLSSSSIVERLNAMGLRTSHGGPFNKSSINRIIQNEMYRGVYVSKKFDVRIEGAIPAIIDNDLWERAQKMFERNRQSRTPHASRADYILSGKLYCGECGCLMKGVCGRSSGNGQMYHYYACPGRSIGRACTRKNIPQDELEAMVVNSVADLLLEPDLLEQIADAIVELQQAEAARPDPEKQALEKSLSDVRSKIQNILTAIENGTSSAALSARLADLEQQESTLSYQLSSLTAKKPLTFTRDQILFLLQQFRVSPSERTKAYCRRLVDTFVDHIELTNTELILYFNISDETIDKNKKAPRSNPSKESSTEKRLVRVARIELTAS

SEQ ID NO: 521 - protein, 584 aa, Unknown
  Description of Unknown: Integrase B522 sequence
  SM00857,G3DSA:1.10.10.2600,IPR036162,PF13408,IPR025827, G3DSA:3.40.50.1390,PS51737,IPR006119,IPR038109,PF07508, SSF53041,IPR011109,PTHR30461,Coil,cd00338, PF00239
MAYRKITDIRDTIGMRAVFYARVSTAEEEQLNAIELQIEENRGCIKDHGWKLVGEYIDRSKSGTMVKGRDDYQRLYEDLYEDLFDIVVIKDQERLQRNTLDWYLFINRVVQTGKLLFMYMDGKFYSPDDALITGVRAIIAEEFSRNLSKKLHNYHDHRIEKARQGQEIALQGSGNVYGWDKKDGKYYINPEQAKVRRLMCEGIMARKGSTLIAKELNDAGYRNTVGKPWKPMDIPKFVYDCKNVGTMIINKERHDFESKQTIKLPKEEWVYVENALPPIVTQEEWDLICKIHEERVIATGSDRRGKKTSGYSFSGKLVCGICGAPYWRKQRVSKDEYWVCSTKQTKGRRTRKRDSTMGKAGEINPLGCDNENISYNSLMEIMGVVSERLQANTDTIKHDMINWLTKLRKQLLEANGGHTEADLQRELSRKSKLLDAYLDGILNKQEYQKKAEELDERIIQLKAETEKNKANSGDIAEIDKVLANIDEEVSRYVDGNEKLKVEYLLEHLEQVQIFPDKVIVIVPILSEGIVVEKTQYVSREKRCRQDYLYENDRRSGKADKRRNIYVWIHRKGFVEGTLKSGLPD

SEQ ID NO: 522 - protein, 584 aa, Unknown
  Description of Unknown: Integrase B523 sequence
  PTHR30461:SF3,IPR036162,PS51737,IPR011109,PTHR30461, PS00397,PF00239,G3DSA:1.10.10.2600,IPR006119,SSF53041, SM00857,IPR025827,IPR038109,PS51736,cd03768, IPR006118,PF13408,G3DSA:3.40.50.1390,PF07508,Coil
MPISKPAFDLIQKVAIYIRVSTQYQVDRASLPVQREELIAYCKYVLGIDSFEVFEDPGYSAKNTDRPDYQRMINRVRTGEFSHILVWKIDRISRNLLDFAAMYAELKKLGVTFVSKNEQFDTSSAMGEAMLKIILVFAELERNMTSERVSAIMLSRANGGVWNGGKIPFGYSYDKEQKVFHVLDDEAKIVLYIYDLYESIQSLTTVAKQLNEKGIRSRTGKPWNPVTVRTMLTNPFYAGTYRYNYRDESSRTYAVKPKDEWVMVEDHHPAIVTRERQNHIAGILEKRRRSNFDSRTYQRKNTHIFGGLLRCGYCGSMMSATSDRARSDGWRPSQYLCTRRRRFNDCTNKYITDMTIGPFVFNFIANMIRASKSFGKSTSIETLEKKLLRGEALAAVDHIGRPGLEELYNHLRSGFSEMPFDAPSAAAAESAANIQERELLLSEKRRLERALNRLRTLYLYSDDSMPEKDYIVERKQLMDSLDEVDAKLEAAEKVAADAISLSDEEFMAKASYFILSQQLQDKRFIDYERFIRKIDPKIVKDFLNSIATNFCIKDGLTTSILFRNGLELQFFYKPAETAKSPETF

SEQ ID NO: 523 - protein, 584 aa, Unknown
  Description of Unknown: Integrase B524 sequence
  SM00857,G3DSA:1.10.10.2600,IPR036162,PF13408,IPR025827, G3DSA:3.40.50.1390,PS51737,IPR006119,IPR038109,PF07508, SSF53041,IPR011109,PTHR30461,Coil,cd00338, PF00239
MAYRKITDIRDTIGMRAVFYARVSTAEEEQLNAIELQIEENRGCIKEHGWKLVGEYIDRSKSGTMVKGRDDYQRLYEDLYEDLFDIVVIKDQERLQRNTLDWYLFINRVVQTGKLLFMYMDGKFYSPDDALITGVRAIIAEEFSRNLSKKLHNYHDHRIEKARQGQEIALQGSGNVYGWDKKDGKYYINPEQAKVRRLMCEGIMARKGSTLIAKELNDAGYRNTVGKPWKPMDIPKFVYDCKNVGTMIINKERHDFESKQTIKLPKEEWVYVENALPPIVTQEEWDLICKIHEERVIATGSDRRGKKTSGYSFSGKLVCGICGAPYWRKQRVSKDEYWVCSTKQTKGRRTRKRDSTMGKAGEINPLGCDNENISYNSLMEIMGVVSERLQANTDTIKHDMINWLTKLRKQLLEANGGHTEADLQRELSRKSKLLDAYLDGILNKQEYQKKAEELDERIIQLKAETEKNKANSGDIAEIDKVLANIDEEVSRYVDGNEKLKVEYLLEHLEQVQIFPDKVIVIVPILSDGIVVEKAQYVSREKRCRQDYLYENDRWSGKADKRRDIHVWIRWKGFVKGTLKSGLPD

SEQ ID NO: 524 - protein, 584 aa, Unknown
  Description of Unknown: Integrase B525 sequence
  PTHR30461:SF3,IPR036162,PS51737,IPR011109,PTHR30461, PF00239,G3DSA:1.10.10.2600,IPR006119,SSF53041,cd00338, SM00857,IPR025827,IPR038109,mobidb-lite,PS51736, PF13408,G3DSA:3.40.50.1390,PF07508,Coil
MAQQKKAAGAEFDGTPRAVIYARYSSTHQRERSIEDQIADCRAYAERCGLMVVGIYADRAISGKTDERPDFQRMIDDSKKRQFDRVIVWKLDRFARNRYDSALYKHKLKQNGVSVLSAMENIGEGDESIILEAILEASAEYYSRDLRKKVLRGMTTSAKKGLHNTGSVPYGYRLEGESAVPDGDRAEFVKHVFEAYAKGETPAELYREMQRRGLDTKVNGRKVSDNIIGSILRNEKYTGRGMWRGIPVEWPRLICDELFEAARARTKKNRRAPAAYKAAEPFILCGKAFCGYCGAPLMSGGGKGRSGKYYRHYICRTKKRERACGKKTEDKDFLEWYIVEQTCAYVLAPERLEYIADRVVECYKESFDGQRVSALEARIAKLDRDLDKTTDLLFAAPSAAAVDRINKHVVELEAQKSELEAELSGLKIAAAITYTRDEVVAWLKQFCNGDPLEAEFRRRIVETFINSVYVYDDRIVIYFNVRGGKQISYAEMLESAGDVEPLPPGPESKKSGGPDNGTAASNSKERFLHGKNTEQTAESAVRFCSGLVHHKSSASSEAELFVMCSRSYRTEGDRRLKLMKQTRI

SEQ ID NO: 525 - protein, 584 aa, Unknown
  Description of Unknown: Integrase B526 sequence
  SM00857,G3DSA:1.10.10.2600,IPR036162,PF13408,IPR025827, G3DSA:3.40.50.1390,PS51737,IPR006119,IPR038109,PF07508, SSF53041,IPR011109,PTHR30461,Coil,cd00338, PF00239
MAYRKITDIKDTIGMRAVFYARVSTAEEEQLNAIELQIEENRGCIKDHGWKLVGEYIDRSKSGTMVKGRDDYQRLYEDLYEDLFDIVVIKDQERLQRNTLDWYLFINRVVQTGKLLFMYMDGKFYSPDDALITGVRAIIAEEFSRNLSKKLHNYHDHRIEKARQGQEIALQGSGNVYGWDKKDGKYYINPEQAKVRRLMCEGIMARKGSTLIAKELNDAGYRNTVGKPWKPMDIPKFVYDCKNVGTMIINKERHDFESKQTIKLPKEEWVYVENALPPIVTQEEWDLICKIHEERVIATGSDRRGKKTSGYSFSGKLVCGICGAPYWRKQRVSKDEYWVCSTKQTKGRRTRKRDSTMGKAGEINPLGCDNENISYNSLMEIMGVVSERLQANTDTIKQDMINWLTKLRKQLLEANGGHTEADLQRELSRKSKLLDAYLDGILNKQEYQKKAEELDERIIQLKAETEKNKANSGDIAEIDKVLANIDEEVARYVDGNEKLKVEYLLEHLEQVQIFPDKVIVIVPILSEGIVVEKTQYVSREKRCRQDYLYENDRWSGKADKRRDIHVWIRWKGFVKGTLKSGLPD

SEQ ID NO: 526 - protein, 584 aa, Unknown
  Description of Unknown: Integrase B527 sequence
  SM00857,G3DSA:1.10.10.2600,IPR036162,PF13408,IPR025827, G3DSA:3.40.50.1390,PS51737,IPR006119,IPR038109,PF07508, SSF53041,IPR011109,PTHR30461,Coil,cd00338, PF00239
MAYRKITDIRDTIGMRAVFYARVSTAEEEQLNAIELQIEENRGCIKDHGWKLVGEYIDRSKSGTMVKGRDDYQRLYEDLYEDLFDIVVIKDQERLQRNTLDWYLFINRVVQTGKLLFMYMDGKFYSPDDALITGVRAIIAEEFSRNLSKKLHNYHDHRIEKARQGQEIALQGSGNVYGWDKKDGKYYINPEQAKVRRLMCEGIMARKGSTLIAKELNEAGYRNTVGKLWKPMDIPKFVYDCKNVGTMIINKERHDFESKQTIKLPKEEWVYVENALPPIVTQEEWDLICKIHEERVIATGSDRRGKKTSGYSFSGKLVCGICGAPYWRKQRVSKDEYWVCSTKQTKGRRTRKRDSTMGKAGEINPLGCDNENISYNSLMEIMGVVSERLQANTDTIKHDMINWLTKLRKQLLEANGGHTEADLQRELSRKSKLLDAYLDGILNKQEYQKKAEELDERIIQLKAETEKNKANSGDIAEIDKVLANIDEEVSRYVDGNEKLKVEYLLEHLEQVQIFPDKVIVIVPILSEGIVVEKTQYVSREKRCRQDYLYENDRWSGKADKRRDIHVWIRWKGFVKGTLKSGLPD

SEQ ID NO: 527 - protein, 584 aa, Unknown
  Description of Unknown: Integrase B528 sequence
  SM00857,G3DSA:1.10.10.2600,IPR036162,PF13408,IPR025827, G3DSA:3.40.50.1390,PS51737,IPR006119,IPR038109,PF07508, SSF53041,IPR011109,PTHR30461,Coil,cd00338, PF00239
MAYRKITDIRDTIGMRAVFYARVSTAEEEQLNAIELQIEENRGCIKDHGWKLVGEYIDRSKSGTMVKGRDDYQRLYEDLYEDLFDIVVIKDQERLQRNTLDWYLFINRVVQTGKLLFMYMDGKFYSPDDALITGVRAIIAEEFSRNLSKKLHNYHDHRIEKARQGQEIALQGSGNVYGWDKKDGKYYINPEQAKVRRLMCEGIMARKGSTLIAKELNDAGYRNTVGKPWKPMDIPKFVYDCKNVGTMIINKERHDFESKQTIKLPKEEWVYVENALPPIVTQEEWDLICKIHEERVIATGSDRRGKKTSGYSFSGKLVCGICGAPYWRKQRVSKDEYWVCSTKQTKGRRTRKRDSTMGKAGEINPLGCDNENISYNSLMEIMGVVSERLQANTDTIKQDMINWLTKLRKQLLEANGGHTEADLQRELSRKSKLLDAYLDGILNKQEYQKKAEELDERIIQLKAETEKNKVNSGDIAEIDKVLANIDEEVSRYVDGNEKLKVEYLLEHLEQVQIFPDKVIVIVPILSEGIVVEKTQYVSREKRCRQDYLYENDRWSGKADKRRDIHVWIRWKGFVKGTLKSGLPD

SEQ ID NO: 528 - protein, 584 aa, Unknown
  Description of Unknown: Integrase B529 sequence
  PTHR30461:SF3,cd00338,SM00857,G3DSA:1.10.10.2600,IPR036162, PF13408,PS51737,IPR025827,G3DSA:3.40.50.1390,IPR006119, IPR038109,PF07508,IPR011109,SSF53041,PTHR30461, PS51736,Coil,PF00239
MARKKNIAAGLDAVIYARYSSHNQREVSIEQQIAECTKHAAALGLRIVGTYEDRAISGKTDNRPRFQQMMRDAEKGKFQAVVAWKSNRIGRNMLQAMVNEAKLDDYGVKVFYAEEDFDDTAAGRFALRNMMNVNQFYSENMAEDITRGLYDNASKCMANGRQPLGYKRGEDGRVVLDEANAAVVREIFTRVAAGDLFVDIARDLNAQGIKTSKGANWNKGSFQSICQNERYRGIYIYGDVRVADGIPRIVSDDLWYRVQEAMRMKKNPVGTRHRVGAEDYLLTGKLRCGHCGSYMTGVSGTSRNGELHYYYTCQKRRTEHACDKKNIRRDVIEPAVAQAIKMYCLTDDVIAWIADRTVEYWEKHDNDLQIEALEQQLEENKKATSNMLKAIEMGIITEATRTRMVELETEQSRLSVQLNVAKEDVVKIDREQIISYLELLQQGDIHDRDFQMELFKNFLVAVYVYDDNRMKLVFSCMGDQNSVEIPLETGEDPPDGGLSPDAKMFVLTPDSSTKKALYFVGSTVLFFLLKLVFGGCIASPAPFLGFCRRFLYNPQLLTLHHFQKGMFAARFFSRLLHHPLQCTA

SEQ ID NO: 529 - protein, 584 aa, Unknown
  Description of Unknown: Integrase B530 sequence
  SM00857,G3DSA:1.10.10.2600,IPR036162,PF13408,PS51737, G3DSA:3.40.50.1390,IPR025827,IPR006119,IPR038109,PF07508, SSF53041,IPR011109,PTHR30461,Coil,cd00338, PF00239
MAYRKITDIKDTIGMRAVFYARVSTAEEEQLNAIELQIEENRGCIKDHGWKLVGEYIDRSKSGTMVKGRDDYQRLYEDLYEDLFDIVVIKDQERLQRNTLDWYLFINRVVQTGKLLFMYMDGKFYSPDDALITGVRAIIAEEFSRNLSKKLHNYHNHRIEKARQGQEIALQGSGNVYGWDKKDGKYYINPEQAKVRRLMCEGIMARKGSTLIAKELNEAGYRNTVGKPWKPMDIPKFVYDCKNVGTMIINKERHDFESKQTIKLPKEEWVYVENALPPIVTQEEWDLICKIHEERVIATGSDRRGKKTGGYSFSGKLVCGICGAPYWRKQRVSKDEYWVCSTKQTKGRKTRKRDSTMGKAGEINPLGCDNENISYNSLMEIMGVVSERLQANTDTIKQDMINWLTKLRKQLLEANGGHTEADLQRELSRKSKLLDAYLDGILNKQEYQKKAEELDERIIQLKAETEKNKANAGDLAEIDKVLANIDEEVARYVDGNEKLKVEYLLEHLEQVQIFPDKVIVIVPILSEGIVVEKTQYVSREKRCRQDYLYENDRWSGKADKRRDIHVWIRWKGFVKGTLKSGLPD

SEQ ID NO: 530 - protein, 584 aa, Unknown
  Description of Unknown: Integrase B531 sequence
  SM00857,G3DSA:1.10.10.2600,IPR036162,PF13408,IPR025827, PS51737,G3DSA:3.40.50.1390,IPR006119,IPR038109,PF07508, SSF53041,IPR011109,PTHR30461,Coil,cd00338, PF00239
MAYRKITDIKDTIGMRAVFYARVSTAEEEQLNAIELQIEENRGCIKDHGWKLVGEYIDRSKSGTMVKGRDDYQRLYEDLYEDLFDIVVIKDQERLQRNTLDWYLFINRVVQTGKLLFMYMDGKFYSPDDALITGVRAIIAEEFSRNLSKKLHNYHDHRIEKARQGQEIALQGSGNVYGWDKKDGKYYINPEQSKVRRLMCEGIMARKGSTLIAKELNEAGYRNTVGKPWKPMDIPKFVYDCKNVGTMIINKERHDFESKQTIKLPKEEWVYVENALPPIVTQEEWDLICKIHEERVIATGSDKRGKKTSGYSFSGKLVCGICGAPYWRKQRVSKDEYWVCSTKQTKGRRTRKRDSTMGKAGEINPLGCDNENISYNSLMEIMGVVSERLQANTDTIKQDMINWLTKLRKQLLEANGGHTEADLQREISRKSKLLDAYLDGILNKQEYQKKAEELDERIIQLKAETEKNKANSGDIAEIDKVLANIDEEVARYVDGNEKLKVEYLLEHLEQVQIFPDKVIVIVPILSEGIVVEKTQYVSREKRCRQDYLYENDRWSGKADKRRDIHVWIRWKGFVKGTLKSRLPD

SEQ ID NO: 531 - protein, 584 aa, Unknown
  Description of Unknown: Integrase B532 sequence
  PTHR30461:SF3,SM00857,G3DSA:1.10.10.2600,IPR036162,PF13408, IPR025827,G3DSA:3.40.50.1390,PS51737,IPR006119,IPR038109, PF07508,IPR011109,SSF53041,PTHR30461,Coil, PS51736,cd00338,PF00239
MSNIYQLRELLRTQTIYDLPLRVAYYARVSTDHDEQKTSIKNQDDYFKELIKSKPNWKFMGGYIDEGISGIAVKKREDFLRMIDDAKNGKIDLILTKEISRFARNTLDSIKYTRELLACGVCVWFMNDGINTIDEDSELRLTIMAAMAQDEIRKMSSRIKFGQAQSIKNGVVMGNSRLYGYDKKDGKLTINEAEAEMVRFIFESYASGNWTTPQIERYLYEKGYRNYNGGKINRGVIKNIIKNPKYKGYYAGGKVKVIDMFTKKQMFLPKDQWVYYKDDGSTVPQIIDEKTWEDANYYMKSRGDNIRSHRTVFKYGNVFTGKVICGIDGASYWLREHKIRGKESDPRWVCSHKIKNGANSCLSVPVRESDLKQMVASAISQAAGNSKDVIDSYMNYYLKAIDDSKEKEEEIAVLRKNIESTKLKMEKILDYNLNGSISDDEFLKRNAAYKKEIENAEEKILKLSKKPEEPDSIARKIEQIREYLANTEIVSADDITKQIVEKLIEKIVILPEEEKGMKVIKSEIYLINKELYKFRKEMGTKTSCSDNVTLIMFPKQRMEITNENAHCVNQYKRFSIEFSLFVRF

SEQ ID NO: 532 - protein, 584 aa, Unknown
  Description of Unknown: Integrase B533 sequence
  SM00857,G3DSA:1.10.10.2600,IPR036162,PF13408,IPR025827, G3DSA:3.40.50.1390,PS51737,IPR006119,IPR038109,PF07508, SSF53041,IPR011109,PTHR30461,Coil,cd00338, PF00239
MAYRKITDIRDTIGMRAVFYARVSTAEEEQLNAIELQIEENRGCIKDHGWKLVGEYIDRSKSGTMVKGRDDYQRLYEDLYEDLFDIVVIKDQERLQRNTLDWYLFINRVVQTGKLLFMYMDGKFYSPDDALITGVRAIIAEEFSRNLSKKLHNYHDHRIEKARQGQEIALQGSGNVYGWDKKDGKYYINPEQAKVRRLMCEGIMARKGSTLIAKELNEAGYRNTVGKPWKPMDIPKFVYDCKNVGTMIINKERHDFESKQTIKLPKEEWVYVENALPPIVTQEEWDLICKIHEERVIATGSDKRGKKTSGYSFSGKLVCGICGAPYWRKQRVSKDEYWVCSTKQTKGRKTRKRDSTMGKAGEINPLGCDNENISYNSLMEIMGVVSERLQANTDTIKQDMINWLTKLRKHLLEANGGHTEADLQRELSRKSKLLDAYLDGILNKQEYQKKAEELDERIIQLKAETEKNKANSGDIAEIDKVLANIDEEVARYVDGNEKLKVEYLLEHLEQVQIFPDKVIVIVPILSDGIVVEKTQYVSREKRCRQDYLYENDRWFGKADKRRDIHVWIRWKGFVKGTLKSGLSD

SEQ ID NO: 533 - protein, 584 aa, Unknown
  Description of Unknown: Integrase B534 sequence
  PTHR30461:SF3,IPR036162,PS51737,IPR011109,PTHR30461, PS00397,PF00239,G3DSA:1.10.10.2600,IPR006119,SSF53041, SM00857,IPR025827,IPR038109,PS51736,cd03768, IPR006118,PF13408,G3DSA:3.40.50.1390,PF07508,Coil
MPISKPIFDLVQKVAIYIRVSTQYQVDRASLPVQREELIAYCKYVLGIDNFEVFEDPGYSAKNTDRPDYQRMINRVRTGEFSHILVWKIDRISRNLLDFAAMYAELKKLGVTFVSKNEQFDTSSAMGEAMLKIILVFAELERNMTSERVSAIMLSRANGGVWNGGKIPFGYSYDKEQKVFHVLDDEAKIVLYIYDLYESIQSLTTVAKQLNEKGIRSRTGKPWNPVTVRTMLTNPFYAGTYRYNYRDESSRTYAVKPKDEWVMVEDHHPAIVTRERQNHIAGILEKRRRSNFDSRTYQRKNTHIFGGLLRCGYCGSMMSATSDRARSDGWRPSQYLCTRRRRFNDCTNKYITDMTIGPFVFNFIANMIRASKSFGKSTSIETLEKKLLRGEALAAVDHIGRPGLEELYNHLRSGFSEMPFDAPSAAAAESAANIQERELLLSEKRRLERALNRLRTLYLYSDDSMPEKDYIVERKQLMDSLDEVDAKLEAAEKVAADAISLSDEEFMAKASYFILSQQLQDKRFIDYERFIRKIDPKIVKDFLNSIATNFCIKDGLTTSILFRNGLELQFFYKPAETAKSPETF

SEQ ID NO: 534 - protein, 584 aa, Unknown
  Description of Unknown: Integrase B535 sequence
  PTHR30461:SF3,cd00338,SM00857,G3DSA:1.10.10.2600,IPR036162, PF13408,IPR025827,PS51737,G3DSA:3.40.50.1390,IPR006119, IPR038109,PF07508,IPR011109,SSF53041,PTHR30461, PS51736,Coil,PF00239
MARKKNIAAGLDAVIYARYSSHNQREVSIEQQIAECTKHAAALGLRIVGTYEDRAISGKTDNRPRFQQMMRDAEKGKFQAVVAWKSNRIGRNMLQAMVNEAKLDDYGVKVFYAEEDFDDTAAGRFALRNMMNVNQFYSENMAEDITRGLYDNANKCMANGRQPLGYKRGADGKVMLDEPAAAVVREIFTRVAAGDLFVDIARDLNAKGIKTSKGAAWNKGSFQSICQNERYKGIYIYGNVRIVDGIPRIVSDELWYRVQEAMRMKKNPVGTRHRVGAEDYLLTGKLRCGHCGSYMTGVSGTSRNGELHYYYTCQKRRTEHACSKKNVRRDVIEPAIAQAIKMYCLTDDIIEWMADQTVQYWEKHDNDLQIEALEQQLAENKKATSNMLKAIEMGIITEATRSRMVELETENSKLTAQLSAAKRDVVKINREDLIDELHILRSKDIHDREVQAELFKDFLVAAYIYDDNRLKLVFSFMGKDNSVEIPLETGEDPPDGEDSPDAKMFVLTPDCSTKKALYFAGSTVLFFLLKPIFGGCIASPAPFSGFCRQFLYTPLFLTLHRFQKRMFVARLFSRQLHHPPQCTA

SEQ ID NO: 535 - protein, 584 aa, Unknown
  Description of Unknown: Integrase B536 sequence
  SM00857,G3DSA:1.10.10.2600,IPR036162,PF13408,IPR025827, G3DSA:3.40.50.1390,PS51737,IPR006119,IPR038109,PF07508, SSF53041,IPR011109,PTHR30461,Coil,cd00338, PF00239
MAYRKITDIRDTIGMRAVFYARVSTAEEEQLNAIELQIEENRGCIKDHGWKLVGEYIDRSKSGTMVKGRDDYQRLYEDLYEDLFDIVVIKDQERLQRNTLDWYLFINRVVQTGKLLFMYMDGKFYSPDDALITGVRAIIAEEFSRNLSKKLHNYHDHRIEKARQGQEIALQGSGNVYGWDKKDGKYYINPEQAKVRRLMCEGIMARKGSTLIAKELNDAGYRNTVGKPWKPMDIPKFVYDCKNVGTMIINKERHDFESKQTIKLPKEEWVYVENALPPIVTQEEWDLICKIHEERVIATGSDRRGKKTSGYSFSGKLVCGICGAPYWRKQRVSKDEYWVCSTKQTKGRRTRKRDSTMGKAGEINPLGCDNENISYNSLMEIMEVVSERLQANTDTIKQDMINWLTKLRKQLLEANGGHTEADLQRELSRKSKLLDAYLDGILNKQEYQTKAEELDERIIQLKAETEKNKANSGDIAEIDKVLANIDEEVSRYVDGNEKLKVEYLLEHLEQVQIFPDKVIVIVPILSEGIVVEKTQYVSREKRCRQDYLYENDRWSGKADKRRDIHVWIRWKGFVKGTLKSGLPD

SEQ ID NO: 536 - protein, 584 aa, Unknown
  Description of Unknown: Integrase B537 sequence
  SM00857,G3DSA:1.10.10.2600,IPR036162,PF13408,IPR025827, PS51737,G3DSA:3.40.50.1390,IPR006119,IPR038109,PF07508, SSF53041,IPR011109,PTHR30461,Coil,PS51736, cd00338,PF00239
MAYRKITDIRDTIGMRAIFYARVSTAEEEQLNAIELQIEENRGCIKDHGWKLVGEYIDRSKSGTMVKGRDDYQRLYEDLYEDLFDIVVIKDQERLQRNTLDWYLFINRVVQTGKLLFMYMDGKFYSPDDALITGVRAIIAEEFSRNLSKKLHNYHDHRIEKARQGQEIALQGSGNVYGWDKKDGKYYINPEQAKVRRLMCEGIMARKGSTLIAKELNDAGYRNTVGKPWKPMDIPKFVYDCKNVGTMIINKERHDFESKQTIKLPKEEWVYVENALPPIVTQEEWDLICKIHEERVIATGSDRRGKKTSGYSFSGKLVCGICGAPYWRKQRVSKDEYWVCSTKQTKGRRTRKRDSTMGKAGEINPLGCDNENISYNSLMEIMGVVSERLQANTDTIKQDMINWLTKLRKQLLEANGGHTEADLQRELSRKSKLLDAYLDGILNKQEYQTKAEELDERIIQLKAETEKNKANSGDIAEIDKVLANIDEEVSRYVDGNEKLKVEYLLEHLEQVQIFPDKVIVIVPILSEGIVIEKTQYVSREKRCRQDYLYENDRWSGKADKRRDIHVWIRWKGFVKGTLKSGLPD

SEQ ID NO: 537 - protein, 584 aa, Unknown
  Description of Unknown: Integrase B538 sequence
  PTHR30461:SF3,cd00338,SM00857,G3DSA:1.10.10.2600,IPR036162, PF13408,PS51737,IPR025827,G3DSA:3.40.50.1390,IPR006119, IPR038109,PF07508,IPR011109,SSF53041,PTHR30461, PS51736,Coil,PF00239
MARKKNIAAGLDAVIYARYSSHNQREVSIEQQIAECTKHAAALGLRIVGTYEDRAISGKTDNRPRFQQMMRDAEKGKFQAVVAWKSNRIGRNMLQAMVNEAKLDDYGVKVFYAEEDFDDTAAGRFALRNMMNVNQFYSENMAEDITRGLYDNASKCMANGRQPLGYKRGEDGRVVLDEANAAVVREIFTRVAAGDLFVDIARDLNAQGIKTSKGANWNKGSFQSICQNERYRGIYIYGDVRVADGIPRIVSDDLWYRVQEAMRMKKNPVGTRHRVGAEDYLLTGKLRCGHCGSYMTGVSGTSRNGELHYYYTCQKRRTEHACDKKNIRRDVIEPAVAQAIKMYCLTDDVIEWMADRTVEYWEKHDNDLQIEALEQQLEENKKATSNMLKAIEMGIITEATRTRMVELETEQSRLSVQLNAAKEDVVKIDREQIISYLELLQQGDIHDRDFQMELFKNFLVAVYVYDDNRMKLVFSCMGDQNSVEIPLETGEDPPDGGLSPDAKMFVLTPDSSTKKALYFVGSTVLFFLLKLVFGGCIASPAPFLGFCRWFLYNPQLLTLHRFQKGMFAGRFFSRLLHHPLQCTA

SEQ ID NO: 538 - protein, 584 aa, Unknown
  Description of Unknown: Integrase B539 sequence
  PTHR30461:SF3,SM00857,G3DSA:1.10.10.2600,IPR036162,PF13408, PS51737,G3DSA:3.40.50.1390,IPR025827,IPR006119,IPR038109, PF07508,IPR011109,SSF53041,PTHR30461,Coil, PS51736,cd00338,PF00239
MSNIYQLRELLRTQTIYDLPLRVAYYARVSTDHDEQKTSIKNQDDYFKELIKSKPNWKFMGGYIDEGISGIAVKNREDFLRMIDDAKNGKIDLILTKEISRFARNTLDSIKYTRELLACGVCVWFMNDGINTIDEDSELRLTIMAAMAQDEIRKMSSRIKFGQAQSIKNGVVMGNSRLYGYDKKDGKLTINEAEAEMVRFIFESYASGKWTTPQIERYLYEKGYRNYNGGKINRGVIKNIIKNPKYKGYYAGGKVKVIDMFTKKQMFLPKDQWVYYKDDGSTVPQIIDEKTWEDANYYMKSRGDNIRSHRTVFKYGNVFTGKVICGIDGASYWLREHKIRGKESDPRWVCSHKIKNGANSCLSVPVRESDLKQMVASAISQAAGNSKDVIDSYMNYYLKAIDDSKEKEGEIAVLRKNIESTKLKMEKILDYNLNGSISDDEFLKRNAAYKKEIENAEEKILKLSKKPEEPDSIARKIEQIREYLANTEIVSADDITKQIVEKLIEKIIILPEEENGIKVIKSEIYLINKELYKFCKDMGTKNSCSDNVTLIMFPKQRMEITNENAHCVNQYKRFSIEFSLFVRF

SEQ ID NO: 539 - protein, 584 aa, Unknown
  Description of Unknown: Integrase B540 sequence
  PTHR30461:SF3,SM00857,G3DSA:1.10.10.2600,IPR036162,PF13408, PS51737,IPR025827,G3DSA:3.40.50.1390,IPR006119,IPR038109, PF07508,IPR011109,SSF53041,PF00239,PTHR30461, PS51736,Coil,cd00338
MKAVIYARFSSHNQREESIEGQVRACQRFAKEHDMTVIEIYADRGLSGLHADNRPEFQRMIADSDRHKFQALIMWNLDRFSRDKYDTAVYKSRLKKNGVTLYYSDQNIPDTPEGIILESLLEGFAQYYSANLSRNAKRGLQENARKCLWNGGGLPLGYTIDETKHFVIDPAGAACVRLIFQMYADNHSIKEIVSTLNEKGYRTVKGNKFRLGSIQGVLRNRKYIGEYHASGITVPNGVPAIVDVELFNAVQEKIGVVSTAKARNKAEIPYLLTTKVFCGHCGSPMIGESGTGKGGSTYRYYKCSCRKNRKGQCDKRTEQKEWLEETVVAQTVEKFLHPNVIEDVSNACAAVLEQDCQNNALLKALNAQLADVEKSSRNLIKAIEAGVFTASMRERLAELEQQKEDITVQIAREQLRKPQLSAEQIAFFLRSFLDGDAHDPNFQERIIESLVRRVDVYDEGSGNRKLTVFYNLKKNNHSSVSVKCSDSESVGLPKGRLRKQPIFLFASCICPAYFPRLRPNYRRRCFFMSPKELLYIDDALGHEQFLIAQCQEAEAALSDPKLKQRVRQLQSAHQQLFNRLMALV

SEQ ID NO: 540 - protein, 584 aa, Unknown
  Description of Unknown: Integrase B541 sequence
  SM00857,G3DSA:1.10.10.2600,IPR036162,PF13408,IPR025827, G3DSA:3.40.50.1390,PS51737,IPR006119,IPR038109,PF07508, SSF53041,IPR011109,PTHR30461,Coil,cd00338, PF00239
MAYRKITDIKDTIGMRAVFYARVSTAEEEQLNAIELQIEENRGCIKDHGWKLVGEYIDRSKSGTMVKGRDDYQRLYEDLYEDLFDIVVIKDQERLQRNTLDWYLFINRVVQTGKLLFMYMDGKFYSPDDALITGVRAIIAEEFSRNLSKKLHNYHDHRIEKARQGQEIALQGSGNVYGWDKKDGKYYINPEQAKVRRLMCEGIMARKGSTLIAKELNDAGYRNTVGKPWKPMDIPKFVYDCKNVGTMIINKERHDFESKQTIKLPKEEWVYVENALPPIVTQEEWDLICKIHEERVIATGSDRRGKKTSGYSFSGKLVCGICGAPYWRKQRVSKDEYWVCSTKQTKGRRTRKRDSTMGKAGEINPLGCDNENISYNSLMEIMGVVSERLQANTDTIKQDMINWLTKLRKQLLEANGGHTEADLQRELSRKSKLLDAYLDGILNKQEYQKKAEELDERIIQLKTETEKNKANSGDIAEIDKVLANIDEEVARYVDGNEKLKVEYLLEHLEQVQIFPDKVIVIVPILSEGIVVEKTQYVSRYKRCRQDYLYENDRWSGKADKRRDIHVWILWKGFVKGTLKSGLPD

SEQ ID NO: 541 - protein, 584 aa, Unknown
  Description of Unknown: Integrase B542 sequence
  PTHR30461:SF3,cd00338,SM00857,G3DSA:1.10.10.2600,IPR036162, PF13408,IPR025827,PS51737,G3DSA:3.40.50.1390,IPR006119, IPR038109,PF07508,IPR011109,SSF53041,PTHR30461, PS51736,Coil,PF00239
MARKKNIAAGLDAVIYARYSSHNQREVSIEQQIAECTKHAAALGLRIVGTYEDRAISGKTDNRPRFQQMMRDAEKGKFQAVVAWKSNRIGRNMLQAMVNEAKLDDYGVKVFYAEEDFDDTAAGRFALRNMMNVNQFYSENMAEDITRGLYDNANKCMANGRQPLGYKRGADGKVMLDEPAAAVVREIFNRVAAGDLFVDIARDLNAKGIKTSKGATWNKGSFQSICQNERYKGIYIYGNVRIVDGIPRIVSDELWYKVQEAMRMKKNPVGTRHRVGAEDYLLTGKLRCGHCGSYMTGVSGTSRNGELHYYYTCQKRRTEHACNKKNVRRDVIEPAIAQAIKMYCLTDDVIEWVANRTVEYWEKHDNDLHIEALEQQLEENKKATSNMLKAIEMGIITDATRSRMIELETEQSKLAVQLNAAKADVVKIDRDDLIDELQIFRDMDVNNRSVQAELFKDFLVAAYIYDDNRLKLVFSFMGKDNSVEIPLETGEDPPDGGDSPDAKMFVLTPDCSTKKALYFVGSMVLFFLLKPIFGGCIASPAPFSGFCRRFLYNPQLLTLHHFQKGMFSARFFSRLLYHPLQCTA

SEQ ID NO: 542 - protein, 584 aa, Unknown
  Description of Unknown: Integrase B543 sequence
  PTHR30461:SF3,SM00857,G3DSA:1.10.10.2600,IPR036162,PF13408, PS51737,G3DSA:3.40.50.1390,IPR025827,IPR006119,IPR038109, PF07508,IPR011109,SSF53041,PTHR30461,Coil, PS51736,cd00338,PF00239
MSNIYQLRELLRTQTIYDLPLRVAYYARVSTDHDEQKTSIKNQDDYFKELIKSKPNWKFMGGYIDEGISGIAVKKREDFLRMIDDAKNGKIDLILTKEISRFARNTLDSIKYTRELLACGVCVWFMNDGINTIDEDSELRLTIMAAMAQDEIRKMSSRIKFGQAQSIKNGVVMGNSRLYGYDKKDGKLTINEAEAEMVRFIFESYASGKWTTPQIERYLYEKGYRNYNGGKINRGVIKNIIKNPKYKGYYAGGKVKVIDMFTKKQMFLPKDQWVYYKDDGSTVPQIIDEKTWEDANYYMKSRGDNIRSHRTVFKYGNVFTGKVICGIDGASYWLREHKIRGKESDPRWVCSHKIKNGANSCLSVPVRESDLKQMVASAISQAAGNSKDVIDSYMNYYLKAIDDSKEKEGEIAVLRKNIESTKLKMEKILDYNLNGSISDDEFLKRNAAYKKEIENAEEKILKLSKKPEEPDSIARKIEQIREYLANTEIVSADDITKQIVEKLIEKIIILPEEENGIKVIKSEIYLINKELYKFCKDMGTKNSCSDNVTLIMFPKQRMEITNENAHCVNQYKRFSIEFSLFVRF

SEQ ID NO: 543 - protein, 584 aa, Unknown
  Description of Unknown: Integrase B544 sequence
  PTHR30461:SF3,SM00857,G3DSA:1.10.10.2600,IPR036162,PS51737, G3DSA:3.40.50.1390,IPR006119,IPR038109,PF07508,IPR011109, SSF53041,PTHR30461,Coil,PS51736,cd00338, PF00239
MDIYETANRMKYEQKTIFDLKLRVTFYARVSTTREEQENSIENQITYFTDFIKSNKNWTYVEGYIDRIRGENAINRTNFIQMIEDGKAGRFDLVLTKEVSRFARNTVDSLVYTRELLRAGVGVFFQNDNICTIDTDSELRLTIMSSIAADEVRKLSERVRWGHKRSIENGTVMGNNRIYGYDKDNCKLVINEKEAEMIRLIFDRYATGAYSVRKLEDILYNKGYRSRNGTRLHHNTISGIIQNPKYKGYYCGNKVKIIDYRTKEQRFLPENEWIVYKDETGEIVPAIVSEELWDKCNKIFRERSAVVKSHSRSFKDRSALSGKIWCGADDKAYWRTSYSNSVSKGTPIYQWICSEKRRFGAGACASFAILESDIYQMLSEHFKNIAENIDDYVATFLKIYRETDTSSENQRELNALKAKIEKEKAKREKLLDAYTEDIITKKEFKERNDASNILINELEEEVSAIEKRNCSSEAYAKELEKIEKYFKEMYHPDRIMTKEEVDEIVTTVVDRITIIPRNEECMKIEIKLKTGESNNYTCIRDKHHCCSGNITKKMTTKQQWSFIHPDMRHIGHCRKITFTVQTGI

SEQ ID NO: 544 - protein, 584 aa, Unknown
  Description of Unknown: Integrase B545 sequence
  PTHR30461:SF3,SM00857,G3DSA:1.10.10.2600,IPR036162,PF13408, IPR025827,PS51737,G3DSA:3.40.50.1390,IPR006119,IPR038109, PF07508,IPR011109,SSF53041,PTHR30461,PS51736, cd00338,PF00239
MRCLPLQHSTLFGYGQAKAPALVRCSAGDNMECSTKPDKENFMLAGVSIPRSLHMGNRPEGSVIMPRKKSTAADAPRLVAYYRYSGGSRQTEQSIEGQRRDCEAYARAHGMTILREYVDRHISGKTDDRPAFQQLVADSAAHTFDAVICWKTDRLARNRYDSAVYKKKLRDNGVEILYAAESNISGAEGIIIEGLMEALAEYYSAELAEKARRGMRESALKGKALGSSRPLGLTVDADKHYIIEPTGAEAVRYIFEQYAAGLSSSSIVERLNAMGLRTSHGGPFNKSSINRIIQNEMYRGVYVSKKFDVRIEGAIPAIIDNDLWKRAQNMFERNRQSRTPHASRADYILSGKLYCGECGCLMKGVCGRSSGNGQMYHYYACPGRSIGRACTRKNIPQDELEAMVVNSVADLLLEPELLEQIADAIVELQQAEAARPDPEKQALEKSLSDVRSKIQNILTAIENGTSSAALSARLADLEQQESTLSYQLSSLTAKKPLTFTRDQILFLLQQFRVSSSERTKAYCRRLVDTFVDHIELTNTELILYFNISDETIDKNKKAPRSNPSKESSTEKRLVRVARIELTAS

SEQ ID NO: 545 - protein, 584 aa, Unknown
  Description of Unknown: Integrase B546 sequence
  SM00857,G3DSA:1.10.10.2600,IPR036162,PF13408,PS51737, G3DSA:3.40.50.1390,IPR025827,IPR006119,IPR038109,PF07508, SSF53041,IPR011109,PTHR30461,Coil,cd00338, PF00239
MAYRKITDIKDTIGMRAVFYARVSTAEEEQLNAIELQIEENRGCIKDHGWKLVGEYIDRSKSGTMVKGRDDYQRLYEDLYEDLFDIVVIKDQERLQRNTLDWYLFINRVVQTGKLLFMYMDGKFYSPDDALITGVRAIIAEEFSRNLSKKLHNYHDHRIEKARQGQEIALQGSGNVYGWDKKDGKYYINPEQAKVRRLMCEGIMARKGSTLIAKELNDAGYRNTVGKPWKPMDIPKFVYDCKNVGTMIINKERHDFESKQTIKLPKEEWVYVENALPPIVTQEEWDLICKIHEERVIATGSDRRGKKTSGYSFSGKLVCGICGAPYWRKQRVSKDEYWVCSTKQTKGRRTRKRDSTMGKAGEINPLGCDNENISYNSLMEIMGVVSERLQANTDTIKHDMINWLTKLRKQLLEANGGHTEADLQRELSRKSKLLDAYLDGILNKQEYQKKAEELDERIIQLKAETEKNKANSGDIAEIDKVLANIDEEVSRYVDGNEKLKVEYLLEHLEQVQIFPDKVIVIVPILSEGIVVEKTQYVSREKWSWEDNLSEDDQWTFQANLWRNRDVRIQGKGFAKSSITDRMSD

SEQ ID NO: 546 - protein, 584 aa, Unknown
  Description of Unknown: Integrase B547 sequence
  PTHR30461:SF3,SM00857,G3DSA:1.10.10.2600,IPR036162,PF13408, PS51737,IPR025827,G3DSA:3.40.50.1390,IPR006119,IPR038109, PF07508,IPR011109,SSF53041,PTHR30461,Coil, PS51736,cd00338,PF00239
MSNIYQLRELLRTQTIYDLPLRVVYYARVSTDHDEQKTSIKNQDDYFKELIKSKPNWKFMGGYIDEGISGIAVKKREDFLRMIDDAKNGKIDLILTKEISRFARNTLDSIKYTRELLACGVCVWFMNDGINTIDEDSELRLTIMAAMAQDEIRKMSSRIKFGQAQSIKNGVVMGNSRLYGYDKKDGKLTINEAEAEMVRFIFESYASGNWTTPQIERYLYEKGYRNYNGGKINRGVIKNIIKNPKYKGYYAGGKVKVIDMFTKKQMFLPKDQWVYYKDDGSTVPQIIDEKTWEDANYYMKSRGDNIRSHRTVFKYGNVFTGKVICGMDGASYWLREHKIRGKESDPRWVCSHKIKNGSNSCLSVPVRESDLKQMVASAISQAAGNSKDVIDSYMNYYLKAIDDSKEKEEEIAVLRKNIESTKLKMEKILDYNLNGSISDDEFLKRNATYKKEIENAEEKILKLSKKPEDPDSIARKIEQIREYLANTEIVSANDITKQIVEKLIEKIIILPEEENGIKVIKSEIYLINKELYKFCKDMGTKNSCSDNVTLIMFPKQRMEITNENAHCVNQYKRFSIEFSLFVRF

SEQ ID NO: 547 - protein, 584 aa, Unknown
  Description of Unknown: Integrase B548 sequence
  SM00857,G3DSA:1.10.10.2600,IPR036162,PF13408,IPR025827, G3DSA:3.40.50.1390,PS51737,IPR006119,IPR038109,PF07508, SSF53041,IPR011109,PTHR30461,Coil,cd00338, PF00239
MAYRKITDIRDTIGMRAVFYARVSTAEEEQLNAIELQIEENRGCIKDHGWKLVGEYIDRSKSGTMVKGRDDYQRLYEDLYEDLFDIVVIKDQERLQRNTLDWYLFINRVVQTGKLLFMYMDGKFYSPDDALITGVRAIIAEEFSRNLSKKLHNYHDHRIEKARQGQEIALQGSGNVYGWDKKDGKYYINPEQAKVRRLMCEGIMARKGSTLIAKELNDAGYRNTVGKPWKPMDIPKFVYDCKNVGTMIINKERHDFESKQTIKLPKEEWVYVENALPPIVTQEEWDLICKIHEERVIATGSDRRGKKTSGYSFSGKLVCGICGAPYWRKQRVSKDEYWVCSTKQTKGRRTRKRDSTMGKAGEINPLGCDNENISYNSLMEIMGVVSERLQANTDTIKHDMINWLTKLRKQLLEANGGHTEADLQRELSRKSKLLDAYLDGILNKQEYQKKAEELDERIIQLKAETEKNKANSGDIAEIDKVLANIDEEVSRYVDGNEKLKVEYLLEHLEQVQIFPDKVIVIVPILSEGIVVEKAQYVSREKRCWQDYLYENDRWSGKADKRRDIHVWIRWKGFVKGTLKSGLPD

SEQ ID NO: 548 - protein, 584 aa, Unknown
  Description of Unknown: Integrase B549 sequence
  SM00857,G3DSA:1.10.10.2600,IPR036162,PF13408,IPR025827, G3DSA:3.40.50.1390,PS51737,IPR006119,IPR038109,PF07508, SSF53041,IPR011109,PTHR30461,Coil,cd00338, PF00239
MAYRKITDIRDTIGMRAVFYARVSTAEEEQLNAIELQIEENRGCIKDHGWKLVGEYIDRSKSGTMVKGRDDYQRLYEDLYEDLFDIVVIKDQERLQRNTLDWYLFINRVVQTGKLLFMYMDGKFYSPDDALITGVRAIIAEEFSRNLSKKLHNYHDHRIEKARQGQEIALQGSGNVYGWDKKDGKYYINSEQAKIRRLMCEGIMARKGSTLIAKELNDAGYRNTVGKPWKPMDIPKFVYDCKNVGTMIINKERHDFESKQTIKLPKEEWVYVENALPPIVTQEEWDLICKIHEERVIATGSDRRGKKTSGYSFSGKLVCGICGAPYWRKQRVSKDEYWVCSTKQTKGRRTRKRDSTMGKAGEINPLGCDNENISYNSLMEIMGVVSERLQANTDTIKHDMINWLTKLRKQLLEANGGHTEADLQRELSRKSKLLDAYLDGILNKQEYQKKAEELDERIIQLKAETEKNKANSGDIEEIDKVLANIDEEVSRYVDGNEKLKVEYLLEHLEQVQIFPDKVIVIVPILSEGIVVEKTQYVSREKRCRQDYLYENDRWSGKADKRRDIHVWIRWKGFVKGTLKSGLPD

SEQ ID NO: 549 - protein, 584 aa, Unknown
  Description of Unknown: Integrase B550 sequence
  SM00857,G3DSA:1.10.10.2600,IPR036162,PF13408,IPR025827, G3DSA:3.40.50.1390,PS51737,IPR006119,IPR038109,PF07508, IPR011109,SSF53041,PTHR30461,Coil,PS51736, cd00338,PF00239
MAKPEVSELAVVYARYSSHSQGEQSIEGQLSNARDYAAAHGYTIVHEYVDRAKSGRTDNRAEFQQMLKDTAKRQFSVIILWKVDRFGRNREEIAINKMKCRKNGVRVEYVAETIPDSPEGVILESVLEGFAEYYSLQLSQNIRRGRAESAEKCQSLGGNRPLGYKTGPDKKFVIDENTAPTVKMIFTMYADGKTVTEIVDKLNEMGLRTLRGGPFTKNSLHSILKNKKYIGVYEYQGREIKDGVPRIIEDDVFNKVQEMLKINKRAPAKTWSRADYILTDKLFCGKCGALMFGESGTSKTGVKHNYYICSNKKRFRSCDKKAVRQADIEDTVLNATHELLQDDELLDYIVDRTWEYYLAQDNSQEKLRNLQRQLAQTDTAISNLIRAIEAGILTEETKKRMDELTQQKADLKASIADREIARGFHLQKSHIAFYLRSLRDADWSDKEAQKRLIQTFVNAVFVYDDHITLTYNFSGDKSTITLHDMQRFEDGEEFGCRASRSTIAEPDEPCRFVWLFVMLKDLHGQRYFRAALSGVTPFGWFFHANRNHAAYFPSECAGLCTWERWQELRLIQVSLAIFFGTTLL

SEQ ID NO: 550 - protein, 583 aa, Unknown
  Description of Unknown: Integrase B551 sequence
  PTHR30461:SF3,cd00338,SM00857,G3DSA:1.10.10.2600,IPR036162, PF13408,IPR025827,PS51737,G3DSA:3.40.50.1390,IPR006119, IPR038109,PF07508,IPR011109,SSF53041,PTHR30461, PS51736,Coil,PF00239
MPRKNKSAGSDQRLVAYYRYSGGSGQTEQSIEGQRRDCMAWAKAHGLTICHEYIDRHISGKTDNRAQFQRMMQDSDKGAFDSLICWKTDRLARNRYDSAIYKSRLRKNGVKIYYAAESSVDGPEGIILEGLMESLAEYYSAELSQKLRRGIRESALKCKCLGGYRALGLTSDKDHNYVIDESQAPAVRYIFEQYAAGRTAAEIVADLNAKGVRTATGGAFNKNSILRIVTNEQYIGTYISRAHNVRVENAIPAIIDRELWDKAQAMVQRNKAGRGVKSKAANYMLSGKLYCQMCGGTMKGICGTGKHGDKHYYYACSNHTAHSCAKRNVEKSFLEDLIVSATAEHILAPGKLEQIADRVVQVQEAEQHIENPEKEMLEAELLECTKKQDNILRAIEDGTGSARLSSRLRELEEQEAALRYRIESIEEPLAAPIYSRDQLLFMLEQFRRAADEQDETYKQRLVNTFVHDIYLSDDSAFVQFNISAQENEKSTTLESVVLSLNGGGPDGENPDKSRLPAGFDRVSLGGDDGNRTRVRKEVHASISGCSSPTGFPHRQAGKRAAASVASSVHGSKQSLMLLTCTAK

SEQ ID NO: 551 - protein, 583 aa, Unknown
  Description of Unknown: Integrase B552 sequence
  cd03768,PTHR30461:SF3,SM00857,IPR006118,G3DSA:1.10.10.2600, IPR036162,PS51737,G3DSA:3.40.50.1390,IPR006119,IPR038109, PF07508,SSF53041,IPR011109,PTHR30461,PS00397, PS51736,Coil,PF00239
MAFKKLMDTHPDKRLRVAIYIRVSTNHQIDRDSLPLQREELINYAKYVLNIEDFEVFEDAGFSAKNTDRPGYQNMMKLVRTCVFSHILVWKLDRISRNLLDFAAMYDELKRLGVTFISKNEQFDTSTAMGEAMLKIILVFAELERKMTSERVTATMLSRAANGKWNGGRIPYGYSYDFEERIFSICTEEQKVALLMCDLYESSNSLLFVSRKLNEMGYRSRAGNLWSPVQVRKILTNPFNTGAYVYNQTSMSTGTQLPNRKEDFVVIEDHHPALFPKERQDKIIARLARNTKSRSGAHNSVNRKNTHVFSGLIFCENCGMMLTSSTGKKMAGDGWRPSIYLCPSKRRHVSVGCHDTTDSTVGEFVINFIMNMLNTQKNFQLIRSTDDLQRSLLYGKVFDDVDHLDPDSLNDMFNVLSSNLPQSVKSGLRKSSKRKVNPELTKLRREMQKLDRAMDRLKHLYMYSEESMSDQEYLTERNRITEAYKEAEARIEEISSYDTIEHSISDADFIREATSFILAKKLSGNSYINYRRLAVSTDTQVLKDFFNSVLDSITINTDGKIGSIVFKNGLRHRFIYKENAPNG

SEQ ID NO: 552 - protein, 583 aa, Unknown
  Description of Unknown: Integrase B553 sequence
  SM00857,G3DSA:1.10.10.2600,IPR036162,PF13408,IPR025827, G3DSA:3.40.50.1390,PS51737,IPR006119,IPR038109,PF07508, IPR011109,SSF53041,PTHR30461,Coil,cd00338, PF00239
MAYRKITDIKDTIGMRAVFYARVSTAEEEQLNAIELQIEENRGCIKDHGWKLVGEYIDRSKSGTTVKGRDDYQRLYEDLYEDLFDIVVIKDQERLQRNTLDWYLFINRVVQTGKLLFMYMDGKFYSPDDALITGVRAIIAEEFSRNLSKKLHNYHDHRIEKARQGQEIALQGSGNVYGWDKKDGKYYINPEQAKVRRLMCEGIMARKGSTLIAKELNDAGYRNTVGKPWKPMDIPKFVYDCKNVGTMIINKERHDFESKQTIKLPKEEWVYVENALPPIVTQEEWDLICKIHEERVIATGSDRRGKKTSGYSFSGKLVCGICGAPYWRKQRVSKDEYWVCSTKQTKGRRTRKRDSTMGKAGEINPLGCDNENISYNSLMEIMGVVSERLQANTDTIKHDMINWLTKLRKQLLEANGGHTEADLQRELSRKSKLLDAYLDGILNKQEYQKKAEELDERIIQLKAETEKNKANSGDIAEIDKVLANIDEEVSRYVDGNEKLKVEYLLEHLEQVQIFPDKVIVIVPILSEGIVVEKTQYVSREKRLWKVYVNEDYCRHYSTGFRAGYYRTDRENGILCTGNSLRKK

SEQ ID NO: 553 - protein, 583 aa, Unknown
  Description of Unknown: Integrase B554 sequence
  PTHR30461:SF3,IPR036162,PS51737,IPR011109,PTHR30461, PS00397,PF00239,G3DSA:1.10.10.2600,IPR006119,SSF53041, SM00857,IPR025827,IPR038109,PS51736,cd03768, IPR006118,PF13408,G3DSA:3.40.50.1390,PF07508,Coil
MNRKTRVKPGKATSGLSKRRKVAIYIRVSTMYQVDKDSLPMQRKDLIAYASLILGIEDYEIFEDAGYSGKNTDRPAYQEMMNRARNGEFSHILVWKIDRISRNLLDFAEMYEELKELGVTFVSKNEQFDTSTAMGEAMLKIILVFAELERNITSERVTATMISRASSGLWNGGRVPFGYDYDPDKTEFSIREDEAAICRLIKDDYLENKSLVHTSRMLNEAGYKTRAGVDWSPTAVWIICSSPFYAGIYRYNRYKGTDRRTENPEDEWVMVDNHHPAIFTLEEHERLLAILDENARSRSVVGQKHRGVNVHIFSSLAYCGKCGCKMVSTPGRLHANGYRPSNYSCPKHRKTKECDNPTVSDTQVGEFVINYILNILNAKTAFSAISTPEKLEDQLLFGSTFSNVDSIDNNGLNELYNLLSRYGSDNSFVFSSRAPKKKKAAVDPEIEALRKEKEKQERALRRLQDLYLYSENAMSEKDFIVRKAEIAQRISEINSMLGMVAKNVDNSLSDEEFIRQASHLLISKQLSNRKYIYFKNLAQSVSPEILKAYMDTILDSVQLSDGRVVAITFKNGLTHKFAYRLLE

SEQ ID NO: 554 - protein, 583 aa, Unknown
  Description of Unknown: Integrase B555 sequence
  PTHR30461:SF3,IPR036162,PS51737,IPR011109,PTHR30461, PF00239,G3DSA:1.10.10.2600,IPR006119,PF14287,SSF53041, IPR025378,SM00857,IPR025827,cd03770,IPR038109, PF13408,G3DSA:3.40.50.1390,PF07508,Coil
MTQTQIHATISSCTPILSADPTVKEDAMLDQQKITILYCRLSNEDALDGESNSIQNQKEFLTRYAAEHGYTNLKILVDDGYTGTNFDRPGVQEGFALVKQGLVGCWLVKDLSRFGRDYLTVGQYTDIIFPSYDVRFIAVNDGVDSEQGDSDGFAAIRNLFNEWYPRDTSKKVRVVFRQKGTSGKHLGKPPYGYRTDPADKDHWIIDEDAAPVVKRIFDLAIDGKGPEQIARILEKDKVLTTKALYAKQSENHPDPKKRKKMPERPYHWIGQSVAGILERMEYTGCTCNFKTYSKSYKLKKRIPNAIEDMCIFPDTQEAIVSQAQWDRVQELRKNKRRPTKAERQGLFSGLLFCPDCGNKLHFATCKSFDGKQDHYVCSSYKSGRGTCSAHYIREDVLRELVLERIRAVNTYIRQDVEGFQEEWLQCSRSDQERNIREDRKRVEQAKKRLADLDVLLSRLYEDFVLGDLSKERYKKMTADYETEQERLKLEIEVTEEWLETQETMSADVDAFVTLTQKYVDVPELTPTIVNEYIKKIEVFAPDKSSGKRVQKVKIYFNFVDDVEIPVISEPVVAKSTSGRRKTA

SEQ ID NO: 555 - protein, 583 aa, Unknown
  Description of Unknown: Integrase B556 sequence
  PTHR30461:SF3,SM00857,G3DSA:1.10.10.2600,IPR036162,PF13408, IPR025827,PS51737,G3DSA:3.40.50.1390,IPR006119,IPR038109, PF07508,IPR011109,SSF53041,PTHR30461,PS51736, cd00338,PF00239
MNRAVIYARYSSDMQREESVEAQIRACKYYAQQNGIDIIGIYADRAKSGMYHSEKREEFQALLNAAPRKEYDIVLVHKLNRFGRAGVKALNDRDYLERLGIEIISVTERLENTPEGRLMLYVITGMNEYYSRNLAGEVLKGLRENAYKGITTGGIPALGYNLSADKKLVINEQEASAVRLIFNMYLSGAGYGEIIDELNSRGFRTKRGARFGKNSIYAILRNERYAGRFTYGKTKRINGYRNQHKIEKEYISIEDGCPAIISADEWEMVQRLMDVKKHDAASGKAKELYILSGKLFCGHCSARMVGNSRVSRGERYLYYDCNAKLRKKTCTKHAVKKNEIEQAVIQKLNQLAFSDDLIERFVDETYKAQDNEMPDIGGKIADIDKKISNLVTAIENGADVGPIKQRMADLSAQKDALLSSNVPKGDFLTRDEIRSRFKKFLNIADLPPAQQKFIISEYVTRIDVFDSDGGGHFCRITLSNNTSVDTDVLAPPAPRRNGLCSIQKAQPVGWAFLIPLRHSSFSPQNFAAQTFAGAPPYGPRRKAGIHFITPTQPLKPLGKAIPGRFCFCNNTLYNHFCPDAGQG

SEQ ID NO: 556 - protein, 582 aa, Unknown
  Description of Unknown: Integrase B557 sequence
  PTHR30461:SF3,IPR036162,PS51737,IPR011109,PTHR30461, PF00239,G3DSA:1.10.10.2600,IPR006119,SSF53041,cd00338, SM00857,IPR025827,IPR038109,PS51736,mobidb-lite, PF13408,G3DSA:3.40.50.1390,PF07508,Coil
MAKKKKPAGGIAVIYARYSSHNQRDVSIEQQIEACRKHAAELGLTIIATYEDRAISGRTDNRPAFQRLMHDAEKGKFSYVLAWKSNRMGRNMMQAMVNESRLMDCGIKVYYAEEDFDDSAAGRFALRSMMNVNQFYSDNLAEDVRRGLMDNANKCMVNGRQPLGYKRGKDGKVVVDEPAAAIVREVYTRVASGELFTDIARDLNRRGIKTADKGEWNKNSFHRLCSNEKYRGIYIYGDIRIEGGIPTIIDDTLWYKVQEALRVKKLKRNGRHRPGDEDYLLTGKLRCGKCGGYMIGMSGRSKTGDIHYYYACQNRRVGRTCDKKNIRRDVIEPAVAQAIKEYCLTDDAIEWIADKTVEYWEKADRNLQLDSIEGDLAAVQSSISNVMKAIEMGVVTETTRDRLIELEKQRTDLKSKLALAKEEVVHVDRKKLISSLLLFRNGDIHDRQYQEDLFKTFLISVYVYDDDDNGHLKIVFNAFGDNNTVDLPIDFGETDNQSAFSDGAEKFDYSLHRSTKKPSDSFRWLFCFISRCVFGPVRHKALIFSRLPGLYCFLMQQGMQQGNTEDRSQANEHLGRIRQRTV

SEQ ID NO: 557 - protein, 582 aa, Unknown
  Description of Unknown: Integrase B558 sequence
  PTHR30461:SF3,IPR036162,PS51737,IPR011109,PTHR30461, PS00028,PS00397,PF00239,G3DSA:1.10.10.2600,IPR006119, SSF53041,IPR013087,cd00338,SM00857,IPR025827,IPR038109 ,PS51736,IPR006118,PF13408,G3DSA:3.40.50.1390,PF07508,Coil
MAKHAITIPQNPKAALYIRVSTDMQADKDSLPLQESDLRKLADLNGIKDIEVFSDAGFSGKNLNRPAFRSMMDRIRAREFSHLYVWKLDRISRNLLDFLELYDELKCYGVAFASKNECFDTQSPGGEAMLKILLIFAELERKTIAERVTAVMLGRANENKWNGGRVPFGYMPGPVTTDANGKKCKSWPVPDPIEAPIVRAIFELYLREKALKKVAKALNAAGYRSRKGTQWSDTTVRCILKNHFYKGEYVYNRQNPNANRREDFYRSENDWVVVTGQHEAIVPEETWRRCNEMLSKNRNWLAPIGSLVSAQDKYIFGGLLQCAECGYTMNSKDRTRIHNHTHSSYYYCTGRWKAPAVCTGEHSGYASDRVLLPQILKLIARMIEACANAIKFASAEQLVSYLLNDNLIPGATGIKEAQRIYMIVRAHVKHIYGVDQTNQYNPNALLVEQSQKEKEKQERALSRLKRAYLFDDGDMSEAEYFEQKAAIEGTIAKLDKQIKSLSGNDIGADEAYFAQLSKLIMIKKLQDTNSDFDYYKLAKAISRKPIHDFLAEIISRIIMGEQNRIIKIIFKNGVSITFQYAK

SEQ ID NO: 558 - protein, 582 aa, Unknown
  Description of Unknown: Integrase B559 sequence
  PTHR30461:SF3,IPR036162,PS51737,IPR011109,PTHR30461, PS00028,PS00397,PF00239,G3DSA:1.10.10.2600,IPR006119, SSF53041,IPR013087,cd00338,SM00857,IPR038109, PS51736,IPR006118,G3DSA:3.40.50.1390,PF07508,Coil
MAKHAITILQNPKAALYIRVSTDMQADKDSLPLQESDLRKLADLNGIKDIEVFCDAGFSGKNLNRPAFRSMMDRIRAREFSHLYVWKLDRISRNLLDFLELYDELKDYGVAFASKNESFDTQSPGGEAMLKILLIFAELERKTIAERVTAVMLGRANENKWNGGRVPFGYMPGPVTTDANGKKCKSWPVPDPIEAPIVRAIFELYLREKALKKVAAALNNAGYRSRKGTLWSDTTVRCILKNHFYKGEYVYNRQNPNAGRREDFYRSENDWVVVTGQHEAIVPEETWRRCNEMLSKNRSWLAPIGSLVSAQDKYIFGGLLQCAECGYTMNSKDRTRIHDHTHSSYYYCTGRWKAPVVCTGEHSGYASDRVLLPQILKLIARMIEACANAIKFANAEQLVSYLLNDNLIPGATGIEEAQRIYMIVRAHVKHIYGVDQANQYNPNALLVEQSQKEKEKQERALSRLKRAYLFDDGDMSEAEYFEQKAAIEGTIAKLDKQIKSLSGNDIGADEAYLAQLSKLIMIKKLQNTNSDFDYYKLAKAIGRKPIHDFLTEIISRIIIGEQNRIIKIIFKNGVSITLQYEK

SEQ ID NO: 559 - protein, 582 aa, Unknown
  Description of Unknown: Integrase B560 sequence
  PTHR30461:SF3,IPR036162,PS51737,IPR011109,PTHR30461, PS00028,PS00397,PF00239,G3DSA:1.10.10.2600,IPR006119, SSF53041,IPR013087,cd00338,SM00857,IPR025827,IPR038109 ,PS51736,IPR006118,PF13408,G3DSA:3.40.50.1390,PF07508,Coil
MAKHAITIPQNPKAALYIRVSTDMQADKDSLPLQESDLRKLADLNGIKDIEVFSDAGFSGKNLNRPAFRSMMDRIRAREFSHLYVWKLDRISRNLLDFLELYDELKCYGVAFASKNECFDTQSPGGEAMLKILLIFAELERKTIAERVTAVMLGRANENKWNGGRVPFGYMPGPVTTDANGKKCKSWPVPDPIEAPIVRAIFELYLREKALKKVAAALNTAGYRSRKGTLWSDTTVRCILKNHFYKGEYVYNRQNPNAGRREDFYRSENDWVIVTGQHEAIVPEETWRRCNEMLSKNRSWLAPIGSLVSAQDKYIFGGLLQCAECGYTMNSKDRTRIHDHTHSSYYYCTGRWKAPAVCTREHSGYASDRVLLPQILKLIARMIEACANAIKFASAEQLVSYLLNDNLIPGATGIEEAQRIYMIVRAHVKHIYGVDQANQYNPNALLVEQSQKEKEKQERALSRLKRAYLFDDGDMSEAEYFDQKSAIEDTIAKLDKQIKSLSGNDIGADEAYLAQLSKLIMIKKLQDTNSDFDYYKLAKAIGRKPIHDFLTEIISRIIIGEQNRIIKIIFKNGVSITLQYEK

SEQ ID NO: 560 - protein, 582 aa, Unknown
  Description of Unknown: Integrase B561 sequence
  PTHR30461:SF3,IPR036162,PS51737,IPR011109,PTHR30461, PS00028,PS00397,PF00239,G3DSA:1.10.10.2600,IPR006119, SSF53041,IPR013087,cd00338,SM00857,IPR038109, PS51736,IPR006118,G3DSA:3.40.50.1390,PF07508,Coil
MAKHAISIPQNPKAALYIRVSTDMQADKDSLPLQESDLRKLADLNGIKDIEVFSDAGFSGKNLNRPAFCSMMDRIRAREFSHLYVWKLDRISRNLLDFLELYDELKCYGVAFASKNECFDTQSPGGEAMLKILLIFAELERKTIAERVTAVMLGRANENKWNGGRVPFGYMPGPVTTDANGKKCKSWPVPDPIEAPIVRAIFELYLREKSLKKVAAALNTAGYRSRKGTLWSDTTVRCILKNHFYKGEYVYNRQNPNASRREDFYRSENDWVVVTGQHEAIVPEETWRRCNEMLSKNRSWLAPIGSLVSAQDKYIFGGLLQCAECGYTMNSKDRTRIHDHTHSSYYYCTGRWKAPVVCTGEHSGYASDRVLLPQILKLIARIIEACANAIKFASAEQLVSYLLNDNLIPGATGIEEAQRIYMIVRAHVKHIYGIEQANQYNPNALLVEQSQKEKEKQERALSRLKRAYLFDDGDMSEAEYFEQKAAIEGTIAKLEKQIKSLSGNDIGADEAYLAQLSKLIMIKKLQDTNSDFDYYKLAKAIGRKPIHDFLTEIISRIIIGEQNRIIKIIFKNGVSITLQYEK

SEQ ID NO: 561 - protein, 582 aa, Unknown
  Description of Unknown: Integrase B562 sequence
  PTHR30461:SF3,IPR036162,PS51737,IPR011109,PTHR30461, PS00028,PS00397,PF00239,G3DSA:1.10.10.2600,IPR006119, SSF53041,IPR013087,cd00338,SM00857,IPR025827,IPR038109 ,PS51736,IPR006118,PF13408,G3DSA:3.40.50.1390,PF07508,Coil
MAKHTISIPQTTKAALYIRVSTDMQADKDSLPLQESDLRKLADLNGIKDIEVFSDAGFSGKNLNRPAFRSMMDRIRAREFSHLYVWKLDRISRNLLDFLELYDELKDYGVAFASKNESFDTQSPGGEAMLKILLIFAELERKTIAERVTAVMLGRANENKWNGGRVPFGYMPGPVTTDANGKKCKSWPVPDPIEAPIVRAIFELYLREKALKKVAAALNTAGYRSRKGTLWSDTTVRCILKNHFYKGEYVYNRQNPNAGRREDFYRSENDWVVVTGQHEAIVPEKTWRRCNEMLSKNRSWLAPIGSLVSAQDKYIFGGLLQCAECGYTMNSKDRTRIHDHTHSSYYYCTGRWKAPAVCTGEHSGYASDRVLLPQILKLIARMIEACANAIKFASAEQLVSYLLNDNLIPGATGIEEAQRIYMIVRAHVKHIYGVDQTNQYNPNALLVEQSQKEKEKQERALSRLKRAYLFDDGDMSEAEYFEQKAAIEGTIIKLEKQIKSLSGNDIGADEAYLAQLSKLIMIKKLQDTNSDFDYYKLAKAIGRKPIHNFLTEIISRIIIGEKNRIIKIIFKNGVPITFQYAK

SEQ ID NO: 562 - protein, 582 aa, Unknown
  Description of Unknown: Integrase B563 sequence
  PTHR30461:SF3,IPR036162,PS51737,IPR011109,PTHR30461, PS00028,PS00397,PF00239,G3DSA:1.10.10.2600,IPR006119, SSF53041,IPR013087,cd00338,SM00857,IPR025827,IPR038109 ,PS51736,IPR006118,PF13408,G3DSA:3.40.50.1390,PF07508,Coil
MAKHAITIPQNPKAALYIRVSTDMQADKDSLPLQESDLRKLADLNGIKDIEVFSDAGFSGKNLNRPAFRSMMDRIRAREFSHLYVWKLDRISRNLLDFLELYDELKCYGVAFASKNECFDTQSPGGEAMLKILLIFAELERKTIAERVTAVMLGRANENKWNGGRVPFGYMPGPVTTDANGKKCKSWPVPDPIEAPIVRAIFELYLREKALKKVAAALNTAGYRSRKGTLWSDTTVRCILKNHFYKGEYVYNRQNPNAGRREDFYRSENDWVVVTGQHEAIVPEETWRRCNEMLSKNRSWLAPIGSLVSAQDKYIFGGLLQCAECGYTMNSKDRTRIHDHTHSSYYYCTGRWKAPAVCTGEHSGYASDRVLLPQILKLIARMIEACANAIKFASAEQLVSYLLNDNLIPGTTGIKEAQRIYMIVRAHVKHIYGVDQTNQYNPNALLVEQSQKEKEKQERALSRLKRAYLFDDGDMSEAEYFEQKAAIEGTIAKLDKQIKSLSGNDIGADEAYLAQLSKLIMIKKLQDTNSDFDYYKLAKAIGRKPIHDFLTEIISRIIIGEQNRIIKIIFKNGVSITLQYEK

SEQ ID NO: 563 - protein, 582 aa, Unknown
  Description of Unknown: Integrase B564 sequence
  PTHR30461:SF3,IPR036162,PS51737,IPR011109,PTHR30461, PS00397,PF00239,G3DSA:1.10.10.2600,IPR006119,SSF53041, cd00338,SM00857,IPR025827,IPR038109,PS51736, IPR006118,PF13408,G3DSA:3.40.50.1390,PF07508,Coil
MNQDKLTDKLSSQKCALYIRVSTHWQVDKASLPVQREDLINYAKYALGIDKYEVFEDAGYSAKNTDRPAFQQMMARLRTGEFSHLLVWKIDRISRNLLDFAGMYSEIKKLGITFVSKNEQFDTSNAMGEAMLKIILVFAELERNMTSERVTAIMLSRANNGQWNGGKVPFGYDYDKENRTFTINEAEASVVNLIYDAYEANNSLLTVSRTLNEKGLLSRKGSPWTPTTISIILKNPFYIGVYRYNYHDETKSGGNARSTQLKNKSEWIYVKDHHPAIIDAERQARIISLLERNRRSNKDSAKSYVRKNTHIFAGLLYCGCCGSQMQSTIDRERSDGYRPSIYACTRKRRFNDCENKYISDVTIAPFVLNYIANILKAQNNFGKSTSIETFERKLLRGKMFEDVEHIERIGLTEMYDILKRGNLSDAVYSTRLQGTIDEQAIIDERNLLSVEKRKKERALARLKSLYLYNDDAISERDYIIEKKTLTDSIERIDKRLEEIERNSSQHFTMTDDEFMTKASVFIMTHHLQGKRYIEFEKLIRKIDSRVIKDFVSSVVQKVVIKNGRVMSIRFRNGIEHNFLYKT

SEQ ID NO: 564 - protein, 582 aa, Unknown
  Description of Unknown: Integrase B565 sequence
  PTHR30461:SF3,IPR036162,PS51737,IPR011109,PTHR30461, PS00028,PS00397,PF00239,G3DSA:1.10.10.2600,IPR006119, SSF53041,IPR013087,cd00338,SM00857,IPR025827,IPR038109 ,PS51736,IPR006118,PF13408,G3DSA:3.40.50.1390,PF07508,Coil
MAKHAITIPQNPKAALYIRVSTDMQADKDSLPLQESDLRKLADLNGIKDIEVFCDAGFSGKNLNRPAFRSMMDRIRAREFSHLYVWKLDRISRNLLDFLELYDELKCYGVAFASKNESFDTQSPGGEAMLKILLIFAELERKTIAERVTAVMLGRANENKWNGGRVPFGYMPGPVTTDANGKKCKSWPVPDPIEAPIVRAIFELYLREKALKKVAAALNTAGYRSRKGTLWSDTTVRCILKNHFYKGEYVYNRQNPNAGRREDFYRSENDWVVVTGQHEAIVPEETWRRCNEMLSKNRSWLAPIGSLVSAQDKYIFGGLLQCAECGYTMNSKDRTRIHDHTHSSYYYCTGRWKAPAVCTGEHSGYASDRVLLPQILKLIARIIEACANAIKFASAEQLVSYLLNDNLIPGATGIEEAQRIYMIVRAHVKHIYGIEQANQYNPNALLVEQSQKEKEKQERALSRLKRAYLFDDGDMSEAEYFEQKAAIEGTIAKLEKQIKSLSGNDIGADEAYLAQLSKLIMIKKLQDTNSDFDYYKLAKAIGRKPIHDFLTEIISRIIIGEQNRIIKIIFKNGVSITLQYEK

SEQ ID NO: 565 - protein, 582 aa, Unknown
  Description of Unknown: Integrase B566 sequence
  PTHR30461:SF3,cd00338,SM00857,G3DSA:1.10.10.2600,IPR036162, PF13408,PS51737,IPR025827,G3DSA:3.40.50.1390,IPR006119, IPR038109,PF07508,IPR011109,SSF53041,PTHR30461, PS51736,Coil,PF00239
MARKKNIAAGLDAVIYARYSSHNQREVSIEQQIAECTKHAAALGLRIVGTYEDRAISGKTDNRPRFQQMMRDAEKGKFQAVVAWKSNRIGRNMLQAMVNEAKLDDYGVKVFYAEEDFDDTAAGRFALRNMMNVNQFYSENMAEDITRGLYDNANKCMANGRQPLGYKRGADGKVMLDEPAAAVVREIFTRVATGDLFVNIARDLNAKGIKTSKGAAWNKGSFQSICQNERYKGIYIYGNVRIVDGIPRIVSDELWYKVQEAMRMKKNPVGTRHRVGAEDYLLTGKLRCGHCGSYMTGVSGTSRNGELHYYYTCQKRRTEHACNKKNVRRDVIEPAIAQAIKMYCLTDDVIEWVADRTVEYWEKHDNDLHIEALEQQLEENKKATSNMLKAIEMGIITDATRSRMIELETEQSKLAVQLNAAKADVVKIDRDDLIDELQIFRDMDVNNRSVQAELFKDFLVAAYLYDDNRLKLVFSFMGKEKNVEIPLETGEDPPDGGDSPDTKMFVFAPDCSTIQFVLEPDSLRKRVRVRFLFTRGSEKALLGTVSRNEQRQGITMAVVSCLLLCGIKFALCELGRPPYMAH

SEQ ID NO: 566 - protein, 582 aa, Unknown
  Description of Unknown: Integrase B567 sequence
  PTHR30461:SF3,IPR036162,PS51737,IPR011109,PTHR30461, PS00028,PS00397,PF00239,G3DSA:1.10.10.2600,IPR006119, SSF53041,IPR013087,cd00338,SM00857,IPR025827,IPR038109 ,PS51736,IPR006118,PF13408,G3DSA:3.40.50.1390,PF07508,Coil
MAKYAISIPQTQKAALYIRVSTDMQADKDSLPLQESDLRKLADLNGINDTEVFCDAGFSGKNLNRPAFRAMMERIRAREFSHLYVWKLDRISRNLLDFLELYDELKCYGVAFASKNECFDTQSPGGEAMLKILLIFAELERKTIAERVTAVMLGRANENKWNGGRVPFGYMPGPVTTDANGKKCKSWPVPDPIEAPIVRAIFELYLREKALKKVAAALNTAGYRSRKGTLWSDTTVRCILKNHFYKGEYVYNRQNPNAGRREDFYRSENDWVVVTGQHEAIVPEETWRRCNEMLSKNRSWLAPIGSLVSAQDKYIFGGLLQCAECGYTMNSKDRTRIHDHTHSSYYYCTGRWKAPAVCTGEHSGYASDRVLLPQILKLIARMIEACANAIKFASAEQLVSYLLNDNLIPGATGIEEAQRIYMIVRAHVKHIYGVDQTNQYNPNALLVEQSQKEKEKQERALSRLKRAYLFDDGDMSEAEYFEQKAAIEGTIAKLDKQIKSLSGNDIGADEAYLAQLSKLIMIKKLQDTNSDFDYYKLAKAIGRKPIHDFLTEIISRIIIGEQNRIIKIIFKNGVSITLQYEK

SEQ ID NO: 567 - protein, 582 aa, Unknown
  Description of Unknown: Integrase B568 sequence
  PTHR30461:SF3,IPR036162,PS51737,IPR011109,PTHR30461, PS00028,PS00397,PF00239,G3DSA:1.10.10.2600,IPR006119, SSF53041,IPR013087,cd00338,SM00857,IPR025827,IPR038109 ,PS51736,IPR006118,PF13408,G3DSA:3.40.50.1390,PF07508,Coil
MAKHAITIPQNPKAALYIRVSTDMQADKDSLPLQESDLRKLADLNGIKDIEVFSDAGFSGKNLNRPAFRSMMDRIRAREFSHLYVWKLDRISRNLLDFLELYDELKCYGVAFASKNECFDTQSPGGEAMLKILLIFAELERKTIAERVTAVMLGRANENKWNGGRVPFGYMPGPVTTDANGKKCKSWPVPDPIEAPIVRAIFELYLREKALKKVAVALNTAGYRSRKGTLWSDTTVRCILKNHFYKGEYVYNRQNPNAGRREDFYRSENDWVVVTGQHEAIVPEETWRRCNEMLSKNRSWLAPIGSLVSAQDKYIFGGLLQCAECGYTMNSKDRTRIHDHTHSSYYYCTGRWKAPAVCTGEHSGYASDRVLLPQILKLIARMIEACANAIKFASAEQLVSYLLNDNLIPGATGIEEAQRIYMIVRAHVKHIYGVDQTNQYNPNALLVEQSQKEKEKQERALSRLKRAYLFDDGDMSEAEYFEQKAAIEGTIAKLDKQIKSLSGNDIGADEAYLAQLSKLIMIKKLQDTNSDFDYYKLAKAIGRKPIHDFLTEIISRIIIGEQNRIIKIIFKNGVSITLQYEK

SEQ ID NO: 568 - protein, 582 aa, Unknown
  Description of Unknown: Integrase B569 sequence
  PTHR30461:SF3,IPR036162,PS51737,IPR011109,PTHR30461, PS00397,PF00239,G3DSA:1.10.10.2600,IPR006119,SSF53041, cd00338,SM00857,IPR025827,IPR038109,PS51736, IPR006118,PF13408,G3DSA:3.40.50.1390,PF07508,Coil
MNQDKLTDKLSSQKCALYIRVSTHWQVDKASLPVQREDLINYAKYALGIDKYEVFEDAGYSAKNTDRPAFQQMMARLRTGEFSHLLVWKIDRISRNLLDFAGMYSEIKKLGITFVSKNEQFDTSNAMGEAMLKIILVFAELERNMTSERVTAIMLSRANNGQWNGGKVPFGYDYDKENRTFTINEAEASVVNLIYDAYEANNSLLTVSRTLNEKGLLSRKGSPWTPTTISIILKNPFYIGVYRYNYHDETKSGGNARSTQLKNKSEWIYVKDHHPAIIDAERQARIISLLERNRRSNKDSAKSYVRKNTHIFAGLLYCGCCGSQMQSTIDRERSDGYRPSIYACTRKRRFNDCDNKYISDVTIAPFVLNYIANILKAQNNFGKSTSIETFERKLLRGKMFEDVEHIERIGLTEMYDILKRGNLSDAVYSTRLQGTIDEQAIIDERNLLSVEKRKKERALARLKSLYLYNDDAISERDYIIEKKTLTDSIERIDKRLEEIERNSSQHFTMTDDEFMTKASVFIMTHHLQGKRYIEFEKLIRKIDSRVIKDFVSSVIQKVVIKNGRVMSIRFRNGIEHNFLYKT

SEQ ID NO: 569 - protein, 582 aa, Unknown
  Description of Unknown: Integrase B570 sequence
  PTHR30461:SF3,IPR036162,PS51737,IPR011109,PTHR30461, PS00028,PS00397,PF00239,G3DSA:1.10.10.2600,IPR006119, SSF53041,IPR013087,cd00338,SM00857,IPR038109, PS51736,IPR006118,G3DSA:3.40.50.1390,PF07508,Coil
MAKHAITIPQNPKAALYIRVSTDMQADKDSLPLQESDLRKLADLNGIKDIEVFCDAGFSGKNLNRPAFRSMMDRIRAREFSHLYVWKLDRISRNLLDFLELYDELKCYGVAFASKNESFDTQSPGGEAMLKILLIFAELERKTIAERVTAVMLGRANENKWNGGRVPFGYMPGPVTTDANGKKCKSWPVPDPIEAPIVRAIFELYLREKALKKVAAALNTAGYRSRKGTLWSDTTVRCILKNHFYKGEYVYNRQNPNAGRREDFYRSENDWVVVTGQHEAIVPEETWRRCNEMLSKNRSWLAPIGSLVSAQDKYIFGGLLQCAECGYTMNSKDRTRIHDHTHSSYYYCTGRWKAPVVCTGEHSGYASDRVLLPQILKLIARMIEACANAIKFANAEQLVSYLLNDNLIPGATGIEEAQRIYMIVRAHVKHIYGVDQANQYNPNALLVEQSQKEKEKQERALSRLKRAYLFDDGDMSEAEYFEQKAAIEGTIAKLDKQIKSLSGNDIGADEAYLAQLSKLIMIKKLQNTNSDFDYYKLAKAIGRKPIHDFLTEIISRIIIGEQNRIIKIIFKNGVSITLQYEK

SEQ ID NO: 570 - protein, 582 aa, Unknown
  Description of Unknown: Integrase B571 sequence
  PTHR30461:SF3,IPR036162,PS51737,IPR011109,PTHR30461, PS00028,PS00397,PF00239,G3DSA:1.10.10.2600,IPR006119, SSF53041,IPR013087,cd00338,SM00857,IPR025827,IPR038109 ,PS51736,IPR006118,PF13408,G3DSA:3.40.50.1390,PF07508,Coil
MAKHAITIPQNPKAALYIRVSTDMQADKDSLPLQESDLRKLADLNGIKDIEVFSDAGFSGKNLNRPAFRSMMDRIRAREFSHLYVWKLDRISRNLLDFLELYDELKCYGVAFASKNECFDTQSPGGEAMLKILLIFAELERKTIAERVTAVMLGRANENKWNGGRVPFGYMPGPVTTDANGKKCKSWPVPDPIEAPIVRAIFELYLREKALKKVAKALNAAGYRSRKGTQWSDTTVRCILKNHFYKGEYVYNRQNPNANRREDFYRSENDWVVVTGQHEAIVPEETWRRCNEMLSKNRNWLAPIGSLVSAQDKYIFGGLLQCAECGYTMNSKDRTRIHNHTHSSYYYCTGRWKAPAVCTGEHSGYASDRVLLPQILKLIARMIEACANAIKFASAEQLVSYLLNDNLIPGATGIKEAQRIYMIVRAHVKHIYGVDQTNQYNPNALLVEQSQKEKEKQERALSRLKRAYLFDDGDMSEAEYFEQKAAIEGTIAKLDKQIKSLSGNDIGADEAYFAQLSKLIMIKKLQDTNSDFDYYKLAKAIGRKPIHDFLTEIISRIIIGEQNRIIKIIFKNGVSITLQYEK

SEQ ID NO: 571 - protein, 582 aa, Unknown
  Description of Unknown: Integrase B572 sequence
  PTHR30461:SF3,IPR036162,PS51737,IPR011109,PTHR30461, PF00239,G3DSA:1.10.10.2600,IPR006119,SSF53041,cd00338, SM00857,IPR025827,IPR038109,PS51736,mobidb-lite, PF13408,G3DSA:3.40.50.1390,PF07508,Coil
MAKKKKPAGGVAIIYARYSSHNQRDVSIEQQIEACRKHAAELGLTITDTYEDRALSGRTDNRPAFQRMMRDAKDGKFQYVLAWKSNRMGRNMMQAMVNESRLMDCGVKVFYAEEDFDDSAAGRFALRSMMNVNQFYSDNLAEDVRRGLMDNASKCMANGRQPLGYKRGENGKIVVDEPAATIVREVYARVASGEMFMDIARDLNRRGIKTADKGEWNKNSFHKMCSNERYRGIYIYGETRIEGGIPPIVDDVLWYKVQEAIKVKKSKNRHHRPDDEDYLLTGKLRCGKCGGYMIGMSGRSKTGDVHHYYACQNRRVGHTCGKKNIRRDVIEPAVAQAIKQYCLTDDAIEWITDQTIAYWEDKDRKLQIDSIENDLATVQSSISNVMKAIEMGVITETTRDRLIELEKQQADLKSKLVLAKEEIVHVDRKDLISSLLAFRHGNVHDRAYQEKLFNAFLIAVYVYDDDHLKLVFNSFGKDDTVSIALDLVENDDSSELSDVSKSSPVISNGQPEQSHPMNNRVAFLFCFLPISRSEHTALYQRSLGKSNTRTAFPFLGRCSAGAFSFVSQRAESSYRMLMRPAP

SEQ ID NO: 572 - protein, 582 aa, Unknown
  Description of Unknown: Integrase B573 sequence
  cd03768,PTHR30461:SF3,SM00857,G3DSA:1.10.10.2600,IPR036162, PF13408,IPR025827,PS51737,G3DSA:3.40.50.1390,IPR006119, IPR038109,PF07508,IPR011109,SSF53041,PTHR30461, PS51736,Coil,PF00239
MNTIAIYTRKSKFTGKGESIENQIEKCKKFIEFKFNIDSENVNIFIDEGFSGKNENRPQYQLMMEKIKKKEIDSIVIYQLNRLGRNARDIHNTMQLCDDLGVIIYSATEGFDSSTSFGRAVIGILASLAQLEREQLAERVKDNMYTLAKMGRWLGGQSPLGFDGSREYYIDETGKERSITKLKKNEEELKLVKLLYDKYLEEKSLSQVGKWALINHLTGKNGGNLNKNAINVILQNPVYVKSSKEVFEYLSNEGYEVCGEPNGNGLLRYGKDDEQIVATAKHKGVIPSDKWIEVQKILKDNVSKAPRMGKTNTALLTGLLRCKCGSTMRISYGQKRKDGTKPFYYICNMKINSGGARCNLKNLNGNLFEKNFIQFLKNYSKETLFAELQKLLNNSKDLESTISSNKIDLEIEKSNKAIKQILNKLKLTDDDELSKILLQEIKVENNKLKALSKQKEELLNDQSEVVITQSEVLAILDDLDNFQKTFDDLNLEDKQKALKSLIESITLTDDKFIVDFNIKKKLDNAIKKLSSLFAKYKSSQLRHPCRSYMYRHSSWSQCSKASTWITTSYSSKFNCHWRYNFI

SEQ ID NO: 573 - protein, 582 aa, Unknown
  Description of Unknown: Integrase B574 sequence
  PTHR30461:SF3,IPR036162,PS51737,IPR011109,PTHR30461, PS00028,PS00397,PF00239,G3DSA:1.10.10.2600,IPR006119, SSF53041,IPR013087,cd00338,SM00857,IPR025827,IPR038109 ,PS51736,IPR006118,PF13408,G3DSA:3.40.50.1390,PF07508,Coil
MAKHAITIPQNPKAALYIRVSTDMQADKDSLPLQESDLRKLADLNGIKDIEVFSDAGFSGKNLNRPAFRSMMDRIRAREFSHLYVWKLDRISRNLLDFLELYDELKCYGVAFASKNECFDTQSPGGEAMLKILLIFAELERKTIAERVTAVMLGRANEKKWNGGRVPFGYMPGPVTTDANGKKCKSWPVPDPIEAPIVRAIFELYLREKALKKVAVALNTAGYRSRKGTLWSDTTVRCILKNHFYKGEYVYNRQNPNAGRREDFYRSENDWVVVTGQHEAIVPEETWRRCNEMLSKNRSWLAPIGSLVSAQDKYIFGGLLQCAECGYTMNSKDRTRIHDHTHSSYYYCTGRWKAPAVCTGEHSGYASDRVLLPQILKLIARMIEACANAIKFASAEQLVSYLLNDNLIPGATGIEEAQRIYMIVRAHVKHIYGVDQANQYNPNALLIEQSQKEKEKQERALSRLKRAYLFDDGDMSEAEYFEQKAAIEDSITKLNKQIKSLSVNDIGADEAYLAQLSKLIMIKKLQDTNSDFDYYKLAKAIGRKPIHDFLTEIISRIIIGEQNRIIKIIFKNGVSITLQYEK

SEQ ID NO: 574 - protein, 582 aa, Unknown
  Description of Unknown: Integrase B575 sequence
  PTHR30461:SF3,IPR036162,PS51737,IPR011109,PTHR30461, PS00028,PS00397,PF00239,G3DSA:1.10.10.2600,IPR006119, SSF53041,IPR013087,cd00338,SM00857,IPR038109, PS51736,IPR006118,G3DSA:3.40.50.1390,PF07508,Coil
MAKHAITIPQNPKAALYIRVSTDMQADKDSLPLQESDLRKLADLNGIKDIEVFSDAGFSGKNLNRPAFRSMMDRIRAREFSHLYVWKLDRISRNLLDFLELYDELKDYGVAFASKNESFDTQSPGGEAMLKILLIFAELERKTIAERVTAVMLGRANENKWNGGRVPFGYMPGPVTTDANGKKCKSWPVPDPIEAPIVRAIFELYLREKALKKVATALNTAGYRSRKGTLWSDTTVRCILKNHFYKGEYVYNRQNPNAGRREDFYRSENDWVVVTGQHEAIVPEETWRRCNEMLSKNRSWLAPIGSLVSAQDKYIFGGLLQCAECGYTMNSKDRTRIHDHTHSSYYYCTGRWKAPVVCTGEHSGYASDRVLLPQILKLIARMIEACANAIKFASAEQLVSYLLNDNLIPGATGIEEAQRIYMIVRAHVKHIYGVDQANQYNPNALLVEQSQKEKEKQERALSRLKRAYLFDDGDMSEAEYFEQKAAIEGTIAKLEKQIKSLSGNDIGADEAYLAQLSKLIMIKKLQNTNSDFDYYKLAKAIGRKPIHDFLTEIISRIIIGEQNRIIKIIFKNGVSITLQYEK

SEQ ID NO: 575 - protein, 582 aa, Unknown
  Description of Unknown: Integrase B576 sequence
  PTHR30461:SF3,IPR036162,PS51737,IPR011109,PTHR30461, PS00028,PS00397,PF00239,G3DSA:1.10.10.2600,IPR006119, SSF53041,IPR013087,cd00338,SM00857,IPR025827,IPR038109 ,PS51736,IPR006118,PF13408,G3DSA:3.40.50.1390,PF07508,Coil
MAKHAITIPQNPKAALYIRVSTDMQADKDSLPLQESDLRKLADLNGIKDIEVFSDAGFSGKNLNRPAFRSMMDRIRAREFSHLYVWKLDRISRNLLDFLELYDELKCYGVAFASKNECFDTQSPGGEAMLKILLIFAELERKTIAERVTAVMLGRANENKWNGGRVPFGYMPGPVTTDANGKKCKSWPVPDPIEAPIVRAIFELYLREKALKKVAAALNTAGYRSRKGTLWSDTTVRCILKNHFYKGEYVYNRQNPNAGRREDFYRSENDWVVVTGQHEAIVPEETWRRCNEMLSKNRSWLAPIGSLVSAQDKYIFGGLLQCAECGYTMNSKDRTRIHDHTHSSYYYCTGRWKAPAVCTGEHSGYASDRVLLPQILKLIARMIEACANAIKFASAEQLVSYLLNDNLIPGATGIEEAQRIYMIVRAHVKHIYGVDQANQYNPNALLVEQSQKEKEKQERALSRLKRAYLFDDGDMSEAEYFDQKSAIEDTITKLDKQIKSLSGNDIGADEAYLAQLSKLIMIKKLQDTNSDFDYYKLAKAIGRKPIHDFLTEIISRIIIGEQNRIIKIIFKNGVSITLQYEK

SEQ ID NO: 576 - protein, 582 aa, Unknown
  Description of Unknown: Integrase B577 sequence
  PTHR30461:SF3,IPR036162,PS51737,IPR011109,PTHR30461, PS00028,PS00397,PF00239,G3DSA:1.10.10.2600,IPR006119, SSF53041,IPR013087,cd00338,SM00857,IPR025827,IPR038109 ,PS51736,IPR006118,PF13408,G3DSA:3.40.50.1390,PF07508,Coil
MAKHAITIPQNPKAALYIRVSTDMQADKDSLPLQESDLRKLADLNGIKDIEVFSDVGFSGKNLNRPAFRSMMERIRAREFSHLYVWKLDRISRNLLDFLELYDELKDYGVAFASKNESFDTQSPGGEAMLKILLIFAELERKTIAERVTAVMLGRANENKWNGGRVPFGYMPGPVTTDANGKKCKSWPVPDPIEAPIVRAIFELYLREKALKKVATALNTAGYRSRKGTLWSDTTVRCILKNHFYKGEYVYNRQNPNAGRREDFYRSENDWVVVTGQHEAIVPEETWRRCNEMLSKNRSWLAPIGSLVSAQDKYIFGGLLQCAECGYTMNSKDRTRIHDHTHSSYYYCTGRWKAPAVCTGEHSGYASDRVLLPQILKLIARMIEACANAIKFASAEQLVSYLLNDNLIPGATGIEEAQRIYMIVRAHVKHIYGVDQTNQYNPNALLVEQSQKEKEKQERALSRLKRAYLFDDGDMSEAEYFEQKAAIEGTIIKLEKQIKSLSGNDIGADEAYLAQLSKLIMIKKLQDTNSDFDYYKLAKAIGRKPIHNFLTEIISRIIIGEKNRIIKIIFKNGVPITFQYAK

SEQ ID NO: 577 - protein, 582 aa, Unknown
  Description of Unknown: Integrase B578 sequence
  cd03768,PTHR30461:SF3,SM00857,IPR036162,PF13408, IPR025827,G3DSA:3.40.50.1390,IPR006119,PF07508,IPR011109, SSF53041,PTHR30461,PS51736,Coil,PF00239
MEKVKIAIYSRKSKYSDKGDSVGNQVEIAMKYITQHYPSSEYDVESIIYEDDGFSGGNIDRPKFKEFLTEENKKPFDILICYRLDRISRNIAHFSNLMNYITNLGTNFVSIKEQFDTKTPMGRAMMYIASVFAQLEREVIAERIRDNMIELAKTGRWLGGKTPTGYKSERIELVDVYEQSEDSVLEKKKKKATKLISIDEELELIQEIGYKFLELKSLTKLEAYFVKNKIATKNNLDFSVSTLRRILVNPVYAPNDKDVLEYFNKNGVTIYADGDRANFDGKYGLIGYGKKDGKKDRNIKDWIVSVGFHQPAFKEGIVWVKIQELLEKNKEKRYRADCKHDFLFSGILRCSECGSYMRPKIAQGERFYYICELKEKSRGMRCHSKNINGRALDELMMKKLEKIFVPTSEVYQELSKLTIKKDRIELDTKVEELNKKVKTNDEAMKNLIDKLKYMDIEVIDLINSELKRLKQENKELEDEVIKLKTNKETEENFRDEESKMAELILDIINNCFKTFNYLDIKSKKDILRILIEDMQGSGQNVEVDILNTKISQNDKRLFSDMFEETANKKDKNVVSRLGLQFL

SEQ ID NO: 578 - protein, 582 aa, Unknown
  Description of Unknown: Integrase B579 sequence
  PTHR30461:SF3,IPR036162,PS51737,IPR011109,PTHR30461, PS00397,PF00239,G3DSA:1.10.10.2600,IPR006119,SSF53041, cd00338,SM00857,IPR025827,IPR038109, PS51736,IPR006118,PF13408,G3DSA:3.40.50.1390,PF07508,Coil
MNQDKLTDKLSSQKCALYIRVSTHWQVDKASLPVQREDLINYAKYALGIDKYEVFEDAGYSAKNTDRPSFQQMMARLRTGEFSHLLVWKIDRISRNLLDFAGMYSEIKKLGITFVSKNEQFDTSNAMGEAMLKIILVFAELERNMTSERVTAIMLSRANNGQWNGGKVPFGYDYDKENRTFTINEAEASVVNLIYDAYEANNSLLTVSRTLNEKGLLSRKGSPWTPTTISIILKNPFYIGVYRYNYHDETKSGGNARSTQLKNKSEWIYVKDHHPAIIDAERQARIISLLERNRRSNKDSAKSYVRKNTHIFAGLLYCGCCGSQMQSTIDRERSDGYRPSIYACTRKRRFNDCDNKYISDVTIAPFVLNYIANILKAQNNFGKSTSIETFERKLLRGKMFEDVEHIERIGLTEMYDILKRGNLSDAVYSTRLQGTIDEQAIIDERNLLSVEKRKKERALARLKSLYLYNDDAISERDYIIEKKTLTDSIERIDKRLEEIERNSSQHFTMTDDEFMTKASVFIMTHHLQGKRYIEFEKLIRKIDSRVIKDFVSSVIQKVVIKNGRVMSIRFRNGIEHNFLYKT

SEQ ID NO: 579 - protein, 582 aa, Unknown
  Description of Unknown: Integrase B580 sequence
  PTHR30461:SF3,IPR036162,PS51737,IPR011109,PTHR30461, PS00397,PF00239,G3DSA:1.10.10.2600,IPR006119,SSF53041, SM00857,IPR025827,IPR038109,PS51736,cd03768, IPR006118,PF13408,G3DSA:3.40.50.1390,PF07508,Coil
MKKDHAPVGVWSLVVKQKSAGPLERVSALAACYKGATSWKRSLGCILLEQGRAVHGQLTWKTTAFIVTRRPQFEKGVLSFMRVICYVRVSTREQAEKGYSVSEQQERLKAYCLAKDWVVAQVITDPGFSGAKLERPGMQQMISLVQAKKCDAVLVWKLDRLSRSQKDTLYLIEDVFLKNGCAFVSMNENFDTSTAFGRAMIGILSVFAQLEREQIRERMAVGRVGRAKAGLFHGGGFAPIGYDYKTIAEGGAGLVVNEYEAMQVREVFSLYLQGWPVNRIRKYMTARYTTKDGDWGSDTTVRDVLKNPLYTGKINWAKKVYDGQHEPLISQETFDAAAARLATSSWKRTCSDGMERNSPFKSTHLLGGIIWCARCGARYFASGNYSGRGENKHYWPYYVCYSRAKSAKHMIRDPNCRNDRWAVAKLDAIIEGEIRKLAFDPAALELAVSGPQQDEDVAQRRAALQQRLNDLRAQMGRVLDLYQMGGSLPASMVGDRVAKLQAEIDGVEAALAEAVEEPPTQRLDAARAALVGAEDVLDNGTLDERRELVHSLIRRIDLDGENIDIHWSFAPEAAEVIPGRSA

SEQ ID NO: 580 - protein, 582 aa, Unknown
  Description of Unknown: Integrase B581 sequence
  PTHR30461:SF3,IPR036162,PS51737,IPR011109,PTHR30461, PS00028,PS00397,PF00239,G3DSA:1.10.10.2600,IPR006119, SSF53041,IPR013087,cd00338,SM00857,IPR025827,IPR038109 ,PS51736,IPR006118,PF13408,G3DSA:3.40.50.1390,PF07508,Coil
MAKHAITIPQNPKAALYIRVSTDMQADKDSLPLQESDLRKLADLNGIKDIEVFSDAGFSGKNLNRPAFQSMMERIRAREFSHLYVWKLDRISRNLLDFLELYDELKCYGVAFASKNECFDTQSPGGEAMLKILLIFAELERKTIAERVTAVMLGRANENKWNGGRVPFGYMPGPVTTDANGKKCKSWPVPDPIEAPIVRAIFELYLREKALKKVAAALNTAGYRSRKGTLWSDTTVRCILKNHFYKGEYVYNRQNPNAGRREDFYRSENDWVVVTGQHEAIIPEETWRRCNEMLSKNRSWLAPIGSLVSAQNKYIFGGLLQCAECGYTMNSKDRTRIHDHTHSSYYYCTGRWKAPAVCTGEHSGYASDRVLLPQILKLIARMIEACANAIKFASAEQLVSYLLNDNLIPGATGIEEAQRIYMIVRAHVKHIYGVDQANQYNPNALLVEQSQKEKEKQERALSRLKRAYLFDDGDMSEAEYFEQKAAIEGTIAKLEKQIKSLSGNDIGADEAYLAQLSKLIMIKKLQDTNSDFDYYKLAKAIGRKPIHDFLTEIISRIIIGEQNRIIKIIFKNGVSITLQYAK

SEQ ID NO: 581 - protein, 582 aa, Unknown
  Description of Unknown: Integrase B582 sequence
  PTHR30461:SF3,SM00857,IPR006118,G3DSA:1.10.10.2600,IPR036162, PS51737,G3DSA:3.40.50.1390,Coil,IPR006119,IPR038109, PF07508,IPR011109,SSF53041,PTHR30461,PS00397, PS51736,cd00338,PF00239
MAKHAITIPKTPKAALYIRVSTDMQADKDSLPLQESDLRKLADLNGIKDIEVFSDVGFSGKNLNRPAFQSMMERIRAREFSHLYVWKLDRISRNLLDFLELYDDLKDYGVAFASKNESFDTQSPGGEAMLKILLIFAELERKTIAERVTAVMLGRANENKWNGGRVPFGYMPGPITTDANGKKCKSWPVPDPIEAPVVRAIFELYLREKALKKVAAALNAAGYRSRKGTQWSDTTVRCILKNHFYKGEYVYNRQNSNASRREDFYRSENDWVVVTGQHEAIVPEETWRKCNDMLSKNRSWLAPIGSLVSAQDKYIFGGLLECAACGYTLNSKDRARGHDHTRSTYYYCNGRWKVPAVCAAEHPGYASDCVLLPRLLKLIARIIEACANAIKFASAEQLVSYLLNDNLVPGAIGIEEAQKIYMIVRAHVKHIYGVDQADHYNPNALLVEQSKKEKEKQERALSRLKRAYLFDDGDMSEAEYFEQKAAIEGTIAKLDKQIKSLSGNDIGADEAYLAQLSKLIMIKKLQDTNSDFDYYKLAKAIGRKPIHDFLAEIISRIIMGEQNRIIKIIFKNGVSITLQYEK

SEQ ID NO: 582 - protein, 582 aa, Unknown
  Description of Unknown: Integrase B583 sequence
  PTHR30461:SF3,cd00338,SM00857,G3DSA:1.10.10.2600,IPR036162, PF13408,PS51737,IPR025827,G3DSA:3.40.50.1390,IPR006119, IPR038109,PF07508,IPR011109,SSF53041,PTHR30461, PS51736,Coil,PF00239
MARKKNIAAGLDAVIYARYSSHNQREVSIEQQIAECTKHAAALGLRIVGTYEDRAISGKTDNRPRFQQMMRDAEKGKFQAVVAWKSNRIGRNMLQAMVNEAKLDDYGVKVFYAEEDFDDTAAGRFALRNMMNVNQFYSENMAEDITRGLYDNASKCMANGRQPLGYKRGEDGRVVLDEANAAVVREIFTRVAAGDLFVDIARDLNAQGIKTSKGANWNKGSFQSICQNERYRGIYIYGDVRVADGIPRIVSDDLWYRVQEAMRMKKNPVGTRHRVGAEDYLLTGKLRCGHCGSYMTGVSGTSRNGELHYYYTCQKRRTEHACDKKNIRRDVIEPAVAQAIKMYCLTDDVIAWIADRTVEYWEKHDNDLQIEALEQQLEENKKATSNMLKAIEMGIITEATRTRMVELETEQSRLSVQLNAAKEDVVKIDREQIISYLELLQQGDIHDRDFQMELFKNFLVAVYVYDDNRMKLVFSCMGDQNSVEIPLETGEDPPDGGLSPDAKMFVLTPDSSTKQFVLEPNSLRKRVRVRFLFIGGSAEGLHRALNEQRQGIIVVMVSCLLFCGIKVALCELDRPPIWRVWG

SEQ ID NO: 583 - protein, 582 aa, Unknown
  Description of Unknown: Integrase B584 sequence
  PTHR30461:SF3,cd00338,SM00857,G3DSA:1.10.10.2600,IPR036162, PF13408,IPR025827,G3DSA:3.40.50.1390,PS51737,IPR006119, IPR038109,PF07508,SSF53041,IPR011109,PTHR30461, PS51736,Coil,PF00239
MIDNCVRAVFYARVSTQEEEQLKALPKQVEECKDIIASKGWRLIDGYVDEGKSGTKKDGRKAYIKLLEDMQEDKFDIVVVKSQDRLQRNTFDWYKFTDLLNKNNKRLYLYMDNKFYEPSEDALITGIKAILAEEYSRDLSKKLNNSNKRRIEKAKAGEEVSAMGNGQTYGYSIVNGKWVVDESQREVVRRMYELYTELHSVRKVRDALNEQGYRNQRGNLFTDENIGRIVKNVMHKGWVILNRHHRDFDSKEIIEKSEEEWVIVKNDHEAIVSEELWDAVNDEIQSHRNKGNSGTRGKRGGTDPLSGKMVCSCCGRVLWKHASQGSYKSKEGRKYTYKRYTQWYCSGKMGRGELACTDPATISGVKLQKYLVEMADMFLDYSTVEYSKNLLKRRTISWLEDLKDKLTTPNDNEKIEQDLKALEGKRGNLIDLYTDGLISKEEFKSRSVDLDAEMEKKRAFLVPVEENPDIKAIEDTIANIDAEIEALFEDEAMVEEKKVQFIQEHIKKIYVSKNSDVFIVLDNVAGAFLFIDKEDTRIEVVPVAEYNPEELSEEGITENDFVPFDRESMPQHHVPICIPRHD

SEQ ID NO: 584 - protein, 582 aa, Unknown
  Description of Unknown: Integrase B585 sequence
  PTHR30461:SF3,cd00338,SM00857,G3DSA:1.10.10.2600,IPR036162, PF13408,IPR025827,G3DSA:3.40.50.1390,PS51737,IPR006119, IPR038109,PF07508,SSF53041,IPR011109,PTHR30461, mobidb-lite,Coil,PF00239
MPRKPAKHPAKPKRGKKLEVEEPGVLYGRYSSHNQKDISVEQQFEKGYELAAEYGIRIIDTYADRAVSGRTDKRRDFQRMMTDAAKGKFRYVIAWKSNRMGRNMLEALINEARLQDLGVRVLYVEEDFDDTAAGRFAARSMMNVNQFYSENMAEDIKRGLYDNAANCMVANGHLPYGYKADETLHYAIDEPKAAVIREIFTRVSCGEAFVDIMASLNARGIKTSYGRPWGRSSFQRILSNERYRGIYIYGDVRKEGGIPRIVSDELYFKVQEVITTKKNPQGRHRVNGDYLLTGKLFCGHCKSPMTGISGTSRSGNLHYYYVCQKRRTEKTCEKKNLRRDDIELQVAKAIKRRTLDDDTINWIADSVVEYSQHQESASGIGLLEDQLKDTQRSIKNLMAAIEQGIITPTTKARLMELEKEQSDIDRKITMAKADVIPVNRDQLVGWLKKLQAGDVHDKKYQAELFDTFLIAVYVYDNPDGQDYMKVVFNYAGSKNTVEIPLDPSVIDNVENIETGAVRLSSAQVHQNTQVRTLLVSECVRPDKKTAAEVIVLCGSFIYFASGIRSRNAAAVSKSQPNAAKAL

SEQ ID NO: 585 - protein, 582 aa, Unknown
  Description of Unknown: Integrase B586 sequence
  PTHR30461:SF3,IPR036162,PS51737,IPR011109,PTHR30461, PS00028,PS00397,PF00239,G3DSA:1.10.10.2600,IPR006119, SSF53041,IPR013087,cd00338,SM00857,IPR025827,IPR038109 ,PS51736,IPR006118,PF13408,G3DSA:3.40.50.1390,PF07508,Coil
MAKHAITIPQNPKAALYIRVSTDMQADKDSLPLQESDLRKLADLNGIKDIEVFSDAGFSGKNLNRPAFRSMMDRIRAREFSHLYVWKLDRISRNLLDFLELYDELKCYGVAFASKNECFDTQSPGGEAMLKILLIFAELERKTIAERVTAVMLGRANENKWNGGRVPFGYMPGPVTTDANGKKCKSWPVPDPIEAPIVRAIFELYLREKALKKVAAALNTAGYRSRKGTLWSDTTVRCILKNHFYKGEYVYNRQNPNAGRREDFYRSENDWVVVTGQHEAIVPEETWRRCNEMLSKNRSWLAPIGSLVSAQDKYIFGGLLQCAECGYTMNSKDRTRIHDHTHSSYYYCTGRWKAPAVCTGEHSGYASDRVLLPQILKLIARMIEACANAIKFASAEQLVSYLLNDNLIPGATGIEEAQRIYMIVRAHVKHIYGVDQTNQYNPNALLVEQSQKEKEKQERALSRLKRAYLFDDGDMSEAEYFEQKAAIEGTIVKLDKQIKSLSGNDIGADEAYLAQLSKLIMIKKLQDTNSDFDYYKLAKAIGRKPIHDFLTEIISRIIIGEQNRIIKIIFKNSVSITLQYEK

SEQ ID NO: 586 - protein, 582 aa, Unknown
  Description of Unknown: Integrase B587 sequence
  PTHR30461:SF3,IPR036162,PS51737,IPR011109,PTHR30461, PS00397,PF00239,G3DSA:1.10.10.2600,IPR006119,SSF53041, cd00338,SM00857,IPR025827,IPR038109,PS51736, IPR006118,PF13408,G3DSA:3.40.50.1390,PF07508,Coil
MNQDKLTDKLSSQKCALYIRVSTHWQVDKASLPVQREDLINYAKYALGIDKYEVFEDAGYSAKNTDRPAFQQMMARLRTGEFSHLLVWKIDRISRNLLDFAGMYSEIKKLGITFVSKNEQFDTSNAMGEAMLKIILVFAELERNMTSERVTAIMLSRANNGQWNGGKVPFGYDYDKENRTFTINEAEASVVNLIYDAYEANNSLLTVSRTLNEKGLLSRKGSPWTPTTISIILKNPFYIGVYRYNYHDETKSGGNARSTQLKNKSEWIYVKDHHPAIIDAERQARIISLLERNRRSNKDSAKSYVRKNTHIFAGLLYCGCCGSQMQSTIDRERSDGYRPSIYACTRKRRFNDCDNKYISDVTIAPFVLNYIANILKAQNNFGKSTSIETFERKLLRGKMFEDVEHIERIGLTEMYDILKRGNLSDAVYSTRLQGTIDEQAIIDERNLLSVEKRKKERALARLKSLYLYNDDAISERDYIIEKKTLTDSIERIDKRLEEIERNSSQQFTMTDDEFMTKASVFIMTHHLQGKRYIEFEKLIRKIDSRVIKDFVSSVVQKVVIKNGRVMSIRFRNGIEHNFLYKT

SEQ ID NO: 587 - protein, 582 aa, Unknown
  Description of Unknown: Integrase B588 sequence
  PTHR30461:SF3,IPR036162,PS51737,IPR011109,PTHR30461, PS00028,PS00397,PF00239,G3DSA:1.10.10.2600,IPR006119, SSF53041,IPR013087,cd00338,SM00857,IPR025827,IPR038109 ,PS51736,IPR006118,PF13408,G3DSA:3.40.50.1390,PF07508,Coil
MAKHAITIPQNPKAALYIRVSTDMQADKDSLPLQESDLRKLADLNGINDTEVFCDAGFSGKNLNRPAFQSMMERIRAREFSHLYVWKLDRISRNLLDFLELYDELKCYGVAFASKNECFDTQSPGGEAMLKILLIFAELERKTIAERVTAVMLGRANENKWNGGRVPFGYMPGPVTTDANGKKCKSWPVPDPIEAPIVLGIFELYLREKALKKVAAALNTAGYRSRKGTLWSDTTVRCILKNHFYKGEYVYNRQNPNAGRREDFYRSENDWVVVTGQHEAIVPEETWRRCNEMLSKNRSWLAPIGSLVSAQDKYIFGGLLQCAECGYTMNSKDRTRIHDHTHSSYYYCTGRWKAPAICTGEHSGYASDRVLLPQILKLIARMIEACANAIKFASAEQLVSYLLNDNLIPGATGIEEAQRIYMIVRAHVKHIYGVDQANQYNPNALLIEQSQKEKEKQERALSRLKRAYLFDDGDMSEAEYFEQKAAIEDTIAKLDKQIKSLSGNDIGADEAYLAQLSKLIMIKKLQDTNSDFDYYKLAKAIGRKPIHDFLTEIISRIIIGEQNRIIKIIFKNGVSITLQYEK

SEQ ID NO: 588 - protein, 582 aa, Unknown
  Description of Unknown: Integrase B589 sequence
  PTHR30461:SF3,cd00338,SM00857,G3DSA:1.10.10.2600,IPR036162, PF13408,IPR025827,G3DSA:3.40.50.1390,PS51737,IPR006119, IPR038109,PF07508,SSF53041,IPR011109,PTHR30461, PS51736,Coil,PF00239
MFVRHKKNMKYALYGRVSSIKQKDEETIEMQKDELHSYVEQHHLDVYDEYYDEAQSGTLPFSERPEGKRLLTDAKAGHFNAVIFYRTDRLGRSAFEGLRVCQQLMDLGVAIQSINETYDTYTSTGKFIFTQMLAIAEMELSTIKTRMNDGKQRKLRRGMAGARGRALYGYKTDENGYYILDNTIVYADKTPVDIIRYIYQSTIDENASSITLSNRLNTMQVPGPIKYWNSKKILDIIKNPAYKGILDYYNTRSELYDDRIEIPVPPIVSPEIWQKANDGIKQRQIYNRQAHNHHHYLLGQGIVRCGNCGYAYTGIYYKDRAPTATKKFYKCNGRTLTKYKKLQNKPVCTMSRPVPGEWLENIVWAECCKLLTSKSYAEQVIVAYYDTTQQQNSFTDTVNILQSSLDKLEQERQDLITLCLKKIISDDDLAQRLPPLDQQITAIKAELKSHPEALSQADVTKEIRNTKEMIHLLQKMLPMTNDFYVKRALVQLLVHSVVVTTHEDNSFTIDINLNFGPQGLGNKLKGEIKDFCKGMTTRARYGVENAMEILKNAVSFNTCIGQAGIDRADGQRAIGDELVLRR

SEQ ID NO: 589 - protein, 582 aa, Unknown
  Description of Unknown: Integrase B590 sequence
  PTHR30461:SF3,IPR036162,PS51737,IPR011109,PTHR30461, PS00028,PS00397,PF00239,G3DSA:1.10.10.2600,IPR006119, SSF53041,IPR013087,cd00338,SM00857,IPR025827,IPR038109 ,PS51736,IPR006118,PF13408,G3DSA:3.40.50.1390,PF07508,Coil
MTKYAISIPQTQKAALYIRVSTDMQADKDSLPLQESDLRKLADLNGINDTEVFCDAGFSGKNLNRPAFRAMMERIRAREFSHLYVWKLDRISRNLLDFLELYDELKCYGVAFASKNECFDTQSPGGEAMLKILLIFAELERKTIAERVTAVMLGRANENKWNGGRVPFGYMPGPVTTDANGKKCKSWPVPDPIEAPIVRAIFELYLREKALKKVAAALNAAGYRSRKGTLWSDTTVRCILKNHFYKGEYVYNRQNPNAGRREDFYRSENDWVVVTGQHEAIVPEETWRRCNEMLSKNRNWLAPIGSLVSAQDKYIFGGLLQCAECGYTMNSKDRTRNHDHTHSSYYYCTGRWKAPAVCTGEHSGYASDRVLLPQILKLIARMIEACANAIKFASAEQLVSYLLNDNLIPGATGIEEAQRIYMIVRAHVKHIYGVDQTNQYNPNALLVEQSQKEKEKQERALSRLKRAYLFDDGDMSEAEYFEQKAAIEGTIAKLDKQIKSLSGNDIGADEAYLAQLSKLIMIKKLQDTNSDFDYYKLAKAIGRKPIHDFLTEIISRIIIGEQNRIIKIIFKNGVSITLQYEK

SEQ ID NO: 590 - protein, 582 aa, Unknown
  Description of Unknown: Integrase B591 sequence
  PTHR30461:SF3,IPR036162,PS51737,IPR011109,PTHR30461, PS00028,PS00397,PF00239,G3DSA:1.10.10.2600,IPR006119, SSF53041,IPR013087,cd00338,SM00857,IPR038109, PS51736,IPR006118,G3DSA:3.40.50.1390,PF07508,Coil
MAKHTITIPQNTKAALYIRVSTDMQADKDSLPLQESDLRKLADLNGIKDIEVFCDAGFSGKNLNRPAFRSMMDRIRAREFSHLYVWKLDRISRNLLDFLELYDELKCYGVAFASKNECFDTQSPGGEAMLKILLIFAELERKTIAERVTAVMLGRANENKWNGGRVPFGYMPGPVTTDANGKKCKSWPVPDPIEAPIVRAIFELYLREKALKKVAAALNTAGYRSRKGTLWSDTTVRCILKNHFYKGEYVYNRQNPNASRREDFYRSENDWVVVTGQHEAIVPKETWRRCNEMLSKNRSWLAPIGSLVSAQDKYIFGGLLQCAECSYTMNSKDRTRIHDHTHSSYYYCTGRWKAPAVCTGEHSGYASDRVLLPQILKLIARMIEACANAIKFASAEQLVSYLLNDNLIPGATGIEEAQRIYMIVRAHVKHIYGVDQANQYNPNALLVEQSQKEKEKQERALSRLKRAYLFDDGDMSEAEYFEQKAAIEGTIAKLDKQIKSLSGNDICADEAYLAQLSKLIMIKKLQDTNSDFDYYKLAKAIGRKPIHDFLTEIISRIIIGEQNRIIKIIFKNGVSITLQYEK

SEQ ID NO: 591 - protein, 582 aa, Unknown
  Description of Unknown: Integrase B592 sequence
  PTHR30461:SF3,IPR036162,PS51737,IPR011109,PTHR30461, PS00028,PS00397,PF00239,G3DSA:1.10.10.2600,IPR006119, SSF53041,IPR013087,cd00338,SM00857,IPR025827,IPR038109 ,PS51736,IPR006118,PF13408,G3DSA:3.40.50.1390,PF07508,Coil
MAKHAITIPQNPKAALYIRVSTDMQADKDSLPLQESDLRKLADLNGIKDIEVFSDAGFSGKNLNRPAFQSMMERIRAREFSHLYVWKLDRISRNLLDFLELYDELKCYGVAFASKNECFDTQSPGGEAMLKILLIFAELERKTIAERVTAVMLGRANENKWNGGRVPFGYMPGPVTTDANGKKCKSWPVPDPIEAPIVRAIFELYLREKALKKVAAALNTAGYRSRKGTLWSDTTVRCILKNHFYKGEYVYNRQNPNAGRREDFYRSENDWVVVTGQHEAIIPEETWRRCNEMLSKNRSWLAPIGSLVSAQNKYIFGGLLQCAECGYTMNSKDRTRIHDHTHSSYYYCTGRWKAPAVCTGEHSGYASDRVLLPQILKLIARMIEACANAIKFASAEQLVSYLLNDNLIPGATGIEEAQRIYMIVRAHVKHIYGVDQANQYNPNALLVEQSQKEKEKQERALSRLKRAYLFDDGDMSEAEYFEQKAAIEGTIAKLEKQIKSLSGNDIGADEAYLAQLSKLIMIKKLQDTNSDFDYYTLAKAIGRKPIHDFLTEIISRIIIGEQNRIIKIIFKNGVSITLQYEK

SEQ ID NO: 592 - protein, 582 aa, Unknown
  Description of Unknown: Integrase B593 sequence
  PTHR30461:SF3,IPR036162,PS51737,IPR011109,PTHR30461, PS00397,PF00239,G3DSA:1.10.10.2600,IPR006119,SSF53041, cd00338,SM00857,IPR025827,IPR038109,PS51736, IPR006118,PF13408,G3DSA:3.40.50.1390,PF07508,Coil
MNQDKLTDKLSSQKCALYIRVSTHWQVDKASLPVQREDLINYAKYALGIDKYEVFEDAGYSAKNTDRPAFQQMMARLRTGEFSHLLVWKIDRISRNLLDFAGMYSEIKKLGITFVSKNEQFDTSNAMGEAMLKIILVFAELERNMTSERVTAIMLSRANNGQWNGGKVPFGYDYDKENRTFTINEAEASIVNLIYDAYEANNSLLTVSRTLNEKGLLSRKGSPWTPTTISIILKNPFYIGVYRYNYHDETKSGGNARSTQLKNKSEWIYVKDHHPAIIDAERQARIISLLERNRRSNKDSAKSYVRKNTHIFAGLLYCGCCGSQMQSTIDRERSDGYRPSIYACTRKRRFNDCDNKYISDVTIAPFVLNYIANILKAQNNFGKSTSIETFERKLLRGKMFEDVEHIERIGLTEMYDILKRGNLSDAVYSTRLQGTIDEQAIIDERNLLSVEKRKKERALARLKSLYLYNDDAISERDYIIEKKTLTDSIERIDKRLEEIERNSSQQFTMTDDEFMTKASVFIMTHHLQGKRYIEFEKLIRKIDSRVIKDFVSSVVQKVVIKNGRVMSIRFRNGIEHNFLYKT

SEQ ID NO: 593 - protein, 582 aa, Unknown
  Description of Unknown: Integrase B594 sequence
  cd00338,SM00857,G3DSA:1.10.10.2600,IPR036162,PF13408, IPR025827,G3DSA:3.40.50.1390,PS51737,IPR006119,IPR038109, PF07508,IPR011109,SSF53041,PTHR30461,PS51736, Coil,PF00239
MSVDIKWQVPKAQPEASELAVVYARYSSHSQGEQSIEGQLSNARDYAAAHGYTIVHEYVDRAKSGRTDNRAEFQQMLKDTAKRQFSVIILWKVDRFGRNREEIAINKMKCRKNGVRVEYVAETIPDSPEGVILESVLEGFAEYYSLQLSQNIRRGRAESAEKCQSLGGNRPLGYKTGPDKKFVIDENTAPTVKMVFTMYADGKTVTEIVDKLNEMGLRTLRGGPFTKNSLHSILKNKKYIGIYEYQGREIKNGVPRIIEDDVFNKVQEMLKINKRAPAKTWSRADYILTDKLFCGKCGALMFGESGTSKTGAKHNYYICSNKKRFRSCDKKAVRQADIEDTVLNATHELLQDDELLDYIVDRTWEYYLAQDNSQEELRNLQRQLAQTDTAISNLIRAIEAGILTEETKKRMDELTQQKADLKASIADREIARGFHLQKSHIAFYLRSLRDADWSDKEAQKRLIQTFVNAVFVYDDHITLTYNFSGDKNTVTLRDMQRFEDGEEFGCRASRSTKMKDQKPRRFLVFSFYPCGFSGFTILQNATGFYSSCALFALKTHTEMHTKTGLLVRVKNGLQPFLDGIVI

SEQ ID NO: 594 - protein, 582 aa, Unknown
  Description of Unknown: Integrase B595 sequence
  PTHR30461:SF3,IPR036162,PS51737,IPR011109,PTHR30461, PS00028,PS00397,PF00239,G3DSA:1.10.10.2600,IPR006119, SSF53041,IPR013087,cd00338,SM00857,IPR038109, PS51736,IPR006118,G3DSA:3.40.50.1390,PF07508,Coil
MAKHAITIPQNPKAALYIRVSTDMQADKDSLPLQESDLRKLADLNGIKDIEVFCDAGFSGKNLNRPAFRSMMDRIRAREFSHLYVWKLDRISRNLLDFLELYDELKCYGVAFASKNESFDTQSPGGEAMLKILLIFAELERKTIAERVTAVMLGRANENKWNGGRVPFGYMPGPVTTDANGKKCKSWPVPDPIEAPIVRAIFELYLREKALKKVAAALNTAGYRSRKGTLWSDTTVRCILKNHFYKGEYVYNRQNPNAGRREDFYRSENDWVVVTGQHEAIVAEETWRRCNEMLSKNRSWLAPIGSLVSAQDKYIFGGLLQCAECGYTMNSKDRTGAHDHIHSSYYYCTGRWKAPAVCTGEHSGYASDRTLLPQTLKLIARMIEACANAIKFASAEQLVSYLLNDNLIPGAIGIEESQRIFMIVRSHVKHVYGVDQADQFNPNALLVEQSQKEKEKQERALSRLKRAYLFDDGDMSEAEYFEQKAAIEDTIAKLEKQIKSLSGNDIGADEAYLAQLSKLIMIKKLQDTNSDFDYYKLAKAIGRKPIHDFLTEIISRIIIGEQNRIIKIIFKNGVSITLQYEK

SEQ ID NO: 595 - protein, 582 aa, Unknown
  Description of Unknown: Integrase B596 sequence
  PTHR30461:SF3,SM00857,G3DSA:1.10.10.2600,IPR036162,PF13408, PS51737,G3DSA:3.40.50.1390,IPR025827,IPR006119,IPR038109, PF07508,IPR011109,SSF53041,PF00239,PTHR30461, PS51736,Coil,cd00338
MRVSVNLNAQKPDTTTNAVIYARYSSHGQTEQSIEGQLAKGHEYAAAQGYTVVHEYIDRAMTGRNDNREAFQKMLSDTGKHQFQVVIVWKVDRFGRNREEIAFNKHTCKKNGVRVEYVAESLPNSPEAVILESVLEGMAEYYSIQLSQNIRRGQLESAKKCQCVGGSVPLGYTLDSDKHFVIDPQTAPVVKKIFDLYAEGATISEITGQLNEQGIRTIRKQLFTKNSLTKLLKNEKYIGVYTYKDIVRVEGGVPAIVDKSTFDRVQELLKINRRAPSHTWTKVEYLLTDKLFCGHCGSPMVGESGFSHTGAKYSYYGCIKRRREKACDKKPVRQDWIEALVLDETVKLLHDDELMEYIIDRTWEYYQVTDKVQEEKAVLEAQLAEVDKAINNLVRAIEAGIFNAATKSRMDELDAQKAALTASLADLELTSGIRITRDHIEYFLLRLRDLDVKDRECQKRLVQTFVNAVFIYDDGRVKITYNYSGQSSTITLNQIASAEKGKGFVCCLPCSTSSPRFPRGVAALFLFWGKSGVNRLPISAVLCYNGSENGRGGRKNEKAACCVPDGARLLGLCGVRGRNAGR

SEQ ID NO: 596 - protein, 582 aa, Unknown
  Description of Unknown: Integrase B597 sequence
  PTHR30461:SF3,IPR036162,PS51737,IPR011109,PTHR30461, PS00028,PS00397,PF00239,G3DSA:1.10.10.2600,IPR006119, SSF53041,IPR013087,cd00338,SM00857,IPR038109, PS51736,IPR006118,G3DSA:3.40.50.1390,PF07508,Coil
MAKHAISIPQNPKAALYIRVSTDMQADKDSLPLQESDLRKLADLNGIKDIEVFSDAGFSGKNLNRPAFRAMMERIRAREFSHLYVWKLDRISRNLLDFLELYDELKDYGVAFASKNESFDTQSPGGEAMLKILLIFAELERKTIAERVTAVMLGRANENKWNGGRVPFGYMPGPVTTDANGKKCKSWPVPDPIEAPIVRAIFELYLREKALKKVAAALNTAGYRSRKGTLWSDTTVRCILKNHFYKGEYVYNRQNPNAGRREDFYRSENDWVVVTGQHEAIVPEETWRRCNEMLSKNRSWLAPIGSLVSAQDKYIFGGLLQCAECGYTMNSKDRTRIHDHTHSSYYYCTGRWKAPVVCTGEHSGYASDRVLLPQILKLIARMIEACANAIKFASAEQLVSYLLNDNLIPGATGIEEAQRIYMIVRAHVKHIYGVDQANQYNPNALLVEQSQKEKEKQERALSRLKRAYLFDDGDMSEAEYFEQKAAIEGTIAKLEKQIKSLSGNDIGADEAYLAQLSKLIMIKKLQNTNSDFDYYKLAKAIGRKPIHDFLTEIISRIIIGEQNRIIKIIFKNGVSITLQYEK

SEQ ID NO: 597 - protein, 581 aa, Unknown
  Description of Unknown: Integrase B598 sequence
  PTHR30461:SF3,IPR036162,PS51737,IPR011109,PTHR30461, PS00397,PF00239,G3DSA:1.10.10.2600,IPR006119,SSF53041, SM00857,IPR025827,IPR038109,PS51736,cd03768, IPR006118,PF13408,G3DSA:3.40.50.1390,PF07508,Coil
MAYATKVPAASADDRIVAIYVRVSTGYQVDKDSLPFQKKELKAYCKHILHIDMSRVEIFEDAGRSGKNTKRPAYERMMQKVRAGLVSHVLVYKIDRISRNLVDFSLMYDDFKYNRVTFVSLNEQFDTSSAIGEAVLKIILVFAELERKLTSERVKDIMIGRANDGKWNGARVPYGWDWDSSAGCPVHSEKEAPFARAMYEMYLEVKSTGKIRDYNNAHKIPTKRGGEWTSKTVGDFLRNPMNKGDYRYNYRESARGRKKPADEIVYLEGVFDPLVDPEIWEKVNKIMDINRDQRNMGGLHPIEKNCNVFAGLIQCGSCGSGYLVGKKDKRRKNGFTPSLYYCGAKTRAIHCQNPNVSDVKIGPFVINYISAMVRVSNERQKIKSPEGLEEMLLSDKAVFADIMGLSSDSLNTTFELLTGKSATGGALWRADLVDQEGSAADPAEIENLKGQIRKYERAKERLEDAYYFSDDGMSEKEYLEKKNRFDSMRVSAENKLKELTETHIASGVDESSFMKSASAFLLTHKIRAGSHIVYSDLAGMVEEESIKEFFNLVLDHIVVKDRRVTEIIFANGLSHKFIYRD

SEQ ID NO: 598 - protein, 581 aa, Unknown
  Description of Unknown: Integrase B599 sequence
  SM00857,G3DSA:1.10.10.2600,IPR036162,PF13408,PS51737, G3DSA:3.40.50.1390,IPR025827,IPR006119,IPR038109,PF07508, IPR011109,SSF53041,PTHR30461,PS51736,cd00338, PF00239
MSEKIINCAIYTRKSTEEGLEQDFNSLDNQYEFCTNYLKSLNDPALQLLPARYDDGGYSGGSLNRPALQRLLADIQCGLVNRVIIYKIDRLTREIRDFFKLLDIFEKYNVEFVSVKENQYYNTTTAIGRLMVNMFLVFAQFERENAGDRIRDKIATSKAKGMWMGGCPPYGYDIGDRCLVINETEAQNVRFIYQTFCNTHSLADTTDALNSGGIRTKRYTTRQGRTFGGRKFSVKTVQRILQNPLYKGMVAHRGKQYPGQHAAIIDAAQFDMVQAVFAAHKEKRKTRRPKMPSSGGERETAALTGFIFCGCCGSAMTPSYCCKGDIRYHYYRCYRRASKLEDKCPINQIRTSEIDRVVMEQVLAILKSRDFFVQYISHHHEFDVSTAFALFNSLDDVWNSLFETEKRRILRELLAKVTIYKDKIVLDVKKAGLAGVFAELSQNNRLAEVEYKENETFQISVAYRATRLANGAKIIVPATAKEESRFNGSLRLARQIAKGFAWRKMMESGLSLQELTASAKTNERDIRFAMRLSMIDPAVVESVLSGKSPEFLTYAFMKKHPIPLLWSDQRKLYGFEERKQQ

SEQ ID NO: 599 - protein, 581 aa, Unknown
  Description of Unknown: Integrase B600 sequence
  PTHR30461:SF3,IPR036162,PS51737,IPR011109,PTHR30461, PS00397,PF00239,G3DSA:1.10.10.2600,IPR006119,SSF53041, SM00857,IPR025827,IPR038109,PS51736,cd03768, IPR006118,PF13408,G3DSA:3.40.50.1390,PF07508,Coil
MSRTTNKRPGKAKSGLSRKQKVAIYIRVSTLYQVDRDSLPMQRKDLIAYASLILGIEEYEIFEDAGYSGKNTDRPAFQEMMQRIRKGEFTHVLVWKIDRISRNLLDFAEMYEELQDLRVTFVSKNEQFDTSTAIGEAMLKIILVFAELERNMTSERVTATMISRANSGLWNGGRIPYGYDYDPDKTEFSIREDEEKVCQMIKNDYMEHKSLVHTSRMLNAAGYKTRAGVEWSPTAVWIIISSPFYAGIYRYNRYKGTERRVENPEDEWIMIQNHHPAIFSLEEHEKMLAILDENSRNHRSVGQRHQTERIHIFGGIAYCGKCGSKMVSTPGRLHVNGYRPTNYSCPKHRKTKECDNPTVSDTQVGEFVINYILNMLGAKKKFSTIENPEDLERCLLYGNTFSEVEHIDGNGLNEYFNLLSRYGSDDSYTFSVKKSRKKKAEVDPEVEALRKEKEKQERAMKRLQDLYLYSDTSMSEKDFIIRKTEISKRLEEINAMLGMVAKNSEPSLSDEEFVRQASHLLISRELQNRQYIYFKNLAQSVSPEILKVYMETVLDSVLLVDGRVSSIVFRNGLTHKFKYKS

SEQ ID NO: 600 - protein, 581 aa, Unknown
  Description of Unknown: Integrase B601 sequence
  PTHR30461:SF3,IPR036162,PS51737,IPR011109,PTHR30461, PS00397,PF00239,G3DSA:1.10.10.2600,IPR006119,SSF53041, SM00857,IPR025827,IPR038109,PS51736,cd03768, IPR006118,PF13408,G3DSA:3.40.50.1390,PF07508,Coil
MAYAMKVPAASADDRIVAIYVRVSTGYQVDKDSLPFQKKELKAYCKHILHVDMSRVEIFEDAGRSGKNTKRPAYERMMQKVRAGLVSHVLVYKIDRISRNLVDFSLMYDDFKYNRVTFVSLNEQFDTSSAIGEAVLKIILVFAELERKLTSERVKDIMIGRANEGKWNGARVPYGWDWDSSAGWPVHSKKEAPFGRAMYEMYLEVKSTGKIRDYNNAHKIPTKRGGEWTSKTVGDFLRNPMNKGDYRYNYRESAHGRKKPINEVVYLEGVFDPLIDPEIWEKVNKIMDSNRDKRNMGGLHPVEKNCNVFAGLIQCGSCGSGYLVGKKDKRRKNGFTPSMYYCGAKTRAIHCQNLNVSDVKIGPFVINYISAMVRVSNERRKIKAPEDLEEMLLSDKAVFADIMGLSSDSLNNTFELLTGKSATGGALWRADLVDQEGAAADPAEIESLKDQIRKYERAKERLEDAYYFSDDGMSEKEYLEKKNRFDSGRVAAENKLKELTETHIASGVDESAFMKSASAFLLTHKIRAGSHIVYSDLAGMVEEESIKEFFNLVLDHITVKDRCVTEIVFANGLSHKFIYRD

SEQ ID NO: 601 - protein, 581 aa, Unknown
  Description of Unknown: Integrase B602 sequence
  PTHR30461:SF3,IPR036162,PS51737,IPR011109,PTHR30461, PS00397,PF00239,G3DSA:1.10.10.2600,IPR006119,SSF53041, SM00857,IPR025827,IPR038109,PS51736,cd03768, IPR006118,PF13408,G3DSA:3.40.50.1390,PF07508,Coil
MAYAMKVPAASADDRAVAIYVRVSTGYQVDKDSLPFQKKELKAYCKHILHVDMSRVEIFEDAGRSGKNTKRPAYERMMQKVRAGLVSHVLVYKIDRISRNLVDFSLMYDDFKYNRVTFVSLNEQFDTSSAIGEAVLKIILVFAELERKLTSERVKDIMIGRANEGKWNGARVPYGWDWDSSAGWPVHSEKEAPFGRAMYEMYLKVKSTGKIRDYNNAHGIPTKRGGEWTSKTVGDFLRNPMNKGDYRYNYRESARGRKKPIDEVVYLEGVFDPLIDPEIWEKVNKIMDINRDKRNMGGSHPVEKNCNVFAGLIQCGSCGSGYLVGKKDKRRKNGFTPSMYYCSAKTRAIHCQNLNVSDVKIGPFVINYISAMVRVSNERRKIKTPEDLEEMLLSDKAVFADIMGLSSDSLNNTFELLTGKSATGGALWRADLVDQEGAAADPAEIENLKDQIRKYERAKERLEDAYYFSDDGMSEKEYLEKKNRFDSGRVAAENKLKELTETHIASGVDESAFMKSASAFLLTHKIRAGSHIVYSDLAGMVEEESIKEFFNLVLDHITVKDRRVTEIVFANGLSHKFIYRD

SEQ ID NO: 602 - protein, 581 aa, Unknown
  Description of Unknown: Integrase B603 sequence
  PTHR30461:SF3,IPR036162,PS51737,IPR011109,PTHR30461, PS00397,PF00239,G3DSA:1.10.10.2600,IPR006119,SSF53041, SM00857,IPR025827,IPR038109,PS51736,cd03768, IPR006118,PF13408,G3DSA:3.40.50.1390,PF07508,Coil
MARKRTNLIGNTPSVRETKVAIYIRVSTIHQVDKDSIPMQKKDLIAYCQLILGTDNYEIFEDAGYSGKNTDRPAFQNMMGRIRKGEFTHVLVWKIDRVSRNLLDFAEMYEELRSLRVTFVSKNEQFDTSTAIGEAMLKIILVFAELERNMTSERVTATMISRANSGQWNGGRIPFGYSYDPKEKVFSIREDEASICRELKDLYLLNRSLAYVSRALNEKGYKTRAGVSWSPHSVWIIASSPFYAGIYRYNRYKGVESRTINPEEEWVMIQNHHPAIFTLEEHQAMRSIMKSNKRNMDNLPGRVHLSTKTHIFQGIMYCDKCGSKMVSTPGRLHVDGYRTSNYGCPLRRNTKKCNNPTVNDIVIGEFVINYILNMLNAKKTFSTINTPDELNVALLSGSVFSEVSSVEENGLNSFFNLLSRYGSDRSYIFSVKSPRKKKAAVDPELSKLRKEKEKQERALQRLQNLYLYSETSMSEKDFIIRKSEISSHLDNINRQLGLMTQDQASFLSDEEFIKQASHLLIQKELKNKKYIYFKKLVSTVDPDILKAYMETILDSIYTADGKITAITFKNGLTHRFIYKDK

SEQ ID NO: 603 - protein, 581 aa, Unknown
  Description of Unknown: Integrase B604 sequence
  PTHR30461:SF3,IPR036162,PS51737,IPR011109,PTHR30461, PS00397,PF00239,G3DSA:1.10.10.2600,IPR006119,SSF53041, SM00857,IPR025827,IPR038109,PS51736,cd03768, IPR006118,PF13408,G3DSA:3.40.50.1390,PF07508,Coil
MAYAMKVPAASADDRIVAIYVRVSTGYQVDKDSLPFQKKELKAYCKHILHVDMSRVEIFEDAGRSGKNTKRPAYERMMQKVRAGLVSHVLVYKIDRISRNLVDFSLMYDDFKYNRVTFISLNEQFDTSSAIGEAVLKIILVFAELERKLTSERVKDIMIGRANEGKWNGARVPYGWDWDSSAMWPVHSEKEAPFGRAMYEMYLEVKSTGKIRDYNNSHGIPTKRGGEWTSKTVGDFLRNPMNKGDYRYNYRESARGRKKPVDEVVYLEGVFDPLIDPEIWEKVNKIMDINRDQRNIVGSHPVEKNCNVFAGLIQCGSCGSGYLVGKKDKRRKNGFTPSMYYCGAKTRAIHCQNLNVSDVKIGPFVINYISAMVRVSNERRKIKSPEDLEEMLLSDKAVFADIIGLSSDSLNNTFELLTGKSATGGALWRADLVDQEGAAADPAEIENLKDRIRKYERAKERLEDAYYFSDDGMSEKEYLEKKNRFDSGRVAAENKLKELTETHIASGVDESAFMKSASAFLLTHKIRAGSHIVYSDLAGMVEEESIKEFFNLVLDHIVVKDRRITEIVFANGLSHKFVYRD

SEQ ID NO: 604 - protein, 581 aa, Unknown
  Description of Unknown: Integrase B605 sequence
  PTHR30461:SF3,IPR036162,PS51737,IPR011109,PTHR30461, PS00397,PF00239,G3DSA:1.10.10.2600,IPR006119,SSF53041, SM00857,IPR025827,IPR038109,PS51736,cd03768, IPR006118,PF13408,G3DSA:3.40.50.1390,PF07508,Coil
MARKRTNLIGNTPSVRETKVAIYIRVSTIHQVDKDSIPMQKKDLIAYCQLILGTDNYEIFEDAGYSGKNTDRPAFQNMMGRIRKGEFTHVLVWKIDRVSRNLLDFAEMYEELRSLRVTFVSKNEQFDTSTAIGEAMLKIILVFAELERNMTSERVTATMISRANSGQWNGGRIPFGYSYDPKEKVFSIREDEASICRELKDLYLLNRSLAYVSRALNEKGYKTRAGVSWSPHSVWIIASSPFYAGIYRYNRYNGVESRTINPEEEWVMIQNHHPAIFTLEEHQAMRSIMKSNKRNMDNLPGRVHLSTKTHIFQGIMYCDKCGSKMVSTPGRLHVDGYRTSNYGCPLRRNTKKCNNPTVNDIVIGEFVINYILNMLNAKKTFSTINTPDELNAALLSGSVFSEVSSVEENGLNSFFNLLSRYGSDRSYIFSVKSPRKKKAAVDPELSKLRKEKEKQERALQRLQDLYLYSETSMSEKDFIIRKSEISSHLDNINRQLGLMTQDQASFLSDEEFIKQASHLLIQKELKNKKYIYFKKLVSTVDPDILKAYMETILDSIYTADGKITAITFKNGLTHRFIYKDK

SEQ ID NO: 605 - protein, 581 aa, Unknown
  Description of Unknown: Integrase B606 sequence
  PTHR30461:SF3,IPR036162,PS51737,IPR011109,PTHR30461, PS00397,PF00239,G3DSA:1.10.10.2600,IPR006119,SSF53041, SM00857,IPR025827,IPR038109,PS51736,cd03768, IPR006118,PF13408,G3DSA:3.40.50.1390,PF07508,Coil
MARKRTNLIGNTPSVRETKVAIYIRVSTIHQVDKDSIPMQKKDLIAYCQLILGTDNYEIFEDAGYSGKNTDRPAFQNMMGRIRKGEFTHVLVWKIDRVSRNLLDFAEMYEELRSLRVTFVSKNEQFDTSTAIGEAMLKIILVFAELERNMTSERVTATMISRANSGQWNGGRIPFGYSYDPKEKVFSIREDEASICRELKDLYLLNRSLAYVSRALNEKGYKTRAGVSWSPHSVWIIASSPFYAGIYRYNRYKGVESRTINPEEEWVMIQNHHPAIFTLEEHQTMRSIMKSNQRNMDNFPGRVHLSTKTHIFQGIMYCDKCGSKMVSTPGRLHVDGYRTSNYGCPLRRNTKKCNNPTVNDIVIGEFVINYILNMLNAKKTFSTINTPDELNAALLSGSVFSEVSSVEENGLNSFFNLLSRYGSDRSYIFSVKSPRKKKAAVDPELSKLRKEKEKQERALQRLQDLYLYSETSMSEKDFIIRKSEISSHLDNINRQLGLMTQDQASFLSDEEFIKQASHLLIQKELKNKKYIYFKKLVSTMDPDILKAYMETILDSIYTADGKITAITFKNGLTHRFIYKDK

SEQ ID NO: 606 - protein, 581 aa, Unknown
  Description of Unknown: Integrase B607 sequence
  PTHR30461:SF3,IPR036162,PS51737,IPR011109,PTHR30461, PS00397,PF00239,G3DSA:1.10.10.2600,IPR006119,SSF53041, SM00857,IPR025827,IPR038109,PS51736,cd03768, IPR006118,PF13408,G3DSA:3.40.50.1390,PF07508,Coil
MARKRTNLIGNTPSVRETKVAIYIRVSTIHQVDKDSIPMQKKDLIAYCQLILGTDNYEIFEDAGYSGKNTDRPAFQNMMGRIRKGEFTHVLVWKIDRVSRNLLDFAEMYEELRSLRVTFVSKNEQFDTSTAIGEAMLKIILVFAELERNMTSERVTATMISRANSGQWNGGRIPFGYSYDPKEKVFSIREDEASICRELKDLYLLNRSLVYVSRALNEKGYKTRAGANWSPHSVWIIASSPFYAGIYRYNRYKGVENRTINPEKEWVMIQNHHPAIFTLEEHHTMQSLLKSNQRNMDNLPGRIHTSEKTHIFQGLMYCDKCGSKMVSTPGRLHVDGYRASNYSCPLRRNTKKCNNPTINDIIVGEFVINYILNMLNAKKTFSTINTPDELNTALLSGSVFSEVSSIEENGLNSFFNLLSRYGSDRSYVFSVKSPRRKKAAVNPELSRLRKEKEKQERALQRLQDLYLYSETSMPEKDFIIRQSEISSHLNNINRQLGLMTQDQASFLSDEEFIKQASHLLIQKELKNKKYIYFKKLVSTVDPDILKAYMETILDSIYTADGKITAITFKNGLTHRFIYKDK

SEQ ID NO: 607 - protein, 581 aa, Unknown
  Description of Unknown: Integrase B608 sequence
  PTHR30461:SF3,IPR036162,PS51737,IPR011109,PTHR30461, PS00397,PF00239,G3DSA:1.10.10.2600,IPR006119,SSF53041, SM00857,IPR025827,IPR038109,PS51736,cd03768, IPR006118,PF13408,G3DSA:3.40.50.1390,PF07508,Coil
MSRTTNKRPGNAKSGLSRKQKVAIYIRVSTLYQVDRDSLPMQRKDLIAYASLILGIEEYEIFEDAGYSGKNTDRPAFQEMMQRIRKGEFTHVLVWKIDRISRNLLDFAEMYEELQDLRVTFVSKNEQFDTSTAIGEAMLKIILVFAELERNMTSERVTATMISRANNGLWNGGRIPFGYVYDPDKTAFSIREDEEKVCQMIKNDYMEHKSLVHTSRMLNASGYKTRAGVEWSPTAVWIIISSPFYAGIYRYNRYKGTERRVENPEDEWIMIQNHHPAIFSLEEHEKMLAILDENSRNRRSVGQRHQTERVHIFGGIAYCGKCGSKMVSTPGRLHVNGYRPTNYSCPKHRKTKECDNPTVSDTQVGEFVINYILNMLGAKKKFSAIENPEDLERCLLYGNTFSEVEHIDSNGLNEYFNLLSRYSSDDSYTFSVKKSRKKKAEVDPEVAALRKEKEKQERAMKRLQDLYLYSDTSMSEKDFIIRKTEISKRLEEINAMLGMVAKNSEPSLSDEEFVRQASHLLISRELQNRQYIYFKNLAQNVSPEILKAYMETVLDSVLLVDGRVSSIVFRNGLTHKFKYKS

SEQ ID NO: 608 - protein, 581 aa, Unknown
  Description of Unknown: Integrase B609 sequence
  PTHR30461:SF3,IPR036162,PS51737,IPR011109,PTHR30461, PS00397,PF00239,G3DSA:1.10.10.2600,IPR006119,SSF53041, SM00857,IPR025827,IPR038109,PS51736,cd03768, IPR006118,PF13408,G3DSA:3.40.50.1390,PF07508,Coil
MARKRTNLIGNTPSVRETKVAIYIRVSTIHQVDKDSIPMQKKDLIAYCQLILGTDNYEIFEDAGYSGKNTDRPAFQNMMGRIRKGEFTHVLVWKIDRVSRNLLDFAEMYEELRSLRVTFVSKNEQFDTSTAIGEAMLKIILVFAELERNMTSERVTATMISRANSGQWNGGRIPFGYSYDPKEKIFSIREDEASICRELKDLYLLNRSLAYVSRALNEKGYKTRAGVSWSPHSVWIIASSPFYAGIYRYNRYKGVESRTINPEEEWVMIQNHHPAIFTLEEHQAMRSIMKSNQRNMDNLPGRVHLSTKTHIFQGIMYCDKCGSKMVSTPGRLHVDGYRTSNYGCPLRRNTKKCNNPTVNDIVIGEFVINYILNMLNAKKTFSTINTPDELNAALLSGSVFSEVSSVEENGLNSFFNLLSRYGSDRSYIFSVKSPRKKKAAVDPELSKLRKEKEKQERALQRLQNLYLYSETSMSEKDFIIRKSEISSHLDNINRQLGLMTQDQASFLSDEEFIKQASHLLIQKELKNKKYIYFKKLVSTVDPDILKAYMETILDSIYTADGKITAITFKNGLTHRFIYKDK

SEQ ID NO: 609 - protein, 581 aa, Unknown
  Description of Unknown: Integrase B610 sequence
  PTHR30461:SF3,IPR036162,PS51737,IPR011109,PTHR30461, PS00397,PF00239,G3DSA:1.10.10.2600,IPR006119,SSF53041, SM00857,IPR025827,IPR038109,PS51736,cd03768, IPR006118,PF13408,G3DSA:3.40.50.1390,PF07508,Coil
MAYAMKISAASADDRIVAIYVRVSTGYQVDKDSLPFQKKELKAYCKHILHIDLSRVEIFEDAGRSGKNTKRPAYERMMQKVRAGLVSHVLVYKIDRISRNLVDFSLMYDDFKYNRVTFVSLNEQFDTSSAIGEAVLKIILVFAELERKLTSERVKDIMIGRANDGKWNGARVPYGWDWESSAGCPVHSKKEASFARAMYDMYLEVKSTGKIRDYNNAHGIPTKRGGEWTSKTVGDFLRNPMNKGDYRYNFRESARGRKKPEEEVVYLEGVFDPLVDPDVWEKVNKIMDSNRDKRNIGGLHPIESNCNVFAGLIQCGLCGSGYLVGKKDKRRKNGFTPSMYYCGAKTRAIHCQNLNVSDVKIGPFVINYISAMVRVSNERRKIKTPEDLEEILLSDKAVFADIMGLSSDSLNNTFELLTGKSATGGALWRADLVDQEGAAADPAEIENLKDQIRKYERAKERLEDAYYFSDDGMSEKEYLEKKNRFDSGRVAAENKLKELTETHIASGVDESAFMKSASAFLLTHKIRAGSHIIYSDLAGMVEEESIKEFFNLVLDHITVKDRRVTEIVFANGLSHKFIYRD

SEQ ID NO: 610 - protein, 581 aa, Unknown
  Description of Unknown: Integrase B611 sequence
  PTHR30461:SF3,IPR036162,PS51737,IPR011109,PTHR30461, PS00397,PF00239,G3DSA:1.10.10.2600,IPR006119,SSF53041, SM00857,IPR025827,IPR038109,PS51736,cd03768, IPR006118,PF13408,G3DSA:3.40.50.1390,PF07508,Coil
MARKRTNLIGNTPSVRETKVAIYIRVSTIHQVDKDSIPMQKKDLIAYCQLILGTDNYEIFEDAGYSGKNTDRPAFQNMMGRIRKGEFTHVLVWKIDRVSRNLLDFAEMYEELRSLRVTFVSKNEQFDTSTAIGEAMLKIILVFAELERNMTSERVTATMISRANSGQWNGGRIPFGYSYDPKEKVFSIREDEASICRELKDLYLLNRSLVYVSRALNEKGYKTRAGVSWSPHSVWIIASSPFYAGIYRYNRYKGVESRTINPEEEWVMIQNHHPAIFTLEEHQAMRSIMKSNQRNMDNLPGRVHLSTKTHIFQGIMYCDKCGSKMVSTPGRLHVDGYRTSNYGCPLRRNTKKCNNPTVNDIIIGEFVINYILNMLNAKKTFSTINTPDELNAALLSGSVFSEVSSVEENGLNSFFNLLSRYGSDRSYIFSVKSPRKKKAAVDPELSKLRKEKEKQERALQRLQDLYLYSETSMSEKDFIIRKSEISSHLDNINRQLGLMTQDQASFLSDEEFIKQASHLLIQKELKNKKYIYFKKLVSTVDPDILKAYMETILDSIYTADGKITAITFKNGLTHRFIYKDK

SEQ ID NO: 611 - protein, 581 aa, Unknown
  Description of Unknown: Integrase B612 sequence
  PTHR30461:SF3,IPR036162,PS51737,IPR011109,PTHR30461, PS00397,PF00239,G3DSA:1.10.10.2600,IPR006119,SSF53041, SM00857,IPR025827,IPR038109,PS51736,cd03768, IPR006118,PF13408,G3DSA:3.40.50.1390,PF07508,Coil
MSRTTNKRPGNAKSGLSRKQKVAIYIRVSTLYQVDRDSLPMQRKDLIAYASLILGIEEYEIFEDAGYSGKNTDRPAFQEMMQRIRKGEFTHVLVWKIDRISRNLLDFAEMYEELQDLRVTFVSKNEQFDTSTAIGEAMLKIILVFAELERNMTSERVTATMISRANSGLWNGGRIPFGYDYDPDKTAFSIREDEEKVCQMIKNDYMEHKSLVHTSRMLNASGCKTRAGAEWSPTAVWIIISSPFYAGIYRYNRYKGTERRVENPEDEWIMIQNHHPAIFSLEEHEKMLAILDENSRNHRSVGQKHQTERVHIFGGIAYCGKCGSKMVSTPGRLHANGYRPTNYSCPKHRKTKECDNPTVSDTQVGEFVINYILNMLGAKKKFSTIENPEDLERCLLYGNTFSEVEHIDSNGLNEYFNLLSRYSSDDSYTFSVKKSRKKKAEVDPEVEALRKEKEKQERAMKRLQDLYLYSDTSMSEKDFIIRKTEISKRLEEINAMLGMVAKNSEPSLSDEEFVRQASHLLISRELQNRQYIYFKNLAQNVSPEILKAYMETVLDSVLLVDGRVSSIVFRNGLTHKFKYKS

SEQ ID NO: 612 - protein, 581 aa, Unknown
  Description of Unknown: Integrase B613 sequence
  PTHR30461:SF3,IPR036162,PS51737,IPR011109,PTHR30461, PS00397,PF00239,G3DSA:1.10.10.2600,IPR006119,SSF53041, SM00857,IPR025827,IPR038109,PS51736,cd03768, IPR006118,PF13408,G3DSA:3.40.50.1390,PF07508,Coil
MSRTTNKRPGKAKSGLSRKQKVAIYIRVSTLYQVDRDSLPMQRKDLIAYASLILGIEEYEIFEDAGYSGKNTDRPAFQEMMQRIRKGEFTHVLVWKIDRISRNLLDFAEMYEELQDLRVTFVSKNEQFDTSTAIGEAMLKIILVFAELERNMTSERVTATMISRANSGLWNGGRIPFGYDYDPDKTAFSIREDEEKVCQMIKNDYMEHKSLVHTSRMLNASGYKTRAGAEWSPTAVWIIISSPFYAGIYRYNRYKGTERRVENPEDEWIMIQNHHPAIFSLEEHEKMLAILDENSRNRRSVGQRHQTERVHIFGGIAYCGKCGSKMVSTPGRLHVNGYRPTNYSCPKHRKTKECDNPTVSDTQVGEFVINYILNMLGAKKKFSAIENPEDLERCLLYGNTFSEVEHIDSNGLNEYFNLLSRYSSDDSYTFSVKKSRKKKAEVDPEVAALRKEKEKQERAMKRLQDLYLYSDTSMSEKDFIIRKTEISKRLEEINAMLGMVAKNSEPSLSDEEFVRQASHLLISRELQNRQYIYFKNLAQNVSPEILKAYMETVLDSVLLVDGRVSSIVFRNGLTHKFKYKS

SEQ ID NO: 613 - protein, 581 aa, Unknown
  Description of Unknown: Integrase B614 sequence
  PTHR30461:SF3,IPR036162,PS51737,IPR011109,PTHR30461, PS00397,PF00239,G3DSA:1.10.10.2600,IPR006119,SSF53041, SM00857,IPR025827,IPR038109,PS51736,cd03768, IPR006118,PF13408,G3DSA:3.40.50.1390,PF07508,Coil
MARKRTNLIGNTPSVRETKVAIYIRVSTIHQVDKDSIPMQKKDLIAYCQLILGTDNYEIFEDAGYSGKNTDRPAFQNMMGRIRKGEFTHVLVWKIDRVSRNLLDFAEMYEELRSLRVTFVSKNEQFDTSTAIGEAMLKIILVFAELERNMTSERVTATMISRANSGQWNGGRIPFGYSYDPKEKVFSIREDEASICRELKDLYLLNRSLAYVSRALNEKGYKTRAGVNWSPHSVWIIASSPFYAGIYRYNRYKGVESRTINPEEEWVMIQNHHPAIFTLEEHQAMRSIMKSNQRNMDNLPGRVHLSTKTHIFQGIMYCDKCGSKMVSTPGRLHVDGYRTSNYGCPLRRNTKKCNNPTVNDIVIGEFVINYILNMLNAKKTFSTINTPDELNAALLSGSVFSEVSSVEENGLNSFFNLLSRYGSDRSYIFSVKSPRKKKAAVDPELSKLRKEKEKQERALQRLQDLYLYSETSMSEKDFIIRKSEISSHLDNINRQLGLMTQDQASFLSDEEFIKQASHLLIQKELKNKKYIYFKKLVSTVDPDILKAYMETILDSIYTADGKITAITFKNGLTHRFIYKDK

SEQ ID NO: 614 - protein, 581 aa, Unknown
  Description of Unknown: Integrase B615 sequence
  PTHR30461:SF3,IPR036162,PS51737,IPR011109,PTHR30461, PS00397,PF00239,G3DSA:1.10.10.2600,IPR006119,SSF53041, SM00857,IPR025827,IPR038109,PS51736,cd03768, IPR006118,PF13408,G3DSA:3.40.50.1390,PF07508,Coil
MSRTTNKRPGKAKSGLSRKQKVAIYIRVSTLYQVDRDSLPMQRKDLIAYASLILGIEEYEIFEDAGYSGKNTDRPAFQEMMQRIRKGEFTHVLVWKIDRISRNLLDFAEMYEELQELRVTFVSKNEQFDTSTAIGEAMLKIILVFAELERNMTSERVTATMISRANSGLWNGGRIPFGYDYDPDKTAFSIREDEEKVCQMIKNDYMEHKSLVHTSRMLNASGYKTRAGAEWSPTAVWIIISSPFYAGIYRYNRYKGTERRVENPEDEWIMIQNHHPAIFSLEEHEKMLAILDENSRNHRSVGQKHQTERVHIFGGIAYCGKCGSKMVSTPGRLHANGYRPTNYSCPKHRKTKECDNPTVSDTQVGEFVINYILNMLRAKKRFSTIENPEDLERCLLYGNTFSEVEHIDGNGLNEYFNLLSRYGSDDSYTFSVKKSRKKKAEVDPEVETLRKEKEKQERAMKRLQDLYLYSDTSMSEKDFIIRKTEISKRLEEINAMLGMVAKNSEPSLSDEEFVRQASHLLISRELQNRQYIYFKNLAQNVSPEILKAYMETVLDSVLLVDGRVSSIVFRNGLTHKFKYKS

SEQ ID NO: 615 - protein, 581 aa, Unknown
  Description of Unknown: Integrase B616 sequence
  PTHR30461:SF3,cd00338,SM00857,G3DSA:1.10.10.2600,IPR036162, PF13408,IPR025827,PS51737,G3DSA:3.40.50.1390,IPR006119, IPR038109,PF07508,IPR011109,SSF53041,PTHR30461, PS51736,Coil,PF00239
MEDFYKIKEALKIMPITQIPLRVVIYSRVSTDSEEQLTSITNQKTYYKKLIENTPKWTLIEEYVDEGITGTSTKKREAFQRMISDGIEGKFDMIITKSVSRFARNTLDSLQNVRILTAHGVGVWFHSDGILTFEADGELRLSIMSAFAQGESEKKSEAVRFGLQESIKRGTVFGFDNMFGYRLRGGKLEIDEAEVPMIQKIFELYATDRYSMNQIEKILYDDGYRNHNGNRISHATLSHIIRNPKYKGVFAGRKVRKKDLFDDRVEMLPQNEWVIIDGEKGRSIVPPIVSEELWAKANRVLEARSIDVKTRQNKCNHPNLLTGKLWCVHCNLPYHRKASKTSNAVLNSAWVCAGKIRNGTASCPSIYLYENEVKQCLYELFIEDDFDIDDYIDQYIKLVSEASSSEKNTNRQNELEKELALIEKKKTKILEFNVLGQVSDQDYIAQNNALNEEYKRKSEELANVRLALDTKKRTEEDFEKMRGALQQLKGRKNIDFIDPTFVRTYIERIDVSMIDGRTMNMDVILKTGDKISRILKKNLSSVNRRKHIYTGRRLTFRRKTPYGRGSHEIPIQINICFFSLN

SEQ ID NO: 616 - protein, 581 aa, Unknown
  Description of Unknown: Integrase B617 sequence
  PTHR30461:SF3,IPR036162,PS51737,IPR011109,PTHR30461, PS00397,PF00239,G3DSA:1.10.10.2600,IPR006119,SSF53041, SM00857,IPR025827,IPR038109,PS51736,cd03768, IPR006118,PF13408,G3DSA:3.40.50.1390,PF07508,Coil
MARKRTNLIGNTPSVRETKVAIYIRVSTIHQVDKDSIPMQKKDLIAYCQLILGTDNYEIFEDAGYSGKNTDRPAFQNMMGRIRKGEFTHVLVWKIDRVSRNLLDFAEMYEELRSLRVTFVSKNEQFDTSTAIGEAMLKIILVFAELERNMTSERVTATMISRANSGQWNGGRIPFGYSYDPKEKVFSIREDEASICRELKDLYLLNRSLVYVSRALNEKGYKTRAGVSWSPHSVWIIASSPFYAGIYRYNRYNGVESRTINPEEEWVMIQNHHPAIFTLEEHQAMRSIMKSNKRNMDNLPGRVHLSTKTHIFQGIMYCDKCGSKMVSTPGRLHVDGYRTSNYGCPLRRNTKKCNNPTVNDIVIGEFVINYILNMLNAKKTFSTINTPDELNAALLSGSVFSEVSSVEENGLNSFFNLLSRYGSDRSYIFSVKSPRKKKAAVDPELSKLRKEKEKQERALQRLQDLYLYSETSMSEKDFIIRKSEISSHLDNINRQLGLMTQDQASFLSDEEFIKQASHLLIQKELKNKKYIYFKKLVSTVDPDILKAYMETILDSIYTADGKITAITFKNGLTHRFIYKDK

SEQ ID NO: 617 - protein, 581 aa, Unknown
  Description of Unknown: Integrase B618 sequence
  PTHR30461:SF3,IPR036162,PS51737,IPR011109,PTHR30461, PS00397,PF00239,G3DSA:1.10.10.2600,IPR006119,SSF53041, SM00857,IPR025827,IPR038109,PS51736,cd03768, IPR006118,PF13408,G3DSA:3.40.50.1390,PF07508,Coil
MAYAMKVPAASADDRIVAIYVRVSTGYQVDKDSLPFQKKELKAYCKHILHVDMSRVEIFEDAGRSGKNTKRPAYERMMQKVRAGLVSHVLVYKIDRISRNLVDFSLMYDDFKYNRVTFVSLNEQFDTSSAIGEAVLKIILVFAELERKLTSERVKDIMIGRANEGKWNGARVPYGWDWDSSAGWPVHSEKEAPFGRAMYEMYLEVKSTGKIRDYNNAHKIPTKRGGEWTSKTVGDFLRNPMNKGDYRYNYRESARGRKKPIDEVVYLEGVFDPLIDPEIWEKVNKIMDINRDKRNMVGSHPVEKNCNVFAGLIQCGSCGSGYLVGKKDKRRKNGFTPSMYYCGAKTRAIHCQNLNVSDVKIGPFVINYISAMVRVSNERRKIKTPEDLEEMLLSDKVVFADIMGLSSDSLNNTFELLTGKSATGGALWRADLVDQEGAAADPAEIESLKDQIRKYERAKERLEDAYYFSDDGMSEKEYLEKKNRFDSGRVAAENKLKELTETHIASGVDESAFMKSASAFLLTHKIRAGSHIVYSDLAGMVEEESIKEFFNLVLDHITVKDRCVTEIVFANGLSHKFIYRD

SEQ ID NO: 618 - protein, 581 aa, Unknown
  Description of Unknown: Integrase B619 sequence
  PTHR30461:SF3,IPR036162,PS51737,IPR011109,PTHR30461, PS00397,PF00239,G3DSA:1.10.10.2600,IPR006119,SSF53041, SM00857,IPR025827,IPR038109,PS51736,cd03768, IPR006118,PF13408,G3DSA:3.40.50.1390,PF07508,Coil
MSRTTNKRPGKAKSGLSRKQKVAIYIRVSTLYQVDRDSLPMQRKDLIAYASLILGIEEYEIFEDAGYSGKNTDRPAFQEMMQRIRKGEFTHVLVWKIDRISRNLLDFAEMYEELQDLRVTFVSKNEQFDTSTAIGEAMLKIILVFAELERNMTSERVTATMISRANSGLWNGGRIPFGYDYDPDKTAFSIREDEEKVCQMIKNDYMEHKSLVHTSRMLNASGYKTRAGAEWSPTAVWIIISSPFYAGIYRYNRYKGTERRVENPEDEWIMIQNHHPAIFSLEEHEKMLAILDENSRNHRSVGQKHQTERVHIFGGIAYCGKCGSKMVSTPGRLHANGYRPTNYSCPKHRKTKECDNPTVSDTQVGEFVINYILNMLGAKKKFSTIENPEDLERCLLYGNTFSEVEHIDSNGLNEYFNLLSRYSSDDSYTFSVKKSRKKKAEVDPEVEALRKEKEKQERAMKRLQNLYLYSDTSMSEKDFIIRKTEISKRLEEINAMLGMVAKNSEPSLSDEEFVRQASHLLISRELQNRQYIYFKNLAQNVSPEILKAYMETVLDSVLLVDGRVSSIVFRNGLTHKFKYKS

SEQ ID NO: 619 - protein, 581 aa, Unknown
  Description of Unknown: Integrase B620 sequence
  PTHR30461:SF3,IPR036162,PS51737,IPR011109,PTHR30461, PS00397,PF00239,G3DSA:1.10.10.2600,IPR006119,SSF53041, SM00857,IPR025827,IPR038109,PS51736,cd03768, IPR006118,PF13408,G3DSA:3.40.50.1390,PF07508,Coil
MAYAMKVPAASADDRIVAIYVRVSTGYQVDKDSLPFQKKELKAYCKHILHVDMSRVEIFEDAGRSGKNTKRPAYERMMQKVRAGLVSHVLVYKIDRISRNLVDFSLMYDDFKYNRVTFVSLNEQFDTSSAIGEAVLKIILVFAELERKLTSERVKDIMIGRANEGKWNGARVPYGWDWDSSAGWPVHSKKEAPFGRAMYEMYLEVKSTGKIRDYNNAHKIPTKRGGEWTSKTVGDFLRNPMNKGDYRYNYRESARGRKKPIDEVVYLEGVFDPLIDPEIWEKVNKIMDSNRDKRNMVGSHPVEKNCNVFAGLIQCGSCGSGYLVGKKDKRRKNGFTPSMYYCGAKTRAIHCQNLNVSDVKIGPFVINYISAMVRVSNERRKIKTPEDLEEMLLSDKAVFADIMGLSSGSLNNTFELLTGKSATGGALWRADLVDQKGVAADPAEIESLKDQIRKYERAKERLEDAYYFSDDGMSEKEYLEKKNRFDSGRVAAENKLKELTETHIASGVDESAFMKSASAFLLTHKIRAGSHIVYSDLAGMVEEESIKEFFNLVLDHIAVKDRCVTEIVFANGLSHKFIYRD

SEQ ID NO: 620 - protein, 581 aa, Unknown
  Description of Unknown: Integrase B621 sequence
  PTHR30461:SF3,IPR036162,PS51737,IPR011109,PTHR30461, PS00397,PF00239,G3DSA:1.10.10.2600,IPR006119,SSF53041, SM00857,IPR025827,IPR038109,PS51736,cd03768, IPR006118,PF13408,G3DSA:3.40.50.1390,PF07508,Coil
MSRTTNKRPVKAKSGLSRKQKVAIYIRVSTLYQVDRDSLPMQRKDLIAYASLILGIEEYEIFEDAGYSGKNTDRPAFQEMMQRIRKGEFTHVLVWKIDRISRNLLDFAEMYEELQDLRVTFVSKNEQFDTSTAIGEAMLKIILVFAELERNMTSERVTATMISRANSGLWNGGRIPYGYDYDPDKTEFSIREDEEKVCQMIKNDYMEHKSLVHTSRMLNAAGYKTRAGVEWSPTAVWIIISSPFYAGIYRYNRYKGTERRVENPEDEWIMIQNHHPAIFSLEEHEKMLAILDENSRNHRSVGQRHQTERIHIFGGIAYCGKCGSKMVSTPGRLHVNGYRPTNYSCPKHRKTKECDNPTVSDTQVGEFVINYILNMIGAKKKFSTIENPEDLERCLLYGNTFSEVEHIDGNGLNEYFNLLSRYGSDDSYTFSVKKSRKKKAEVDPEVEALRKEKEKQERAMKRLQDLYLYSDTSMSEKDFIIRKTEISKRLEEINAMLGMVAKNSEPSLSDEEFVRQASHLLISRELQNRQYIYFKNLAQSVSPEILKVYMETVLDSVLLVDGRVSSIVFRNGLTHKFKYKS

SEQ ID NO: 621 - protein, 581 aa, Unknown
  Description of Unknown: Integrase B622 sequence
  PTHR30461:SF3,IPR036162,PS51737,IPR011109,PTHR30461, PS00397,PF00239,G3DSA:1.10.10.2600,IPR006119,SSF53041, SM00857,IPR025827,IPR038109,PS51736,cd03768, IPR006118,PF13408,G3DSA:3.40.50.1390,PF07508,Coil
MACAMKVPATSVDDRIVAIYVRVSTGYQVDKDSLPFQKKELKAYCKHILHVDMSRVEIFEDAGRSGKNTKRPAYERMMQKVRAGLVSHVLVYKIDRISRNLVDFSLMYDDFKYNRVTFVSLNEQFDTSSAIGEAVLKIILVFAELERKLTSERVKDIMIGRANEGKWNGARVPYGWDWDSSAGWPVHSEKEAPFGRAMYEMYLEVKSTGKIRDYNNAHNIPTKRGGEWTSKTVGDFLRNPMNKGDYRCNYRESARGRKKPVDEVVYLEGVFDPLIDPEIWEKVNKIMDINRDKRNMCGSHPVEKNCNVFAGLIQCGSCGSGYLVGKKDKRRKNGFTPSMYHCSAKTRAIHCQNLNVSEVKIGPFVINYISAMVRVSNERRKIKTPEDLEEMLLSDKAVFADIMGLSSDSLNNTFELLTGKSATGGALWRADLVDQEGAAADPAEIESLKDQIRKYERAKERLEDAYYFSDDGMSEKEYLEKKNRFDSGRVAAENKLKELTETHIASGVDESAFMKSASAFLLTHKIRAGSHIVYSDLAGMVEEESIKEFFNLVLDHITVKDRRVTEIVFANGLSHKFIYRD

SEQ ID NO: 622 - protein, 581 aa, Unknown
  Description of Unknown: Integrase B623 sequence
  PTHR30461:SF3,IPR036162,PS51737,IPR011109,PTHR30461, PS00397,PF00239,G3DSA:1.10.10.2600,IPR006119,SSF53041, SM00857,IPR025827,IPR038109,PS51736,cd03768, IPR006118,PF13408,G3DSA:3.40.50.1390,PF07508,Coil
MSRTTNKRPGKAKSGLSRKQKVAIYIRVSTLYQVDRDSLPMQRKDLIAYASLILGIEEYEIFEDAGYSGKNTDRPAFQEMMQRIRKGEFTHVLVWKIDRISRNLLDFAEMYEELQDLRVTFVSKNEQFDTSTAIGEAMLKIILVFAELERNMTSERVTATMISRANSGLWNGGRIPFGYDYDPDKTAFSIREDEEKVCQMIKNDYMEHKSLVHTSRMLNASGYKTRAGAEWSPTAVWIIISSPFYAGIYRYNRYKGTERRVENPEDEWIMIQNHHPAIFSLEEHEKMLAILDENSRNHRSVGQKHQTERVHIFGGIAYCGKCGSKMVSTPGRLHANGYRPTNYSCPKHRKTKECDNPTVSDTQVGEFVINYILNMLGAKKKFSTIENPEDLERCLLYGNTFSEVEHIDSNGLNEYFNLLSRYSSDDSYTFSVKKSRKKKAEVDPEVAALRKEKEKQERAMKRLQDLYLYSDTSMSEKDFIIRKTEISKRLEEINAMLGMVAKNSEPSLSDEEFVRQASHLLISRELQNRQYIYFKNLAQNVSPEILKAYMETVLDSVLLVDGRVSSIVFRNGLTHKFKYKS

SEQ ID NO: 623 - protein, 581 aa, Unknown
  Description of Unknown: Integrase B624 sequence
  PTHR30461:SF3,IPR036162,PS51737,IPR011109,PTHR30461, PS00397,PF00239,G3DSA:1.10.10.2600,IPR006119,SSF53041, SM00857,IPR025827,IPR038109,PS51736,cd03768, IPR006118,PF13408,G3DSA:3.40.50.1390,PF07508,Coil
MARKRTNLIGNTPSVRETKVAIYIRVSTIHQVDKDSIPMQKKDLIAYCQLILGTDNYEIFEDAGYSGKNTDRPAFQNMMGRIRKGEFTHVLVWKIDRVSRNLLDFAEMYEELRSLRVTFVSKNEQFDTSTAIGEAMLKIILVFAELERNMTSERVTATMISRANSGQWNGGRIPFGYSYDPKEKIFSIREDEASICRELKDLYLLNRSLAYVSRALNEKGYKTRAGVSWSPHSVWIIASSPFYAGIYRYNRYKGVESRTINPEEEWVMIQNHHPAIFTLEEHQAMRSIMKSNQRNMDNLPGRVHLSTKTHIFQGIMYCDKCGSKMVSTPGRLHVDGYRTSNYGCPLRRNTKKCNNPTVNDIVIGEFVINYILNMLNAKKTFSTINTPDELNAALLSGSVFSEVSSVEENGLNSFFNLLSRYGSDRSYIFSVKNPRKKKAAVDPELSKLRKEKEKQERALQRLQDLYLYSETSMSEKDFIIRKSEISSHLDNINRQLGLMTQDQASFLSDEEFIKQASHLLIQKELKNKKYIYFKKLVSTVDPDILKAYMETILDSIYTADGKITAITFKNGLTHRFIYKDK

SEQ ID NO: 624 - protein, 581 aa, Unknown
  Description of Unknown: Integrase B625 sequence
  PTHR30461:SF3,IPR036162,PS51737,IPR011109,PTHR30461, PS00397,PF00239,G3DSA:1.10.10.2600,IPR006119,SSF53041, SM00857,IPR025827,IPR038109,PS51736,cd03768, IPR006118,PF13408,G3DSA:3.40.50.1390,PF07508,Coil
MARKRTNLIGNTPSVRETKVAIYIRVSTIHQVDKDSIPMQKKDLIAYCQLILGTDNYEIFEDAGYSGKNTDRPAFQNMMGRIRKGEFTHVLVWKIDRVSRNLLDFAEMYEELRSLRVTFVSKNEQFDTSTAIGEAMLKIILVFAELERNMTSERVTATMISRANSGQWNGGRIPFGYSYDPKEKVFSIREDEASICRELKDLYLLNRSLAYVSRALNEKGYKTRAGVSWSPHSVWIIASSPFYAGIYRYNRYKGVESRTINPEEEWVMIQNHHPAIFTLEEHQTMRSIMKSNQRNMDNLPGRVHLSTKTHIFQGIMYCDKCGSKMVSTPGRLHVDGYRTSNYGCPLRRNTKKCNNPTVNDIVIGEFVINYILNMLNAKKTFSTINTPDELNAALLSGSVFSEVSSVEENGLNSFFNLLSRYGSDRSYIFSVKSPRKKKAAVDPELSKLRKEKEKQERALQRLQDLYLYSETSMSEKDFIIRKSEISSHLDNINRQLGLMTQDQASFLSDEEFIKQASHLLIQKELKNKKYIYFKKLVSTVDPDILKAYMETILDSIYTADGKITAITFKNGLTHRFIYKDK

SEQ ID NO: 625 - protein, 581 aa, Unknown
  Description of Unknown: Integrase B626 sequence
  PTHR30461:SF3,IPR036162,PS51737,IPR011109,PTHR30461, PS00028,PS00397,PF00239,G3DSA:1.10.10.2600,IPR006119, SSF53041,IPR013087,cd00338,SM00857,IPR025827,IPR038109 ,PS51736,IPR006118,PF13408,G3DSA:3.40.50.1390,PF07508,Coil
MAKHAITIPQNPKAALYIRVSTDMQADKDSLPLQESDLRKLADLNGIKDIEVFSDAGFSGKNLNRPAFRSMMDRIRAREFSHLYVWKLDRISRNLLDFLELYDELKCYGVAFASKNECFDTQSPGGEAMLKILLIFAELERKTIAERVTAVMLGRANENKWNGGRVPFGYMPGPVTTDANGKKCKSWPVPDPIEAPIVRAIFELYLREKALKKVAAALNTAGYRSRKGTLWSDTTVRCILKNHFYKGEYVYNRQNPNAGRREDFYRSENDWVIVTGQHEAIVPEETWRRCNEMLSKNRSWLAPIGSLVSAQDKYIFGGLLQCAECGYTMNSKDRTRIHDHTHSSYYYCTGRWKAPAVCTGEHSGYASDRVLLPQILKLIARMIEACANAIKFASAEQLVSYLLNDNLIPGATGIEEAQRIYMIVRAHVKHIYGVDQANQYNPNALLVEQSQKEKEKQERALSRLKRAYLFDDGDMSEAEYFDQKSAIEDTIAKLDKQINSLSGNDIGADEAYLAQLSKLIMIKKLQDTNSDFDYYKLAKAIGRKPIHDFLTEIISRIIIGEQNRIIKIIFKNGVPITFQYA

SEQ ID NO: 626 - protein, 581 aa, Unknown
  Description of Unknown: Integrase B627 sequence
  SM00857,IPR036162,PF13408,IPR025827,G3DSA:3.40.50.1390, PF14287,IPR006119,PF07508,cd03770,IPR011109, SSF53041,PTHR30461,PS51736,Coil,IPR025378, PF00239
MNRTRQTTDKSKNRITALYERLSRDDELAGDSNSIVNQKKMLEDYAKSNGYTDLVHFTDDGYSGGNFDRPGWKEMLRQIEDGSIGAVIVKDMSRVGRDYLQVGFYTEVFFREKGVHFVAISNGVDSDINTSSEFAPFLNIMNEWYLRDCSRKIKAVLQAKGRDGKPITNNPPYGYIKDPEDKNRCDMSKPYEWAGVSVVRMLEKPEYMGDTVNFRTKKLSYKDKVAVKNDSDEIVVFTDTHEAIIDRKTWYMVQELRKTKRRINTEGESNPFVGKIFCADCGGKMHYRNEGKRAGRKWRGLLDGSVRTTPACYNCGNYNNSHDQSGKVCCSHNIQAKVIDQFVLETIQYACKSVRMDERAFVESIRSASEIWEQSEAKKLKAALKHQEKRYAELDILLKKVYEDNALGRLPDKRYEMLSAGYEKEQAELEQSIKACREQLTQYDEDTDRTEEFLALVHKYTDITELTPVIINEFVDKILVHKAEKIDGERVMEIEIYLNFIGKVELPAQELTEEELAEIKEKQRLRERNAMYQRRRRAKFMPKTKAIRAKVQEAEIKETLENASAKAENCLWQIMMHISQR

SEQ ID NO: 627 - protein, 581 aa, Unknown
  Description of Unknown: Integrase B628 sequence
  PTHR30461:SF3,IPR036162,PS51737,IPR011109,PTHR30461, PS00397,PF00239,G3DSA:1.10.10.2600,IPR006119,SSF53041, SM00857,IPR025827,IPR038109,PS51736,cd03768, IPR006118,PF13408,G3DSA:3.40.50.1390,PF07508,Coil
MSRTTNKRPGKAKSGLSRKQKVAIYIRVSTLYQVDRDSLPMQRKDLIAYASLILGIEEYEIFEDAGYSGKNTDRPAFQEMMQRIRKGEFTHVLVWKIDRISRNLLDFAEMYEELQELRVTFVSKNEQFDTSTAIGEAMLKIILVFAELERNMTSERVTATMISRANSGLWNGGRIPFGYDYDPDKTAFSIREDEEKVCQMIKNDYMEHKSLVHTSRMLNASGYKTRAGAEWSPTAVWIIISSPFYAGIYRYNRYKGTERRVENPEDEWIMIQNHHPAIFSLEEHEKMLAILDENSRNHRSVGQKHQTERVHIFGGIAYCGKCGSKMVSTPGRLHANGYRPTNYSCPKHRKTKECDNPTVSDTQVGEFVINYILNMLRAKKRFSTIENPEDLERCLLYGNTFSEVEHIDGNGLNEYFNLLSRYGSDDSYTFSVKKSRKKKAEVDPEVETLRKEKEKQERAMKRLQDLYLYSDTSMSEKDFIIRKTEISKRLEGINAMLGMVAKNSEPSLSDEEFVRQASHLLISRELQNRQYIYFKNLAQNVSPEILKAYMETVLDSVLLVDGRVSSIVFRNGLTHKFKYKS

SEQ ID NO: 628 - protein, 581 aa, Unknown
  Description of Unknown: Integrase B629 sequence
  PTHR30461:SF3,IPR036162,PS51737,IPR011109,PTHR30461, PS00397,PF00239,G3DSA:1.10.10.2600,IPR006119,SSF53041, SM00857,IPR025827,IPR038109,PS51736,cd03768, IPR006118,PF13408,G3DSA:3.40.50.1390,PF07508,Coil
MSRTTNKRPGKAKSGLSRKQKVAIYIRVSTLYQVDRDSLPMQRKDLIAYASLILGIEEYEIFEDAGYSGKNTDRPAFQEMMQRIRKGEFTHVLVWKIDRISRNLLDFAEMYEELQVLRVTFVSKNEQFDTSTAIGEAMLKIILVFAELERNMTSERVTATMISRANSGLWNGGRIPFGYDYDPDKTAFSIREDEEKVCQMIKNDYMEHKSLVHTSRMLNASGYKTRAGVEWSPTAVWIIISSPFYAGIYRYNRYKGTERRVENPEDEWIMIQNHHPAIFSLEEHEKMLAILDENSRNRRSVGQKHQTERVHIFGGIAYCGKCGSKMVSTPGRLHANGYRPTNYSCPKHRKTKECDNPTVSDTQVGEFVINYILNMLRAKKKFSTVENPEDLEHCLLYGNTFSEVEHIDGNGLNEYFNLLSRYGSDDSYTFSIKKSRKKKAEVDPEVEALRKEKEKQERAMKRLQDLYLYSDTSMSEKDFIIRKTEISKRLKEINAMLGMVAKNSEPSLSDEEFVRQASHLLISRELQNRQYIYFKNLAQSVSPEILKAYMETVLDSVLLVDGRVSSIVFRNGLTHKFKYKS

SEQ ID NO: 629 - protein, 581 aa, Unknown
  Description of Unknown: Integrase B630 sequence
  PTHR30461:SF3,IPR036162,PS51737,IPR011109,PTHR30461, PS00397,PF00239,G3DSA:1.10.10.2600,IPR006119,SSF53041, SM00857,IPR025827,IPR038109,PS51736,cd03768, IPR006118,PF13408,G3DSA:3.40.50.1390,PF07508,Coil
MSRTTNKRPGKAKSGLSRKQKVAIYIRVSTLYQVDRDSLPMQRKDLIAYASLILGIEEYEIFEDAGYSGKNTDRPAFQEMMQRIRKGEFTHVLVWKIDRISRNLLDFAEMYEELQDLRVTFVSKNEQFDTSTAIGEAMLKIILVFAELERNMTSERVTATMISRANSGLWNGGRIPFGYDYDPDKTAFSIREDEEKVCQMIKNDYMEHKSLVHTSRMLNASGYKTRAGAEWSPTAVWIIISSPFYAGIYRYNRYKGTERRVENPEDEWIMIQNHHPAIFSLEEHEKMLAILDENSRNHRSVGQKHQTERVHIFGGIAYCGKCGSKMVSTPGRLHANGYRPTNYSCPKHRKTKECDNPTVSDTQVGEFVINYILNMLGAKKKFSTIENPEDLERCLLYGNTFSEVEHIDSNGLNEYFNLLSRYSSDDSYTFSVKKSRKKKAEVDPEVEALRKEKEKQERAMKRLQDLYLYSDTSMSEKDFIIRKTEISKRLEEINAMLGMVAKNSEPSLSDEEFVRQASHLLISRELQNRQYIYFKNLAQNVSPEILKAYMETVLDSVLLVDGRVSSIVFRNGLTHKFKYKS

SEQ ID NO: 630 - protein, 581 aa, Unknown
  Description of Unknown: Integrase B631 sequence
  PTHR30461:SF3,IPR036162,PS51737,IPR011109,PTHR30461, PS00397,PF00239,G3DSA:1.10.10.2600,IPR006119,SSF53041, SM00857,IPR025827,IPR038109,PS51736,cd03768, IPR006118,PF13408,G3DSA:3.40.50.1390,PF07508,Coil
MARKRTNLIGNTPSVRETKVAIYIRVSTIHQVDKDSIPMQKKDLIAYCQLILGTDNYEIFEDAGYSGKNTDRPAFQNMMGRIRKGEFTHVLVWKIDRVSRNLLDFAEMYEELRSLRVTFVSKNEQFDTSTAIGEAMLKIILVFAELERNMTSERVTATMISRANSGQWNGGRIPFGYSYDPKEKVFSIREDEASICRELKDLYLLNRSLAYVSRALNEKGYKTRAGVSWSPHSVWIIASSPFYAGIYRYNRYKGVESRTINPEEEWVMIQNHHPAIFTLEEHQAMRSIMKSNKRNMDNLPGRVHLSTKTHIFQGIMYCDKCGSKMVSTPGRLHVDGYRTSNYGCPLRRNTKKCNNPTVNDIVIGEFVINYILNMLNAKKTFSTINTPDELNVALLSGSVFSEVSSVEENGLNSFFNLLSRYGSDRSYIFSVKSPRKKKAAVDPELSKLRKEKEKQERALQRLQNLYLYSETSMSEKDFIIRKSEISSHLDNINRQLGLMTQDQASFLSDEEFIKQASHLLIQKELKNKKYIYFKKLVSTVDPDILKSYMETILDSIYTADGKITAITFKNGLTHRFIYKDK

SEQ ID NO: 631 - protein, 581 aa, Unknown
  Description of Unknown: Integrase B632 sequence
  PTHR30461:SF3,IPR036162,PS51737,IPR011109,PTHR30461, PS00397,PF00239,G3DSA:1.10.10.2600,IPR006119,SSF53041, SM00857,IPR025827,IPR038109,PS51736,cd03768, IPR006118,PF13408,G3DSA:3.40.50.1390,PF07508,Coil
MSRTTNKRPGKAKSGLSRKQKVAIYIRVSTLYQVDRDSLPMQRKDLIAYASLILGIEEYEIFEDAGYSGKNTDRPAFQEMMQRIRKGEFTHVLVWKIDRISRNLLDFAEMYEELQELRVTFVSKNEQFDTSTAIGEAMLKIILVFAELERNMTSERVTATMISRANSGLWNGGRIPFGYDYDPDKTAFSIREDEEKVCQMIKNDYMEHKSLVHTSRMLNASGYKTRAGAEWSPTAVWIIISSPFYAGIYRYNRYKGTDRRVENPEDEWIMIQNHHPAIFSLEEHEKMLAILDENSRNRRSVGQRHQTERVHIFGGIAYCGKCGSKMVSTPGRLHVNGYRPTNYSCPKHRKTKECDNPTVSDTQVGEFVINYILNMLGAKKKFSTIENPEDLERCLLYGNTFSEVEHIDSNGLNEYFNLLSRYSSDDSYTFSVKKSRKKKAEVDPEVEALRKEKEKQERAMKRLQDLYLYSDTSMSEKDFIIRKTEISKRLEEINAMLGMVARNNEPSLSDEEFVRQASHLLISRELQNRQYIYFKNLAQNVSPEILKAYMETVLDSVLLVDGRVSSIVFRNGLTHKFKYKS

SEQ ID NO: 632 - protein, 581 aa, Unknown
  Description of Unknown: Integrase B633 sequence
  PTHR30461:SF3,IPR036162,PS51737,IPR011109,PTHR30461, PS00397,PF00239,G3DSA:1.10.10.2600,IPR006119,SSF53041, cd00338,SM00857,IPR025827,IPR038109,PS51736, IPR006118,PF13408,G3DSA:3.40.50.1390,PF07508,Coil
MAYAMKVPAASADDRIVAIYVRVSTGYQVDKDSLPFQKKELRAYCKHILHVDMSRVEIFEDAGRSGKNTKRPAYERMMQKVRAGLVSHVLVYKIDRISRNLVDFSLMYDDFKYNRVTFVSLNEQFDTSSAIGEAVLKIILVFAELERKLTSERVKDIMIGRANEGKWNGARVPYGWDWDSSAMWPVHSEKEAPFGRAMYEMYLEVKSTGKIRDYNNAHGIPTKRGGEWTSKTVGDFLRNPMNKGDYRYNYRESARGRKKPIDEVVYLEGVFDPLIDPEIWEKVNKIMDINRDKRNMGGLHPVEKNCNVFAGLIQCGSCGSGYLVGKKDKRRKNGFTPSMYYCSAKTRAIHCQNLNVSDVKIGPFVINYISAMVRVSNERRKIKTPEDLEEMLLSDKAVFADIMGLSSDSLNSTYKLLTGKSATGGALWRADLVDQEGTVSDPVEIENLKDQIRKYERAKERLEDAYYFSDDGMSEKEYLEKKNRFDSGRVAAENKLKELTETHIASGVDESAFMKSASAFLLTHKIRAGSHIVYSDLAGMVKEESIKEFFNLVLDHITVKDRRVTEIVFANGLSHKFIYRD

SEQ ID NO: 633 - protein, 581 aa, Unknown
  Description of Unknown: Integrase B634 sequence
  PTHR30461:SF3,IPR036162,PS51737,IPR011109,PTHR30461, PS00397,PF00239,G3DSA:1.10.10.2600,IPR006119,SSF53041, SM00857,IPR025827,IPR038109,PS51736,cd03768, IPR006118,PF13408,G3DSA:3.40.50.1390,PF07508,Coil
MAYAMKVPAASADDRIVAIYVRVSTGYQVDKDSLPFQKKELKAYCKHILHVDMSRVEIFEDAGRSGKNTKRPAYERMMQKVRAGLVSHVLVYKIDRISRNLVDFSLMYDDFKYNRVTFVSLNEQFDTSSAIGEAVLKIILVFAELERKLTSERVKDIMIGRANEGKWNGARVPYGWDWDSSAMWPVHSEKEAPFGRAMYEMYLEVKSTGKIRDYNNAHGIPTKRGGEWTSKTVGDFLRNPMNKGDYRYNYRESARGRKKPIDEVVYLEGVFDPLIDPEIWEKVNKIMDINRDKRNMVGSHPVEKNCNVFAGLIQCGSCGSGYLVGKKDKRRKNGFTPSMYYCGAKTRAIHCQNLNVSDVKIGPFVINYISAMVRVSNERRKIKTPEDLEEMLLSDKAVFADIMGLSSDSLNNTFELLTGKSATGGALWRADLVDQEGAAADPAEIESLKDQIRKYERAKERLEDAYYFSDDGMSEKEYLEKKNRFDSGRVAAENKLKELTETHIASGVDESAFMKSASAFLLTHKIRAGSHIVYSDLAGMVEEESIKEFFNLVLDHITVKDRCVTEIVFANGLSHKFIYRD

SEQ ID NO: 634 - protein, 581 aa, Unknown
  Description of Unknown: Integrase B635 sequence
  PTHR30461:SF3,cd00338,SM00857,G3DSA:1.10.10.2600,IPR036162, PF13408,PS51737,IPR025827,G3DSA:3.40.50.1390,IPR006119, IPR038109,PF07508,SSF53041,IPR011109,PTHR30461, PS51736,Coil,PF00239
MEDFYKIKEALKIMPITQIPLRVVIYSRVSTDSEEQLTSITNQKTYYKKLIENTPKWTLIEEYVDEGITGTSTKKREAFQRMISDGIEGKFDMIITKSVSRFARNTLDSLQNVRILTAHGVGVWFHSDGILTFEADGELRLSIMSAFAQGESEKKSEAVRFGLQESIKRGTVFGFDNMFGYRLHGGKLEIDEAEVPMIQKIFELYATDRYSMNQIEKILYDDGYRNHNGKRISHATLSHIIRNPKYKGVFAGRKVRKKDLFDDRVEMLPQNEWVIIDGEKGRSIVPPIVSEELWAKANRVLEARSIDVKTRQNKCNHPNLLTGKLWCVHCNLPYHRKASKTSNAVLNSAWVCSGKIRNGTASCPSIYLYENEVKQCLYELFIEDDFDIDDYIDQYIKLVSEASSSEKNTNRQNELEKELALIEKKKTKILEFNVLGQVSDQDYIAQNNALNEEYQRKSEELANVRLALDTKKRTEEDFEKMRGALQQLKGRKNIDFIDPAFVRTYIERIDVSMIDGRTMNMDVILKTGDKISRILKKNLSSVNRRKHIYTGRRLTFRRKTPYGRGSHEIPIQINICFFSLN

SEQ ID NO: 635 - protein, 581 aa, Unknown
  Description of Unknown: Integrase B636 sequence
  PTHR30461:SF3,IPR036162,PS51737,IPR011109,PTHR30461, PS00397,PF00239,G3DSA:1.10.10.2600,IPR006119,SSF53041, SM00857,IPR025827,IPR038109,PS51736,cd03768, IPR006118,PF13408,G3DSA:3.40.50.1390,PF07508,Coil
MARKRTNLIGNTPSVRETKVAIYIRVSTIHQVDKDSIPMQKKDLIAYCQLILGTDNYEIFEDAGYSGKNTDRPAFQNMMGRIRKGEFTHVLVWKIDRVSRNLLDFAEMYEELRSLRVTFVSKNEQFDTSTAIGEAMLKIILVFAELERNMTSERVTATMISRANSGQWNGGRIPFGYSYDPKEKVFFIREDEASICRELKDLYLLNRSLAYVSRALNEKGYKTRAGVSWSPHSVWIIASSPFYAGIYRYNRYKGVESRTINPEEEWVMIQNHHPAIFTLEEHQAMRSIMKSNKRNMDNLPGRVHLSTKTHIFQGIMYCDKCGSKMVSTPGRLHVDGYRTSNYGCPLRRNTKKCNNPTVNDIVIGEFVINYILNMLNAKKTFSTINTPDELNAALLSGSVFSEVSSVEENGLNSFFNLLSRYGSDRSYIFSVKSPRKKKAAVDPELSKLRKEKEKQERALQRLQDLYLYSETSMSEKDFIIRKSEISSHLDNINRQLGLMTQDQASFLSDEEFIKQASHLLIQKELKNKKYIYFKKLVSTVDPDILKAYMETILDSIYTADGKITAITFKNGLTHRFIYKDK

SEQ ID NO: 636 - protein, 581 aa, Unknown
  Description of Unknown: Integrase B637 sequence
  PTHR30461:SF3,IPR036162,PS51737,IPR011109,PTHR30461, PS00397,PF00239,G3DSA:1.10.10.2600,IPR006119,SSF53041, SM00857,IPR025827,IPR038109,PS51736,cd03768, IPR006118,PF13408,G3DSA:3.40.50.1390,PF07508,Coil
MAYATKVPAASADDRIVAIYVRVSTGYQVDKDSLPFQKKELKAYCKHILHIDMSRVEIFEDAGRSGKNTKRPAYERMMQKVRAGLVSHVLVYKIDRISRNLVDFSLMYDDFKYNRVTFVSLNEQFDTSSAIGEAVLKIILVFAELERKLTSERVKDIMIGRANDGKWNGARVPYGWDWDSSAGCPVHSEKEAPFARAMYEMYLEVKSTGKIRDYNNAHKIPTKRGGEWTSKTVGDFLRNPMNKGDYRYNYRESARGRKKPADEIVYLEGVFDPLVDPEIWEKVNKIMDINRDQRNMGGLHPIEKNCNVFAGLIQCGSCGSGYLVGKKDKRRKNGFTPSLYYCGAKTRAIHCQNPNVSDVKIGPFVINYISAMVRVSNERQKIKSPEELEEMLLSDKAVFADIMGLSSDSLNTTFELLTGKSATGGALWRADLVDQEGSAADPAEIENLKGQIRKYERAKERLEDAYYFSDDGMSEKEYLEKKNRFDSMRVSAENKLKELTETHIASGVDESSFMKSAFAFLLTHKIRAGSHIVYSDLAGMVEEESIKEFFNLVLDHIVVKDRRVTEIIFANGLSHKFIYRD

SEQ ID NO: 637 - protein, 581 aa, Unknown
  Description of Unknown: Integrase B638 sequence
  PTHR30461:SF3,cd00338,SM00857,G3DSA:1.10.10.2600,IPR036162, PF13408,IPR025827,PS51737,G3DSA:3.40.50.1390,IPR006119, IPR038109,PF07508,SSF53041,IPR011109,PTHR30461, PS51736,Coil,PF00239
MEDFYKIKEALKIMPITQIPLRVVIYSRVSTDSEEQLTSITNQKTYYKKLIENTPKWTLIEEYVDEGITGTSTKKREAFQRMISDGIEGKFDMIITKSVSRFARNTLDSLQNVRILTAHGVGVWFHSDGILTFEADGELRLSIMSAFAQGESEKKSEAVRFGLQESIKRGTVFGFDNMFGYRLRGGKLEIDEAEVPMIQKIFELYATDRYSMNQIEKILYDDGYRNHNGNRISHATLSHIIRNPKYKGVFAGRKVRKKDLFDDRVEMLPQNEWVIIDGEKGRSIVPPIVSEELWAKANRVLEARSIDVKTRQNKCNHPNLLTGKLWCVHCNLPYHRKASKTSNAVLNSAWVCAGKIRNGTASCPSIYLYENEVKQCLYELFIEDDFDIDDYIDQYIKLVSEASSLEKNTNRQNELEKELALIEKKKTKILEFNVLGQVSDQDYIAQNNALNEEYQRKSEELANVRLALDTKKRTEEDFEKMRGALQQLKGRKNIDFIDPAFVRTYIERIDVSMIDGRTMNMDVILKTGDKISRILKKNLSSVNRRKHIYTGRRLMFRRKTPYGRGSHEIPIQINICFFSLN

SEQ ID NO: 638 - protein, 581 aa, Unknown
  Description of Unknown: Integrase B639 sequence
  PTHR30461:SF3,IPR036162,PS51737,IPR011109,PTHR30461, PS00397,PF00239,G3DSA:1.10.10.2600,IPR006119,SSF53041, SM00857,IPR025827,IPR038109,PS51736,cd03768, IPR006118,PF13408,G3DSA:3.40.50.1390,PF07508,Coil
MAYASQNTAARFDDRIVAIYVRVSTGYQVDKDSLPFQKKELKAYCKHILHVDMSRVEIFEDAGRSGKNTKRPAYERMMQKVRAGLVSHVLVYKIDRISRNLVDFSLMYDDFKYNRVTFVSLNEQFDTSSAIGEAVLKIILVFAELERKLTSERVKDIMIGRANEGKWNGARVPYGWDWDSSAMRPVHSEKEAPFGRAMYEMYLEVKSTGKIRDYNNAHKIPTKRGGEWTSKTVGDFLRNPMNKGDYRYNYRESARGRKKPVDEVVYLEGVFEPLVNPEIWEKVNKIMDINRDQRNIGGSHPIEKNCNVFAGLIQCGSCGSGYLVGKKDKRRKNGFTPSMYYCSAKTRAIHCQNLNVSDVKIGPFVINYISAMVRVSNERRKIKTSEDLEEMLLSDKAVFADIMGLSSDSLNNTFELLTGKSSTSGALWRADLVDQEGASADPAEIESLKDQIRKYERAKERLEDAYYFSDDGMSEKEYLEKKNRFDSGRVAAENKLKELTETHIASGVDESAFMKSASAFLLTHKIRAGSHIVYSDLAGMVEEESIKEFFNLVLDHITVKDRRVTEIVFANGLSHKFIYRD

SEQ ID NO: 639 - protein, 581 aa, Unknown
  Description of Unknown: Integrase B640 sequence
  PTHR30461:SF3,IPR036162,PS51737,IPR011109,PTHR30461, PS00397,PF00239,G3DSA:1.10.10.2600,IPR006119,SSF53041, SM00857,IPR025827,IPR038109,PS51736,cd03768, IPR006118,PF13408,G3DSA:3.40.50.1390,PF07508,Coil
MAYAMKVPAASADDRIVAIYVRVSTGYQVDKDSLPFQKKELKAYCKHILHVDMSRVEIFEDAGRSGKNTKRPAYERMMQKVRAGLVSHVLVYKIDRISRNLVDFSLMYDDFKYNRVTFVSLNEQFDTSSAIGEAVLKIILVFAELERKLTSERVKDIMIGRANEGKWNGARVPYGWDWDSSAGWPVHSKKEAPLARAMYEMYLEVKSTGKIRDYNNAHKIPTKRGGEWTSKTVGDFLRNPMNKGDYRYNYRESARGRKKPADEIVYLEGVFDPLVDPDVWEKVNKIMDSNRDKRNMGGLHPIESNCNVFAGLIQCGLCGSGYLVGKKDKRRKNGFTPSLYYCGAKTRAIHCQNLNVSDVKIGPFVINYISAMVRVSNERRKIKSPEELEEMLLSDKAVFADIMGLSSDSLNTTFELLTGKSATGGALWRADLVDQEGAAADPAEIESLKDQIRKYERAKERLEDAYYFSDDGMSEKEYLEKKNRFDSMRVAAENKLKELTETHIASGVDESAFMKSASAFLLTHKIRAGSHIVYSDLAGMVEEESIKDFFNLVLDHIVVKDRRVTEIVFANGLSHKFIYRD

SEQ ID NO: 640 - protein, 581 aa, Unknown
  Description of Unknown: Integrase B641 sequence
  PTHR30461:SF3,IPR036162,PS51737,IPR011109,PTHR30461, PS00397,PF00239,G3DSA:1.10.10.2600,IPR006119,SSF53041, SM00857,IPR025827,IPR038109,PS51736,cd03768, IPR006118,PF13408,G3DSA:3.40.50.1390,PF07508,Coil
MAYAMKVPAASADDRIVAIYVRVSTGYQVDKDSLPFQKKELKAYCKHILHVDMSRVEIFEDAGRSGKNTKRPAYERMMQKVRAGLVSHVLVYKIDRISRNLVDFSLMYDDFKYNRVTFVSLNEQFDTSSAIGEAVLKIILVFAELERKLTSERVKDIMIGRANEGKWNGARVPYGWDWDSSAGWPVHSEKEAPFGRAMYEMYLKVKSTGKIRDYNNAHGIPTKRGGEWTSKTVGDFLRNPMNKGDYRYNYRESARGRKKPIDEVVYLEGVFDPLIDPEIWEKVNKIMDINRDKRNMVGSHPVEKNCNVFAGLIQCGSCGSGYLVGKKDKRRKNGFTPSMYYCGAKTRAIHCQNLNVSDVKIGPFVINYISAMVRVSNERRKIKTPEDLEEILLSDKAVFADIMGLSFDSLNNTFELLTGKSATGGALWHADLVDQEGVVADPAEIESLKDQIQKYERAKERLEDAYYFSDDGMSEKEYLEKKNQFDSGRVAAENKLKELTETHIASGVDESAFMKSASAFLLTHKIRAGSHIVYSDLAGMVEEESIKEFFNLVLDHITVKDRRVTEIVFANGLSHKFIYRD

SEQ ID NO: 641 - protein, 581 aa, Unknown
  Description of Unknown: Integrase B642 sequence
  PTHR30461:SF3,IPR036162,PS51737,IPR011109,PTHR30461, PS00397,PF00239,G3DSA:1.10.10.2600,IPR006119,SSF53041, SM00857,IPR025827,IPR038109,PS51736,cd03768, IPR006118,PF13408,G3DSA:3.40.50.1390,PF07508,Coil
MSRTTNKRPGKAKSGLSRKQKVAIYIRVSTLYQVDRDSLPMQRKDLIAYASLILGIEEYEIFEDAGYSGKNTDRPAFQEMMQRIRKGEFTHVLVWKIDRISRNLLDFAEMYEELQDLRVTFVSKNEQFDTSTAIGEAMLKIILVFAELERNMTSERVTATMISRANSGLWNGGRIPFGYDYDPDKTAFSIREDEEKVCQMIKNDYMEHKSLVHTSRMLNASGYKTRSGVEWSPTAVWIIVSSPFYAGIYRYNRYKGTERRVENPEDEWIMIQNHHPAIFSLEEHEKMLAILDENSRNRRSVGQRHQTERVHIFGGIAYCGKCGSKMVSTPGRLHVNGYRPTNYSCPKHRKTKECDNPTVSDTQVGEFVINYILNMLGAKKKFSTIENPEDLERCLLYGNTFSEVEHIDSNGLNEYFNLLSRYSSDDSYTFSVKKSRKKKAEVDPEVEALRKEKEKQERAMKRLQDLYLYSDTSMSEKDFIIRKTEISKRLEEINAMLGMVAKNSEPSLSDEEFVRQASHLLISRELQNRQYIYFKNLAQNVSPEILKAYMETVLDSVLLVDGRVSSIVFRNGLTHKFKYKS

SEQ ID NO: 642 - protein, 581 aa, Unknown
  Description of Unknown: Integrase B643 sequence
  PTHR30461:SF3,IPR036162,PS51737,IPR011109,PTHR30461, PS00397,PF00239,G3DSA:1.10.10.2600,IPR006119,SSF53041, SM00857,IPR025827,IPR038109,PS51736,cd03768, IPR006118,PF13408,G3DSA:3.40.50.1390,PF07508,Coil
MSRTTNKRPGKAKSGLSRKQKVAIYIRVSTLYQVDRDSLPMQRKDLIAYASLILGIEEYEIFEDAGYSGKNTDRPAFQEMMQRIRKGEFTHVLVWKIDRISRNLLDFAEMYEELQDLRVTFVSKNEQFDTSTAIGEAMLKIILVFAELERNMTSERVTATMISRANSGLWNGGRIPFGYDYDPDKTAFSIREDEEKVCQMIKNDYMEHKSLVHTSRMLNASGYKTRSGVEWSPTAVWIIVSSPFYAGIYRYNRYKGTERRVENPEDEWIMIQNHHPAIFSLEEHEKMLAILDENSRNRRSVGQRHQTERVHIFGGIAYCGKCGSKMVSTPGRLHVNGYRPTNYSCPKHRKTKECDNPTVSDTQVGEFVINYILNMLGAKKKFSTIENPEDLERCLLYGNTFSEVEHIDSNGLNEYFNLLSRYSSDDSYTFSVKKSRKKKAEVDPEVAALRKEKEKQERAMKRLQDLYLYSDTSMSEKDFIIRKTEISKRLEEINAMLGMVAKNSEPSLSDEEFVRQASHLLISRELQNRQYIYFKNLAQSVSPEILKVYMETVLDSVLLVDGRVSSIVFRNGLTHKFKYKS

SEQ ID NO: 643 - protein, 581 aa, Unknown
  Description of Unknown: Integrase B644 sequence
  PTHR30461:SF3,IPR036162,PS51737,IPR011109,PTHR30461, PS00397,PF00239,G3DSA:1.10.10.2600,IPR006119,SSF53041, cd00338,SM00857,IPR025827,IPR038109,PS51736, IPR006118,PF13408,G3DSA:3.40.50.1390,PF07508,Coil
MAYAMKVPTASADDRIVAIYVRVSTGYQVDKDSLPFQKKELKAYCKHILHVDMSRVEVFEDAGRSGKNTKRPAYERMMQKVRAGLVSHVLVYKIDRISRNLVDFSLMYDDFKYNRVTFVSLNEQFDTSSAIGEAVLKIILVFAELERKLTSERVKDIMIGRANEGKWNGARVPYGWDWDSSAGWPVHSEKEAPFGRAMYEMYLKVKSTGKIRDYNNAHGIPTKRGGEWTSKTVGDFLRNPMNKGDYRYNYRESARGRKKPIGEVVYLEGVFDPLIDPEIWEKVNKIMDINRDKRNMGGSHPVEKNCNVFAGLIQCGSCGSGYLVGKKDKRRKNGFTPSMYHCSAKTRAIHCQNLNVSEVKIGPFVINYVSAMVRVSNERRKIKTPEDLEEMLLSDKAVFADIMGLSSDSLNNTFELLTGKSATGGALWRADLVDQEGAVADPAEIENLKDQIRKYERAKERLEDAYYFSDDGMSEKEYLEKKNLFDSGRVAAENKLKELTETHIASGVDESAFMKSASAFLLTHKIRAGSHIVYSDLAGMVEEESIKEFFNLVLDHITVKDRRVTEIVFANGLSHKFIYRD

SEQ ID NO: 644 - protein, 581 aa, Unknown
  Description of Unknown: Integrase B645 sequence
  PTHR30461:SF3,IPR036162,PS51737,IPR011109,PTHR30461, PS00397,PF00239,G3DSA:1.10.10.2600,IPR006119,SSF53041, SM00857,IPR025827,IPR038109,PS51736,cd03768, IPR006118,PF13408,G3DSA:3.40.50.1390,PF07508,Coil
MSRTTNKRPGKAKSGLSRKQKVAIYIRVSTLYQVDRDSLPMQRKDLIAYASLILGIEEYEIFEDAGYSGKNTDRPAFQEMMQRIRKGEFTHVLVWKIDRISRNLLDFAEMYEELQDLRVTFVSKNEQFDTSTAIGEAMLKIILVFAELERNMTSERVTATMISRANSGLWNGGRIPFGYDYDPDKTAFSIREDEEKVCQMIKNDYMEHKSLVHTSRMLNASGYKTRAGAEWSPTAVWIIISSPFYAGIYRYNRYKGTERRVENPEDEWIMIQNHHPAIFSLEEHEKMLAILDENSRNRRSVGQKHQTERVHIFGGIAYCGKCGSKMVSTPGRLHANGYRPTNYSCPKHRKTKECDNPTVSDTQVGEFVINYILNMLGAKKKFSTIENPEDLERCLLYGNTFSEVEHIDSNGLNEYFNLLSRYSSDDSYTFSVKKSRKKKAEVDPEVEALRKEKEKQERAMKRLQDLYLYSDTSMSEKDFIIRKTEISKRLEEINAMLGMVAKNSEPSLSDEEFVRQASHLLISRELQNRQYIYFKNLAQNVSPEILKAYMETVLDSVLLVDGRVSSIVFRNGLTHKFKYKS

SEQ ID NO: 645 - protein, 581 aa, Unknown
  Description of Unknown: Integrase B646 sequence
  PTHR30461:SF3,IPR036162,PS51737,IPR011109,PTHR30461, PS00397,PF00239,G3DSA:1.10.10.2600,IPR006119,SSF53041, cd00338,SM00857,IPR025827,IPR038109,PS51736, IPR006118,PF13408,G3DSA:3.40.50.1390,PF07508,Coil
MSRTTNKRPGKAKSGLSRKQKVAIYIRVSTLHQVDRDSLPMQRKDLIAYASLILGIEEYEIFEDAGYSGKNTDRPAFQEMMQRIRKGEFTHVLVWKIDRISRNLLDFAEMYEELQDLRVTFVSKNEQFDTSTAIGEAMLKIILVFAELERNMTSERVTATMISRANSGLWNGGRIPFGYDYDPDKTAFSIREDEEKVCQMIKNDYMEHKSLVHTSRMLNASGYKTRAGAEWSPTAVWIIISSPFYAGIYRYNRYKGTERRVENPEDEWIMIQNHHPAIFSLEEHEKMLAILDENSRNHRSVGQKHQTERVHIFGGIAYCGKCGSKMVSTPGRLHANGYRPTNYSCPKHRKTKECDNPTVSDTQVGEFVINYILNMLGAKKKFSTIENPEDLERCLLYGNTFSEVEHIDSNGLNEYFNLLSRYSSDDSYTFSVKKSRKKKAEVDPEVEALRKEKEKQERAMKRLQDLYLYSDTSMSEKDFIIRKTEISKRLEEINAMLGMVAKNSEPSLSDEEFVRQASHLLISRELQNRQYIYFKNLAQNVSPEILKAYMETVLDSVLLVDGRVSSIVFRNGLTHKFKYKS

SEQ ID NO: 646 - protein, 581 aa, Unknown
  Description of Unknown: Integrase B647 sequence
  PTHR30461:SF3,IPR036162,PS51737,IPR011109,PTHR30461, PS00397,PF00239,G3DSA:1.10.10.2600,IPR006119,SSF53041, SM00857,IPR025827,IPR038109,PS51736,cd03768, IPR006118,PF13408,G3DSA:3.40.50.1390,PF07508,Coil
MAYAMKVPAASADDRIVAIYVRVSTGYQVDKDSLPFQKKELKAYCKHILHVDMSRVELFEDAGRSGKNTKRPAYERMMQKVRAGLVSHVLVYKIDRISRNLVDFSLMYDDFKYNRVTFVSLNEQFDTSSAIGEAVLKIILVFAELERKLTSERVKDIMIGRANEGKWNGARVPYGWDWDSSAGWPVHSEKEAPFGRAMYEMYLEVKSTGKIRDYNNAHGIPTKRGGEWTSKTVGDFLRNPMNKGDYRYNYRESARGRKKPIDEVVYLEGVFDPLIDPEIWEKVNKIMDINRDKRNMGGLHPVEKNCNVFAGLIQCGSCGSGYLVGKKDKRRKNGFTPSMYYCSAKTRAIHCQNLNVSDVKIGPFVINYISAMVRVSNERRKIKTPEDLEEILLSDKAVFADIMGLSSDSLNNTFELLTGKSATGGALWRADLVDQEGVAADPAEIESLKDQIRKYERAKERLEDAYYFSDDGMSEKEYLEKKNRFDSGRVAAENKLKELTETHIASGVDESAFMKSASAFLLTHKIRAGSHIVYSDLAGMVEEESIKEFFNLVLDHITVKDRRVTEIVFANGLSHKFIYRD

SEQ ID NO: 647 - protein, 581 aa, Unknown
  Description of Unknown: Integrase B648 sequence
  PTHR30461:SF3,IPR036162,PS51737,IPR011109,PTHR30461, PS00397,PF00239,G3DSA:1.10.10.2600,IPR006119,SSF53041, SM00857,IPR025827,IPR038109,PS51736,cd03768, IPR006118,PF13408,G3DSA:3.40.50.1390,PF07508,Coil
MARKRTNLIGNTPSVRETKVAIYIRVSTIHQVDKDSIPMQKKDLIAYCQLILGTDNYEIFEDAGYSGKNTDRPAFQNMMGRIRKGEFTHVLVWKIDRVSRNLLDFAEMYEELRSLRVTFVSKNEQFDTSTAIGEAMLKIILVFAELERNMTSERVTATMISRANSGQWNGGRIPFGYSYDPKEKVFSIREDEASICRELKDLYLLNRSLAYVSRALNEKGYKTRAGVSWSPHSVWIIASSPFYAGIYRYNRYKGVESRTINPEEEWVMIQNHHPAIFTLEEHQTMRSIMKSNQRNMDNLPGRVHLSTKTHIFQGIMYCDKCGSKMVSTPGRLHVDGYRTSNYGCPLRRNTKKCNNPTVNDIVIGEFVINYILNMLNAKKTFSTINTPDELNAALLSGSVFSEVSSVEENGLNSFFNLLSRYGSDRSYIFSVKNPRKKKAAVDPELSKLRKEKEKQERALQRLQDLYLYSETSMSEKDFIIRKSEISSHLDNINRQLGLMTQDQASFLSDEEFIKQASHLLIQKELKNKKYIYFKKLVSTVDPDILKAYMETILDSIYTADGKITAITFKNGLTHRFIYKDK

SEQ ID NO: 648 - protein, 581 aa, Unknown
  Description of Unknown: Integrase B649 sequence
  PTHR30461:SF3,IPR036162,PS51737,IPR011109,PTHR30461, PS00397,PF00239,G3DSA:1.10.10.2600,IPR006119,SSF53041, SM00857,IPR025827,IPR038109,PS51736,cd03768, IPR006118,PF13408,G3DSA:3.40.50.1390,PF07508,Coil
MARKRTNLIGNTPSVRETKVAIYIRVSTIHQVDKDSIPMQKKDLIAYCQLILGTDNYEIFEDAGYSGKNTDRPAFQNMMGRIRKGEFTHVLVWKIDRVSRNLLDFAEMYEELRSLRVTFVSKNEQFDTSTAIGEAMLKIILVFAELERNMTSERVTATMISRANSGQWNGGRIPFGYSYDPKEKVFSIREDEASICRELKDLYLLNRSLVYVSRALNEKGYKTRAGVSWSPHSVWIIASSPFYAGIYRYNRYKGVESRTINPEEEWVMIQNHHPAIFTLEEHQAMRSIMKSNQRNMDNLPGRVHLSTKTHIFQGIMYCDKCGSKMVSTPGRLHVDGYRTSNYGCPLRRNTKKCNNPTVNDIIIGEFVINYILNMLNAKKTFSTINTPDELNAALLSGSVFSEISSVEENGLNSFFNLLSRYGSDRSYIFSVKSPRKKKAAVDPELSKLRKEKEKQERALQRLQDLYLYSETSMSEKDFIIRKSEISSHLDNINRQLGLMTQDQASFLSDEEFIKQASHLLIQKELKNKKYIYFKKLVSTVDPDILKAYMETILDSIYTADGKITAITFKNGLTHRFIYKDK

SEQ ID NO: 649 - protein, 581 aa, Unknown
  Description of Unknown: Integrase B650 sequence
  SM00857,G3DSA:1.10.10.2600,IPR036162,PF13408,PS51737, G3DSA:3.40.50.1390,IPR025827,IPR006119,IPR038109,IPR011109, SSF53041,PTHR30461,Coil,PS51736,cd00338, PF00239
MAIEHRGDGKARRERVKGKLIGPYKRKKNAPHANPPRFVQGKAIPSQRRQVHHIMPKKDRAAIYARFSSHNQREESIEIQVEKSREYCEAHALEVVRIYTDSAKTGRNTNRDGFQRMMEDAKSGIFDFVVIYKVTRIMRNRDEMAVARIMLRKAGVEILYAGETLGEGSTRIMHLGMLEVLAEYESAVNAERVRDGIAKNAERGLANGQVRYGWDIVDGRYQINEHEAAVMRKMRSMLFSGHTVADIVLALKGELTHRGNPLGRNTAVRLLRREQNCGVYDYAGTRIEGGMPALWSREDQDMIESILDRRRVPHRQIDAEQECPLSGKLWCTECGRAMIGVSGTSKSGKVYRYYKCRKCRRAHRREVVEEAVYDCIVESLGQQETRDRIAEVLALYWVDNPEPDPEVQRKAEASRIRKEIREVDAAIENIWKAVESGTVLPGVSERMASLNQRKAELENEMENLGDGEDDRVTLDHVTAWLDYARTEADPTDILNMFVGRIDICGDELRIYCNFDPIDPVGEDEKTDINENTRLEDGCSHDSLWRPTSSTARTLTTININGSRAHIDVAKDYFVVVTLFGK

SEQ ID NO: 650 - protein, 581 aa, Unknown
  Description of Unknown: Integrase B651 sequence
  PTHR30461:SF3,SM00857,IPR006118,G3DSA:1.10.10.2600,IPR036162, PS51737,G3DSA:3.40.50.1390,Coil,IPR006119,IPR038109, PF07508,SSF53041,IPR011109,PTHR30461,PS00397, PS51736,cd00338,PF00239
MAYRSTITTPSAASRKVKAALYIRVSTLYQIDKDSLPFQRQELINLAKYMLGTDDYEVFEDAGYSGKNTDRPSYQRMMTRIRQKEFSHLCVWKIDRISRNLLDFAAMYDELKKYNVTFVSKNEQFDTSSAMGEAMLKIILVFAELERKLTSERVMGVMLDRASKGLWNGARMPLGYKWDTNAKFPVIDADEAVTIRFIFDKYEEVKSTLQISRILNRNHIKTKRGGEWTSKTVNDIVRNPFYKGTYRYNYRESARGAIKNEEEWIIVPNALPAIITEEQWTRCNALMDSHHETKDTSSFRVCHTHIFAGILKCCDCGGGFSSNRDRPRLSGWRPSTYRCTRSAKMQDCPTFGISDVVLGPFIFNYIANFVRLQRKGTNYTVESIEKALLSGKPFENIIGIDSTSLEETLLALKQYNLSSNAANYSPDLLEELPNQSDNGSNIDIELLRQEENKYKTALQRLLDLYLFDPTAMPQKDYLLRKEELEGKLQEVQASIKRNSASTPEVAGATDISFIKKASAFIISQRILSKQDIDFEDLIQKCTPELLKDLVNSTIKEIGIRGRRVEYIEFQSGLRHTFIYKD

SEQ ID NO: 651 - protein, 581 aa, Unknown
  Description of Unknown: Integrase B652 sequence
  PTHR30461:SF3,IPR036162,PS51737,IPR011109,PTHR30461, PS00397,PF00239,G3DSA:1.10.10.2600,IPR006119,SSF53041, SM00857,IPR025827,IPR038109,PS51736,cd03768, IPR006118,PF13408,G3DSA:3.40.50.1390,PF07508,Coil
MAKLAKRISEVLSELKAAIYIRVSTQYQVDRASLPVQREELINYAKYALGIDNYVVFEDPGYSAKNTDRPDYQRMMARVRTGEFSHILVWKIDRISRNLLDFAAMYAELKQLGVTFVSKNEQFDTSNAMGEAMLKIILVFAELERNMTSERVSAVMLSRASDGVWNGGKTPFGYSYDKETKRFSIVDDEAKVVLHIYDLYEMAQSLVTVAKTLNEKGIRSRTGKPWNPTTVRTMLTNPFYAGTYRYNYRDESKGKTFSVKSESEWVMVEDHHPAIVTRERQNHIAAILRSKQRGGVGSGETYQRKNTHIFAGLLKCGCCGSTMVSTVDRPRSDGWRPSVYICARRRRFNDCQNKYVSDITLGPFVLNFIANLIRVSRSFGKSTSIETLEKKLLRGDMFSNVDHIERAGLEELYNHLRSGFDGLSFEAHSVNAAESGANLQERDLLLSEKRRLERALNRLKSLFLYGEEAIAEKDYLTERKQITDSLEEIDARLAELDVASASSLSMSDEEFIAKASYFILTQQLQDKRFIDYEKFIRKINPHIVKDFLNSVVSNFCIENGLTTSVLFKNGLEIRFSYKQAE

SEQ ID NO: 652 - protein, 581 aa, Unknown
  Description of Unknown: Integrase B653 sequence
  PTHR30461:SF3,IPR036162,PS51737,IPR011109,PTHR30461, PS00397,PF00239,G3DSA:1.10.10.2600,IPR006119,SSF53041, SM00857,IPR025827,IPR038109,PS51736,cd03768, IPR006118,PF13408,G3DSA:3.40.50.1390,PF07508,Coil
MSRTTNKRPGKAKSGLSRKQKVAIYIRVSTLYQVDRDSLPMQRKDLIAYASLILGIEEYEIFEDAGYSGKNTDRPAFQEMMQRIRKGEFTHVLVWKIDRISRNLLDFAEMYEELQELRVTFVSKNEQFDTSTAIGEAMLKIILVFAELERNMTSERVTATMISRANSGLWNGGRIPFGYDYDPDKTAFSIREDEEKVCQMIKNDYMEHKSLVHTSRMLNASGYKTRAGAEWSPTAVWIIISSPFYAGIYRYNRYKGTERRVENPEDEWIMIQNHHPAIFSLEEHEKMLAILDENSRNHRSVGQKHQTERVHIFGGIAYCGKCGSKMVSTPGRLHANGYRPTNYSCPKHRKTKECDNPTVSDTQVGEFVINYILNMLGAKKKFSTIENPEDLERCLLYGNTFSEVEHIDSNGLNEYFNLLSRYSSDDSYTFSVKKSRKKKAEVDPEVEALRKEKEKQERAMKRLQDLYLYSDTSMSEKDFIIRKTEISKRLEEINAMLGMVAKNSEPSLSDEEFVRQASHLLISRELQNRQYIYFKNLAQNVSPEILKAYMETVLDSVLLVDGRVSSIVFRNGLTHKFKYKS

SEQ ID NO: 653 - protein, 581 aa, Unknown
  Description of Unknown: Integrase B654 sequence
  PTHR30461:SF3,IPR036162,PS51737,IPR011109,PTHR30461, PS00397,PF00239,G3DSA:1.10.10.2600,IPR006119,SSF53041, SM00857,IPR025827,IPR038109,PS51736,cd03768, IPR006118,PF13408,G3DSA:3.40.50.1390,PF07508,Coil
MAYAMKAPATSADDRIVAIYVRVSTGYQVDKDSLPFQKKELKAYCKHILHVDMSRVEIFEDAGRSGKNTKRPAYERMMQKVRAGLVSHVLVYKIDRISRNLVDFSLMYDDFKYNRVTFVSLNEQFDTSSAIGEAVLKIILVFAELERKLTSERVKDIMIGRANEGKWNGARVPYGWDWDSSAGWPVHSKKEAPFGRAMYEMYLEVKSTGKIRDYNNAHGIPTKRGGEWTSKTVGDFLRNPMNKGDYRYNYRESARGRKKPIDEVVYLEGVFEPLVDPEIWEKVNKIMDINRDKRNMCGSHPVEKNCNVFAGLIQCGSCGSGYLVGKKDKRRKNGFTPSMYYCSAKTRAIHCQNLNVSDVKIGPFAINYISAMVRVSNERRKVKTPEDLEEMLLSDKAVFADIMGLSSDSLNSTFELLTGKSATGGALWRADLVDQEGAAADPAEIESLKDQIRKYERAKERLEDAYYFSDDGMSEKEYLEKKNRFDSWRVAAENKLKELTETHIASGVDESAFMKSASAFLLTHKIRAGSHIVYSDLAGMVEEESIKEFFNLVLDHITVKDRRVTEIVFANGLSHKFIYRD

SEQ ID NO: 654 - protein, 581 aa, Unknown
  Description of Unknown: Integrase B655 sequence
  PTHR30461:SF3,IPR036162,PS51737,IPR011109,PTHR30461, PS00397,PF00239,G3DSA:1.10.10.2600,IPR006119,SSF53041, SM00857,IPR025827,IPR038109,PS51736,cd03768, IPR006118,PF13408,G3DSA:3.40.50.1390,PF07508,Coil
MARKRTNLIGNTPSVRETKVAIYIRVSTIHQVDKDSIPMQKKDLIAYCQLILGTDNYEIFEDAGYSGKNTDRPAFQNMMGRIRKGEFTHVLVWKIDRVSRNLLDFAEMYEELRSLRVTFVSKNEQFDTSTAIGEAMLKIILVFAELERNMTSERVTATMISRANSGQWNGGRIPFGYSYDPKEKVFSIREDEASICRELKDLYLLNRSLAYVSRALNEKGYKTRAGVSWSPHSVWIIASSPFYAGIYRYNRYKGVEGRTINPEEEWVMIQNHHPAIFTLEEHQAMRSIMKSNKRNMDNLPGRVHLSTKTHIFQGIMYCDKCGSKMVSTPGRLHVDGYRTSNYGCPLRRNTKKCNNPTVNDIVIGEFVINYILNMLNAKKTFSTINTPDELNAALLSGSVFSEVSSVEENGLNSFFNLLSRYGSDRSYIFSVKNPRKKKAAVDPELSKLRKEKEKQERALQRLQDLYLYSETSMSEKDFIIRKSEISSHLDNINRQLGLMTQDQASFLSDEEFIKQASHLLIQKELKNKKYIYFKKLVSTVDPDILKAYMETILDSIYTADGKITAITFKNGLTHRFIYKDK

SEQ ID NO: 655 - protein, 581 aa, Unknown
  Description of Unknown: Integrase B656 sequence
  PTHR30461:SF3,IPR036162,PS51737,IPR011109,PTHR30461, PS00397,PF00239,G3DSA:1.10.10.2600,IPR006119,SSF53041, cd00338,SM00857,IPR025827,IPR038109,PS51736, IPR006118,PF13408,G3DSA:3.40.50.1390,PF07508,Coil
MAYAMKVPAASADDRIVAIYVRVSTGYQVDKDSLPFQKKELKAYCKHILHVDMSRVEIFEDAGRSGKNTKRPAYERMMQKVRAGLVSYVLVYKIDRISRNLVDFSLMYDDFKYNRVTFVSLNEQFDTSSAIGEAVLKIILVFAELERKLTSERVKDIMIGRANEGKWNGARVPYGWDWDSSAGWPVHSEKEAPFGRAMYEMYLEVKSTGKIRDYNNAHNIPTKRGGEWTSKTVGDFLRNPMNKGDYRYNYRESARGRKKPVDEVVYLEGVFEPLVDPEIWEKVNKIMDINRDQRNMGGSHPVEKNCNVFAGLIQCGSCGSGYLVGKKDRRRKNGFTPSMYYCGAKTRAIHCQNLNVSDVKIGPFVINYISAMVRVSNERRKIKTPEDLEEMLLSDKTVFADIMGLSSDSLNNTFELLTGKSATGGALWRADLVDQEGVAADPAEIESLKDQIRKYERAKERLEDAYYFSDDGMSEKEYLEKKNRFDSGRVAAENKLKELTETHIASGVDESAFMKSASAFLLTHKIRAGSHIVYSDLAGMVEEESIKEFFNLVLDHITVKDRRVTEIVFANGLSHKFIYRD

SEQ ID NO: 656 - protein, 581 aa, Unknown
  Description of Unknown: Integrase B657 sequence
  PTHR30461:SF3,IPR036162,PS51737,IPR011109,PTHR30461, PS00397,PF00239,G3DSA:1.10.10.2600,IPR006119,SSF53041, SM00857,IPR025827,IPR038109,PS51736,cd03768, IPR006118,PF13408,G3DSA:3.40.50.1390,PF07508,Coil
MSRTTNKRPGKAKSGLSRKQKVAIYIRVSTLYQVDRDSLPMQRKDLIAYASLILGIEEYEIFEDAGYSGKNTDRPAFQEMMQRIRKGEFTHVLVWKIDRISRNLLDFAEMYEELQDLRVTFVSKNEQFDTSTAIGEAMLKIILVFAELERNMTSERVTATMISRANSGLWNGGRIPFGYDYDPDKTTFSIREDEEKVCQMIKNDYMEHKSLVHTSRMLNASGYKTRSGVEWSPTAVWIIVSSPFYAGIYRYNRYKGTERRVENPEDEWIMIQNHHPAIFSLEEHEKMLAILDENSRNRRSVGQRHQTERVHIFGGIAYCGKCGSKMVSTPGRLHVNGYRPTNYSCPKHRKTKECDNPTVSDTQVGEFVINYILNMLGAKKKFSTIENPEDLERCLLYGNTFSEVEHIDSNGLNEYFNLLSRYSSDDSYTFSVKKSRKKKAEVDPEVAALRKEKEKQERAMKRLQDLYLYSDTSMSEKDFIIRKTEISKRLEEINAMLGMVARNSEPSLSDEEFVRQASHLLISRELQNRQYIYFKNLAQNVSPEILKAYMETVLDSVLLVDGRVSSIVFRNGLTHKFKYKS

SEQ ID NO: 657 - protein, 581 aa, Unknown
  Description of Unknown: Integrase B658 sequence
  PTHR30461:SF3,IPR036162,PS51737,IPR011109,PTHR30461, PS00397,PF00239,G3DSA:1.10.10.2600,IPR006119,SSF53041, SM00857,IPR025827,IPR038109,PS51736,cd03768, IPR006118,PF13408,G3DSA:3.40.50.1390,PF07508,Coil
MAYAAKTLAASADDRIVAIYVRVSTGYQVDKDSLPFQKKELKAYCKHILHIDMSRVEIFEDAGRSGKNTKRPAYERMMQKVRAGLVSHVLVYKIDRISRNLVDFSLMYDDFKYNRVTFVSLNEQFDTSSAIGEAVLKIILVFAELERKLTSERVKDIMIGRANEGKWNGARVPYGWDWDSSAGWPVHSKKEAPFARAMYEMYLEVKSTGKIRDYNNAHKIPTKRGGEWTSKTVGDFLRNPMNKGDYRYNYRESARGRKKPIDEIVYLEGVFDPLVDPDVWEKVNKIMDINRDQRNIGGSHPIEKNCNVFAGLIQCGSCGSGYLVGKKDKRRKNGFTPSLYYCGAKTRAIHCQNLNVSDVKIGPFVINYISAMVRVSNERRKIKSPEELEEMLLFDKAVFADIMGLSSDSLNTTFELLTGKSATGGALWRADLVDREGAAADPAEIENLKDQIRKYERAKERLEDAYYFSDDGMSEKEYLEKKNRFDSMRVSAENKLKELTETHIASGVDESAFMKSASAFLLTHKIRAGSHIVYSDLAGMVEEESIKEFFNLVLDHITVKDRRVTEIVFSNGLSHKFIYRD

SEQ ID NO: 658 - protein, 581 aa, Unknown
  Description of Unknown: Integrase B659 sequence
  PTHR30461:SF3,IPR036162,PS51737,IPR011109,PTHR30461, PS00397,PF00239,G3DSA:1.10.10.2600,IPR006119,SSF53041, SM00857,IPR025827,IPR038109,PS51736,cd03768, IPR006118,PF13408,G3DSA:3.40.50.1390,PF07508,Coil
MAYAMKVPAASADDRIVAIYVRVSTGYQVDKDSLPFQKKELKAYCKHILHIDMSRVEIFEDAGRSGKNTKRPAYERMMQKVRAGLVSHVLVYKIDRISRNLVDFSLMYDDFKYNRVTFVSLNEQFDTSSAIGEAVLKIILVFAELERKLTSERVKDIMIGRANEGKWNGARVPYGWDWDSSAGWPVHSKKEAPFARAMYEMYLEVKSTGKIRDYNNAHKIPTKRGGEWTSKTVGDFLRNPMNKGDYRYNYRESARGRKKPADEIVYLEGVFDPLVDPDVWEKVNKIMDSNRDKRNMGGLHPIESNCNVFAGLIQCGLCGSGYLVGKKDKRRKNGFTPSLYYCGAKTRAIHCQNLNVSDVKIGPFVINYISAMVRVSNERLKIKTPEDLEEMLLSDKAVFADIMGLSSDSLNSTFELLTGKSATGSALWRADLVDQEGAAADPAEIESLKDQIRKYERAKERLEDAYYFSDDGMSEKEYLEKKNRFDSGRVAAENKLKELTETHIASGVDESSFMKSASAFLLTHKIRAGSHIVYSDLAGMVEEESIKEFFNLVLDHITVKDRRVTEIVFANGLSHKFIYRD

SEQ ID NO: 659 - protein, 581 aa, Unknown
  Description of Unknown: Integrase B660 sequence
  PTHR30461:SF3,IPR036162,PS51737,IPR011109,PTHR30461, PS00397,PF00239,G3DSA:1.10.10.2600,IPR006119,SSF53041, cd00338,SM00857,IPR025827,IPR038109,PS51736, IPR006118,PF13408,G3DSA:3.40.50.1390,PF07508,Coil
MAYRFSQQTAAPDTRTVALYVRVSTGYQVDKDSLPFQKQELRNYCRHVLHIEESRLEVFEDAGKSGKNTKRPAFERMMAKVKAGLVSHVIVYKIDRISRNLVDFSLMYDDFKYNRVTFISLNEQFDTSSAIGEAVLKIILVFAELERKLTSERVKDIMIGRANEGKWNGARVPYGWDWDSVACRPVHSEKEAPFARAMYEMYLEVKSTGKIRDYNNAHGVPTKRGGEWTSKTVSDFLRNPLNKGDYRYNYRESAKGRKKPEDEVVYLEGVFDPLVDPELWDKVNKIMDSNRDKRNMGGLHPIEKNCNIFAGLIRCSVCGADYLVGKKDKRRKNGFTPSIYYCGSKTKAIHCKNLNVSDVKIGPFMINYISAMVRVSNERRKIKSPEDLESMLLSDKAVFGEIAGLSSDSLNSTYELLTGKSVTSGALWHADLVDQGGTADGSAEIAELKNQIQKYERAKERLEDAYYFSDDSMSEKEYLEKKNRFDSGRVAAENKLKKLTETHIAAGVDESSFIKSASAFLLTHKIRAGSHIVYSDLAGMIEEESIKEFFNLVLDHIIVKDRRIIEVVFANGLSHKFIYRE

SEQ ID NO: 660 - protein, 581 aa, Unknown
  Description of Unknown: Integrase B661 sequence
  PTHR30461:SF3,IPR036162,PS51737,IPR011109,PTHR30461, PS00397,PF00239,G3DSA:1.10.10.2600,IPR006119,SSF53041, SM00857,IPR025827,IPR038109,PS51736,cd03768, IPR006118,PF13408,G3DSA:3.40.50.1390,PF07508,Coil
MAYAMKVPAASADDRIVAIYVRVSTGYQVDKDSLPFQKKELKAYCKHILHVDMSLVEIFEDAGRSGKNTKRPAYERMMQKVRAGLVSHVLVYKIDRISRNLVDFSLMYDDFKYNRVTFVSLNEQFDTSSAIGEAVLKIILVFAELERKLTSERVKDIMIGRANEGKWNGARVPYGWDWDSSAGWPVHSEKEAPFGRAMYEMYLKVKSTGKIRDYNNAHGIPTKRGGEWTSKTVGDFLRNPMNKGDYRYNYRESARGRKKPIDEVVYLEGVFDPLIDPEIWEKVNKIMDINRDKRNMAGSHPVEKNCNVFAGLIQCGSCGSGYLVGKKDKRRKNGFTPSMYYCSAKTRAIHCQNLNVSDVKIGPFVINYISAMVRVSNERRKIKTPEDLEETLLSDKAVFADIMGLSSDSLNNTFELLTGKSATGGALWRADLVDQEGVAADPAEIESLKDQIRKYERAKERLEDAYYFSDDGMSEKEYLEKKNRFDSGRVAAENKLKELTETHIASGVDESAFMKSASAFLLTHKIRAGSHIVYSDLAGMVEEESIKEFFNLVLDHITVKDRRVTEIVFANGLSHKFIYRD

SEQ ID NO: 661 - protein, 581 aa, Unknown
  Description of Unknown: Integrase B662 sequence
  PTHR30461:SF3,IPR036162,PS51737,IPR011109,PTHR30461, PS00397,PF00239,G3DSA:1.10.10.2600,IPR006119,SSF53041, SM00857,IPR025827,IPR038109,PS51736,cd03768, IPR006118,PF13408,G3DSA:3.40.50.1390,PF07508,Coil
MAYAMKVPAASADDRAVAIYVRVSTGYQVDKDSLPFQKKELKAYCKHILHVDMSRVEIFEDAGRSGKNTKRPAYERMMQKVRAGLVSHVLVYKIDRISRNLVDFSLMYDDFKYNRVTFVSLNEQFDTSSAIGEAVLKIILVFAELERKLTSERVKDIMIGRANEGKWNGARVPYGWDWDSSAGWPVHSEKEAPFGRAMYEMYLKVKSTGKIRDYNNAHGIPTKRGGEWTSKTVGDFLRNPMNKGDYRYNYRESARGRKKPIDEVVYLEGVFDPLIDPEIWEKVNKIMDINRDKRNMGGLHPVEKNCNVFAGLIQCGSCGSGYLVGKKDKRRKNGFTPSMYYCSAKTRAIHCQNLNVSDVKIGPFVINYISAMVRVSNERRKIKTPEDLEEILLSDKAVFADIMGLSSDSLNNTFELLTGKSATGGALWRADLVDQEGVTADPAEIESLKDQIRKYERAKERLEDAYYFSDDGMSEKEYLEKKNRFDSGRVAAENKLKELTETHIASGVDESAFMKSASAFLLTHKIRAGSHIVYSDLAGMVEEESIKEFFNLVLDHITVKDRRVTEIVFANGLSHKFIYRD

SEQ ID NO: 662 - protein, 581 aa, Unknown
  Description of Unknown: Integrase B663 sequence
  PTHR30461:SF3,IPR036162,PS51737,IPR011109,PTHR30461, PF00239,G3DSA:1.10.10.2600,IPR006119,SSF53041,cd00338, SM00857,IPR025827,IPR038109,mobidb-lite,PS51736, PF13408,G3DSA:3.40.50.1390,PF07508,Coil
MRQKFNTDLSMLTPEEQQQFHDDPTTLTKGEVDVALYLRFSSERQKEQSIEGQLRDCIAYCKRKSFRIVAIYVDRATTARKDVEKRVHFQEMISDSAHHLWNFVVVWKLDRFARNREDSAVFKMRLRKNGVRVKSATETISDNPEGIILESVLEGIAEYYSADLSQKITRGLRESAMKGHSVGGHVPLGYKIEDHRLVINPATAHIVQEAFQLYANGESMAEICRIFNSKGYRTAKNSEFNRSSFKSMFKNVRYIGTYIYKDIKKENAIPAIIDKDLFETVQRRLSLAADAPARGKAKVDYLLSGKLFCGHCGATMNGESGTSKTGAIHNYYTCYSRKRRKGCNKKPLKKDFIERVVAQDAMALLTDDVIEELADMAMSQADRDLKENTRIPELSTRLTEIEQGINNITKAIEKGIASDTLLNRLTELEKEKKDLTSQLHEEEKYICRIDRDQIIFWLTKFQGGNIEDEDCRRRVIDLLVNSVTVWDEPDGYKITTAYNLTSCKTKTFRVSNNADSPSGEGFGFGELSSTIAEPDEPAWFVWLFYARRSARSAVFSRCPIRCHTARRAFSRKPKPSCVFSV

SEQ ID NO: 663 - protein, 581 aa, Unknown
  Description of Unknown: Integrase B664 sequence
  PTHR30461:SF3,IPR036162,PS51737,IPR011109,PTHR30461, PS00397,PF00239,G3DSA:1.10.10.2600,IPR006119,SSF53041, SM00857,IPR025827,IPR038109,PS51736,cd03768, IPR006118,PF13408,G3DSA:3.40.50.1390,PF07508,Coil
MAYAMKVPAASADDRIVAIYVRVSTGYQVDKDSLPFQKKELKAYCKHILHVDMSRVEIFEDAGRSGKNTKRPAYERMMQKVRAGLVSHVLVYKIDRISRNLVDFSLMYDDFKYNRVTFVSLNEQFDTSSAIGEAVLKIILVFAELERKLTSERVKDIMIGRANEGKWNGARVPYGWDWDSSAGWPVHSEKEAPFGRAMYEMYLKVKSTGKIRDYNNAHCIPTKRGGEWTSKTVGDFLRNPMNKGDYRYNYRESARGRKKPIDEVVYLEGVFDPLIDPEIWEKVNKIMDINRDKRNMVGSHPVEKNCNVFAGLIQCGSCGSGYLVGKKDKRRKNGFTPSMYYCGAKTRAIHCQNLNVSDVKIGPFVINYISAMVRVSNERRKIKTPEDLEKMLLSDKAVFADIMGLSSDSLNNTFELLTGKSATGGALWRADPVDQEGVAADPAEIESLKDQIRKYERAKERLEDAYYFSDDGMSEKEYLEKKNRFDSGRVAAENKLKELTETHIASGVDESAFMKSASAFLLTHKIRAGSHIVYSDLAGMVEEESIKEFFNLVLDHITVKDRCVTEIVFANGLSHKFIYRD

SEQ ID NO: 664 - protein, 581 aa, Unknown
  Description of Unknown: Integrase B665 sequence
  PTHR30461:SF3,IPR036162,PS51737,IPR011109,PTHR30461, PS00397,PF00239,G3DSA:1.10.10.2600,IPR006119,SSF53041, SM00857,IPR025827,IPR038109,PS51736,cd03768, IPR006118,PF13408,G3DSA:3.40.50.1390,PF07508,Coil
MAYAMKVPAASADDRIVAIYVRVSTGYQVDKDSLPFQKKELKAYCKHILHVDMSRVEIFEDAGRSGKNTKRPAYERMMQKVRAGLVSHVLVYKIDRISRNLVDFSLMYDDFKYNRVTFVSLNEQFDTSSAIGEAVLKIILVFAELERKLTSERVKDIMIGRANEGKWNGARVPYGWDWDSSAGWPVHSEKEAPFGRAMYEMYLKVKSTGKIRDYNNAHGIPTKRGGEWTSKTVGDFLRNPMNKGDYRYNYRESARGRKKPIDEVVYLEGVFDPLIDPEIWEKVNKIMDINRDKRNMAGSHPVEKNCNVFAGLIQCGSCGSGYLVGKKDKRRKNGFTPSMYYCSAKTRAIHCQNLNVSDVKIGPFVINYISAMVRVSNERRKIKTPEDLEETLLSDKAVFADIMGLSSDSLNNTFELLTGKSATGGALWRADLVDQEGAAADPAEIESLKDQIRKYERAKERLEDAYYFSDDGMSEKEYLEKKNRFDSGRVAAENKLKELTETHIASGVDESAFMKSASAFLLTHKIRAGSHIVYSDLAGMVEEESIKEFFNLVLDHITVKDRRVTEIVFANGLSHKFIYRD

SEQ ID NO: 665 - protein, 581 aa, Unknown
  Description of Unknown: Integrase B666 sequence
  PTHR30461:SF3,IPR036162,PS51737,IPR011109,PTHR30461, PS00397,PF00239,G3DSA:1.10.10.2600,IPR006119,SSF53041, SM00857,IPR025827,IPR038109,PS51736,cd03768, IPR006118,PF13408,G3DSA:3.40.50.1390,PF07508,Coil
MSRTTNKRPGKAKSGLSRKQKVAIYIRVSTLYQVDRDSLPMQRKDLIAYASLILGIEEYEIFEDAGYSGKNTDRPAFQEMMQRIRKGEFTHVLVWKIDRISRNLLDFAEMYEELQDLRVTFVSKNEQFDTSTAIGEAMLKIILVFAELERNMTSERVTATMISRANSGLWNGGRIPFGYDYDPDKTAFSIREDEEKVCQMIKNDYMEHKSLVHTSRMLNASGYKTRAGAEWSPTAVWIIISSPFYAGIYRYNRYKGTERRVENPEDEWIMIQNHHPAIFSLEEHEKMLAILDENSRNHRSVGQKHQTERVHIFGGIAYCGKCGSKMVSTPGRLHANGYRPTNYSCPKHRKTKECDNPTMSDTQVGEFVINYILNMLGAKKKFSTIENPEDLERCLLYGNTFSEVEHIDSNGLNEYFNLLSRYSSDDSYTFSVKKSRKKKAEVDPEVEALRKEKEKQERAMKRLQDLYLYSDTSMSEKDFIIRKTEISKRLEEINAMLGMVAKNSEPSLSDEEFVRQASHLLISRELQNRQYIYFKNLAQNVSPEILKAYMETVLDSVLLVDGRVSSIVFRNGLTHKFKYKS

SEQ ID NO: 666 - protein, 581 aa, Unknown
  Description of Unknown: Integrase B667 sequence
  PTHR30461:SF3,IPR036162,PS51737,IPR011109,PTHR30461, PS00397,PF00239,G3DSA:1.10.10.2600,IPR006119,SSF53041, SM00857,IPR025827,IPR038109,PS51736,cd03768, IPR006118,PF13408,G3DSA:3.40.50.1390,PF07508,Coil
MARKRTNLIGNTPSVRETKVAIYIRVSTIHQVDKDSIPMQKKDLIAYCQLILGTDNYEIFEDAGYSGKNTDRPAFQNMMGRIRKGEFTHVLVWKIDRVSRNLLDFAEMYEELRSLRVTFVSKNEQFDTSTAIGEAMLKIILVFAELERNMTSERVTATMISRANGGQWNGGRIPFGYSYDPKEKVFSIREDEASICRELKDLYLLNRSLAYVSRALNEKGYKTRAGVSWSPHSVWIIASSPFYAGIYRYNRYKGVESRTINPEEEWVMIQNHHPAIFTLEEHQAMRSIMKSNKRNMDNLPGRVHLSTKTHIFQGIMYCDKCGSKMVSTPGRLHVDGYRTSNYGCPLRRNTKKCNNPTVNDIVIGEFVINYILNMLNAKKTFSTINTPDELNAALLSGSVFSEVSSVEENGLNSFFNLLSRYGSDRSYIFSVKSPRKKKAAVDPELSKLRKEKEKQERALQRLQDLYLYSETSMSEKDFIIRKSEISSHLDNINRQLGLMTQDQASFLSDEEFIKQASHLLIQKELKNKKYIYFKKLVNTVDPDILKAYMETILDSIYTADGKITAITFKNGLTHRFIYKDK

SEQ ID NO: 667 - protein, 581 aa, Unknown
  Description of Unknown: Integrase B668 sequence
  PTHR30461:SF3,SM00857,G3DSA:1.10.10.2600,IPR036162,PF13408, PS51737,G3DSA:3.40.50.1390,IPR025827,IPR006119,IPR038109, PF07508,IPR011109,SSF53041,PTHR30461,Coil, PS51736,cd00338,PF00239
MRQKFKIDLSMLTPEEQQQFRDDSTTLTKGEVDVALYLRFSSERQKEQSIEGQLRDCIAYCKRKSFRIVAIYVDRATTARKDVEKRVHFQEMISDSAHHLWNFVVVWKLDRFARNREDSAVFKMRLRKNGVRVKSATETISDNPEGIILESVLEGIAEYYSADLSQKITRGLRESAMKGHSVGGHVPLGYKIEDHRLVINPATAHIVQEAFQLYANGESVAEICRIFNGKGYRTAKNSEFNRSSFKSIFKNVRYIGTYIYKDIEKENAIPAIIDKDLFETVQRRLSLAADAPARGKAKVDYLLSGKLFCGHCGATMNGESGTSKTGAIHNYYTCYSRKRRKGCNKKPLKKDFIERVVAQDAMALLTDDVIEELADMAMSQADKDLKENTRIPELSARLTEVEQGINNITKVVEKGIASDALLNRLTELEKEKKDLTSQLREEEKYICRIDRDQIIFWLTKFQGGDIEDEDCRRRIIDLLVNSVTVWDEPDGYKITTAYNLTSCKTKTFRVSNNADSPSGEGFGFGELSSTIAEPDEPAWFVWLFYARRSAWSAVFSRCPIRCHTARWAFSRKAKPCCVFSV

SEQ ID NO: 668 - protein, 581 aa, Unknown
  Description of Unknown: Integrase B669 sequence
  PTHR30461:SF3,IPR036162,PS51737,IPR011109,PTHR30461, PS00397,PF00239,G3DSA:1.10.10.2600,IPR006119,SSF53041, SM00857,IPR025827,IPR038109,PS51736,cd03768, IPR006118,PF13408,G3DSA:3.40.50.1390,PF07508,Coil
MARKRTNLIGNTPSVRETKVAIYIRVSTIHQVDKDSIPMQKKDLIAYCQLILGTDNYEIFEDAGYSGKNTDRPAFQNMMGRIRKGEFTHVLVWKIDRVSRNLLDFAEMYEELRSLRVTFVSKNEQFDTSTAIGEAMLKIILVFAELERNMTSERVTATMISRANSGQWNGGRIPFGYSYDPKEKVFSIREDEASICRELKDLYLLNRSLAYVSRALNEKGYKTRAGASWSPHSVWIIASSPFYAGIYRYNRYNGVESRTINPEEEWVMIQNHHPAIFTLEEHQAMRSIMKSNKRNMDNLPGRVHLSTKTHIFQGIMYCDKCGSKMVSTPGRLHVDGYRTSNYGCPLRRNTKKCNNPTVNDIIIGEFVINYILNMLNAKKTFSTINTPDELNAALLSGSVFSEVSSVEENGLNSFFNLLSRYGSDRSYIFSVKSPRKKKAAVDPELSKLRKEKEKQERALQRLQDLYLYSETSMSEKDFIIRKSEISSHLDNINRQLGLMTQDQASFLSDEEFIKQASHLLIQKELKNKKYIYFKKLVSTVDPDILKAYMETILDSIYTADGKITAITFKNGLTHRFIYKDK

SEQ ID NO: 669 - protein, 581 aa, Unknown
  Description of Unknown: Integrase B670 sequence
  PTHR30461:SF3,IPR036162,PS51737,IPR011109,PTHR30461, PS00397,PF00239,G3DSA:1.10.10.2600,IPR006119,SSF53041, SM00857,IPR025827,IPR038109,PS51736,cd03768, IPR006118,PF13408,G3DSA:3.40.50.1390,PF07508,Coil
MAYAMKVPAASADDLIVAIYVRVSTGYQVDKDSLPFQKKELKAYCKHILHVDMSRVEIFEDAGRSGKNTKRPAYERMMQKVRAGLVSHVLVYKIDRISRNLVDFSLMYDDFKYNRVTFVSLNEQFDTSSAIGEAVLKIILVFAELERKLTSERVKDIMIGRANEGKWNGARVPYGWDWDSSAGWPVHSEKEAPFGRAMYEMYLKVKSTGKIRDYNNAHGIPTKRGGEWTSKTVGDFLRNPMNKGDYRYNYRESARGRKKPIDEVVYLEGVFDPLVDPEIWEKVNKIMDINRDKRNMGGSHPVEKNCNVFAGLIQCGSCGSGYLVGKKDKRRKNGFTPSMYYCSAKTRAIHCQNLNVSDVKIGPFVINYISAMVRVSNERRKVKTPEDLEEMLLSDKAVFADIMGLSSDSLNSTFELLTGKSATGGALWRADLVDQEGAAADPAEIESLKDQIRKYERAKERLEDAYYFSDDGMSEKEYLEKKNQFDSGRVAAENKLKELTETHIASGVDESAFMKSASAFLLTHKIRAGSHIVYSDLAGMVEEESIKEFFNLVLDHITVKDRRVTEIVFANGLSHKFIYRG

SEQ ID NO: 670 - protein, 581 aa, Unknown
  Description of Unknown: Integrase B671 sequence
  PTHR30461:SF3,IPR036162,PS51737,IPR011109,PTHR30461, PS00397,PF00239,G3DSA:1.10.10.2600,IPR006119,SSF53041, SM00857,IPR025827,IPR038109,PS51736,cd03768, IPR006118,PF13408,G3DSA:3.40.50.1390,PF07508,Coil
MARKRTNLIGNTPSVRETKVAIYIRVSTIHQVDKDSIPMQKKDLIAYCQLILGTDNYEIFEDAGYSGKNTDRPAFQNMMGRIRKGEFTHVLVWKIDRVSRNLLDFAEMYEELRSLRVTFVSKNEQFDTSTAIGEAMLKIILVFAELERNMTSERVTATMISRANGGQWNGGRIPFGYSYDPKEKVFSIREDEASICRELKDLYLLNRSLAYVSRALNEKGYKTRAGVSWSPHSVWIIASSPFYAGIYRYNRYKGVESRTINPEEEWVMIQNHHPAIFTLQEHQAMRSIMKSNKRNMDNLPGRVHLSTKTHIFQGIMYCDKCGSKMVSTPGRLHVDGYRTSNYGCPLRRNTKKCNNPTVTDIVIGEFVINYILNMLNAKKTFSTINTPDELNAALLSGSVFSEVSSVEENGLNSFFNLLSRYGSDRSYIFSVKSPRKKKAAVDPELSKLRKEKEKQERALQRLQDLYLYSETSMSEKDFIIRKSEISSHLDNINRQLGLMTQDQASFLSDEEFIKQASHLLIQKELKNKKYIYFKKLVSTVDPDILKAYMETILDSIYTADGKITAITFKNGLTHRFIYKDK

SEQ ID NO: 671 - protein, 581 aa, Unknown
  Description of Unknown: Integrase B672 sequence
  PTHR30461:SF3,IPR036162,PS51737,IPR011109,PTHR30461, PS00397,PF00239,G3DSA:1.10.10.2600,IPR006119,SSF53041, SM00857,IPR025827,IPR038109,PS51736,cd03768, IPR006118,PF13408,G3DSA:3.40.50.1390,PF07508,Coil
MAYAMKVPAASADDRIVAIYVRVSTGYQVDKDSLPFQKKELKAYCKHILHVDMSRVEIFEDAGRSGKNTKRPAYERMMQKVRAGLVSHVLVYKIDRISRNLVDFSLMYDDFKYNRVTFVSLNEQFDTSSAIGEAVLKIILVFAELERKLTSERVKDIMIGRANEGKWNGARVPYGWDWDSSAGWPVHSEKEAPFGRAMYEMYLEVKSTGKIRDYNNAHGIPTKRGGEWTSKTVGDFLRNPMNKGDYRYNYRESARGRKKPIDEVVYLEGIFDPLIDPEIWEKVNKIMDINRDKRNMVGSHPVEKNCNVFAGLIQCGSCGSGYLVGKKDKRRKNGFTPSMYYCGAKTRAIHCQNLNVSDVKIGPFVINYISAMVRVSNERRKIKTPEDLEEILLSDKAVFADIMGLSSDSLNNTFELLTGKSTTGGALWRADLVDQEGAVADPAEIESLKDQIRKYERAKERLEDAYYFSDDGMSEKEYLEKKNRFDSGRVAAENKLKELTETHIASGVDESAFMKSASAFLLTHKIRAGSHIVYSDLAGMVEEESIKEFFNLVLDRITVKDRRVVEIMFANGLSHKFIYRD

SEQ ID NO: 672 - protein, 581 aa, Unknown
  Description of Unknown: Integrase B673 sequence
  PTHR30461:SF3,cd00338,SM00857,G3DSA:1.10.10.2600,IPR036162, PF13408,PS51737,G3DSA:3.40.50.1390,IPR025827,IPR006119, IPR038109,PF07508,IPR011109,SSF53041,PTHR30461, PS51736,Coil,PF00239
MARKKNIAAGLDAVIYARYSSHNQREVSIEQQIAECTKHAAALGLRIVGTYEDRAISGKTDNRPRFQQMMRDAEKGKFQAVVAWKSNRIGRNMLQAMVNEAKLDDYGVKVFYAEEDFDDTAAGRFALRNMMNVNQFYSENMAEDITRGLYDNANKCMANGRQPLGYKRGADGKVMLDEPAAAVVREIFTRVAAGDLFVDIARDLNAKGIKTSKGAAWNKGSFQSICQNERYKGIYIYGDVRIVDGIPRIVSDELWYRVQEAMRMKKNPVGTRHRVGAEDYLLTGKLRCGHCGSYMTGVSGTSRNGELHYYYTCQKRRTEHACNKKNVRRDVIEPAIAQAIKMYCLTDDVIEWMADQTVQYWEKHDNDLQIEALEQQLAENKKATSNMLLAIEMGIITEATRSRMVELETENSKLTAQLSAAKRDVVKINREDLIDELHILRSKDIQDREVQAELFKDFLVAAYIYDDNRLKMVFSFMGKDNSVEIPLETGEDPPDGEDSPDAKMFVLTPDCSTKKSTVLRLKYGAFLFAFLEVASRISQMPDFAGAWTATPNSCYFAAFENACSMPDCFAGRRITPPQCKE

SEQ ID NO: 673 - protein, 581 aa, Unknown
  Description of Unknown: Integrase B674 sequence
  PTHR30461:SF3,IPR036162,PS51737,IPR011109,PTHR30461, PS00397,PF00239,G3DSA:1.10.10.2600,IPR006119,SSF53041, SM00857,IPR025827,IPR038109,PS51736,cd03768, IPR006118,PF13408,G3DSA:3.40.50.1390,PF07508,Coil
MSRTTNKRPGKAKSGLSRKQKVAIYIRVSTLYQVDRDSLPMQRKDLIAYASLILGIEEYEIFEDAGYSGKNTDRPAFQEMMQRIRKGEFTHVLVWKIDRISRNLLDFAEMYEELQDLRVTFVSKNEQFDTSTAIGEAMLKIILVFAELERNMTSERVTATMISRANSGLWNGGRIPFGYDYDPDKTAFSIREDEEKVCQMIKNDYMEHKSLVHTSRMLNASGYKTRAGAEWSPTAVWIIISSPFYAGIYRYNRYKGTERRVENPEDEWIMIQNHHPAIFSLEEHEKMLAILDENSRNHRSVGQKHQTERVHIFGGIAYCGKCGSKMVSTPGRLHANGYRPTNYSCPKHRKTKECDNPTVSDTQVGEFVINYILNMLGAKKKFSTIENPEDLERCLLYGNTFSEVEHIDSNGLNEYFNLLSRYSSDDSYTFSVKKSRKKKAEVDPEVEALRKEKEKQERAMKRLQDLYLYSDTSMSEKDFIIRKTEISKRLEEINAMLGMVAKNSEPSLSDEEFVRQASHLLISSELQNRQYIYFKNLAQNVSPEILKAYMETVLDSVLLVDGRVSSIVFRNGLTHKFKYKS

SEQ ID NO: 674 - protein, 581 aa, Unknown
  Description of Unknown: Integrase B675 sequence
  PTHR30461:SF3,IPR036162,PS51737,IPR011109,PTHR30461, PS00397,PF00239,G3DSA:1.10.10.2600,IPR006119,SSF53041, SM00857,IPR025827,IPR038109,PS51736,cd03768, IPR006118,PF13408,G3DSA:3.40.50.1390,PF07508,Coil
MARKRTNLIGNTPSVRETKVAIYIRVSTIHQVDKDSIPMQKKDLIAYCQLILGTDNYEIFEDAGYSGKNTDRPAFQNMMGRIRKGEFTHVLVWKIDRVSRNLLDFAEMYEELRSLRVTFVSKNEQFDTSTAIGEAMLKIILVFAELERNMTSERVTATMISRANSGQWNGGRIPFGYSYDPKEKVFSIREDEASICRELKDLYLLNRSLAYVSRALNEKGYKTRAGVSWSPHSVWIIASSPFYAGIYRYNRYKGVESRTINPEEEWVMIQNHHPAIFTLEEHQTMRSIMKSNQRNMDNFPGRVHLSTKTHIFQGIMYCDKCGSKMVSTPGRLHVDGYRTSNYGCPLRRNTKKCNNPTVNDIVIGEFVINYILNMLNAKKTFSTINTPDELNAALLSGSVFSEVSSVEENGLNSFFNLLSRYGSDRSYIFSVKSPRKKKAAVDPELSKLRKEKEKQERALQRLQDLYLYSETSMSEKDFIIRKSEISSHLDNINRQLGLMTQDQASFLSDEEFIKQASHLLIQKELKNKKYIYFKKLVSTVDPDILKAYMETILDSIYTADGKITAITFKNGLTHRFIYKDK

SEQ ID NO: 675 - protein, 581 aa, Unknown
  Description of Unknown: Integrase B676 sequence
  cd00338,SM00857,G3DSA:1.10.10.2600,IPR036162,PF13408, PS51737,IPR025827,G3DSA:3.40.50.1390,IPR006119,IPR038109, PF07508,IPR011109,SSF53041,PTHR30461,PS51736, Coil,PF00239
MSTGAGLRAVFYARVSTEEEKQLNALEKQIQENKDVIRDHGWKLVGEYIDEGKTGTTTKRRSDYKRLLKDMTENKFDIVVCKDQDRLQRNTLDWYLFVDNLVTNNLKLFMYLDNKFFKPSEDALITGVKAIIAEEYSRNLSKKLNNSNKRRIERALNGEEVSAMGNGKSLAFKIVNGKWVKDEEEAKLGKKIFELYLEYDSIRKVRDWVNEHGYTNSVGKPFTSESISRILKNEKAKGVIVMGKYHHDFDKKKIVRRSEEELVRIPAPELAYVSEEVFDKVQERLRAKTGNGRGVNAYSDPLSGKIYCGSCGRKLWKHASNGYVNWMCASQVAKGDVECNGTRITTVAIRNIYKKITDNLEVNKEVVKQDIVKWLSELKATLSDTSVNEKIQKDLDKLEGKRTKLLEAYLEDLISKGDYKAKYETIEGQIEEKKKLLVPVEENEDIKAIESVLQNIDNEIDDYVKTLDMEESKVDFLIEHTKRITVLENRDIIIELDLVAGAIIAGKDFLLYVHDTMQIADGRVCVKGYSRKAWSHFQLRDRFRCHQQRRNLERHRQPGLSAGTGGVEETWDWKNGIYKLF

SEQ ID NO: 676 - protein, 581 aa, Unknown
  Description of Unknown: Integrase B677 sequence
  PTHR30461:SF3,IPR036162,PS51737,IPR011109,PTHR30461, PS00397,PF00239,G3DSA:1.10.10.2600,IPR006119,SSF53041, SM00857,IPR025827,IPR038109,PS51736,cd03768, IPR006118,PF13408,G3DSA:3.40.50.1390,PF07508,Coil
MAYATKTLAASADDRIVAIYVRVSTGYQVDKDSLPFQKKELKAYCKHILHIDMSRVEIFEDAGRSGKNTKRPAYERMMQKVRAGLVSHVLVYKIDRISRNLVDFSLMYDDFKYNRVTFVSLNEQFDTSSAIGEAVLKIILVFAELERKLTSERVKDIMIGRANEGKWNGARVPYGWDWDSSAGWPVHSKKEAPFARAMYEMYLEVKSTGKIRDYNNAHKIPTKRGGEWTSKTVGDFLRNPMNKGDYRYNYRESARGRKKPADEIVYLEGIFEPLVDPEIWEKVNKIMDINRDQRNIGGSHPIEKNCNVFAGLIQCGSCGSGYLVGKKDKRRKNGFTPSLYYCGAKTRAIHCQNLNVSDVKIGPFVINYISAMVRVSNERRKIKSPEELEEMLLSDKAVFADIMGLSSDSLNTTFELLTGKSATGGALWRADLVDQEGAAADPAEIENLKDQIQKYERAKERLEDAYYFSDDGMSEKEYLEKKNRFDSGRVAAENKLKELTETHIASGVDESSFMKSASAFLLTHKIHAGSHIVYSDLAGMVEEESIKEFFNLVLDHITVKDRRVTEIVFANGLSHKFIYRD

SEQ ID NO: 677 - protein, 581 aa, Unknown
  Description of Unknown: Integrase B678 sequence
  PTHR30461:SF3,IPR036162,PS51737,IPR011109,PTHR30461, PS00397,PF00239,G3DSA:1.10.10.2600,IPR006119,SSF53041, SM00857,IPR025827,IPR038109,PS51736,cd03768, IPR006118,PF13408,G3DSA:3.40.50.1390,PF07508,Coil
MAYAMKVPAASADDRIVAIYVRVSTGYQVDKDSLPFQKKELKAYCKHILHVDMSRVEIFEDAGRSGKNTKRPAYERMMQKVRAGLVSHVLVYKIDRISRNLVDFSLMYDDFKYNRVTFVSLNEQFDTSSAIGEAVLKIILVFAELERKLTSERVKDIMIGRANEGKWNGARVPYGWDWDSSAGWPVHSEKEAPLGRAMYEMYLKVKSTGKIRDYNNAHCIPTKRGGEWTSKTVGDFLRNPMNKGDYRYNYRESARGRKKPVDEVVYLEGVFEPLIDPEIWEKVNKIMDINRDKRNMVGSHPVEKNCNVFAGLIQCGSCGSGYLVGKKDRRRKNGFTPSMYYCGAKTRAIHCQNLNVSDVKIGPFVINYISAMVRVSNERRKIKTPEDLEEMLLSDKAVFADIMGLSSDSLNNTFELLTGKSATGGALWRADLVDQEGVAADPAEIESLKDQIRKYERAKERLEDAYYFSDDGMSEKEYLEKKNRFDSGRVAAENKLKELTETHIASGVDESAFMKSASAFLLTHKIRAGSHIVYSDLAGMVEEESIKEFFNLVLDHITVKDRRVTEIVFANGLSHKFIYRD

SEQ ID NO: 678 - protein, 581 aa, Unknown
  Description of Unknown: Integrase B679 sequence
  PTHR30461:SF3,IPR036162,PS51737,IPR011109,PTHR30461, PS00397,PF00239,G3DSA:1.10.10.2600,IPR006119,SSF53041, SM00857,IPR025827,IPR038109,PS51736,cd03768, IPR006118,PF13408,G3DSA:3.40.50.1390,PF07508,Coil
MAYAMKVPAASADDRAVAIYVRVSTGYQVDKDSLPFQKKELKAYCKHILHVDMSRVEIFEDAGRSGKNTKRPAYERMMQKVRAGLVSHVLVYKIDRISRNLVDFSLMYDDFKYNRVTFVSLNEQFDTSSAIGEAVLKIILVFAELERKLTSERVKDIMIGRANEGKWNGARVPYGWDWDSSAGWPVHSEKEAPFGRAMYEMYLEVKSTGKIRDYNNAHGIPTKRGGEWTSKTVGDFLRNPMNKGDYRYNYRESARGRKKPIDEVVYLEGVFDPLIDPEIWEKVNKIMDINRDKRNMGGLHPVEKNCNVFAGLIQCGSCGSGYLVGKKDKRRKNGFTPSMYYCSAKTRAIHCQNLNVSDVKIGPFVINYISAMVRVSNERRKIKAPEDLEEMLLSDKAVFADIMGLSSDSLNNTFELLTGKSANGVALWRADLVDQEGVAADPAEIESLKDQIRKYERAKERLEDAYYFSDDGMSEKEYLEKKNRFDSGRVAAENKLKELTETHIASGVDESAFMKSASAFLLTHKIRAGSHIVYSDLAGMVEEESIKEFFNLVLDHITVKDRRVTEIVFANGLSHKFIYRD

SEQ ID NO: 679 - protein, 581 aa, Unknown
  Description of Unknown: Integrase B680 sequence
  PTHR30461:SF3,IPR036162,PS51737,IPR011109,PTHR30461, PS00397,PF00239,G3DSA:1.10.10.2600,IPR006119,SSF53041, SM00857,IPR025827,IPR038109,PS51736,cd03768, IPR006118,PF13408,G3DSA:3.40.50.1390,PF07508,Coil
MARKKTNLIGNTPSVRETKVAIYIRVSTIHQVDKDSIPMQKKDLIAYCQLILGTDNYEIFEDAGYSGKNTDRPAFQNMMGRIRKGEFTHVLVWKIDRVSRNLLDFAEMYEELRSLRVTFVSKNEQFDTSTAIGEAMLKIILVFAELERNMTSERVTATMISRANSGQWNGGRIPFGYSYDPKEKVFSIREDEASICRELKDLYLLNRSLAYVSRALNEKGYKTRAGVSWSPHSVWIIASSPFYAGIYRYNRYKGVESRTINPEEEWVMIQNHHPAIFTLEEHQAMRSIMKSNKRNMDNLPGRVHLSTKTHIFQGIMYCDKCGSKMVSTPGRLHVDGYRTSNYGCPLRRNTKKCNNPTVNDIVIGEFVINYILNMLNAKKTFSTINTPDELNAALLSGSVFSEVSSVEENGLNSFFNLLSRYGSDRSYIFSVKSPRKKKAAVDPELSKLRKEKEKQERALQRLQNLYLYSETSMSEKDFIIRKSEISSHLDNINRQLGLMTQDQASFLSDEEFIKQASHLLIQKELKNKKYIYFKKLVSTVDPDILKAYMETILDSIYTADGKITAITFKNGLTHRFIYKDK

SEQ ID NO: 680 - protein, 581 aa, Unknown
  Description of Unknown: Integrase B681 sequence
  SM00857,G3DSA:1.10.10.2600,IPR036162,PF13408,PS51737, G3DSA:3.40.50.1390,IPR025827,IPR006119,IPR038109,PF07508, IPR011109,SSF53041,PTHR30461,PS51736,cd00338, PF00239
MPEKIINCAIYTRKSTEEGLEQDFNSLDNQYEFCTNYLKSINDPALQLLPARYDDGGYSGGSLNRPALQRLLADIQCGLVNRVIIYKIDRLTREIRDFFKLLDIFEKYNVEFVSVKENQYYNTTTAIGRLMVNMFLVFAQFERENAGDRIRDKIATSKAKGMWMGGCPPYGYDIGDRCLVINETEAQNVRFIYQTFCNTHSLADTTDALNSGGIRTKRYTTRQGRTFGGRKFSVKTVQRILQNPLYKGMVAHRGKQYPGQHAAIIDAVQFDMVQAVFAAHKEKRETRRPKMPSSGGERETAALTGLIFCGCCGSAMTPSYCCKGDIRYHYYRCYRRASKLEDKCPINQIRTSEIDRVVMEQVLAILKSRDFFVQYISHHHEFDVSTAFALFNSLDDVWNSLFETEKRRILRELLAKVTIYKDKIVLDVKKAGLAGVFAELSQNNRLAEVEYKENETFQISVAYRATRLANGAKIIVPATAKEESRFNGSLRLARQIAKGFAWRKMIESGLSLQELTASAKTNERDIRFAMRLSMIDPAIVESVLSGKSPEFLTYAFMKKHPIPLLWSDQRKLYGFEERKQQ

SEQ ID NO: 681 - protein, 581 aa, Unknown
  Description of Unknown: Integrase B682 sequence
  PTHR30461:SF3,IPR036162,PS51737,IPR011109,PTHR30461, PS00397,PF00239,G3DSA:1.10.10.2600,IPR006119,SSF53041, SM00857,IPR025827,IPR038109,PS51736,cd03768, IPR006118,PF13408,G3DSA:3.40.50.1390,PF07508,Coil
MARKRTNLIGNTPSVRETKVAIYIRVSTIHQVDKDSIPMQKKDLIAYCQLILGTDNYEIFEDAGYSGKNTDRPAFQNMMGRIRKGEFTHVLVWKIDRVSRNLLDFAEMYEELRSLRVTFVSKNEQFDTSTAIGEAMLKIILVFAELERNMTSERVTATMISRANSGQWNGGRIPFGYSYDPKEKVFSIREDEASICRELKDLYLLNRSLVYVSRALNEKGYKTRAGANWSPHSVWIIASSPFYAGIYRYNRYKGVENRTINPEKEWVMIQNHHPAIFTLEEHHTMQSLLKSNQRNMDNLPGRIHTSEKTHIFQGLMYCDKCGSKMVSTPGRLHVDGYRASNYSCPLRRNTKKCNNPTINDIIVGEFVINYILNMLNAKKTFSTINTPDELNTALLSGSVFSEVSSIEENGLNSFFNLLSRYGYDRSYVFSVKSPRRKKAAVNPELSRLRKEKEKQERALQRLQDLYLYSETSMPEKDFIIRQSEISSHLNNINRQLGLMTQDQASFLSDEEFIKQASHLLIQKELKNKKYIYFKKLVSTVDPDILKAYMETILDSIYTADGKITAITFKNGLTHRFIYKDK

SEQ ID NO: 682 - protein, 580 aa, Unknown
  Description of Unknown: Integrase B683 sequence
  PTHR30461:SF3,SM00857,G3DSA:1.10.10.2600,IPR036162,PF13408, PS51737,G3DSA:3.40.50.1390,IPR025827,IPR006119,IPR038109, PF07508,IPR011109,SSF53041,PTHR30461,Coil, PS51736,cd00338,PF00239
MSVDIKWAIPQTGSQVTTEGDLAAVYTRYSSHNQGEQSIEGQLAAARRYAAEHGYTIVREYTDRAKSGRTDDREAFQQMLRDTAKKQFSVIILWKVDRFGRNREEIAINKMKCRKNGVRVEYVAEQIPDSPEGVILESVLEGFAEYYSLQLSQNIRRGLAKSAEKCKVTGGNRPLGYKTGPDKEFLIDEDNAPTVKLIFDMYAKGSTVKEIVDHLNQKGLRTLTGKAFTKNSLHTVLKNEKYRGVYTYKDIRVEGGVPRIVDDDTWYKVQEMLKINKRAPAKTWTRADYILTDKLFCGKCGGVMFGECGTSRTGVRHNYYTCSNRKKHHACDKKAVRQEDIEDLVIKATCNIFRDKELLDAIIENTWQYYLAQSDNQAELKGLTKQLNQTELAIKNLLRAIEAGILTEDTKARMDELTAQKAELKAAIADLQLARGFHLQKSHIAYYLTKLCDANYKDRDVQKRLIQTFVNAIFVFDDHLKITFNFSGDKNAVTLSTVQDAESGNVFGHRALCSTKIGKHRKMLADFILLFSVQRKFYVNSFSTLDKNPRSNSAVIVRNFCFFSTNYAFGACIQPLREVK

SEQ ID NO: 683 - protein, 580 aa, Unknown
  Description of Unknown: Integrase B684 sequence
  PTHR30461:SF3,IPR036162,PS51737,IPR011109,PTHR30461, PS00397,PF00239,G3DSA:1.10.10.2600,IPR006119,SSF53041, SM00857,IPR025827,IPR038109,PS51736,cd03768, IPR006118,PF13408,G3DSA:3.40.50.1390,PF07508,Coil
MARRKTTSRGVSTSIRETKVAIYIRVSTVHQIDKDSIPMQKRDLIAYCQLILGTDNYDIFEDAGYSGKNTDRPAFQDMMGRTRKGEFTHILVWKIDRISRNLLDFAEMYEELRSLRVTFVSKNEQFDTSTAIGEAMLKIVLVFAELERNMTSERVTATMISRANNGQWNGGRIPFGYSYDSTTTQFSIREDEAVVCRKLKDLYLSNKSLVYTARALNADGYKTRAGVDWTAHAVWFITSSPFYAGIYRYNRYKGTENRTLNPEDEWIMIPDHHPAIFTLEEHEAMKAILKNNSRYVRNPVGRLHTTANIHIFQGIAYCGKCGNKMVSTPGKKHVDGYRPSNYSCPLHRRSKKCDNATVNDMIIGEFTINYILNMLNAKKTFSTIDTPEELQRHLLAGSTFSNISSIEGNGLNDFFNLLARYGSDNSYVFAVKKPRKKKATINPELAALRKEKEKQERALQRLQDLYLYSDKSMSEKDFIIRKSEISDHLKNINAQLGLITQNPDSLLSDEEFIKQASHLLIQKELSNRKYIYYKNLATSVDPEILRTYMETILDSVYVTDGHVSSIVFKNGLTHKFIYKN

SEQ ID NO: 684 - protein, 580 aa, Unknown
  Description of Unknown: Integrase B685 sequence
  PTHR30461:SF3,SM00857,G3DSA:1.10.10.2600,IPR036162,PF13408, PS51737,G3DSA:3.40.50.1390,IPR025827,IPR006119,IPR038109, PF07508,IPR011109,SSF53041,PTHR30461,Coil, PS51736,cd00338,PF00239
MSVDIKWAIPQTGSQVTTEGDLAAVYTRYSSHNQGEQSIEGQLAAARRYAAEHGYTIVREYTDRAKSGRTDDREAFQQMLRDTAKKQFSVIILWKVDRFGRNREEIAINKMKCRKNGVRVEYVAEQIPDSPEGVILESVLEGFAEYYSLQLSQNIRRGLAKSAEKCKVTGGNRPLGYKTGPDKEFLIDEDNAPTVKLIFDMYAKGSTVKEIVDHLNQKGLRTLTGKAFTKNSLHTVLKNEKYRGVYTYKDIRVEGGVPRIVDDDTWYKVQEMLKINKRAPAKTWTRADYILTDKLFCGKCGGVMFGECGTSRTGVRHNYYTCSNRKKHHACDKKAVRQEDIEDLVIKATCNIFRDKELLDAIIENTWQYYLAQSDNQAELKGLTKQLNQTELAIKNLLRAIEAGILTEDTKARMDELTAQKAELKAAIADLQLARGFHLQKSHIAYYLTKLCDANYKDRDVQKRLIQTFVNAIFVFDDHLKITFNFSGDKNTVTLSTVQDAESGNVFGHRALCSTKIGKHRKMLADFILLFSVQRKFYVNSFSTLDKNPRSNSAVIVRNFCFFSTNYAFGACIQPLREVK

SEQ ID NO: 685 - protein, 580 aa, Unknown
  Description of Unknown: Integrase B686 sequence
  PTHR30461:SF3,IPR036162,PS51737,IPR011109,PTHR30461, PS00397,PF00239,G3DSA:1.10.10.2600,IPR006119,SSF53041, SM00857,IPR025827,IPR038109,PS51736,cd03768, IPR006118,PF13408,G3DSA:3.40.50.1390,PF07508,Coil
MVRRKTALRGVSASTRITKVAIYIRVSTIHQVDKDSIPMQKKDLIAYCQLILGTDNYEIFEDAGYSGKNTDRPAFQDMMGRIRKGEFTHVLVWKIDRISRNLLDFAEMYEELQSLRVTFVSKNEQFDTSTAIGEAMLKIVLVFAELERNMTSERVTATMISRANNGQWNGGRIPFGYSYDSGTSTFSIREDEAAVCRRLKDLYLDNKSLVYTARALNADGYKTRAGADWTPTAVWIIASSPFYAGIYRYNRYKGTENRTLNPEEEWVMIPDHHPAIFTLEEHEAMKSSLKTNARYVDNPVGKPHATANIHIFQGIAYCGKCGNKMVSTPGKKHADGYRPSNYSCPLHRRSKKCDNATVNDMIVGEFAINYILNMLNAKKTFSNIDTPEELQRHLLTGSTFSDISSIEEDGLNDFFNLLSRYGSDNSYVFAIKTPRRKKASVNPELAALRKEKEKQERALQRLQDLYLYSDKSMSEKDFILRKSEISDRLKNINAQLGLITQNPDSLLSDEEFIKQASHLLIQKELKGRKYIYYKNLATSVDPEILRTYMETILDSIYIIDGRISSIVFKNGLTHKFIYKN

SEQ ID NO: 686 - protein, 580 aa, Unknown
  Description of Unknown: Integrase B687 sequence
  PTHR30461:SF3,IPR036162,PS51737,IPR011109,PTHR30461, PS00397,PF00239,G3DSA:1.10.10.2600,IPR006119,SSF53041, SM00857,IPR025827,IPR038109,PS51736,cd03768, IPR006118,PF13408,G3DSA:3.40.50.1390,PF07508,Coil
MEFSKLTRVAIYIRVSTTMQAENGESLNVQRTQLTTYAQMMLNALPENIVIFEDAGYSGKNMDRPKFQDMMSQIRAGKFSHLLVWKIDRISRNLLDFSMMYKELKELGVTFVSKNEQFDTSTAMGEAMLKIILVFAELERNMTSERVTHTMIAMAQSGRWNGGRVPFGYTYRTEGEKKEKQIFEIDKGEAALVQEIFDLYEQERSIVREAKILNDRNAISRYGHEWSPVTVHLVLRNIFYVGDYRYNALREGDRSKPKPESEWIIVKDHHPAIISREQFARVQAILKANKRYRKDMAPASSRERIHIFGGLLFCGNCGKPLNNSVSNKKADGWQYSNYPCPTRRRSSNKCTGKSTSDPVVGEFVFNYILNMLNAQKGFKDIQTPAQLQDRLLFGDAFHNVISIDSDGLNSFFNLLSSGNISGAIYGKDVAVSKPKTAKVDPELVRLRKEKKRLERALDRLLNTYIMSDRPISENEYIRKRTDLETLLSDVNDKLGIAQSEEVQMALTDSEFLTKASQFIIGQKLSNRLYINYKNLAQSVDPSVLKTFVVSVIDNIVIYNGKVKSIVFRNGLAATFEYSSI

SEQ ID NO: 687 - protein, 580 aa, Unknown
  Description of Unknown: Integrase B688 sequence
  PTHR30461:SF3,IPR036162,PS51737,IPR011109,PTHR30461, PS00397,PF00239,G3DSA:1.10.10.2600,IPR006119,SSF53041, SM00857,IPR025827,IPR038109,PS51736,cd03768, IPR006118,PF13408,G3DSA:3.40.50.1390,PF07508,Coil
MEFSKLTRVAIYIRVSTTMQAENGESLNVQRTQLTTYAQMMLNALPENIVIFEDAGYSGKNMDRPKFQDMMSQIRAGKFSHLLVWKIDRISRNLLDFSMMYKELKELGVTFVSKNEQFDTSTAMGEAMLKIILVFAELERNMTSERVTHTMIAMAQSGRWNGGRVPFGYTYRTEGEKKEKQIFEIDKGEAALVQEIFDLYEQERSIVREAKILNDRNAISRYGHEWSPVTVHLVLMNIFYVGDYRYNALREGDRSKPKPESEWIIVKDHHPAIISREQFARVQAILKANKRYRKDMAPASSRERIHIFGGLLFCGNCGKPLNNSVSNKKADGWQYSNYPCPTRRRSSNKCTGKSTSDPVVGEFVFNYILNMLNAQKGFKDIQTPAQLQDRLLFGDAFHNVISIDSDGLNSFFNLLSSGNISGAIYGKDVAVSKPKTAKVDPELVRLRKEKKRLERALDRLLNTYIMSDRPISEIEYIRKRTDLETLLSDVNDKLGIAQSEEVQMALTDSEFLTKASQFIIGQKLSNRLYINYKNLAQSVDPSVLKTFVVSVIDNIVIYNGKVKSIVFRNGLAATFEYSSI

SEQ ID NO: 688 - protein, 580 aa, Unknown
  Description of Unknown: Integrase B689 sequence
  PTHR30461:SF3,SM00857,G3DSA:1.10.10.2600,IPR036162,PS51737, G3DSA:3.40.50.1390,IPR006119,IPR038109,PF07508,IPR011109, SSF53041,PTHR30461,PS51736,cd00338,PF00239
MYNMSPYSLSRSFRDKPCRAVIYGRASTEHEAQVKALQNQMQWYDDVARFHPQWNVISRYIDQGITGTQVYKRDAFMQMMEDAKQHKFDLIVTREVCRFARNTVDALVCVRQLAAMGIEVYFVNDNIWTLDGDGELRLTIMATMAQEESRKISERSLSGQRVSREKGVLYGNGNIFGYTRNKLTKQFEIDPDQAETVKMIFDLYDSGMGETLVAKELTRLGRKNGVGKVKWDAGKVSKIIKRKNYLGYTVYCQSYSNNYLEQKRIKRDESEFVYVKGGFPQIISEEQYERCNAIRRSRTKRLTDEKGRTRSFGVQQAQNVWGRKMRCRCGSPMLRHRWRTNSAGKPIYGYECKRHHDTPRIRLQNEQGNPTPICEIKPVGQSKLELMASKIFERVWGDQREIVLQTCKMLDACYKPDADRRADLMKAKDNSIQLLQQQLDDLVVVRARGEIEQDKFLQRTIEIQQQMEALRQSKAQIASEDYNPGRLDMEAIEAALCEAVEMHDGLVSEDFIDLFVSQVTPLSDSRFAWCLDFSPQPTVAFLNLAGQRKYTTCSMDSKLHFGSFADGEGHTIPFPGSLRR

SEQ ID NO: 689 - protein, 580 aa, Unknown
  Description of Unknown: Integrase B690 sequence
  PTHR30461:SF3,IPR036162,PS51737,IPR011109,PTHR30461, PS00397,PF00239,G3DSA:1.10.10.2600,IPR006119,SSF53041, SM00857,IPR025827,IPR038109,PS51736, cd03768,IPR006118,PF13408,G3DSA:3.40.50.1390,PF07508,Coil
MVRRKTALRGVSASTRITKVAIYIRVSTIHQVDKDSIPMQKKDLIAYCQLILGTDNYEIFEDAGYSGKNTDRPAFQDMMGRIRKGEFTHVLVWKIDRISRNLLDFAEMYEELQSLRVTFVSKNEQFDTSTAIGEAMLKIVLVFAELERNMTSERVTATMISRANNGQWNGGRIPFGYSYDSGTSTFSIREDEAAVCRRLKDLYLDNKSLVYTARALNADGYKTRAGADWTPTAVWIIASSPFYAGIYRYNRYKGTENRTLNPEEEWVMIPDHHPAIFTLEEHEAMKSSLKTNARYVDNPVGKPHATANIHIFQGIAYCGKCGNKMVSTPGKKHADGYRPSNYSCPLHRRSKKCDNATVNDMIVGEFAINYILNMLNAKKTFSNIDTPEELQRHLLTGSTFSDISSIEEDGLNDFFNLLSRYGSDNSYVFAIKTPRRKKASVNPELAALRKEKEKQERALQRLQDLYLYSDKSMSEKDFILRKSEISDRLKNINAQLGLITQNPDSLLSDEEFIKQASHLLIQKELKGRKYIYYKNLATSVDPEILRTYMETILDSMYIIDGRISSIVFKNGLTHKFIYKN

SEQ ID NO: 690 - protein, 580 aa, Unknown
  Description of Unknown: Integrase B691 sequence
  PTHR30461:SF3,SM00857,G3DSA:1.10.10.2600,IPR036162,PS51737, G3DSA:3.40.50.1390,IPR006119,IPR038109,PF07508,IPR011109, SSF53041,PTHR30461,PS51736,cd00338,PF00239
MYNMSPYSLSRSFRDKPCRAVIYGRASTEHEAQVKALQNQMQWYDDVARFHPQWNVINRYIDQGITGTQVYKRDAFMRMMEDAKQQKFDLIVTREVCRFARNTVDALVCVRQLAAIGIEVYFVNDNIWTLDGDGELRLTIMATMAQEESRKISERSLAGQRVSREKGVLYGNGNIFGYTRNKLTKQFEIDPDQAETVKMIFDLYDSGMGETLVAKELTRLGRKNGVGKVKWDAGKVSKIIKRKNYLGYTVYCQSYSNNYLEQKRIKRDESEFVYVKGGFPQIISEEQYERCNAIRRSRTKRLTDEKGRTRSFGIQQAQNVWGRKMRCRCGSPMLRHRWRTNNAGKPIYGYECKRHHDTPRIRLQNEQGNPTPICEIKPVGQSKLELMASKIFERVWGDQREIVLQTCKMLDACYKPDADRRADLMKAKDDSIQLLQQQLDDLVVVRARGEIEQDKFLQRTIEIQQQMEALRQSKAQIASEDYNPGRLDMEAIEAALCEAVEMHDGLVSEDFIDLFVSQVTPLSDSRFAWCLDFSPQPTVAFLNLAGQRKYTTCSMDSKLHFGPFADEEGHTIPFPGSLRR

SEQ ID NO: 691 - protein, 580 aa, Unknown
  Description of Unknown: Integrase B692 sequence
  SM00857,G3DSA:1.10.10.2600,IPR036162,PF13408, PS51737,G3DSA:3.40.50.1390,IPR025827,IPR006119, IPR038109,PF07508,IPR011109,SSF53041, PTHR30461,PS51736,cd00338,PF00239
MPEKIINCAIYTRKSTEEGLEQDFNSLDNQYEFCTNYLKSINDPALQLLPARYDDGGYSGGSLNRPALQRLLADIQCGLVNRVIIYKIDRLTREIRDFFKLLDIFEKYNVEFVSVKENQYYNTTTAIGRLMVNMFLVFAQFERENAGDRIRDKIATSKAKGMWMGGCPPYGYDIGDRCLVINETEAQNIRFIYQTFCNTHSLADTTEALNSGGIRTKCYTTRQGRTFGGRKFSVKTVQRILQNPLYKGMVTHRDKQYPGQHAAIIDAAQFDLVQAIFAAHKDKREARRCPPKASGGERETAALTGLIFCGCCGSAMTPSYCCKGDIRYHYYRCYRRASKLEDKCPINQIRTSEIDRVVMEQVLAILKSREFFVQYISHHHEFDVSTAFALFNNLDDVWNSLFETEKRRILRELLAKVTIFKDKIVLDVKKAGLAGVFAELSRNNRLAEVEYKENETFQISIAYRATRLANGAKIIVPATAKEESRFNGSLRLARQIAKGFAWRKMMESGLSLQELTASAKTNERDIRFAMRLSMIDPAIVESVLSGKSPEFLTYAFMKKHPIPLLWSDQRKLYGFEERKQ

SEQ ID NO: 692 - protein, 580 aa, Unknown
  Description of Unknown: Integrase B693 sequence
  PTHR30461:SF3,cd00338,SM00857,G3DSA:1.10.10.2600,IPR036162, PF13408,PS51737,G3DSA:3.40.50.1390,IPR025827,IPR006119, IPR038109,PF07508,IPR011109,SSF53041,PTHR30461, mobidb-lite,Coil,PF00239
MPRKPAKHPAKPKRGKKLEIEEPGVLYGRYSSHNQKDISVEQQFEKGYELAAEYGIRIIDTYADRAVSGRTDKRRDFQRMMTDAAKGKFRYVIAWKSNRMGRNMLEALINEARLQDLGVRVLYVEEDFDDTAAGRFAARSMMNVNQFYSENMAEDIKRGLYDNAANCMVANGHLPYGYKADETLHYAIDEPKAAVIREIFTRVSCGEAFVDIMASLNARGIKTSYGRPWGRSSFQKILSNERYRGIYIYGDVRKEGGIPRIISDELYFKVQEVITTKKNPQGRHRVNGDYLLTGKLFCGHCKSPMTGISGTSRSGSLHYYYVCQKRRTEKTCEKKNLRRDDIELQVAKAIKRRTLDDDTINWIADSVVEYSQHQESASGIGLLEDQLKDTQRSIKNLMAAIEQGIITPTTKARLMELEKEQSDIDRKITMAKADVIPVNRDQLVGWLKKLQAGDVHDKKYQAELFDTFLIAVYVYDNPDGQDYMKVVFNYAGSKNTVEIPLDPSVIDNVENIETGAVRLSSAQVHQTRKIRTCFRLEKGSDFSFSSGTTTKVPVDGAKLRYLVIDRKPITRFGGYDYEVR

SEQ ID NO: 693 - protein, 580 aa, Unknown
  Description of Unknown: Integrase B694 sequence
  SM00857,G3DSA:1.10.10.2600,IPR036162,PF13408,PS51737, IPR025827,G3DSA:3.40.50.1390,IPR006119,IPR038109,PF07508, IPR011109,SSF53041,PTHR30461,PS51736,cd00338, PF00239
MSEKIINCAIYTRKSTEEGLEQDFNSLDNQYEFCTNYLKSLNDPTLHLLPTRYDDGGYSGGSLNRPALQCLLADIRCGLVNRVIIYKIDRLTREIRDFFKLLDVFEKYNVEFVSVKENQYYNTTTAIGRLMVNMFLVFAQFERENAGDRIRDKIATSKAKGMWMGGCPPYGYDIGDRCLVINETEAQNIRFIYQTFCNTHSLADTTEALNSGGIRTKCYTTRQGRTFGGRKFSVKTVQRILQNPLYKGMVTHRDKQYPGQHAAIIDATQFDLVQAIFAAHKDKREARRCPQKASGGERETAALTGLIFCGCCGSAMTPSYCCKGDIRYHYYRCYRRASKLEDKCPINQIRTSEIDRVVMEQVLAILKSREFFVQYISHHHEFDVSTAFALFNNLDDVWNSLFETEKRRILRELLAKVTIFKDKIVLDVKKSGLAGVFAELSQNNLLAEVEYKENETFQISIAYRATRLANGAKIIVPATAKEESRFNGSLRLARQIAKGFAWRKMMESGLSLQELTASAKTNERDIRFAMRLSMIDPAIVESVLSGKSPEFLTYAFMKKHPIPLLWSDQRKLYGFEERKQ

SEQ ID NO: 694 - protein, 580 aa, Unknown
  Description of Unknown: Integrase B695 sequence
  PTHR30461:SF3,IPR036162,PS51737,IPR011109,PTHR30461, PS00397,PF00239,G3DSA:1.10.10.2600,IPR006119,SSF53041, SM00857,IPR025827,IPR038109,PS51736,cd03768, IPR006118,PF13408,G3DSA:3.40.50.1390,PF07508,Coil
MARRKTALRGVSASTRITKVAIYIRVSTIHQVDKDSIPMQKKDLIAYCQLILGTDNYEIFEDAGYSGKNTDRPAFQDMMGRIRKGEFTHVLVWKIERISRNLLDFAEMYEELQSLRVTFVSKNEQFDTSTAIGEAMLKIVLVFAELERNMTSERVTATMISRANNGQWNGGRIPFGYSYDSGTSTFSIREDAAVVCRRLKDLYLDNKSLVYTARALNADGYKTRAGADWTPTAVWIIASSPFYAGIYRYNRYKGTENRTLNPEEEWVMIPDHHPAIFTLEEHEAMKSSLKTNARYVDNPVGKPHATANIHIFQGIAYCGKCGNKMVSTPGKKHADGYRPSNYSCPLHRRSKKCDNATVNDMIVGEFAINYILNMLNAKKTFSNIDTPEELQRHLLTGSTFSDISSIEEDGLNDFFNLLSRYGSDNSYVFAIKTPRRKKASVNPELAALRKEKEKQERALQRLQDLYLYSDKSMSEKDFILRKSEISDRLKNINAQLGLITQNPDSLLSDEEFIKQASHLLIQKELKGRKYIYYKNLATSVDPEILRTYMETILDSMYIIDGRISSIVFKNGLTHKFIYKN

SEQ ID NO: 695 - protein, 580 aa, Unknown
  Description of Unknown: Integrase B696 sequence
  IPR036162,PS51737,IPR011109,PTHR30461,PS00397, PF00239,G3DSA:1.10.10.2600,IPR006119,SSF53041,cd00338, SM00857,IPR025827,IPR038109,PS51736,IPR006118, PF13408,G3DSA:3.40.50.1390,PF07508,Coil
MKKAAIYLRVSTSDQNYDRQEIELRQLASALGYEVKYVFEEKKSAVLKMDTREQLSEMRKLTNKDVDRIFIWDITRLSRRAIDFISLINEFADKGICLHFKDKNIITLEEDGSLNVLTGMYLYLLGVFAQMDAENLKAKMKSGKEAALLKGNSYTNNPPFGYELRNKHLYINEDEAKYVKMAYELYREGKDTQYIADMFNANNVPLKSGKKDIIWVKGTISQILNNTAYYGKGKRSTTIKKATANIPAEVKVSYFDTPAIISKELFEECRKIAMANICKQDKSRNLICLLRGLLKCGRCGKFYVLGNNNKQREYRDGDIRANVNNRVGCKNGSIKAMIADELVWKAIQNIYKYKKFKEKCIAEKEKYRLEIANNDNSITNMEKELKQLSIQSENLVKFAIKGLLSEEEFAKQKLYLESEKVRKNNILEELRATNLILQRKINAEFDYNILNEGVSLSLEEKKQICNDLIEDVFIYGYGAYKKLLQVNLKMDITYNILINTQHSISSYCIFDDEVATFSNPFKSDTLIKDMNLDIKIPDFDVTSDNNSLFSEEVFGVYSFDDMWNIMKKYGYIKKIDGDSN

SEQ ID NO: 696 - protein, 580 aa, Unknown
  Description of Unknown: Integrase B697 sequence
  PTHR30461:SF3,IPR036162,PS51737,IPR011109,PTHR30461, PS00397,PF00239,G3DSA:1.10.10.2600,IPR006119,SSF53041, SM00857,IPR025827,IPR038109,PS51736,cd03768, IPR006118,PF13408,G3DSA:3.40.50.1390,PF07508,Coil
MVRRKTALRGVSASTRITKVAIYIRVSTIHQVDKDSIPMQKKDLIAYCQLILGTDNYEIFEDAGYSGKNTDRPAFQDMMGRIRKGEFTHVLVWKIDRISRNLLDFAEMYEELQSLRVTFVSKNEQFDTSTAIGEAMLKIVLVFAELERNMTSERVTATMISRANNGQWNGGRIPFGYSYDSGTSTFSIREDEAVVCRRLKDLYLDNKSLVYTARALNADGYKTRAGADWTPTAVWIIASSPFYAGIYRYNRYKGTENRTLNPEEEWVMIPDHHPAIFTLEEHEAMKSSLKTNARYVDNPVGKPHATANIHIFQGIAYCGKCGNKMVSTPGKKHADGYRPSNYSCPLHRKSKKCDNATVNDMIVGEFAINYILNMLNAKKTFSNIDTPEELQRHLLIGSTFSDISSIEEDGLNDFFNLLSRYGSDNSYVFAIKTPRRKKASVNPELAALRKEKEKQERALQRLQDLYLYSDKSMSEKDFILRKSEISDRLKNINAQLGLITQNPDSLLSDEEFIKQASHLLIQKELKGRKYIYYKNLATSVDPEILRTYMETILDSVYITDGHVSSIVFKNGLTHKFIYKN

SEQ ID NO: 697 - protein, 580 aa, Unknown
  Description of Unknown: Integrase B698 sequence
  PTHR30461:SF3,IPR036162,PS51737,IPR011109,PTHR30461, PS00397,PF00239,G3DSA:1.10.10.2600,IPR006119,SSF53041, cd00338,SM00857,IPR025827,IPR038109,PS51736, IPR006118,PF13408,G3DSA:3.40.50.1390,PF07508,Coil
MPNYIDKLNKQKVAIYIRVSTKHQIDKDSLDVQRRELIAYTEMILGISDYYIFEDAGFSAKDTKRPAFQQMIDRIHFGEFSHVLVWKIDRISRNLLDFASMYADLKKCGVAFISKNEQFDTSSAIGEAMLKIILVFAELERNMTAERVTTIMLDRANTGKWNGGHVPYGYIYDKKTKEFSIDKEQALVVKRIFDLYEHEQSLIYVSRALNEKEIKTKQGNPWSPTTVHTILSNVFYIGDYKYNTRKTNSGYGLKDESEWIIYENHHEPIIEDRERFERIQFILKRNHRNSTEPIKLDTPGMSIRKKSVHIFAGILRCGMCGENMWAALDTIRANGYRPSHYTCKGHRNTAQRCTSKIPSDITLGPFVFTYIANLMRASKKITTETSLDALQAKLLTGKPFASVDHIEPDGLQKTLQMFTAPTDPEAIPYRPAIVLSESPKAKSRLQQLTEQKIKLETAEKRLRKIYLYENSGMTEEEYLAEKTTITENLGSCIAEIEKLKQDNQFLLASEDGFMEKASYFLIIQKLLDPKYTDFEKLIQKVDATIAKGFIASIIKEIVVTDGTVTKITFKNNIVHTFIYK

SEQ ID NO: 698 - protein, 580 aa, Unknown
  Description of Unknown: Integrase B699 sequence
  PTHR30461:SF3,IPR036162,PS51737,IPR011109,PTHR30461, PS00397,PF00239,G3DSA:1.10.10.2600,IPR006119,SSF53041, SM00857,IPR025827,IPR038109,PS51736,cd03768, IPR006118,PF13408,G3DSA:3.40.50.1390,PF07508,Coil
MARRKTALRGISASVRETKVAIYIRVSTIHQVDKDSIPMQKKDLIAYCQLILGTDNYEIFEDAGYSGKNTDRPAFQDMMKKIRKGEFTHMLVWKIDRISRNLLDFAEMYEELQALRITFVSKNEQFDTSTAIGEAMLKIVLVFAELERNMTSERVTATMISRANNGQWNGGRIPFGYSYDPDTSQFSIREDEAVVCRRLKDLYLDNKSLVYTARTLNADGYKTRAGVDWTPTAVWIIASSPFYAGIYRYNRYKGTENRTLNPEEEWVMIPNHHPAIFTLDEHEAMKSSLKSNARYVDNPVGKPHATANIHIFQGIAYCDKCGSKMVSTPGKKRADGYRPSNYSCPLHRRSKKCDNSTVNDMIIGEFTINYILNMLNAKKIFSGIDTPEELQRHLLTGSTFSDISSIEEDGLHEFFNLLSRYGSDNSYVFAVQKPRKKKASVNPEIAALRKEKEKQERALQRLQDLYLYSDKSMSEKDFIIRKSEISDHLKSINAQLGLITQDPDALLSDEEFIKQASHLLIQKELKDKKYIYYKNLATSVDPEILRTYMKTILDSVYLTDSHVSAIVFKNGLTQKFIYKK

SEQ ID NO: 699 - protein, 580 aa, Unknown
  Description of Unknown: Integrase B700 sequence
  PTHR30461:SF3,IPR036162,PS51737,IPR011109,PTHR30461, PS00397,PF00239,G3DSA:1.10.10.2600,IPR006119,SSF53041, SM00857,IPR025827,IPR038109,PS51736,cd03768, IPR006118,PF13408,G3DSA:3.40.50.1390,PF07508,Coil
MARRKTALRGVSAPARITKVAIYIRVSTIHQVDKDSIPMQKKDLIAYCQLILGTDNYEIFEDAGYSGKNTDRPAFQDMMGRIRKGEFTHVLVWKIDRISRNLLDFAEMYEELQSLRVTFVSKNEQFDTSTAIGEAMLKIVLVFAELERNMTSERVTATMISRANNGQWNGGRVPFGYSYDSSTSQFSIREDEAVICHRLKDLYLDNKSLVYTARALNADGYKTRAGADWTPTAVWIIASSPFYAGIYRYNRYKGTENRTLNPEEEWVMIPDHHPAIFTLEEHETMKSSLKANARYVDNPIGKPHTTTNIHIFQGIAYCGKCGNKMVSTPGRKHTDGYRPSNYSCPLHRKSNKCDNATVNDMVVGEFVINYILNMLNAKKTFSNINTPKELQKQLLTGSTFSDIFSIEEDGLNDFFNLLSRYGSDNSYVFAIKTPRKKKASVNPELAALRKEKEKQERALQRLQDLYLYSDKSMSEKDFILRKSEISDHLKSINAQLGLITQNTDSFLSDEEFIKQASHLLIQKELKNRKYIYYKNLATSVDPEILKTYMETILDSIYIADGHVTSIVFKNGLTHKFIYKN

SEQ ID NO: 700 - protein, 580 aa, Unknown
  Description of Unknown: Integrase B701 sequence
  PTHR30461:SF3,IPR036162,PS51737,IPR011109,PTHR30461, PS00397,PF00239,G3DSA:1.10.10.2600,IPR006119,SSF53041, cd00338,SM00857,IPR025827,IPR038109,PS51736, IPR006118,PF13408,G3DSA:3.40.50.1390,PF07508,Coil
MAKLVSRISEALSEMKVAIYIRVSTQYQVDRASLPVQREELINYAKYVLGITDYAVFEDAGYSAKNTDRPDYQQMMTRVRTGEFTHILVWKIDRISRNLLDFAAMYAELKQLGVTFVSKNEQFDTSSAMGEAMLKIILVFAELERNMTSERVSAIMLSRATDGVWNGGKVPFGYSYDKRNKVFSIYEPEAKIVTYIYDQYEAVRSLTSVAKILNEKGVRSRTGKPWNPTTIRTMLTNPFYAGTYRYNYRDESGKSHVVKAAKEWVMVEDHHPAIVTRERQNRIAALLQSRQRGVYSSGMTYQRKNTHIFAGLLRCGCCGSSMASTIDRERSDGWRPSIYMCTRRRRFNDCQNKYVSDITLGPFILNFIANMIRVSNSFGKSTSIETLEKKLLRGDVFSNVDHIERPGLEELYAHLRSGFDEMSFESTGVQAAESASQIQERDLLLTEKRRLERALNRLRSLYLYSEDEMPEKDYIVERKQLTDRLGEVDARLEEVEKLAVDSLTLSDEEFMAKASYFILTQQLQDKRYVNYERFIRKIDPQIVKDFLNSIVTNFCIKDGLTTSILFKNGLEIQFSYKSTE

SEQ ID NO: 701 - protein, 579 aa, Unknown
  Description of Unknown: Integrase B702 sequence
  PTHR30461:SF3,IPR036162,PS51737,IPR011109,PTHR30461, PS00397,PF00239,G3DSA:1.10.10.2600,IPR006119,SSF53041, SM00857,IPR025827,IPR038109,PS51736,cd03768, IPR006118,PF13408,G3DSA:3.40.50.1390,PF07508,Coil
MAYKAKAPDSGAEKDIRVAIYVRVSTVYQIDKDSLPMMKQDLTAYCKYVLNTEDYEIFEDAGYSGKNTARPAYQKMMAQIRQGNFTHLLVWKIDRISRNLLDFAEMYQELKKLDVTFVSKNEQFDTSTAIGEAMLKIILVFAELERNMTSERVTATMINRASNGVWNGGRVPYGYSYDKDTQTFSLDPSENSIYNLLVETYETSKSVVYTSRKLNDLGYRSRYGNLWSPIAVWTILRSPWYKGIYRYNYYKIPGRAAIKDESEWVVVENHHPASITPERFDKIQETLDRNARFRNAPGRKITKKTTHVFAGLVLCADCGSAFTASPGKRHVSGYHPSKYGCSNARKTSACHAKYTSDVVLGEFLLNYILNILNAQKNVDEISSTEELQSRLLCGSTFSSIDHVKQDDLDSLFTQLKSRPEKDPFIAVRSKAKPKVDPELKRMMNDLKKQRRALDRLNDLYLYSENSISEREYLVRKQQITDCIQEINDTIEAIAKENHEQSIDDNEFIKQASTFILNQKLADRQYVCYTKLAETLSPETLKAFFSSIIDSIIMRAGKIETVIFRNGLSQTFIYKEKPGK

SEQ ID NO: 702 - protein, 579 aa, Unknown
  Description of Unknown: Integrase B703 sequence
  PTHR30461:SF3,IPR036162,PS51737,IPR011109,PTHR30461, PS00397,PF00239,G3DSA:1.10.10.2600,IPR006119,SSF53041, SM00857,IPR025827,IPR038109,PS51736,cd03768, IPR006118,PF13408,G3DSA:3.40.50.1390,PF07508,Coil
MNNTLSALNITPSPPRMCRVAIYIRVSTLQQVDKDSLPMQRKDLIAYSKLILNTDDYVIFEDAGYSGKNTIRPRYQDMMDQIRTGAFTHLLVWKIDRISRNLLDFAQMYQELKELNVTFVSKNEQFNTSTAMGEAMLKIILVFAELERNMTSERVTATMISRANTGKWNGGRVPYGYKYDQEEEDFLIIASESNVVKLIHDKYEELQSLVYLARYMNEHGYRTRSGNEWSPPSLAIILKSWWYCGCYEYNKRKAGNRQKLKDESEWIMIEDHHIAIISYEQKERVLAILKGNKRYATDHNLYVKGIHVHVFGGLCWCRNCGKKMTSTSSNKNRSWQYSKYLCSTRRRSLTKCRGRSTSDPVLGEFIFNYILNMLNAQKGFDSIHSPADLQAALLTGDAFSDIKSIDREELNDLYNTLSSNVSGNIYGRSFNVNKAKKNDEVQSSLTILKSEKKKLERALDRLTNLYLYDDMAISEKDYMTKKTEIETKIAEIDEKIGIVNKNSVDDSITDEEFVDKASTFIITQKLTDRNYISYKRLATSIDPKILYMFTHDVIDYIDIYNGKVQRIVFRNGLSQTFVR

SEQ ID NO: 703 - protein, 579 aa, Unknown
  Description of Unknown: Integrase B704 sequence
  PTHR30461:SF3,IPR036162,PS51737,IPR011109,PTHR30461, PS00397,PF00239,G3DSA:1.10.10.2600,IPR006119,SSF53041, cd00338,SM00857,IPR025827,IPR038109,PS51736, IPR006118,PF13408,G3DSA:3.40.50.1390,PF07508
MPNLPYSNEFAKLIIAIYCRVSSEDQAERGTIEIQKEFAAKYVNLYNLEVFDYYCDDGVSGTLPLEQRPEGKRLLEDAAKKRFNMVIFYKLDRLGRKVRVILNAVNDLDALGVTVKSMTEPFENETPTGKFLLTTLAGIAELDRDTILSRMWSGAQYAAKQGRWLGGVIPYGYMVADKKLVISTDPIPNCRLSEEDVIKIIFRMAAKEKANCAEIADYLNSIKIPTRYMLNGISGKRYKKTAEIWRPSRISEIIRSTTYKGLHQYGKNATHKNSKIITRSVPAIVSDEIWQEANNTMKDNRVSCKRNTKNLYLLQGMIRCGLCGLAYSPTFYKARNTSYYCCTCKGQQKTKFYNRDTCIGKPVRVDWLDNLVWSKCLELLKEPEKIYDAKPSTNKEPPNIVPTPTEFELIKSRIQELSTEREKLLDLYRKGIIIESDLTTQINKLYLEETELNNKIIKIDNQPKQELKRSKASTVMVLKEFIEMIKNTDINQLPFELKREVVKMLIDKVFVYTKVDPDKFYPSINVIISWRFDAAPFNIDYIENYTLITFLLQRKKLKTQLQPTPLITLTPVLNCNTRR

SEQ ID NO: 704 - protein, 579 aa, Unknown
  Description of Unknown: Integrase B705 sequence
  cd03768,PTHR30461:SF3,SM00857,IPR006118,G3DSA:1.10.10.2600, IPR036162,PS51737,G3DSA:3.40.50.1390,IPR006119,IPR038109, PF07508,IPR011109,SSF53041,PTHR30461,PS00397, PS51736,Coil,PF00239
MAYKKNITTPPAAPTRKLKAALYIRVSTLYQIDKDSLPFQRQELINLAKYMLGTDDYDVFEDAGYSGKNTDRPAYQRMMTRIRRKEFTHLCVWKIDRISRNLLDFASMYDELKRYNVTFVSKNEQFDTSSAMGEAMLKIILVFAELERKLTSERVMGVMLDRASKGLWNGARMPLGYKWDSEAEFPAIDEQEAATIHYIFNKYEEIKSSVQLARMLNRNHVTTKRGGDWSSKTVSDIIRNPFYKGTYRYNYRQSARGAVKDPSEWVIVPNAVPVIIDETQWARCNAIMDSHHIYKDTSDFRPRHRTHIFAGLLKCCDCGSGFQSNRDKPRLSGWCPSTYRCTRSVRMQDCTTVNWSDVVLGPFVFNYIANFVRLQRNGAPYTTETIEKTLLSGKAFESIAGIDEQGLHDTLSALKGYSPSAQSDYSSKLLDVPQMDNADSIDIELLRQEETKYKTALQRLLDLYLYDPAAMSQKDYLTRKEELESKLKEVQASIERNTHVEVTESADISFMQKASVFVVSKRILSKKDINYEELAVKCDAEVLKDLVNSVISKIGVRGRHIEYIEFKSGLRHTFIYKDK

SEQ ID NO: 705 - protein, 579 aa, Unknown
  Description of Unknown: Integrase B706 sequence
  PTHR30461:SF3,IPR036162,PS51737,IPR011109,PTHR30461, PS00397,PF00239,G3DSA:1.10.10.2600,IPR006119,SSF53041, cd00338,SM00857,IPR025827,IPR038109,PS51736, IPR006118,PF13408,G3DSA:3.40.50.1390,PF07508
MPNLPYSNEFTKLIIAIYCRVSSEDQAERGTIEIQKEFAAKYVNLYNLEVFDYYCDDGVSGTLPLEQRPEGKRLLEDAAKKRFNMVIFYKLDRLGRKVRVILNAVNDLDALGVTVKSMTEPFENETPTGKFLLTTLAGIAELDRDTILSRMWSGAQYAAKQGRWLGGVIPYGYMVADKKLVISTDPIPNCRLSEEDVIKIIFRMAAKEKANCAEIADYLNSIKIPTRYMLNGISGKRYKKTAEIWRPSRISEIIRSTTYKGLHQYGKNATHKNSKIITRSVPAIVSDEIWQEANNTMKDNRVSCKRNTKNLYLLQGMIRCGLCGLAYSPTFYKARNTSYYCCTCKGQQKTKFYNRDTCIGKPVRVDWLDNLVWSKCLELLKEPEKIYDAKPSTNKEPPNIVPTPTEFELIKSRIQELSTEREKLLDLYRKGIIIESDLTTQINKLYLEETELNNKIIKIDNQPKQELKRSKASTVMVLKEFIEMIKNTDINQLPFELKREVVKMLIDKVFVYTKVDPDKFYPSINVIISWRFDAAPFNIDYIENYTLTTFLLQRKKSKTPLQPTLPITLTPVLNCNTRR

SEQ ID NO: 706 - protein, 579 aa, Unknown
  Description of Unknown: Integrase B707 sequence
  PTHR30461:SF3,IPR036162,PS51737,IPR011109,PTHR30461, PS00397,PF00239,G3DSA:1.10.10.2600,IPR006119,SSF53041, SM00857,IPR025827,IPR038109,PS51736,cd03768, IPR006118,PF13408,G3DSA:3.40.50.1390,PF07508,Coil
MRNKSLAGRANNRAERPRKVAIYIRVSTTHQIDKDSLPMQRKDLIAYCELILGIEDYEIFEDAGYSGKNTDRPAFQEMMQKIRAGSFSHLLVWKIDRISRNLLDFAEMYEELQSLRVTFVSKNEQFDTSNAMGEAMLKIILVFAELERNMTSERVTATMISRANQGLWNGGRIPYGYSYDAETSAFSIIQDEADVCQLMKTDYFEHKSIIHTARLLNDKKIPTRSGALWSPTAVWKILSSPFYAGVYRYNHYKGTENRTLNPEEEWVLVPDHHPAIFTLEEHEKLCDILDANKRTANLPGQKHRAKNVYVFSGILYCGKCGNKLVSTPGRLQADNFRTTTYSCPKKRKTHECDNPSVNDLIVGEFVINYILNMLNAKSSFSSINSPAELEERLLYGGSFKDVQHISEDGLNEFYNLLSRYGSDSSYVFAVKHPRKKKAAVNPEVEALRKDKEKQERALKRLQDLYLYSERAMTEKDFIIQKNEISSRIQDINTRLGMVTHDANSTLSDEDFVRQASHLLITKKLIGRDYIYYKALAQTVSPDVLKIYMETILDSVYVIDGRVSSIVFRNGLTHTFIYQK

SEQ ID NO: 707 - protein, 579 aa, Unknown
  Description of Unknown: Integrase B708 sequence
  PTHR30461:SF3,cd00338,SM00857,G3DSA:1.10.10.2600,IPR036162, PS51737,G3DSA:3.40.50.1390,IPR006119,IPR038109,PF07508, SSF53041,IPR011109,PTHR30461,PS51736,Coil, PF00239
MNENKKVIVGLYPRVSTEDQSRFGHSLDEQECRMKQLCEFKNYEIFKVYREEGVSAKNTNRPKFQEMIEDVKQGKINKIIIFKLDRLTRSIQDLENICKFLDKYNCGLESISEEINTSSANGKFFVRMITILAQLEIERTSERTKVGLVGAIKQGHISGRPPLGYVKKNGSKKIFIDEVQADVVRRIFKLYLDGMSVCSICKLFKEENVLNRRWPTTTVDKILSNQLYIGNSEYGKRTNNEIQIFKNVVPAIIDKTTFDMVQKRKEKNLKNFKRKATYIFMQKIICPKCNKVMGGTSSTSKNKEKHLYYKCNCCKTRINEKKIEKELMEFLNDMLDFFLIIDNSFKPTLNKDVENEIKKYLTMKEDINNKITRIKTAFIDAIIDANIFQEELNELQRELENVEIKLNELEETKRNIEYKQDIETIFNIKEIEKMKMKSEYVKSHNLWKKLDSSQKYYIINKYIDEIKIDIDKKYNVSINDIIFNKNEIENIGYMFRSDCFDMIINIDERDAILSNYKNEFKTQEYIESLREFYNIKETTIQADLFNINEYDKDNIIQIIPQERKTKFEKNKFTILEIEV

SEQ ID NO: 708 - protein, 579 aa, Unknown
  Description of Unknown: Integrase B709 sequence
  PTHR30461:SF3,IPR036162,PS51737,IPR011109,PTHR30461, PS00397,PF00239,G3DSA:1.10.10.2600,IPR006119,SSF53041, SM00857,IPR025827,IPR038109,PS51736,cd03768, IPR006118,PF13408,G3DSA:3.40.50.1390,PF07508,Coil
MRNKSLARRANNRAERPRKVAIYIRVSTTHQIDKDSLPMQRKDLVAYCELILGIEDYEIFEDAGYSGKNTDRPAFQEMMQKIRAGSFSHLLVWKIDRISRNLLDFAEMYEELQSLRVTFVSKNEQFDTSNAMGEAMLKIILVFAELERNMTSERVTATMISRANQGLWNGGRVPYGYSYDAETSVFSIIQDEADVCQLMKTDYFEHKSIIHTAKLLNDRKVPTRSGALWSPTAVWKILSSPFYAGIYRYNHYKGTENRTINPEEEWVLVPDHHPAIFTLEEHEKICDIMDTNKRMSNLPGQKHRAKNVYAFSGILYCGKCGSKLVSTPGRLQADGFRTTTYSCPKKRKTHECDNPSINDLIVGEFVINYILNMLNAKSSFSSISSPAELEEHLLYGGSFKDVQHISEDGLNEFYNLLSRYGSDSSYVFAVKRPRKKKAAVNPEVEALRKDKEKQERALKRLQDLYLYSERAMTEKDFIIQKNEISSRIQDINTRLGMVTHDANSTLSDEDFVRQASHLLITKKLIGREYIYYKSLAQTVSPGVLKIYMETILDSVYVIDGRVSSIIFKNGLTHTFIYKK

SEQ ID NO: 709 - protein, 579 aa, Unknown
  Description of Unknown: Integrase B710 sequence
  PTHR30461:SF3,IPR036162,PS51737,IPR011109,PTHR30461, PF00239,G3DSA:1.10.10.2600,IPR006119,SSF53041,cd00338, SM00857,IPR025827,IPR038109,mobidb-lite,PS51736, PF13408,G3DSA:3.40.50.1390,PF07508,Coil
MRKKSNLNAATRAVIYARYSSANQRDCSIEQQVAKCRELAARLGLTVIDVYEDRAISGKTDRRPSFQRMMKDADRGIFDIVLAWKSNRMGRDMLQAMTNEERLRDNGIRTVYAEEDFDDTAAGRFALRNMMNVNQFYSENMAEDITRGLMDNAAKCLSNGSLPLGYKPGDDRHVVLDEAEAAIVQEIFTRVSCYEPFIDIARDLNRRGIKTKKGSEWGRSSFHTICRNERYRGIYIYRDVRIEGGMPRIVSDELFYKVQEVLKVKKNPQGRRKRSGYEEYLLTGKLFCGHCGSPMTGIAGTSKTGAMHYYYTCQKRRTDHSCDKKAVRRDQIERAVGVAIQQQLLTDENIQMMADKLMEYNARTETKYRLQGLQDQLNANKTATANILKAIEMGIITDATKARLLELEKEQGQLLVKIDEAKAEMVPISRNDFVKLLYIYKEGEPTDKKYLAALFDNFLVRVDLYDDHLKITFDPTGGRQPIDMPIGAEESPESPGDSSESSNFEASSQDAEKFVLALHNCTKKSPCNVVCKVIFCLLYFRFKSASAAYHRLRRCTGLVGFSCFAADLRLFLLDGFPHW

SEQ ID NO: 710 - protein, 579 aa, Unknown
  Description of Unknown: Integrase B711 sequence
  PTHR30461:SF3,IPR036162,PS51737,IPR011109,PTHR30461, PF00239,G3DSA:1.10.10.2600,IPR006119,SSF53041,cd00338, SM00857,IPR025827,IPR038109,mobidb-lite,PS51736, PF13408,G3DSA:3.40.50.1390,PF07508,Coil
MRQKFNTDLSMLTPEEQQQFHDDPTTLTKGEVDVALYLRFSSERQKEQSIEGQLRDCIAYCKRKSFRIVAIYVDRATTARKDVEKRVHFQEMISDSAHHLWNFVVVWKLDRFARNREDSAVFKMRLRKNGVRVKSATETISDNPEGIILESVLEGIAEYYSADLSQKITRGLRESAMKGHSVGGHVPLGYKIEDHRLVINPETAHIVQEAFQLYANGESVAEICRIFNSKGYRTAKNSEFNRSSFKSIFKNVRYIGTYIYKDIEKENAIPAIIDKDLFETVQRRLSLAADAPARGKAKVDYLLSGKLFCGHCGATMNGESGTSKTGAIHNYYTCYSRKRRKGCNKKPLKKDFIERIVAQDAMALLTNDVIEELADMAMSQADRDLKENTRIPELSTRLTEIEQGINNITKAVEKGIASDALLNRLTELEKEKKDLTAQLREEEKYICRIDRDQIIFWLTKFQGGNIEDEDCRRRVIDLLVNSVTVWDEPDGYKITTAYNLTSCKTKTFRVSNNADSPSGEGFGFGELSSTKMVKSSNPLGLLVFSLFIIAVRPSFAAARSAKTAGFTARGLSVLQILVL

SEQ ID NO: 711 - protein, 579 aa, Unknown
  Description of Unknown: Integrase B712 sequence
  PTHR30461:SF3,IPR036162,PS51737,IPR011109,PTHR30461, PF00239,G3DSA:1.10.10.2600,IPR006119,SSF53041,cd00338, SM00857,IPR025827,IPR038109,PS51736,mobidb-lite, PF13408,G3DSA:3.40.50.1390,PF07508,Coil
MRKKSNLNAATRAVIYARYSSANQRDCSIEQQVAKCREQAARLGLTVIDVYEDRAISGKTDRRPNFQRMMKDADLRQFDVVLAWKSNRMGRNMLQAMTNEERLRDNGIRTVYAEEDFDDTAAGRFALRNMMNVNQFYSENMAEDITRGLMDNAAKCLSNGSLPLGYKPGDDRHVVLDEAEAAIVQEIFTRVSCYEPFIDIARDLNRRGIKTKKGSEWGRSSFHTICRNERYRGIYIYRDVRIEGGMPRIVSDELFYKVQEVLKVKKNPQGRRKRSGYEEYLLTGKLFCGHCGSPMTGIAGTSKTGAMHYYYTCQKRRTDHSCDKKAVRRDQIERAVGVAIQQQLLTDENIQMMADKLMEYNARTETKYRLQGLQDQLNANKTATANILKAIEMGIITDATKARLLELEKEQGQLLVKIDEAKAEMVPISRNDFVKLLYIYKEGEPTDKKYLAALFDNFLVRVDLYDDHLKITFDPTGGRQPIDMPIGAEESPESPGDSSESSNFSASSQDAEKFVLALHNCTNKNLELRFEVFIFYHYKSIHKNTVHTANKSWYALRLFSLGSQSSLTQPLIILPVLLR

SEQ ID NO: 712 - protein, 579 aa, Unknown
  Description of Unknown: Integrase B713 sequence
  PTHR30461:SF3,IPR036162,PS51737,IPR011109,PTHR30461, PS00397,PF00239,G3DSA:1.10.10.2600,IPR006119,SSF53041, SM00857,IPR025827,IPR038109,PS51736,cd03768, IPR006118,PF13408,G3DSA:3.40.50.1390,PF07508,Coil
MAYKAKAPDSGAEKDIRVAIYVRVSTVYQIDKDSLPMMKQDLTAYCKYVLNTEDYEIFEDAGYSGKNTARPAYQKMMAQIRQGNFTHLLVWKIDRISRNLLDFAEMYQELKKLDVTFVSKNEQFDTSTAIGEAMLKIILVFAELERNMTSERVTATMINRASNGVWNGGRVPYGYSYDKDTQTFSLDPNENSIYNLLVETYETSKSVVYTSRKLNDLGYRSRYGNLWSPIAVWTILRSPWYKGIYRYNYYKIPGRAAVKDESEWVVVENHHPASITPERFDKIQETLDRNARFRNAPGRKITKKTTHVFAGLVLCADCGSAFTASPGKRHVSGYHPSKYGCSNARKTSACHAKYTSDVVLGEFLLNYILNILNAQKNVDEISSTEELQSRLLCGSTFSSIDHVKQDDLDSLFTQLKSRPEKDPFTAVRSKTKPKVDPELKRMMNDLKKQRRALDRLNDLYLYSENSISEREYLVRKQQITDCIQEINDTIEAIAKENHEQSIDDNEFIKQASTFILNQKLADRQYVCYTKLAESLAPETLKAFFSSIIDSIIMRAGKIETVIFRNGLSQTFIYKEKPGK

SEQ ID NO: 713 - protein, 579 aa, Unknown
  Description of Unknown: Integrase B714 sequence
  PTHR30461:SF3,IPR036162,PS51737,IPR011109,PTHR30461, PS00397,PF00239,G3DSA:1.10.10.2600,IPR006119,SSF53041, SM00857,IPR025827,IPR038109,PS51736,cd03768, IPR006118,PF13408,G3DSA:3.40.50.1390,PF07508,Coil
MNNTLSALNITPSPPRMCRVAIYIRVSTLQQVDKDSLPMQRKDLIAYSKLILNTDDYVIFEDAGYSGKNTIRPRYQDMMDQIRTGAFTHLLVWKIDRISRNLLDFAQMYQELKELNVTFVSKNEQFNTSTAMGEAMLKIILVFAELERNMTSERVTATMISRANTGKWNGGRVPYGYKYDPEEEDFLIVANESNTVKLIHDKYEELQSLVYLARYMNEHGYRTRSGNEWSPPSLAIILKSWWYCGCYEYNKRKAGNRQKLKNESEWIMIEDHHIAIISYDQKERVLAILKGNKRFATEHNLYVKGIHVHVFGGLCWCKNCGKKMTSTSSNKNRSWQYSKYLCSTRRRSLTKCRGRSTSDPVLGEFIFNYILNMLNAQKGFDSIHSPADLQDALLTGDAFSDIKSIDQEELNDLYNILSSSVVGNIYGRSFNVNKAKKNDEVQSSLTILKAEKKKLDRALDRLTNLYLYDDMAISEKDYMTKKTEIETKIAEIDEKIGIVNKNSVDNSITDEEFVDKASTFIITQKLTNRNYISYKRLATSVDPKILYMFTHDVIDYIDIYNGKVQRIVFRNGLSQTFIR

SEQ ID NO: 714 - protein, 579 aa, Unknown
  Description of Unknown: Integrase B715 sequence
  PTHR30461:SF3,IPR036162,PS51737,IPR011109,PTHR30461, PS00397,PF00239,G3DSA:1.10.10.2600,IPR006119,SSF53041, SM00857,IPR025827,IPR038109,PS51736,cd03768, IPR006118,PF13408,G3DSA:3.40.50.1390,PF07508,Coil
MNNTLSALNITPSPPRMCRVAIYIRVSTLQQVDKDSLPMQRKDLIAYSKLILNTDDYVIFEDAGYSGKNTIRPRYQDMMEQIRTGAFTHLLVWKIDRISRNLLDFAQMYQELKELNVTFVSKNEQFNTSTAMGEAMLKIILVFAELERNMTSERVTATMISRANTGKWNGGRVPYGYKYDPEEEDFLIVANESNTVKLIHDKYEELQSLVYLARYMNEHGYRTRSGNEWSPPSLAIILKSWWYCGCYEYNKRKAGNRQKLKNESEWIMIEDHHIAIISYDQKERVLAILKGNKRFATEHNLYVKGIHVHVFGGLCWCKNCGKKMTSTSSNKNRSWQYSKYLCSTRRRSLTKCRGRSTSDPVLGEFIFNYILNMLNAQKGFDSIHSPADLQDALLTGDAFSDIKSIDQEELNDLYNILSSSVVGNIYGRSFNVNKAKKNDEVQSSLTILKAEKKKLDRALDRLTNLYLYDDMAISEKDYMTKKTEIETKIAEIDEKIGIVNKNSVDNSITDEEFVDKASTFIITQKLTNRNYISYKRLATSVDPKILYMFTHDVIDYIDIYNGKVQRIVFRNGLSQTFIR

SEQ ID NO: 715 - protein, 579 aa, Unknown
  Description of Unknown: Integrase B716 sequence
  PTHR30461:SF3,IPR036162,PS51737,IPR011109,PTHR30461, PS00397,PF00239,G3DSA:1.10.10.2600,IPR006119,SSF53041, SM00857,IPR025827,IPR038109,PS51736,cd03768, IPR006118,PF13408,G3DSA:3.40.50.1390,PF07508,Coil
MRNKSLAGRANNRAERPRKVAIYIRVSTTHQIDKDSLPMQRKDLIAYCELILGIEDYEIFEDAGYSGKNTDRPAFQEMMQKIRSGSFSHLLVWKIDRISRNLLDFAEMYEELQSLRVTFVSKNEQFDTSNAMGEAMLKIILVFAELERNMTSERVTATMISRANQGLWNGGRVPYGYAYDAETSVFSIIQDEADICQLMKTDYFEHKSIIHTAKLLNDKKAPTRSGALWSPTAVWKILSSPFYAGIYRYNHYKGTENRTINPEDEWVLVPDHHPAIFTLEEHEKICDIMDTNKRTSNLPGQKHRSKNVYVFSGILYCGKCGNKLVSTPGRLQADGFRTTTYSCPKKRKTHECDNPSINDLIVGEFVINYVLNMLNAKSSFSSISSPAELEKRLLCGGSFKDVQHISEDGLNEFYNLLSRYGSDSSYIFSVKRPRKKKAAVNPEVESLRKDKEKQERALKRLQDLYLYSERAMTEKDFIIQKNEISSRIQDINTRLGMVTHDANSTLSDEDFVRQASHLLITKKLIGREYIYYKSLAQTVSPDVLKIYMETILDSVYVVDGRVSSIIFKNGLSHTFVYQN

SEQ ID NO: 716 - protein, 579 aa, Unknown
  Description of Unknown: Integrase B717 sequence
  PTHR30461:SF3,IPR036162,PS51737,IPR011109,PTHR30461, PS00397,PF00239,G3DSA:1.10.10.2600,IPR006119,SSF53041, SM00857,IPR025827,IPR038109,PS51736,cd03768, IPR006118,PF13408,G3DSA:3.40.50.1390,PF07508,Coil
MNNTLSALNITPSPPRMCRVAIYIRVSTLQQVDKDSLPMQRKDLIAYSKLILNTDDYVIFEDAGYSGKNTIRPRYQDMMEQIRTGAFTHLLVWKIDRISRNLLDFAQMYQELKELNVTFVSKNEQFNTSTAMGEAMLKIILVFAELERNMTSERVTATMISRANTGKWNGGRVPYGYKYDPEEEDFLIVANESNTVKLIHDKYEELQSLVYLARYMNEHGYRTRSGNEWSPPSLAIILKSWWYCGCYEYNKRKAGNRQKLKDKSEWIMIEDHHIAIISYDQKERVLAILKGNKRYATDHNLYVKGIHVHVFGGLCWCRNCGKKMTSTSSNKNRSWQYSKYLCSTRRRSLTKCRGRSTSDPVLGEFIFNYILNMLNAQKGFDSIHSPADLQDALLTGDAFSDIKSIDQEELNDLYNILSSSVVGNIYGRSFNVNKAKKNDEVQSSLTILKAEKKKLDRALDRLTNLYLYDDMAISEKDYMTKKTEIETKIAEIDEKIGIVNKNSVDNSITDEEFVDKASTFIITQKLTNRNYISYKRLATSVDPKILYMFTHDVIDYIDIYNGKVQRIVFRNGLSQTFIR

SEQ ID NO: 717 - protein, 579 aa, Unknown
  Description of Unknown: Integrase B718 sequence
  PTHR30461:SF3,cd00338,SM00857,G3DSA:1.10.10.2600,IPR036162, PF13408,PS51737,G3DSA:3.40.50.1390,IPR025827,IPR006119, IPR038109,PF07508,SSF53041,IPR011109,PTHR30461, PS51736,Coil,PF00239
MKKRINTNSAARAVIYARYSSANQRDCSIEQQVEKCRELAAREGVTVIEIYADRAVSGKTDRRPNFQRMMKDASLRQFDVVLAWKSNRMGRNMLQAMMNEEQLRSNGIRTIYAEEDFDDTAAGRFALRNMMNVNQFYSENMAEDISRGLMDNASKCMSNGSLPLGYKTGKDQKVVLDEAEAAIVQEIFTRVSCYEPFIDIARDLNRRGIKTKKGAEWGRSSFHTICRNERYRGIYIYRDVRVEGGMPRIISDELFYKVQEVLKVKKNPQGRRKRSGYEEYLLTGKLYCGHCGSPMTGIAGTSKTGAMHYYYTCQKRRTDHSCDKKAVRRDQIERAVGVAIQQQLLTDENIQMMADETMAYNARTEIKYRLQGLQQQLYSNETSTANIMKAIEMGIITDTTKARLLALEQEHGQLLAKIDTAKAEMVPINREDFVSLLDIYRTGDVNNKKYLAALFDTFLVRVDLYDDHFKITFDPTGGKMPVDIPIGAEDFPESPGDSPESSDFEASPQDAEKFVLALHNRTKKSPCNVVCKVIFCLLYFRFKSASAAYHRLRRCTGLIGFSCFAADLRLFLLDGFPHW

SEQ ID NO: 718 - protein, 579 aa, Unknown
  Description of Unknown: Integrase B719 sequence
  PTHR30461:SF3,IPR036162,PS51737,IPR011109,PTHR30461, PS00397,PF00239,G3DSA:1.10.10.2600,IPR006119,SSF53041, SM00857,IPR025827,IPR038109,PS51736,cd03768, IPR006118,PF13408,G3DSA:3.40.50.1390,PF07508,Coil
MNNTLSALNITPSPPRMCRVAIYIRVSTLQQVDKDSLPMQRKDLIAYSKLILNTDDYVIFEDAGYSGKNTIRPRYQDMMDQIRTGAFTHLLVWKIDRISRNLLDFAQMYQELKELNVTFVSKNEQFNTSTAMGEAMLKIILVFAELERNMTSERVTATMISRANTGKWNGGRVPYGYKYDPEEEDFLIVANESNTVKLIHDKYEELQSLVYLARYMNEHGYRTRSGNEWSPPSLAIILKSWWYCGCYEYNKRKAGNRQKLKDKSEWIMIEDHHIAIISYDQKERVLAILKGNKRYATDHNLYVKGIHVHVFGGLCWCRNCGKKMTSTSSNKNRSWQYSKYLCSTRRRSLTKCRGRSTSDPVLGEFIFNYILNMLNAQKGFDSIHSPADLQAALLTGDAFSDIKSIDQEELNDLYNILSSSVVGNIYGRSFNVNKAKKNDEVQSSLTILKAEKKKLDRALDRLTNLYLYDDMAISEKDYMTKKTEIETKIAEIDEKIGIVNKNSVDNSITDEEFVDKASTFIITQKLTNRNYISYKRLATSVDPKILYMFTHDVIDYIDIYNGKVQRIVFRNGLSQTFIR

SEQ ID NO: 719 - protein, 579 aa, Unknown
  Description of Unknown: Integrase B720 sequence
  PTHR30461:SF3,IPR036162,PS51737,IPR011109,PTHR30461, PS00397,PF00239,G3DSA:1.10.10.2600,IPR006119,SSF53041, SM00857,IPR025827,IPR038109,PS51736,cd03768, IPR006118,PF13408,G3DSA:3.40.50.1390,PF07508,Coil
MNNTLSALNITPSPPRMCRVAIYIRVSTLQQVDKDSLPMQRKDLIAYSKLILNTDDYVIFEDAGYSGKNTIRPRYQDMMDQIRTGAFTHLLVWKIDRISRNLLDFAQMYQELKELNVTFVSKSEQFDTSTAMGEAMLKIILVFAELERNMTSERVTATMISRANTGKWNGGRVPYGYKYDPVEEDFLVIANESNTVKLIHDKYEELQSLVYLARYMNEHGYRTRSWNEWSPPSLSIILKSWWYCGCYEYNKRKAGNRQKLKNESEWIMIEDHHIAIISYDQKERVLAILKGNKRFATEHNLYVKGIHVHVFGGLCWCKNCGKKMTSTSSNKNRSWQYSKYLCSTRRQSLTKCRGRSTSDPVLGEFIFNYILNMLNAQKGFDSIHSPADLQDALLTGDAFSDIKSIDQEELNDLYNILSSSVVGNIYGRSFNVNKAKKNDEVQSSLTILKAEKKKLDRALDRLTNLYLYDDMAISEKDYMTKKTEIETKIAEIDEKIGIVNKNSVDDSITDEEFVDKASTFIITQKLTDRNYISYKRLATTVDPKILYMFTHDVIDYIDIYNGKVQRIVFRNGLSQTFIR

SEQ ID NO: 720 - protein, 579 aa, Unknown
  Description of Unknown: Integrase B721 sequence
  PTHR30461:SF3,IPR036162,PS51737,IPR011109,PTHR30461, PS00397,PF00239,G3DSA:1.10.10.2600,IPR006119,SSF53041, SM00857,IPR025827,IPR038109,PS51736,cd03768, IPR006118,PF13408,G3DSA:3.40.50.1390,PF07508,Coil
MNNTLSALNITPSPPRMCRVAIYIRVSTLQQVDKDSLPMQRKDLIAYSKLILNTDDYVIFEDAGYSGKNTIRPRYQDMMEQIRTGAFTHLLVWKIDRISRNLLDFAQMYQELKELNVTFVSKNEQFNTSTAMGEAMLKIILVFAELERNMTSERVTATMISRANTGKWNGGRVPYGYKYDPEEEDFLIVANESNTVKLIHDKYEELQSLVYLARYMNEHGYRTRSGNEWSPPSLAIILKSWWYCGCYEYNKRKAGNRQKLKDKSEWIMIEDHHIAIISYDQKERVLAILKGNKRYATDHNLYVKGIHVHVFGGLCWCRNCGKKMTSTSSNKNRSWQYSKYLCSTRRRSLTKCRGRSTSDPVLGEFIFNYILNMLNAQKGFDSIHSPADLQDALLTGDAFSDIKSIDQEELNDLYNILSSSVVGNIYGRSFNVNKAKKNDEVQSSLTILKAEKKKLDRALDRLTNLYLYDDMAISEKDYMTKKTEIETKIAEIDEKIGIVNKNSLDNSITDEEFVDKASTFIITQKLTNRNYISYKRLATSVDPKILYMFTHDVIDYIDIYNGKVQRIVFRNGLSQTFIR

SEQ ID NO: 721 - protein, 579 aa, Unknown
  Description of Unknown: Integrase B722 sequence
  PTHR30461:SF3,IPR036162,PS51737,IPR011109,PTHR30461, PS00397,PF00239,G3DSA:1.10.10.2600,IPR006119,SSF53041, cd00338,SM00857,IPR025827,IPR038109,PS51736, IPR006118,PF13408,G3DSA:3.40.50.1390,PF07508
MPNLPYSNEFAKLIIAIYCRVSSEDQAERGTIEIQKEFAAKYVNLYNLEVFDYYCDDGVSGTLPLEQRPEGKRLLEDAAKKRFNMVIFYKLDRLGRKVRVILNAVNDLDALGVTVKSMTEPFENETPTGKFLLTTLAGIAELDRDTILSRMWSGAQYAAKQGRWLGGVIPYGYMVADKKLVISTDPIPNCRLSEEDVIKIIFRMAAKEKANCAEIADYLNSIKIPTRYMLNGISGKRYKKTAEIWRPSRISEIIRSTTYKGLHQYGKNATHKNSKIITRSVPAIVSDEIWQEANNTMKDNRVSCKRNTKNLYLLQGMIRCGLCGLAYSPTFYKARNTSYYCCTCKGQQKTKFYNRDTCIGKPVRVDWLDNLVWSKCLELLKEPEKIYDAKPSTNKEPPNIVPTPTEFELIKSRIQELSTEREKLLDLYRKGIIIESDLTTQINKLYLEETELNNKIIKIDNQPKQELKRSKASTVMVLKEFIEMIKNTDINQLPFELKREVVKMLIDKVFVYTKVDPDKFYPSINVIISWRFDAAPFNIDYIENYTLTTFLLQRKKLKTQLQPTPLITLTPVLNCNTRR

SEQ ID NO: 722 - protein, 579 aa, Unknown
  Description of Unknown: Integrase B723 sequence
  PTHR30461:SF3,IPR036162,PS51737,IPR011109,PTHR30461, PS00397,PF00239,G3DSA:1.10.10.2600,IPR006119,SSF53041, SM00857,IPR025827,IPR038109,PS51736,cd03768, IPR006118,PF13408,G3DSA:3.40.50.1390,PF07508,Coil
MAYKAKAPDSGAEKDIRVAIYVRVSTVYQIDKDSLPMMKQDLTAYCKYVLNAEDYEIFEDAGYSGKNTARPAYQKMMAQIRQGNFTHLLVWKIDRISRNLLDFAEMYQELKKLDVTFVSKNEQFDTSTAIGEAMLKIILVFAELERNMTSERVTATMINRASNGVWNGGRVPYGYSYDKDTQTFSLDPNENSIYNLLVETYETSKSVVYTSRKLNDLGYRSRYGNLWSPIAVWTILRSPWYKGIYRYNYYKIPGRAAIKDESEWVVVENHHPASITPERFDKIQETLDRNARFRNAPGRKITKKTTHVFAGLVLCADCGSAFTASPGKRHVSGYHPSKYGCSNARKTSACHAKYTSDVVLGEFLLNYILNILNAQKNVDEISSTEELQSRLLCGSTFSSIDHVKQDDLDSLFTQLKSRPEKDPFIAVRSKAKPKVDPELKRMMNDLKKQRRALDRLNDLYLYSENSISEREYLVRKQQITDCIQEINDTIEAIAKENHEQSIDDNEFIKQASTFILNQKLADRQYVCYTKLAETLSPETLKAFFSSIIDSIIMRAGKIETVIFRNGLSQTFIYKEKPGK

SEQ ID NO: 723 - protein, 579 aa, Unknown
  Description of Unknown: Integrase B724 sequence
  PTHR30461:SF3,IPR036162,PS51737,IPR011109,PTHR30461, PS00397,PF00239,G3DSA:1.10.10.2600,IPR006119,SSF53041, cd00338,SM00857,IPR025827,IPR038109,PS51736, IPR006118,PF13408,G3DSA:3.40.50.1390,PF07508
MPNLPYSNEFAKLIIAIYCRVSSEDQAERGTIEIQKEFAAKYVNLYNLEVFDYYCDDGVSGTLPLEQRPEGKRLLEDAAKKRFNMVIFYKLDRLGRKVRVILNAVNDLDALGVTVKSMTEPFENETPTGKFLLTTLAGIAELDRDTILSRMWSGAQYAAKQGRWLGGVIPYGYMVADKKLVISTDPIPNCRLSEEDVIKIIFRMAAKEKANCAEIADYLNSIKIPTRYMLNGISGKRYKKTAEIWRPSRISEIIRSTTYKGLHQYGKNATHKNSKIITRSVPAIVSDEIWQEANNTMKDNRVSCKRNTKNLYLLQGMIRCGLCGLAYSPTFYKARNTSYYCCTCKGQQKTKFYNRDTCIGKPVRVDWLDNLVWSKCLELLKEPEKIYDAKPSTNKEPPNIVPTPTEFELIKSRIQELSTEREKLLDLYRKGIIIESDLTTQINKLYLEETELNNKIIKIDNQPKQELKRSKASTVMVLKEFIEMIKNTDINQLPFELKREVVKMLIDKVFVYTKVDPDKFYPSINVIISWRFDAAPFNIDYIENYTLITFLLQRKKLKTQLQPTLLITLTPVLNCNTRR

SEQ ID NO: 724 - protein, 579 aa, Unknown
  Description of Unknown: Integrase B725 sequence
  PTHR30461:SF3,SM00857,G3DSA:1.10.10.2600,IPR036162,PF13408, IPR025827,G3DSA:3.40.50.1390,PS51737,IPR006119,IPR038109, PF07508,SSF53041,IPR011109,PTHR30461,PS51736, cd00338,PF00239
MEVEIIKAKGAGEDTSTGRKIDRLRVAAYCRVSTDDEDQIKSYNSMVRYYTDLIKSNKQWVFAGVFADKAITGTKTDKREEFQLLIQECLSGNIDLVIAKSIPRFARNTLDTLKYVRMLRERNIAVYFEVEKINTLKDGEFLLTILSSVAQQEVENTSAYVKKGLKMKMKRGELVGFQGCLGYDYDVVTKSLSINEEGAETVRYIFDRYVAGAGSTMIARELNEQGISTIKGNLWTSSSVMGIINNEKYKGDILLGKTFTVDPISKRRLENLGEEDRFYIKNHHEPIISEEKFARAQEIRERRNGGRKKGVAPGKREKFSRQYAFSCMLECGFCGASLSRRRWHSSSKYKKTIWQCVKSTKHGKRFCPDSKGIPEQVIEDAFIESYRMLCTDHKDVLEEFIKRVEKTLSEDSIEDKIEKLNKNAYNIQYKRKKLLESYLEGVVAKDIYEETDMGYEKKLSEVNAQLGMLEQQYDNEGSLQRRLVDFRKALSKNQILEGFDRGIFESIIEKVIVGGYDENGEKDPYKIIFIYKTGFKNEIGNAKERFGKKSKAVEKAKEMCSHIADEVKDVCSYVSDNTR

SEQ ID NO: 725 - protein, 579 aa, Unknown
  Description of Unknown: Integrase B726 sequence
  PTHR30461:SF3,IPR036162,PS51737,IPR011109,PTHR30461, PS00397,PF00239,G3DSA:1.10.10.2600,IPR006119,SSF53041, cd00338,SM00857,IPR025827,IPR038109,PS51736, IPR006118,PF13408,G3DSA:3.40.50.1390,PF07508
MPNLPYSNEFAKLIIAIYCRVSSEDQAERGTIEIQKEFAAKYVNLYNLEVFDYYCDDGVSGTLPLEQRPEGKRLLEDAAKKRFNMVIFYKLDRLGRKVRVILNAVNDLDALGVTVKSMTEPFENETPTGKFLLTTLAGIAELDRDTILSRMWSGAQYAAKQGRWLGGVIPYGYMVADKKLVISTDPVPNCRLSEEDVIKIIFRMAAKEKANCAEIAEYLNSIKIPTRYMLNGISGKRYKKTAEIWRPGRISEIIRSTTYKGLHQYGKNATHKNSKIITRSVPAIISDEIWQEANNTMKDNRVSCKRNTKNLYLLQGMIRCGLCGLAYSPTFYKARNTSYYCCTCKGQQKTKFYNRDACIGKPVRVDWLDTLVWSKCLELLKEPEKIYDAKPSTNKEPPNMVPTPTEFELIKSRIQELSTEREKLLDLYRKGIIIESDLTTQINKLYLEETELNNKIIKIDNQPKQELKRSKASTVMVLKEFIEMIKNTDINQLPFELKREVVKMLIDKVFVYTKVDPDKFYPSINVIISWRFDAAPFNIDYIENYTLITFLLQRKKLKTPLQPTPLITLTPVLNCNTRR

SEQ ID NO: 726 - protein, 579 aa, Unknown
  Description of Unknown: Integrase B727 sequence
  PTHR30461:SF3,IPR036162,PS51737,IPR011109,PTHR30461, PS00397,PF00239,G3DSA:1.10.10.2600,IPR006119,SSF53041, SM00857,IPR025827,IPR038109,PS51736,cd03768, IPR006118,PF13408,G3DSA:3.40.50.1390,PF07508,Coil
MAYKAKAPDSGAEKDIRVAIYVRVSTVYQIDKDSLPMMKQDLTAYCKYVLNTEDYEIFEDAGYSGKNTARPAYQKMMAQIRQGNFTHLLVWKIDRISRNLLDFAEMYQELKKLDVTFVSKNEQFDTSTAIGEAMLKIILVFAELERNMTSERVTATMINRASNGVWNGGRVPYGYSYDKDTQTFSLDPNENSIYNLLVETYETSKSVVYTSRKLNDLGYRSRYGNLWSPIAVWTILRSPWYKGIYRYNYYKIPGRAAVKDESEWVVVENHHPASITPERFDKIQETLDRNARFRNAPGRKITKKTTHVFAGLVLCADCGSAFTASPGKRHVSGYHPSKYGCSNARKTSACHAKYTSDVVLGEFLLNYILNILNAQKNVDEISSTEELQSRLLCGSTFSSIDHVKQDDLDSLFTQLKSRPEKDPFTAVRSKTKPKVDPELKRMMNDLKKQRRALDRLNDLYLYSENSISEREYLVRKQQITDCIQEINDTIEAIAKENHEQSIDDNEFIKQASTFILNQKLADRQYVCYTKLAETLSPETLKAFFSSIIDSIIMRAGKIETVIFRNGLSQTFIYKEKPGK

SEQ ID NO: 727 - protein, 579 aa, Unknown
  Description of Unknown: Integrase B728 sequence
  PTHR30461:SF3,IPR036162,PS51737,IPR011109,PTHR30461, PS00397,PF00239,G3DSA:1.10.10.2600,IPR006119,SSF53041, SM00857,IPR025827,IPR038109,PS51736,cd03768, IPR006118,PF13408,G3DSA:3.40.50.1390,PF07508,Coil
MNNTLSALNITPSPPRMCRVAIYIRVSTLQQVDKDSLPMQRKDLIAYSKLILNTDDYVIFEDAGYSGKNTIRPRYQDMMEQIRTGAFTHLLVWKIDRISRNLLDFAQMYQELKELNVTFVSKNEQFNTSTAMGEAMLKIILVFAELERNMTSERVTATMISRANTGKWNGGRVPYGYKYDPEEEDFLIVANESNTVKLIHDKYEELQSLVYLARYMNEHGYRTRSGNEWSPPSLAIILKSWWYCGCYEYNKRKAGNRQKLKNESEWIMIEDHHIAIISYDQKERVLAILKGNKRFATEHNLYVKGIHVHVFGGLCWCKNCGKKMTSTSSNKNRSWQYSKYLCSTRRRSLTKCRGRSTSDPVLGEFIFNYILNMLNAQKGFDSIHSPADLQDALLTGDAFSDIKSIDQEELNDLYNILSSSVVGNIYGRSFNVNKAKKNDEVQSSLTILKTEKKKLDRALDRLTNLYLYDDMAISEKDYMTKKTEIETKIAEIDEKIGIVNKNSVDNSITDEEFVDKASTFIITQKLTNRNYISYKRLATSVDPKILYMFTHDVIDYIDIYNGKVQRIVFRNGLSQTFIR

SEQ ID NO: 728 - protein, 579 aa, Unknown
  Description of Unknown: Integrase B729 sequence
  PTHR30461:SF3,IPR036162,PS51737,IPR011109,PTHR30461, PS00397,PF00239,G3DSA:1.10.10.2600,IPR006119,SSF53041, cd00338,SM00857,IPR025827,IPR038109,PS51736, IPR006118,PF13408,G3DSA:3.40.50.1390,PF07508,Coil
MINIDEKLSKKKAAGYIRVSTVYQVDKDSLPMQREDLTNYIKYALGIDEYEIFEDAGYSAKNTDRPSFQRMMSRLRSGEFSHLVVWKIDRISRNLIDFTTMYEELKRLGVTFVSKNEQFDTSSAMGEAMLKIILVFAELERKMTSERVSAVMVSRANEGKYNGGRIPIGYDYDKSTKTISVNDAEAKIVNLIYDKYDEMQSIIQVVKYLNSQGVKTKRGYDFSATTVHKVLTNKFYVGDLVYNKHDERNTGNSSTKSVRDESEWIVIEDHHPAIIERWRQERTIVALSSRNFANVSYKTYQRRNTHIFAGLIQCGMCGKGMTASVDRERSDGYRPSIYICDSRRKTKLCSNKYVSDITLGPFIFNLISNIVKAYNNVGKSTSVEMLEKKLLRGDTFDNVYSIESEGVRQLLDSIRNASDDSTENIILSKSTSAFSASTEEKELLRSEKKRHEAALSRLQQLFLYGEDAITQTDYLVQKTNIEKSIDIIDKRLNEIDSSIANNFVMTDSDFFSKASMFIIQSNLAQARSVDFDKLIRTVDKQTLKMFINKVVQKVVVLDGKIAQISFQNGISLKFLYAAK

SEQ ID NO: 729 - protein, 578 aa, Unknown
  Description of Unknown: Integrase B730 sequence
  PTHR30461:SF3,IPR036162,PS51737,IPR011109,PTHR30461, PS00397,PF00239,G3DSA:1.10.10.2600,IPR006119,SSF53041, cd00338,SM00857,IPR025827,IPR038109,PS51736, IPR006118,PF13408,G3DSA:3.40.50.1390,PF07508,Coil
MGYVTKKAAQRFEEKKAAIYVRVSTQYQVDRASLPVQREELINYAKYALGISDYVIFEDAGYSAKNTDRPDYQQMMARMRIGEFSHLLVWKIDRISRNLLDFSVMYAELKELGVVFVSKNEQFDTSSAMGEAMLKIILIFAELERKTTSERVSAVFVSRANDGIWNGGKVPYGYSYDKKSKTFSIIEDEAKIVRLIYSLYESEKSIVRVAQIMNSRGLKSRAGNDWSPTAVHNVLSNPFYSGTYRYNYRDESSGKTYRTKDKDEWVLIENHHTPIVSPEQQAAAGAILESKHYNKNATYQRKNVHVFAGLLTCGCCGSTMAATTDRVRADGWRPSMYICSRRRKSEDCTNKYVSDVTLGPFVLNFFANLIKASNSFGRTTSIETLEKKLLRGEALARVDHIERPGLEELYNHLRSGFDEKRFESPTIAATESSADLSERDLLLSEKRRLERALNRLKAIYLYGDDEMASKDFNIERERITKALSEVDSRINELDIANAFNLSLSDEAFMQKASQFILTQQLLDKRYVNYERFIRKIDPKIVKDFLNETVSNFCIKDGLTTSILLKNGIELRFSYKTSE

SEQ ID NO: 730 - protein, 578 aa, Unknown
  Description of Unknown: Integrase B731 sequence
  PTHR30461:SF3,IPR036162,PS51737,IPR011109,PTHR30461, PS00397,PF00239,G3DSA:1.10.10.2600,IPR006119,SSF53041, cd00338,SM00857,IPR025827,IPR038109,PS51736, IPR006118,PF13408,G3DSA:3.40.50.1390,PF07508,Coil
MGYVVKKAAQRFEEKKAAIYVRVSTQYQVDRASLPVQREELINYAKYALGISDYVIFEDAGYSAKNTDRPDYQQMMARMRTGEFSHLLVWKIDRISRNLLDFSVMYAELKELGVVFVSKNEQFDTSSAMGEAMLKIILIFAELERKTTSERVSAVFVSRANDGIWNGGKVPYGYSYDKESKTFSIAEDEAKIVRLIYSLYESEKSIVRVARIMNERGLKSRAGSDWSPTTVHTILSSPFYSGTYRYNYRDESNAKRFREKGKDEWVLVENHHPAIVSPERQAAVGVILESKRYNKNATYQRKNVHVFAGLLTCGCCGSTMAATTDKVRADGWRPSMYICSRRRKSEDCTNKYVSDVTLGPFVLNFFANLIKASNSFGRTTSIETLEKKLLRGEALSHVDHIERPGLEELYNHLRSGFDEKCFESPTIAATESSADLSERDLLLSEKRRLERALNRLKTIYLYGDDEMASKDFNIERERITKALSEVDSRINELDIANAFDLSLSDEAFMQKASQFILTQQLLDKRYVNYERFIRKIDPKIVKDFLNETVSNFCIKDGLTTSILLKNGIELRFSYKTAE

SEQ ID NO: 731 - protein, 578 aa, Unknown
  Description of Unknown: Integrase B732 sequence
  PTHR30461:SF3,IPR036162,PS51737,IPR011109,PTHR30461, PS00397,PF00239,G3DSA:1.10.10.2600,IPR006119,SSF53041, SM00857,IPR025827,IPR038109,PS51736,cd03768, IPR006118,PF13408,G3DSA:3.40.50.1390,PF07508,Coil
MAYPTKNTAADNRIIAIYVRVSTGYQVDKDSLPFQKKELKAYCKHILHVDLSQVEIFEDAGRSGKNTKRPAYERMMEKVRAGLVSHVLVYKIDRISRNLVDFSLMYDDFKYNRVTFISLNEQFDTSSAIGEAVLKIILVFAELERKLTSERVKDIMIGRATEGKWNGARVPYGWDWDPDAEQPVHSKIEAPYARGMYEMYLKVRSTGKIRDYNNAHGIPTKRGGEWTSKTVSDFLRNPMNKGDYRYNYRESARGRKKPEDEVIYQEGVFEPLVDPEMWERVNRIMDNNASKRNTGGLHPIMKNCNVFAGLIQCAECSSGFQVVKKDRRRKNGFAPSMYGCTSRFRKIHCPAPNVSEVQIGPFVINYISAMVHATKERFKIHSPAALESMLLSDPIFANIAGIESQGLNETFALLTGVSVSGSALWRTDLVKQTEAAANPSEIAELKKQIQKYNRAKERLEDAYYFSDDAMSEKEYLEKKNKFDAARVAAENKLKELTEVQIASHVDDSGFMKSASAFLLAHQLHAGVHIEYRDFAVTVEEESLKEFMNLVLDHISVKDRRVVEIVFSNGLSHRFIYRE

SEQ ID NO: 732 - protein, 578 aa, Unknown
  Description of Unknown: Integrase B733 sequence
  PTHR30461:SF3,IPR036162,PS51737,IPR011109,PTHR30461, PS00397,PF00239,G3DSA:1.10.10.2600,IPR006119,SSF53041, cd00338,SM00857,IPR025827,IPR038109,PS51736, IPR006118,PF13408,G3DSA:3.40.50.1390,PF07508,Coil
MGYVVKKAAQRFEEKKAAIYVRVSTQYQVDRASLPVQREELINYAKYALGISDYVIFEDAGYSAKNTDRPDYQQMMARMRTGEFSHLLVWKIDRISRNLLDFSVMYAELKELGVVFVSKNEQFDTSSAMGEAMLKIILIFAELERKTTSERVSAVFVSRANDGIWNGGKVPYGYSYDKEGKTFSIAEDEAKIVRLIYSLYESEKSIVRVARIMNERGLKSRAGNDWSPTTVHTILSSPFYSGTYRYNYRDESNTKRFREKGKDEWVLVENHHPAIVSPERQAAVGVILESKRYNKNATYQRKNVHVFAGLLTCGCCGSTMAATTDKVRADGWRPSMYICSRRRKSEDCTNKYVSDVTLGPFVLNFFANLIKASNSFGRTTSIETLEKKLLRGEALSRVDHIERPGLEELYNHLRSGFDEKRFESPTIAATDSSADLSERDLLLSEKRRLERALNRLKTIYLYGDDEMASKDFNVERERITKALVEVDSRINELDIANAFDLSLSDEAFMQKASQFILTQQLLDKRYVNYERFIRKIDPKIVKDFLNETVSNFCIKDGLTTSILLKNGIELRFSYKTAE

SEQ ID NO: 733 - protein, 578 aa, Unknown
  Description of Unknown: Integrase B734 sequence
  PTHR30461:SF3,IPR036162,PS51737,IPR011109,PTHR30461, PS00397,PF00239,G3DSA:1.10.10.2600,IPR006119,SSF53041, cd00338,SM00857,IPR025827,IPR038109,PS51736, IPR006118,PF13408,G3DSA:3.40.50.1390,PF07508,Coil
MGYVTKKAAQRFEEKKAAIYVRVSTQYQVDRASLPVQREELINYAKYALGISDYVIFEDAGYSAKNTDRPDYQQMMARMRTGEFSHLLVWKIDRISRNLLDFSVMYAELKELGVVFVSKNEQFDTSSAMGEAMLKIILIFAELERKTTSERVSAVFVSRANDGIWNGGKVPYGYSYDKEGKTFSIAEDEAKIVRLIYSLYESEKSIVRVARIMNERGLKSRAGSDWSPTTVHTILSSPFYSGTYRYNYRNESNRKRFREKGKDEWVLVENHHPAIVSPERQAAVGVILESKRYNKNATYQRKNVHVFAGLLTCGCCGSTMAATTDKVRADGWRPSMYICSRRRKSEDCTNKYVSDVSLGPFVLNFFANLIKASNSFGRTTSIETLEKKLLRGEALSRVDHIERPGLEELYNHLRSGFDEKRFESPTIAATESSADLSERDLLLSEKRRLERALNRLKTIYLYGDDEMASKDFNIERERITKALSEVDSRINELDIANAFDLSLSDEAFMQKASQFILTQQLLDKRYVNYERFIRKIDPKIVKDFLNETVSNFCIKDGLTTSILFKNGLEIQFSYKSTE

SEQ ID NO: 734 - protein, 578 aa, Unknown
  Description of Unknown: Integrase B735 sequence
  PTHR30461:SF3,IPR036162,PS51737,IPR011109,PTHR30461, PS00397,PF00239,G3DSA:1.10.10.2600,IPR006119,SSF53041, SM00857,IPR025827,IPR038109,PS51736,cd03768, IPR006118,PF13408,G3DSA:3.40.50.1390,PF07508,Coil
MAYPMKNTAADNRIIAIYVRVSTGYQVDKDSLPFQKKELKAYCKHILHVDLSQVEIFEDAGRSGKNTKRPAYERMMEKVRAGLVSHVLVYKIDRISRNLVDFSLMYDDFKYNRVTFISLNEQFDTSSAIGEAVLKIILVFAELERKLTSERVKDIMIGRATEGKWNGARVPYGWDWDPDVEQPVHSKIEAPYARGMYEMYLKVRSTGKIRDYNNSHNIPTKRGGEWTSKTVSDFLRNPMNKGDYRYNYRESARGRKKPEDEVIYQEGVFEPLVDPEVWERVNRIMDDNASKRNTGGLHPIMKNCNVFAGLIQCAECSSGFQVVKKDRRRKNGFAPSMYGCTSRFRKIHCPAPNVSEVQIGPFVINYISAMVHATKERFKIHSPAALESMLLSDPIFANIAGIESQGLNETFALLTGVSVSGSALWRTDPVKQSDTAATSSEIENLKKQIQKYNRAKERLEDAYYFSDDAMSEKEYLEKKNKFDAARVAAENKLKELTEVQIASHVDDSGFMKSASAFLLAHQLHAGVHIEYRDFAVTVEEESLKEFMNLVLDHISVKDRRVVEIVFSNGLSHRFIYRE

SEQ ID NO: 735 - protein, 578 aa, Unknown
  Description of Unknown: Integrase B736 sequence
  PTHR30461:SF3,IPR036162,PS51737,IPR011109,PTHR30461, PS00397,PF00239,G3DSA:1.10.10.2600,IPR006119,SSF53041, cd00338,SM00857,IPR025827,IPR038109,PS51736, IPR006118,PF13408,G3DSA:3.40.50.1390,PF07508,Coil
MGYVVKKAAQRFEEKKAAIYVRVSTQYQVDRASLPVQREELINYAKYALGISDYVIFEDAGYSAKNTDRPDYQQMMARMRTGEFSHLLVWKIDRISRNLLDFSVMYAELKELGVVFVSKNEQFDTSSAMGEAMLKIILIFAELERKTTSERVSAVFVSRANDGIWNGGKVPYGYSYDKESKTFSIAEDEAKIVRLIYSLYESEKSIVRVARIMNERGLKSRAGSDWSPTTVHTILSSPFYSGTYRYNYRDESNTKRFREKGKDEWVLVENHHPAIVSPERQAAVGVILESKRYNKNATYQRKNVHVFAGLLTCGCCGSTMAATTDKVRADGWRPSMYICSRRRKSEDCTNKYVSDVSLGPFVLNFFANLIKASNSFGRTTSIETLEKKLLRGEALSRVDHIERPGLEELYNHLRSGFDEKRFESPTIAATESSADLSERDLLLSEKRRLERALNRLKTIYLYGDDEMASKDFNIERERITKALSEVDSRINELDIANAFDLSLSDEAFMQKASQFILTQQLLDKRYVNYERFIRKIDPKIVKDFLNETVSNFCIKDGLTTSILLKNGIELRFSYKTAE

SEQ ID NO: 736 - protein, 578 aa, Unknown
  Description of Unknown: Integrase B737 sequence
  PTHR30461:SF3,IPR036162,PS51737,IPR011109,PTHR30461, PS00397,PF00239,G3DSA:1.10.10.2600,IPR006119,SSF53041, cd00338,SM00857,IPR025827,IPR038109,PS51736, IPR006118,PF13408,G3DSA:3.40.50.1390,PF07508,Coil
MGYVVKKAAQRFEEKKAAIYVRVSTQYQVDRASLPVQREELINYAKYALGISDYVIFEDAGYSAKNTDRPDYQQMMARMRTGEFSHLLVWKIDRISRNLLDFSVMYAELKELGVVFVSKNEQFDTSSAMGEAMLKIILIFAELERKTTSERVSAVFVSRANDGIWNGGKVPYGYSYDKEGKTFSIAEDEAKIVRLIYSLYESEKSIVRVARIMNERGLKSRAGNDWSPTTVHTILSSPFYSGTYRYNYRDESNTKRFREKGKDEWVLVENHHPAIVSPERQAAVGVILESKRYNKNATYQRKNVHVFAGLLTCGCCGSTMAATTDKVRADGWRPSMYICSRRRKSEDCTNKYVSDVSLGPFVLNFFANLIKASNSFGRTTSIETLEKKLLRGEALSRVDHIERPGLEELYNHLRSGFDEKRFESPTIAATESSADLSERDLLLSEKRRLERALNRLKTIYLYGDDEMASKDFNIERERITKALSEVDSRIDELDIANAFDLSLSDEAFMQKASQFILTQQLLDKRSVNYERFIRKIDPKIVKDFLNETVSNFCIKDGLTTSILLKNGIELRFSYKTAE

SEQ ID NO: 737 - protein, 578 aa, Unknown
  Description of Unknown: Integrase B738 sequence
  PTHR30461:SF3,IPR036162,PS51737,IPR011109,PTHR30461, PS00397,PF00239,G3DSA:1.10.10.2600,IPR006119,SSF53041, SM00857,IPR025827,IPR038109,PS51736,cd03768, IPR006118,PF13408,G3DSA:3.40.50.1390,PF07508,Coil
MAYPTKNTAADNRIIAIYVRVSTGYQVDKDSLPFQKKELKAYCKHILHVDLSQVEIFEDAGRSGKNTKRPAYERMMEKVRAGLVSHVLVYKIDRISRNLVDFSLMYDDFKYNRVTFISLNEQFDTSSAIGEAVLKIILVFAELERKLTSERVKDIMIGRATEGKWNGARVPYGWDWDPDAEQPVHSKVEAPYARGMYEMYLEVRSTGKIRDYNNSHNIPTKRGGEWTSKTVSDFLRNPMNKGDYRYNYRESARGRKKPEDEVIYQEGVFEPLVDPEVWEHVNRIMDDNASKRNTGGLHPIMKNCNVFAGLIQCAECGSGFQVVKKDRRRKNGFAPSMYGCTSRFRKIHCPAPNVSEVQIGPFVINYISAMVHATKERFKIHSPSALESMLLSDPIFANIAGIESQGLNETFALLTGVSVSGSALWRTDPVKQSDTAATSSEIENLKKQIQKYNRAKERLEDAYYFSDDAMSEKEYLEKKNKFDAARVTAENKLKELTEVQIASHVDDSGFMKSASAFLLAHQLHAGVHIEYRDFAVTVEEESLKEFMNLVLDHISVKDRRVVEIVFFNGLSHRFIYRE

SEQ ID NO: 738 - protein, 578 aa, Unknown
  Description of Unknown: Integrase B739 sequence
  PTHR30461:SF3,IPR036162,PS51737,IPR011109,PTHR30461, PS00397,PF00239,G3DSA:1.10.10.2600,IPR006119,SSF53041, SM00857,IPR025827,IPR038109,PS51736,cd03768, IPR006118,PF13408,G3DSA:3.40.50.1390,PF07508,Coil
MNTLSALNITPSPPRMCRVAIYIRVSTLQQVDKDSLPMQRKDLIAYSKLILNTDDYVIFEDAGYSGKNTIRPRYQDMMEQIRTGAFTHLLVWKIDRISRNLLDFAQMYQELKELNVTFVSKNEQFNTSTAMGEAMLKIILVFAELERNMTSERVTATMISRANTGKWNGGRVPYGYKYDPEEEDFLIVANESNTVKLIHDKYEELQSLVYLARYMNEHGYRTRSGNEWSPPSLAIILKSWWYCGCYEYNKRKAGNRQKLKDKSEWIMIEDHHIAIISYDQKERVLAILKGNKRYATDHNLYVKGIHVHVFGGLCWCRNCGKKMTSTSSNKNRSWQYSKYLCSTRRRSLTKCRGRSTSDPVLGEFIFNYILNMLNAQKGFDSIHSPADLQAALLTGDAFSDIKSIDQEELNDLYNILSSSVVGNIYGRSFNVNKAKKNDEVQSSLTILKAEKKKLDRALDRLTNLYLYDDMAISEKDYMTKKTEIETKIAEIDEKIGIVNKNSVDNSITDEEFVDKASTFIITQKLTNRNYISYKRLATSVDPKILYMFTHDVIDYIDIYNGKVQRIVFRNGLSQTFIR

SEQ ID NO: 739 - protein, 578 aa, Unknown
  Description of Unknown: Integrase B740 sequence
  PTHR30461:SF3,IPR036162,PS51737,IPR011109,PTHR30461, PS00397,PF00239,G3DSA:1.10.10.2600,IPR006119,SSF53041, SM00857,IPR025827,IPR038109,PS51736,cd03768, IPR006118,PF13408,G3DSA:3.40.50.1390,PF07508,Coil
MNTLSSLNITPSPPRMCRVAIYIRVSTLQQVDKDSLPMQRKDLIAYSKLILNTDDYVIFEDAGYSGKNTIRPRYQDMMDQIRTGAFTHLLVWKIDRISRNLLDFAQMYQELKELNVTFVSKNEQFNTSTAMGEAMLKIILVFAELERNMTSERVTATMISRANTGKWNGGRVPYGYKYDPEEEDFLIVANESNTVKLIHDKYEELQSLVYLARYMNEHGYRTRSGNEWSPPSLAIILKSWWYCGCYEYNKRKAGNRQKLKNESEWIMIEDHHIAIISYDQKERVLAILKGNKRFATEHNLYVKGIHVHVFGGLCWCKNCGKKMTSTSSNKNRSWQYSKYLCSTRRRSLTKCRGRSTSDPVLGEFIFNYILNMLNAQKGFDSIHSPADLQDALLTGDAFSDIKSIDQEELNDLYNILSSSVVGNIYGRSFNVNKAKKNDEVQSSLTILKAEKKKLDRALDRLTNLYLYDDMAISEKDYMTKKTEIETKIAEIDEKIGIVNKNSVDNSITDEEFVDKASTFIITQKLTNRNYISYKRLATSVDPKILYMFTHDVIDYIDIYNGKVQRIVFRNGLSQTFIR

SEQ ID NO: 740 - protein, 578 aa, Unknown
  Description of Unknown: Integrase B741 sequence
  PTHR30461:SF3,IPR036162,PS51737,IPR011109,PTHR30461, PS00397,PF00239,G3DSA:1.10.10.2600,IPR006119,SSF53041, cd00338,SM00857,IPR025827,IPR038109,PS51736, IPR006118,PF13408,G3DSA:3.40.50.1390,PF07508,Coil
MGYVTKKAAQRFEEKKAAIYVRVSTQYQVDRASLPVQREELINYAKYALGISDYVIFEDAGYSAKNTDRPDYQQMMARMRTGEFSHLLVWKIDRISRNLLDFSVMYAELKELGVVFVSKNEQFDTSSAMGEAMLKIILIFAELERKTTSERVSAVFVSRANDGIWNGGKVPYGYSYDKESKTFSIAEDEAKIVRLIYSLYESEKSIVRVARIMNERGLKSRAGNDWSPTTVHTVLSSPFYSGTYRYNYRDESNTKRFREKGKDEWVLVENHHPAIVSPERQAAVGLILESKRYNKNATYQRKNVHVFAGLLTCGCCGATMAATTDKVRADGWRPSMYICSRRRKSEDCTNKYVSDVTLGPFVLNFFANLIKASNSFGRTTSIETLEKKLLRGEALSRVDHIERPGLEELYNHLRSGFDEKCFESPTIAATESSADLSERDLLLSEKRRLERALNRLKTIYLYGDDEMASKDFNIERERITKALSEVDSRINELDIANAFDLSLSDEAFMQKASQFILTQQLLDKRYVNYERFIRKIDPKIVKDFLNETVSNFCIKDGLTTSILLKNGIELRFSYKTAE

SEQ ID NO: 741 - protein, 578 aa, Unknown
  Description of Unknown: Integrase B742 sequence
  PTHR30461:SF3,IPR036162,PS51737,IPR011109,PTHR30461, PS00397,PF00239,G3DSA:1.10.10.2600,IPR006119,SSF53041, cd00338,SM00857,IPR025827,IPR038109,PS51736, IPR006118,PF13408,G3DSA:3.40.50.1390,PF07508,Coil
MGYVTKKAAQRFEEKKAAIYVRVSTQYQVDRASLPVQREELINYAKYALGISDYVIFEDAGYSAKNTDRPDYQQMMARMRTGEFSHLLVWKIDRISRNLLDFSVMYAELKELGVVFVSKNEQFDTSSAMGEAMLKIILIFAELERKTTSERVSAVFVSRANDGIWNGGKVPYGYSYDKESKTFSIAEDEAKIVRLIYSLYESEKSIVRVARIMNERGLKSRAGSDWSPTTVHTILSSPFYSGTYRYNYRDESNAKRFREKGKDEWVLVENHHPAIVSPERQAAVGVILESKHYNKNATYQRKNVHVFAGLLTCGCCGSTMAATTDKVRADGWRPSMYICSRRRKSEDCTNKYVSDVTLGPFVLNFFANLIKASNSFGRTTSIETLEKKLLRGEALSHVDHIERPGLEELYNHLRSGFDEKCFESPTIAATESSADLSERDLLLSEKRRLERALNRLKTIYLYGDDEMASKDFNIERERITKALSEVDSRINELDIANAFDLSLSDEAFMQKASQFILTQQLLDKRYVNYERFIRKIDPKIVKDFLNETVSNFCIKDGLTTSILLKNGIELRFSYKTAE

SEQ ID NO: 742 - protein, 578 aa, Unknown
  Description of Unknown: Integrase B743 sequence
  PTHR30461:SF3,IPR036162,PS51737,IPR011109,PTHR30461, PS00397,PF00239,G3DSA:1.10.10.2600,IPR006119,SSF53041, cd00338,SM00857,IPR025827,IPR038109,PS51736, IPR006118,PF13408,G3DSA:3.40.50.1390,PF07508,Coil
MGYVTKKAAQRFEEKKAAIYVRVSTQYQVDRASLPVQREELINYAKYALGISDYVIFEDAGYSAKNTDRPDYQQMMARMRTGEFSHLLVWKIDRISRNLLDFSIMYAELKELGVVFVSKNEQFDTSSAMGEAMLKIILIFAELERKTTSERVSAVFVSRANDGIWNGGKVPYGYSYDKEGKTFSIAEDEAKIVRLIYSLYESEKSIVRVARIMNERGLKSRAGNDWSPTTVHAILSSPFYSGTYRYNYRDESNTKRFHEKGKDEWVLVENHHPAIVSPERQAAVGVILESKRYNKNATYQRKNVHVFAGLLTCGCCGSTMAATTDKVRADGWRPSMYICSRRRKSEDCTNKYVSDVTLGPFVLNFFANLIKASNSFGRTTSIETLEKKLLRGEALARVDHIERPGLEELYNHLRSGFDEKRFESPTIAATESSADLSERDLLLSEKRRLERALNRLKTIYLYGDDEMASKDFNIERERITKALSEVDSRINELDIANAFDLSLSDEAFMQKASQFILTQQLLDKRYVNYERFIRKIDPKIVKDFLNETVSNFCIKDGLTTSILLKNGIELRFSYKTAE

SEQ ID NO: 743 - protein, 578 aa, Unknown
  Description of Unknown: Integrase B744 sequence
  PTHR30461:SF3,IPR036162,PS51737,IPR011109,PTHR30461, PS00397,PF00239,G3DSA:1.10.10.2600,IPR006119,SSF53041, cd00338,SM00857,IPR025827,IPR038109,PS51736, IPR006118,PF13408,G3DSA:3.40.50.1390,PF07508,Coil
MGYVTKKAAQRFEEKKAAIYVRVSTQYQVDRASLPVQREELINYAKYALGISDYVIFEDAGYSAKNTDRPDYQQMMARMRTGEFSHLLVWKIDRISRNLLDFSVMYAELKELGVVFVSKNEQFDTSSAMGEAMLKIILIFAELERKTTSERVSAVFVSRANDGIWNGGKVPYGYSYDKESKTFSIAEDEAKIVRLIYSLYESEKSIVRVARIMNERGLKSRAGNDWSPTTVHMILSSPFYSGTYRYNYRDESNTKRFREKGKDEWVLVENHHPVIVSPERQAAVGVILESKRYNKNATYQRKNVHVFAGLLTCGCCGSTMAATTDKVRADGWRPSMYICSRRRKSEDCTNKYVSDVSLGPFVLNFFANLIKASNSFGRTTSIETLEKKLLRGEALSRVDHIERPGLEELYNHLRSGFDEKRFEPPTIAATETSADLSERDLLLSEKRRLERALNRLKTIYLYGDDEIASKDFNIERERITKALSEVDSRINELDIANAFDLSLSDEAFMQKASQFILTQQLLDKRYVNYERFIRKIDPKIVKDFLNETVSNFCIKDGLTTSILLKNGIELRFSYKTAE

SEQ ID NO: 744 - protein, 578 aa, Unknown
  Description of Unknown: Integrase B745 sequence
  PTHR30461:SF3,SM00857,G3DSA:1.10.10.2600,IPR036162,PF13408, PS51737,G3DSA:3.40.50.1390,IPR025827,IPR006119,IPR038109, PF07508,IPR011109,SSF53041,PF00239,PTHR30461, PS51736,Coil,cd00338
MKKQPTGGKRLVAYYRYSGGSHQTEQSIEGQRRDCETYARIHGMVILHEYIDRHISGKTDNRPEFQQMIADSGKGMFDYVICWKTDRIARSRYDSIVYKKKLRDNGVELLYAAEANVEGSGGIIVEGLMEALAEYYSAELAEKVRRGMRESALKGKAIGSSRPLGLTVDKDKKYIIDPAGAAAVRYIFEQYAAGAASSAIVAHLNEQGLCTSRGNPFNKSSVVRIIQNEVYRGVYVSPKFDVRIEGAVPAIIDDDLWERAQKMFIRNRQSRSPRNDRADYILSGKLFCGECGTAMKGVSGHSSNGEVYFYYNCPCKDCHRRNIPKDELEGLVIRTVCNDVLQPDVMDRIADSVIEAQIAELNQPNPEKEALQHELADVQRKAKNLLSALENGTAGAMLTNRLAELEQQADTLSYQLSSLESEPKFPVFSKEEVLYLLEQFLIAPSEKTKAYRRRLIDTFVSKIEVSNAELTIYFNIAEEDCGKIKKAPQSNQPEGCSTEKQMVHWIHLLTAIKAYPSITKQRIPVLLRGRLNSLIILSWLYLGINRNPRKCIHPCFRKKCDSARTFFAHCPVSHENSR

SEQ ID NO: 745 - protein, 578 aa, Unknown
  Description of Unknown: Integrase B746 sequence
  PTHR30461:SF3,IPR036162,PS51737,IPR011109,PTHR30461, PS00397,PF00239,G3DSA:1.10.10.2600,IPR006119,SSF53041, cd00338,SM00857,IPR025827,IPR038109,PS51736, IPR006118,PF13408,G3DSA:3.40.50.1390,PF07508,Coil
MGYVTKKAAQRFEEKKAAIYVRVSTQYQVDRASLPVQREELINYAKYALGISDYVIFEDAGYSAKNTDRPDYQQMMARMRTGEFSHLLVWKIDRISRNLLDFSVMYAELKELGVVFVSKNEQFDTSSAMGEAMLKIILIFAELERKTTSERVSAVFVSRANDGIWNGGKVPYGYSYDKESKTFSIAEDEAKIVRLIYSLYESEKSIVRVARIMNERGLKSRAGNDWSPTTVHMILSSPFYSGTYRYNYRDESNTKRFREKGKDEWVLVENHHPVIVSPERQAAVGVILESKRYNKNATYQRKNVHVFAGLLTCGCCGSTMAATTDKVRADGWRPSMYICSRRRKSEDCTNKYVSDVSLGPFVLNFFANLIKASNSFGRTTSIETLEKKLLRGEALSHVDHIERPGLEELYNHLRSGFDEKRFEPPTIAATEASADLSERDLLLSEKRRLERALNRLKTIYLYGDDEMASKDFNIERERIIKALSEVDSRINELDIANAFDLSLSDEAFMQKASQFILTQQLLDKRYVNYERFIRKIDPKIVKDFLNETVSNFCIKDGLTTSILLKNGIELRFSYKTAE

SEQ ID NO: 746 - protein, 578 aa, Unknown
  Description of Unknown: Integrase B747 sequence
  PTHR30461:SF3,IPR036162,PS51737,IPR011109,PTHR30461, PS00397,PF00239,G3DSA:1.10.10.2600,IPR006119,SSF53041, cd00338,SM00857,IPR025827,IPR038109,PS51736, IPR006118,PF13408,G3DSA:3.40.50.1390,PF07508,Coil
MGYVTRKAAQRFEEKKAAIYVRVSTQYQVDRASLPVQREELINYAKYALGISDYVIFEDAGYSAKNTDRPDYQQMMARMRTGEFSHLLVWKIDRISRNLLDFSIMYAELKELGVVFVSKNEQFDTSSAMGEAMLKIILIFAELERKTTSERVSAVFVSRANDGIWNGGKVPYGYSYDKEGKTFSIAEDEAKIVRLIYSLYESEKSIVRVARIMNERGLKSRAGNDWSPTTVHTILSSPFYSGTYRYNYRDESNTKRFHEKGKDEWVLVENHHPAIVSPERQAAVGVILESKRYNKNATYQRKNVHVFAGLLTCGCCGSTMAATTDKVRADGWRPSMYICSRRRKSEDCTNKYVSDVTLGPFVLNFFANLIKASNSFGRTTSIETLEKKLLRGEALARVDHIERPGLEELYNHLRSGFDEKRFESPTIAATESSADLSERDLLLSEKRRLERALNRLKTIYLYGDDEMASKDFNIERERITKALSEVDSRINELDIANAFDLSLSDEAFMQKASQFILTQQLLDKRYVNYERFIRKIDPKIVKDFLNETVSNFCIKDGLTTSILLKNGIELRFSYKTAE

SEQ ID NO: 747 - protein, 578 aa, Unknown
  Description of Unknown: Integrase B748 sequence
  PTHR30461:SF3,IPR036162,PS51737,IPR011109,PTHR30461, PS00397,PF00239,G3DSA:1.10.10.2600,IPR006119,SSF53041, cd00338,SM00857,IPR025827,IPR038109,PS51736, IPR006118,PF13408,G3DSA:3.40.50.1390,PF07508,Coil
MGYVTKKAAQRFEEKKAAIYVRVSTQYQVDRASLPVQREELINYAKYALGISDYVIFEDAGYSAKNTDRPDYQQMMSRMRTGEFSHLLVWKIDRISRNLLDFSVMYAELKELGVVFVSKNEQFDTSSAMGEAMLKIILIFAELERKTTSERVSAVFVSRANDGIWNGGKVPYGYSYDKESKTFSIAEDEAKIVRLIYSLYESEKSIVRVARIMNERGLKSRAGNDWSPTTVHTILSSPFYSGTYRYNYRDESNTKRFREKGKDEWVLVENHHPAIVSPERQAAVGGILESKRYNKNATYQRKNVHVFAGLLTCGCCGATMAATTDKVRADGWRPSMYICSRRRKSEDCTNKYVSDVTLGPFVLNFFANLIKASNSFGRTTSIETLEKKLLRGEALSCVDHIERPGLEELYNHLRSGFDEKCFESPTIAATESSADLSERDLLLSEKRRLERALNRLKTIYLYGDDEMASKDFNIERERITKALSEVDSRINELDIANAFDLSLSDEAFMQKASQFILTQQLLDKRYVNYERFIRKIDPKIVKDFLNETVSNFCIKDGLTTSILLKNGIELRFSYKTAE

SEQ ID NO: 748 - protein, 578 aa, Unknown
  Description of Unknown: Integrase B749 sequence
  PTHR30461:SF3,IPR036162,PS51737,IPR011109,PTHR30461, PS00397,PF00239,G3DSA:1.10.10.2600,IPR006119,SSF53041, cd00338,SM00857,IPR025827,IPR038109,PS51736, IPR006118,PF13408,G3DSA:3.40.50.1390,PF07508,Coil
MGYVTKKAAQRFEEKKAAIYVRVSTQYQVDRASLPVQREELINYAKYALGISDYVIFEDAGYSAKNTDRPDYQQMMARMRTGEFSHLLVWKIDRISRNLLDFSVMYAELKELGVVFVSKNEQFDTSSAMGEAMLKIILIFAELERKTTSERVSAVFVSRANDGIWNGGKVPYGYSYDKESKTFSIAEDEAKIVRLIYSLYESEKSIVRVARIMNERGLKSRAGSDWSPTTVHTILSSPFYSGTYRYNYRDESNAKRFREKGKDEWVLVENHHPAIVSPERQAAVGVILESKHYNKNATYQRKNVHVFAGLLTCGCCGSTMAATTDKVRADGWRPSMYICSRRRKSEDCTNKYVSDVTLGPFVLNFFANLIKASNSFGRTTSIETLEKKLLRGEALSHVDHIERPGLKELYNHLRSGFDEKCFESPTIAATESSADLSERDLLLSEKRRLERALNRLKTIYLYGDDEMASKDFNIERERITKALSEVDSRINELDIANAFDLSLSDEAFMQKASQFILTQQLLDKRYVNYERFIRKIDPKIVKDFLNETVSNFCIKDGLTTSILLKNGIELRFSYKTAE

SEQ ID NO: 749 - protein, 578 aa, Unknown
  Description of Unknown: Integrase B750 sequence
  PTHR30461:SF3,IPR036162,PS51737,IPR011109,PTHR30461, PS00397,PF00239,G3DSA:1.10.10.2600,IPR006119,SSF53041, cd00338,SM00857,IPR025827,IPR038109,PS51736, IPR006118,PF13408,G3DSA:3.40.50.1390,PF07508,Coil
MGYVVKKAAQRFEEKKAAIYVRVSTQYQVDRASLPVQREELINYAKYALGISDYVIFEDAGYSAKNTDRPDYQQMMARMRTGEFSHLLVWKIDRISRNLLDFSVMYAELKELGVVFVSKNEQFDTSSAMGEAMLKIILIFAELERKTTSERVSAVFVSRANDGIWNGGKVPYGYSYDKESKTFSIAEDEAKIVCLIYSLYESEKSIVRVARIMNERGLKSRAGSDWSPTTIHTILSSPFYSGTYRYNYRDESNTKRFREKGKDEWVLVENHHPAIVSPERQAAVGVILESKRYNKNATYQRKNVHVFAGLLTCGCCGSTMAATTDKVRADGWRPSMYICSRRRKSEDCTNKYVSDVTLGPFVLNFFANLIKASNSFGRTTSIETLEKKLLRGEALSRVDHIERPGLEELYNHLHSGFDEKRFESPTIAATESSADLSERDLLLSEKRRLERALNRLKTIYLYGDDGMASKDFNIERERITKALSEVDSRINELDIANAFDLSLSDEAFMQKASQFILTQQLLDKRYVNYERFIRKIDPKIVKDFLNETVSNFCIKDGLTTSILLKNGIELRFSYKTAE

SEQ ID NO: 750 - protein, 578 aa, Unknown
  Description of Unknown: Integrase B751 sequence
  PTHR30461:SF3,IPR036162,PS51737,IPR011109,PTHR30461, PS00397,PF00239,G3DSA:1.10.10.2600,IPR006119,SSF53041, cd00338,SM00857,IPR025827,IPR038109,PS51736, IPR006118,PF13408,G3DSA:3.40.50.1390,PF07508,Coil
MGYVVKKAAQRFEEKKAAIYVRVSTQYQVDRASLPVQREELINYAKYALGISDYVIFEDAGYSAKNTDRPDYQQMMARMRTGEFSHLLVWKIDRISRNLLDFSVMYAELKELGVVFVSKNEQFDTSSAMGEAMLKIILIFAELERKTTSERVSAVFVSRANDGIWNGGKVPYGYSYDKEGKTFSIAEDEAKIVRLIYSLYESEKSIVRVARIMNERGLKSRAGNDWSPTTVHTILSSPFYSGTYRYNYRDESNTKRFREKGKDEWVLVENHHPAIVSPERQAAVGVILESKRYNKNATYQRKNVHVFAGLLTCGCCGSTMAATTDKVRADGWRPSMYICSRRRKSEDCTNKYVSDVTLGPFVLNFFANLIKASNSFGRTTSIETLEKKLLRGEALSRVDHIERPGLEELYNHLRSGFDEKRFESPTIAATESSADLSERDLLLSEKRRLERALNRLKTIYLYGDDEMASKDFNIERERITKALSEVDSRIDELDIANAFDLSLSDEAFMQKASQFILTQQLLDKRSVNYERFIRKIDPKIVKDFLNETVSNFCIKDGLTTSILLKNGIELRFSYKTAE

SEQ ID NO: 751 - protein, 578 aa, Unknown
  Description of Unknown: Integrase B752 sequence
  PTHR30461:SF3,IPR036162,PS51737,IPR011109,PTHR30461, PS00397,PF00239,G3DSA:1.10.10.2600,IPR006119,SSF53041, cd00338,SM00857,IPR025827,IPR038109,PS51736, IPR006118,PF13408,G3DSA:3.40.50.1390,PF07508,Coil
MGYVTKKAAQRFEEKKAAIYVRVSTQYQVDRASLPVQREELINYAKYALGISDYVIFEDAGYSAKNTDRPDYQQMMARMRTGEFSHLLVWKIDRISRNLLDFSIMYAELKELGVVFVSKNEQFDTSSAMGEAMLKIILIFAELERKTTSERVSAVFVSRANDGIWNGGKVPYGYSYDKEGKTFSIAEDEAKIVRLIYSLYESEKSIVRVARIMNERGLKSRAGNDWSPTTVHTILSSPFYSGTYRYNYRDESNTKRFHEKGKDEWVLVENHHPAIVSPERQAAVGVILESKRYNKNATYQRKNVHVFAGLLTCGCCGSTMAATTDKVRADGWRPSMYICSRRRKSEDCTNKYVSDVTLGPFVLNFFANLIKASNSFGRTTSIETLEKKLLRGEALARVDHIERPGLEELYNHLRSGFDEKRFESPTIAATESSADLSERDLLLSEKRRLERALNRLKTIYLYGDDEMASKDFNIERERITKALSEVDSRINELDIANAFDLSLSDEAFMQKASQFILTQQLLDKRYVNYERFIRKIDPKIVKDFLNETVSNFCIKDGLTTSILLKNGIELRFSYKTAE

SEQ ID NO: 752 - protein, 578 aa, Unknown
  Description of Unknown: Integrase B753 sequence
  PTHR30461:SF3,IPR036162,PS51737,IPR011109,PTHR30461, PS00397,PF00239,G3DSA:1.10.10.2600,IPR006119,SSF53041, cd00338,SM00857,IPR025827,IPR038109,PS51736, IPR006118,PF13408,G3DSA:3.40.50.1390,PF07508,Coil
MGYVTKKAAQRFEEKKAAIYVRVSTQYQVDRASLPVQREELINYAKYALGISDYVIFEDAGYSAKNTDRPDYQQMMARMRTGEFSHLLVWKIDRISRNLLDFSVMYAELKELGVVFVSKNEQFDTSSAMGEAMLKIILIFAELERKTTSERVSAVFVSRANDGIWNGGKVPYGYSYDKEGKTFSIAEDEAKIVRLIYSLYESEKSIVRVARIMNERGLKSRAGNDWSPTTVHTILSSPFYSGTYRYNYRDESNTKRFHEKGKDEWVLVENHHPAIVSPERQAAVGVILESKRYNKNATYQRKNVHVFAGLLTCGCCGSTMAATTDKVRADGWRPSMYICSRRRKSEDCTNKYVSDVTLGPFVLNFFANLIKASNSFGRTTSIETLEKKLLRGEALSRVDHIERPGLEELYNHLRSGFDEKRFESPTIAATESSADLSERDLLLSEKRRLERALNRLKTIYLYGDDEMASKDFNIERERITKALSEVDSRINELDIANAFDLSLSDEAFMQKASQFILTQQLLDKRYVNYERFIRKIDPKIVKDFLNETVSNFCIKDGLTTSILLKNGIELRFSYKTAE

SEQ ID NO: 753 - protein, 578 aa, Unknown
  Description of Unknown: Integrase B754 sequence
  PTHR30461:SF3,IPR036162,PS51737,IPR011109,PTHR30461, PS00397,PF00239,G3DSA:1.10.10.2600,IPR006119,SSF53041, SM00857,IPR025827,IPR038109,PS51736,cd03768, IPR006118,PF13408,G3DSA:3.40.50.1390,PF07508,Coil
MNTLSALNITPSPPRMCRVAIYIRVSTLQQVDKDSLPMQRKDLIAYSKLILNTDDYAIFEDAGYSGKNTIRPRYQDMMEQIRTGAFTHLLVWKIDRISRNLLDFAQMYQELKELNVTFVSKNEQFNTSTAMGEAMLKIILVFAELERNMTSERVTATMISRANTGKWNGGRVPYGYKYDPEEEDFFIIASESNVVKLIHDKYEELQSLVYLARYMNEHGYRTRSGNEWSPPSLAIILKSWWYCGCYEYNKRKAGNRQKLKDESEWIMIEDHHIAIISYDQKERVLSILKGNKRFATDHNLYVKGIHVHVFGGLCWCKNCGKKMTSTSSNKNRSWQYSKYLCSTRRRSLTKCRGRSTSDPVLGEFIFNYILNMLNAQKGFDSIHSPADLQAALLTGDAFSDIKSIDREELNDLYNTLSSNVSGNIYGRSFNVNKAKKNDEVQSSLTILKSEKKKLERALDRLTNLYLYDDMAISEKDYMTKKTEIETKIAEIDEKIGIVNKNSIDDSITDEEFVDKASTFIITQKLTDRNYISYKRLATTVDPKILYMFTHDVIDYIDIYNGKVQRIVFRNGLSQTFVR

SEQ ID NO: 754 - protein, 578 aa, Unknown
  Description of Unknown: Integrase B755 sequence
  PTHR30461:SF3,IPR036162,PS51737,IPR011109,PTHR30461, PS00397,PF00239,G3DSA:1.10.10.2600,IPR006119,SSF53041, cd00338,SM00857,IPR025827,IPR038109,PS51736, IPR006118,PF13408,G3DSA:3.40.50.1390,PF07508,Coil
MGYVTKKAAQRFEEKKAAIYVRVSTQYQVDRASLPVQREELINYAKYALGISDYVIFEDAGYSAKNTDRPDYQQMMARMRTGEFSHLLVWKIDRISRNLLDFSVMYAELKELGVVFVSKNEQFDTSSAMGEAMLKIILIFAELERKTTSERVSAVFVSRANDGIWNGGKVPYGYSYDKESKTFSIAEDEAKIVRLIYSLYESEKSIVRVARIMNERGLKSRAGNDWSPTTVHTILSSPFYSGTYRYNYRDESNTKRFREKGKDEWVLVENHHPAIVSPERQAAVGVILESKRYNKNATYQRKNVHVFAGLLTCGYCGSTMAATTDKVRADGWRPSMYICSRRRKSDDCANKYVSDVTLGPFVLNFFSNLIKASNSFGRTTSIETLEKKLLRGEALSHVDHIERPGLEELYNHLRSGFDEKRFESPTIAATDSSADLSERDLLLSEKRRLERALNRLKTIYLYGDDEMASKDFNVERERITKALVEVDSRINELDIANAFDLSLSDEAFMQKASQFILTQQLLDKRYVNYERFIRKIDPKIVKDFLNETVSNFCIKDGLTTSILLKNGIELRFSYKTAE

SEQ ID NO: 755 - protein, 578 aa, Unknown
  Description of Unknown: Integrase B756 sequence
  PTHR30461:SF3,IPR036162,PS51737,IPR011109,PTHR30461, PS00397,PF00239,G3DSA:1.10.10.2600,IPR006119,SSF53041, cd00338,SM00857,IPR025827,IPR038109,PS51736, IPR006118,PF13408,G3DSA:3.40.50.1390,PF07508,Coil
MGYVVKKAAQRFEEKKAAIYVRVSTQYQVDRASLPVQREELINYAKYALGISDYVIFEDAGYSAKNTDRPDYQQMMARMRTGEFSHLLVWKIDRISRNLLDFSVMYAELKELGVVFVSKNEQFDTSSAMGEAMLKIILIFAELERKTTSERVSAVFVSRANDGIWNGGKVPYGYSYDKESKTFSIAEDEAKIVRLIYSLYESEKSIVRVARIMNERGLKSRAGSDWSPTTVHTILSSPFYSGTYRYNYRDESNTKRFREKGKDEWVLVENHHPAIVSPERQAAVGVILESKRYNKNATYQRKNVHVFAGLLTCGCCGSTMAATTDKVRADGWRPSMYICSRRRKSEDCTNKYVSDVALGPFVLNFFANLIKASNSFGRTTSIETLEKKLLRGEALSRVDHIERPGLEELYNHLRSGFDEKRFESPTIAATESSADLSERDLLLSEKRRLERALNRLKTIYLYGDDEMASKDFNIERERITKALSEVDSRINELDIANAFDLSLSDEAFMQKASQFILTQQLLDKRYVNYERFIRKIDPKIVKDFLNETVSNFCIKDGLTTSILLKNGIELRFSYKTAE

SEQ ID NO: 756 - protein, 578 aa, Unknown
  Description of Unknown: Integrase B757 sequence
  PTHR30461:SF3,cd00338,SM00857,G3DSA:1.10.10.2600,IPR036162, PF13408,PS51737,G3DSA:3.40.50.1390,IPR025827,IPR006119, IPR038109,PF07508,IPR011109,SSF53041,PTHR30461, PS51736,Coil,PF00239
MKKFPIDLSCLTEEEISQFQEDPYTLYNGDQDVALYLRYSSTGQSDQSIEGQLRDCRDFCKANHYRIVAIYVDRATTAHKDVEKRVHLMEMVADSAKQNWEYVIVWKLDRFARNRNDSAIMKMRLRKNGVKVLSATEHLTDSPESIILESVLEGMAEFFSAELSQKVTRGMRESALKCHSVGGHIPLGYKVENHKLVVDPDTAHIVQEAFSLYANGESVADICRKFNSAGYKTAKNTEFNRSSFKAMFRNTRYIGTYTYKDIVIENGIPAIIDKELFETVQQRLSKTTTAPARGKAKVDYLLSGKLFCGHCGASMNGESGAGRHGKVYHYYSCYTKKRKLGCDKRPLKKDYIEGIVARDALNLLTDQLIDEIADMAIRQSEQDLINDTHIPQLTAQLSEVEKSIMNITAAIEKGIASETLMNRLVQLEHEKKTLNKEIKAEEKFVYRIDRDQIVFWLSQFKYGNIEDENFRRRLIDLLVNSVTVWDEPDGYKITTAYNLTSCKTKTFRVDKNPAAEEATGFDFGESECTTANLLISMGSRFLFYLRISFIHLFSNVFLTSFIQAFCQLICKALLSGSV

SEQ ID NO: 757 - protein, 578 aa, Unknown
  Description of Unknown: Integrase B758 sequence
  PTHR30461:SF3,IPR036162,PS51737,IPR011109,PTHR30461, PS00397,PF00239,G3DSA:1.10.10.2600,IPR006119,SSF53041, cd00338,SM00857,IPR025827,IPR038109,PS51736, IPR006118,PF13408,G3DSA:3.40.50.1390,PF07508,Coil
MGYVVKKAAQRFEEKKAAIYVRVSTQYQVDRASLPVQREELINYAKYALGISDYVIFEDAGYSAKNTDRPDYQQMMARMRTGEFSHLLVWKIDRISRNLLDFSVMYAELKELGVVFVSKNEQFDTSSAMGEAMLKIILIFAELERKTTSERVSAVFVSRANDGIWNGGKVPYGYSYDKESKAFSIAEDEAKIVRLIYSLYESEKSIVRVARIMNERGLKSRAGSDWSPTTVHTILSSPFYSGTYRYNYRDESNTKRFREKGKDEWVLVENHHPAIVSPERQAAVGVILESKRYNKNATYQRKNVHVFAGLLTCGCCGSTMAATTDKVRADGWRPSMYICSRRRKSEDCTNKYVSDVTLGPFVLNFFANLIKASNSFGRTTSIETLEKKLLRGEALSRVDHIERPGLEELYNHLRSGFDEKRFESPTIAATESSADLSERDLLLSEKRRLERALNRLKTIYLYGDDEMASKDFNIERERITKALSEVDSRINELDIANAFDLSLSDEAFMQKASQFILTQQLLDKRYVNYERFIRKIDPKIVKDFLNETVSNFCIKDGLTTSILLKNGIELRFSYKTAE

SEQ ID NO: 758 - protein, 578 aa, Unknown
  Description of Unknown: Integrase B759 sequence
  PTHR30461:SF3,IPR036162,PS51737,IPR011109,PTHR30461, PS00397,PF00239,G3DSA:1.10.10.2600,IPR006119,SSF53041, cd00338,SM00857,IPR025827,IPR038109,PS51736, IPR006118,PF13408,G3DSA:3.40.50.1390,PF07508,Coil
MGYVTKKAAQRFEEKKAAIYVRVSTQYQVDRASLPVQREELINYAKYALGISDYVIFEDAGYSAKNTDRPDYQQMMARMRTGEFSHLLVWKIDRISRNLLDFSVMYAELKELGVVFVSKNEQFDTSSAMGEAMLKIILIFAELERKTTSERVSAVFVSRANDGIWNGGKVPYGYSYDKESKTFSIAEDEAKIVRLIYSLYESEKSIVRVARIMNERGLKSRAGSDWSPTTVHTILSSPFYSGTYRYNYRDESNTKRFREKGKDEWVLVENHHPAIVSPERQAAVGVILESKRYNKNATYQRKNVHVFAGLLTCGCCGSTMAATTDKVRADGWRPSMYICSRRRKSEDCTNKYVSDVTLGPFVLNFFANLIKASNSFGRTTSIETLEKKLLRGEALARVDHIERPGLEELYNHLRSGFDEKRFESPTIAATESSADLSERDLLLSEKRRLERALNRLKTIYLYGDDEMASKDFNIERERITKVLSEVDSRINELDIANAFDLSLSDEAFMQKASQFILTQQLLDKRYVNYERFIRKIDPKIVKDFLNETVSNFCIKDGLTTSILLKNGIELRFSYKTAE

SEQ ID NO: 759 - protein, 578 aa, Unknown
  Description of Unknown: Integrase B760 sequence
  PTHR30461:SF3,IPR036162,PS51737,IPR011109,PTHR30461, PS00397,PF00239,G3DSA:1.10.10.2600,IPR006119,SSF53041, cd00338,SM00857,IPR025827,IPR038109,PS51736, IPR006118,PF13408,G3DSA:3.40.50.1390,PF07508,Coil
MGYVTKKAAQRFEEKKAAIYVRVSTQYQVDRASLPVQREELINYAKYALGISDYVIFEDAGYSAKNTDRPDYQQMMARMRTGEFSHLLVWKIDRISRNLLDFSVMYAELKELGVVFVSKNEQFDTSSAMGEAMLKIILIFAELERKTTSERVSAVFVSRANDGIWNGGKVPYGYSYDKESKTFSIAEDEAKIVRLIYSLYESEKSIVRVARIMNERGLKSRAGNDWSPTTVHMILSSPFYSGTYRYNYRDESNTKRFREKGKDEWVLVENHHPAIVSPERQAAVGVILESKHYNKNATYQRKNVHVFAGLLTCGCCGSTMAATTDKVRADGWRPSMYICSRRRKSDDCTNKYISDVSLGPFVLNFFANLIKASNSFGRTTSIETLEKKLLRGEALSRVDHIERPGLEELYNHLRSGFDEKRFEPPTIAATETSADLSERDLLLSEKRRLERALNRLKTIYLYGDDEMASKDFNIERERITKALSEVDSRINELDIANAFDLSLSDEAFMQKASQFILTQQLLDKRYVNYERFIRKIDPKIVKDFLNETVSNFCIKDGLTTSILLKNGIELRFSYKTAE

SEQ ID NO: 760 - protein, 578 aa, Unknown
  Description of Unknown: Integrase B761 sequence
  PTHR30461:SF3,IPR036162,PS51737,IPR011109,PTHR30461, PS00397,PF00239,G3DSA:1.10.10.2600,IPR006119,SSF53041, cd00338,SM00857,IPR025827,IPR038109,PS51736, IPR006118,PF13408,G3DSA:3.40.50.1390,PF07508,Coil
MGYVVKKAAQRFEEKKAAIYVRVSTQYQVDRASLPVQREELINYAKYALGISDYVIFEDAGYSAKNTDRPDYQQMMARMRTGEFSHLLVWKIDRISRNLLDFSVMYAELKELGVVFVSKNEQFDTSSAMGEAMLKIILIFAELERKTTSERVSAVFVSRANDGIWNGGKVPYGYSYDKESKTFSIAEDEAKIVRLIYSLYESEKSIVRVARIMNERGLKSRAGSDWSPTTVHTILSSPFYSGTYRYNYRDESNTKRFREKGKDEWVLVENHHPAIVSPERQAAVGVILESKRYNKNATYQRKNVHVFAGLLTCGCCGSTMAATTDKVRADGWRPSMYICSRRRKSEDCTNKYVSDVTLGPFVLNFFANLIKASNSFGRTTSIETLEKKLLRGEALSHVDHIERPGLEELYNHLRSGFDEKCFESPTIAATESSADLSERDLLLSEKRRLERALNRLKTIYLYGDDEMASKDFNIERERITKALSEVDSRINELDIANTFDLSLSDEAFMQKASQFILTQQLLDKRYVNYERFIRKIDPKIVKDFLNETVSNFCIKDGLTTSILLKNGIELRFSYKTAE

SEQ ID NO: 761 - protein, 578 aa, Unknown
  Description of Unknown: Integrase B762 sequence
  PTHR30461:SF3,IPR036162,PS51737,IPR011109,PTHR30461, PS00397,PF00239,G3DSA:1.10.10.2600,IPR006119,SSF53041, cd00338,SM00857,IPR025827,IPR038109,PS51736, IPR006118,PF13408,G3DSA:3.40.50.1390,PF07508,Coil
MGYVVKKAAQRFEEKKAAIYVRVSTQYQVDRASLPVQREELINYAKYALGISDYVIFEDAGYSAKNTDRPDYQQMMARMRTGEFSHLLVWKIDRISRNLLDFSVMYAELKELGVVFVSKNEQFDTSSAMGEAMLKIILIFAELERKTTSERVSAVFVSRANDGIWNGGKVPYGYSYDKESKTFSIAEDEAKIVRLIYSLYESEKSIVRVARIMNERGLKSRAGNDWSPTTVHTILSSPFYSGTYRYNYRDESNTKRFREKGKDEWVLVENHHPAIVSPERQAAVGVILESKRYNKNATYQRKNVHVFAGLLTCGCCGSTMAATTDKVRADGWRPSMYICSRRRKSEDCTNKYVSDVSLGPFVLNFFANLIKASNSFGRTTSIETLEKKLLRGEALSRVDHIERPGLEELYNHLRSGFDEKRFESPTIAATESSADLSERDLLLSEKRRLERALNRLKTIYLYGDDEMASKDFNIERERITKALSEVDSRINELDIANAFDLSLSDEAFMQKASQFILTQQLLDKRYVNYERFIRKIDPKIVKDFLNETVSNFCIKDGLTTSILLKNGIELRFSYKTAE

SEQ ID NO: 762 - protein, 578 aa, Unknown
  Description of Unknown: Integrase B763 sequence
  PTHR30461:SF3,IPR036162,PS51737,IPR011109,PTHR30461, PS00397,PF00239,G3DSA:1.10.10.2600,IPR006119,SSF53041, cd00338,SM00857,IPR025827,IPR038109,PS51736, IPR006118,PF13408,G3DSA:3.40.50.1390,PF07508,Coil
MGYVVKKAAQRFEEKKAAIYVRVSTQYQVDRASLPVQREELINYAKYALGISDYVIFEDAGYSAKNTDRPDYQQMMARMRTGEFSHLLVWKIDRISRNLLDFSVMYAELKELGVVFVSKNEQFDTSSAMGEAMLKIILIFAELERKTTSERVSAVFVSRANDGIWNGGKVPYGYSYDKESKTFSIAEDEAKIVRLIYSLYESEKSIVRVARIMNERGLKSRAGSDWSPTTVHTILSSPFYSGTYRYNYRDESNAKRFREKGKDEWVLVENHHPAIVSPERQAAVGVILESKRYNKNATYQRKNVHVFAGLLTCGCCGSTMAATTDKVRADGWRPSMYICSRRRKSEDCTNKYVSDVTLGPFVLNFFANLIKASNSFGRTTSIETLEKKLLRGEALSRVDHIERPGLEELYNHLRSGFDEKRFESPTIAATESSADLSERDLLLSEKRRLERALNRLKTIYLYGDDEMASKDFNIERERITKALSEVDSRINELDIANAFELSLSDEAFMQKASQFILTQQLLDKRYVNYERFIRKIDPKIVKDFLNETVSNFCIKDGLTTSILLKNGIELRFSYKTAE

SEQ ID NO: 763 - protein, 578 aa, Unknown
  Description of Unknown: Integrase B764 sequence
  PTHR30461:SF3,IPR036162,PS51737,IPR011109,PTHR30461, PS00397,PF00239,G3DSA:1.10.10.2600,IPR006119,SSF53041, cd00338,SM00857,IPR025827,IPR038109,PS51736, IPR006118,PF13408,G3DSA:3.40.50.1390,PF07508,Coil
MGYVVKKAAQRFEEKKAAIYVRVSTQYQVDRASLPVQREELINYAKYALGISDYVIFEDAGYSAKNTDRPDYQQMMARMRTGEFSHLLVWKIDRISRNLLDFSVMYAELKELGVVFVSKNEQFDTSSAMGEAMLKIILIFAELERKTTSERVSAVFVSRANDGIWNGGKVPYGYSYDKEGKTFSIAEDEAKIVRLIYSLYESEKSIVRVARIMNERGLKSRAGNDWSPTTVHTILSSPFYSGTYRYNYRDESNTKRFREKGKDEWVLVENHHPAIVSPERQAAVGVILESKHYNKNATYQRKNVHVFAGLLTCGCCGSTMAATTDKVRADGWRPSMYICSRRRKSEDCTNKYVSDVTLGPFVLNFFANLIKASNSFGRTTSIETLEKKLLRGEALSHVDHIERPGLEELYNHLRSGFDEKCFESPTIAATESSADLSERDLLLSEKRRLERALNRLKTIYLYGDDEMASKDFNIERERITKALSEVDSRINELDIANAFDLSLSDEAFMQKASQFILTQQLLDKRYVNYERFIRKIDPKIVKDFLNETVSNFCIKDGLTTSILLKNGIELRFSYKTAE

SEQ ID NO: 764 - protein, 578 aa, Unknown
  Description of Unknown: Integrase B765 sequence
  PTHR30461:SF3,IPR036162,PS51737,IPR011109,PTHR30461, PS00397,PF00239,G3DSA:1.10.10.2600,IPR006119,SSF53041, cd00338,SM00857,IPR025827,IPR038109,PS51736, IPR006118,PF13408,G3DSA:3.40.50.1390,PF07508,Coil
MGYVVKKAAQRFEEKKAAIYVRVSTQYQVDRASLPVQREELINYAKYALGISDYVIFEDAGYSAKNTDRPDYQQMMARMRTGEFSHLLVWKIDRISRNLLDFSVMYAELKELGVVFVSKNEQFDTSSAMGEAMLKIILIFAELERKTTSERVSAVFVSRANDGIWNGGKVPYGYSYDKESKTFSIAEDEAKIVRLIYSLYESEKSIVRVARIMNERGLKSRAGSDWSPTTVHTILSSPFYSGTYRYNYRDESNAKRFREKGKDEWVLVENHHPAIVSPERQAAVGVILESKRYNKNATYQRKNVHVFAGLLTCGCCGSTMAATTDKVRADGWRPSMYICSRRRKSEDCTNKYVSDVSLGPFVLNFFANLIKASNSFGRTTSIETLEKKLLRGEALSRVDHIERPGLEELYNHLRSGFDEKRFESPTIAATESSADLSERDLLLSEKRRLERALNRLKTIYLYGDDEMASKDFNIERERITKALSEVDSRIDELNIANAFDLSLSDEAFMQKASQFILTQQLLDKRSVNYERFIRKIDPKIVKDFLNETVSNFCIKDGLTTSILLKNGIELRFSYKTAE

SEQ ID NO: 765 - protein, 578 aa, Unknown
  Description of Unknown: Integrase B766 sequence
  PTHR30461:SF3,IPR036162,PS51737,IPR011109,PTHR30461, PS00397,PF00239,G3DSA:1.10.10.2600,IPR006119,SSF53041, cd00338,SM00857,IPR025827,IPR038109,PS51736, IPR006118,PF13408,G3DSA:3.40.50.1390,PF07508,Coil
MGYVTKKAAQRFEEKKAAIYVRVSTQYQVDRASLPVQREELINYAKYALGISDYVIFEDAGYSAKNTDRPDYQQMMARMRTGEFSHLLVWKIDRISRNLLDFSVMYAELKELGVVFVSKNEQFDTSSAMGEAMLKIILIFAELERKTTSERVSAVFVSRANDGIWNGGKVPYGYSYDKESKTFSIAEDEAKIVRLIYSLYESEKSIVRVARIMNERGLKSRAGSDWSPTTVHTILSSPFYSGTYRYNYRDESNTKRFREKGKDEWVLVENHHPAIVSPERQAAVGVILESKRYNKNATYQRKNVHVFAGLLTCGCCGSTMAATTDKVRADGWRPSMYICSRRRKSEDCTNKYVSDVTLGPFVLNFFANLIKASNSFGRTTSIETLEKKLLRGEALARVDHIERPGLEELYNHLRSGFDEKRFESPTIAATESSADLSERDLLLSEKRRLERALNRLKTIYLYGDDEMASKDFNIERERITKALSEVDSRINELDIANAFDLSLSDEAFMQKASQFILTQQLLDKRYVNYERFIRKIDPKIVKDFLNETVSNFCIKDGLTTSILLKNGIELRFSYKTAE

SEQ ID NO: 766 - protein, 578 aa, Unknown
  Description of Unknown: Integrase B767 sequence
  PTHR30461:SF3,IPR036162,PS51737,IPR011109,PTHR30461, PS00397,PF00239,G3DSA:1.10.10.2600,IPR006119,SSF53041, cd00338,SM00857,IPR025827,IPR038109,PS51736, IPR006118,PF13408,G3DSA:3.40.50.1390,PF07508,Coil
MGYVTKKAAQRFEEKKAAIYVRVSTQYQVDRASLPVQREELINYAKYALGISDYVIFEDAGYSAKNTDRPDYQQMMSRMRTGEFSHLLVWKIDRISRNLLDFSVMYAELKELGVVFVSKNEQFDTSSAMGEAMLKIILIFAELERKTTSERVSAVFVSRANDGIWNGGKVPYGYSYDKESKTFSIAEDEAKIVRLIYSLYESEKSIVRVARIMNERGLKSRAGNDWSPTTVHTILSSPFYSGTYRYNYRDESNTKRFREKGKDEWVLVENHHPAIVSPERQAAVGVILESKRYNKNATYQRKNVHVFAGLLTCGCCGATMAATTDKVRADGWRPSMYICSRRRKSEDCTNKYVSDVTLGPFVLNFFANLIKASNSFGRTTSIETLEKKLLRGEALSRVDHIERPGLEELYNHLRSGFDEKCFESPTIAATESSADLSERDLLLSEKRRLERALNRLKTIYLYGDDEMASKDFNIERERITKALSEVDSRINELDIANAFDLSLSDEAFMQKASQFILTQQLLDKRYVNYERFIRKIDPKIVKDFLNETVSNFCIKDGLTTSILLKNGIELRFSYKTAE

SEQ ID NO: 767 - protein, 578 aa, Unknown
  Description of Unknown: Integrase B768 sequence
  PTHR30461:SF3,IPR036162,PS51737,IPR011109,PTHR30461, PS00397,PF00239,G3DSA:1.10.10.2600,IPR006119,SSF53041, cd00338,SM00857,IPR025827,IPR038109,PS51736, IPR006118,PF13408,G3DSA:3.40.50.1390,PF07508,Coil
MGYVTKKAAQRFEEKKAAIYVRVSTQYQVDRASLPVQREELINYAKYALGISDYVIFEDAGYSAKNTDRPDYQQMMARMRTGEFSHLLVWKIDRISRNLLDFSVMYAELKELGVVFVSKNEQFDTSSAMGEAMLKIILIFAELERKTTSERVSAVFVSRANDGIWNGGKVPYGYSYDKEGKTFSIAEDEAKVVRLIYSLYESEKSIVRVARIMNERGLKSRAGSDWSPTTVHTILSSPFYSGTYRYNYRNESNRKRFREKGKDEWVLVENHHPAIVSPERQAAVGVILESKRYNKNATYQRKNVHVFAGLLTCGCCGSTMAATTDKVRADGWRPSMYICSRRRKSEDCTNKYVSDVSLGPFVLNFFANLIKASNSFGRTTSIETLEKKLLRGEALSRVDHIERPGLEELYNHLRSGFDEKRFESPTIAATESSADLSERDLLLSEKRRLERALNRLKTIYLYGDDEMASKDFNIERERITKALSEVDSRINELDIANAFDLSLSDEAFMQKASQFILTQQLLDKRYVNYERFIRKIDPKIVKDFLNETVSNFCIKDGLTTSILLKNGIELRFSYKTAE

SEQ ID NO: 768 - protein, 578 aa, Unknown
  Description of Unknown: Integrase B769 sequence
  PTHR30461:SF3,IPR036162,PS51737,IPR011109,PTHR30461, PS00397,PF00239,G3DSA:1.10.10.2600,IPR006119,SSF53041, cd00338,SM00857,IPR025827,IPR038109,PS51736, IPR006118,PF13408,G3DSA:3.40.50.1390,PF07508,Coil
MGYVTKKAAQRFEEKKAAIYVRVSTQYQVDRASLPVQREELINYAKYALGISDYVIFEDAGYSAKNTDRPDYQQMMARMRTGEFSHLLVWKIDRISRNLLDFSVMYAELKELGVVFVSKNEQFDTSSAMGEAMLKIILIFAELERKTTSERVSAVFVSRANDGIWNGGKVPYGYSYDKEGKTFSIAEDEAKIVRLIYSLYESEKSIVRVARIMNERGLKSRAGNDWSPTTVHTILSSPFYSGTYRYNYRDESNAKRFREKGKDEWVLVENHHPAIVSPERQASVGVILESKRYNKNATYQRKNVHVFAGLLTCGCCGSTMAATTDKVRADGWRPSMYICSRRRKSEDCTNKYVSDVSLGPFVLNFFANLIKASNSFGRTTSIETLEKKLLRGEALSRVDHIERPGLEELYNHLRSGFDEKRFESPTIAATESSADLSERDLLLSEKRRLERALNRLKAIYLYGDDEMASKDFNIERERITKALSEVDSRINELDIANAFDLSLSDEAFMQKASQFILTQQLLDKRYVNYERFIRKIDPKIVKDFLNETVSNFCMKDGLTTSILLKNGIELRFSYKTAE

SEQ ID NO: 769 - protein, 578 aa, Unknown
  Description of Unknown: Integrase B770 sequence
  PTHR30461:SF3,IPR036162,PS51737,IPR011109,PTHR30461, PS00397,PF00239,G3DSA:1.10.10.2600,IPR006119,SSF53041, cd00338,SM00857,IPR025827,IPR038109,PS51736, IPR006118,PF13408,G3DSA:3.40.50.1390,PF07508,Coil
MGYVVKKAAQRFEEKKAAIYVRVSTQYQVDRASLPVQREELINYAKYALGISDYVIFEDAGYSAKNTDRPDYQQMMARMRTGEFSHLLVWKIDRISRNLLDFSVMYAELKELGVVFVSKNEQFDTSSAMGEAMLKIILIFAELERKTTSERVSAVFVSRANDGIWNGGKVPYGYSYDKESKTFSIAEDEAKIVRLIYSLYESEKSIVRVARIVNERGLKSRAGSDWSPTTVHTILSSPFYSGTYRYNYRDESNTKRFREKGKDEWVLVENHHPAIVSPERQAAVGVILESKRYNKNATYQRKNVHVFAGLLTCGCCGSTMAATTDKVRADGWRPSMYICSRRRKSEDCTNKYVSDVTLGPFVLNFFANLIKASNSFGRTTSIETLEKKLLRGEALARVDHIERPGLEELYNHLRSGFDEKRFESPTIAATESSADLSERDLLLSEKRRLERALNRLKTIYLYGDDEMASKDFNIERERITKALSEVDSRINELDIANAFDLSLSDEAFMQKASQFILTQQLLDKRYVNYERFIRKIDPKIVKDFLNETVSNFCIKDGLTTSILLKNGIELRFSYKTAE

SEQ ID NO: 770 - protein, 578 aa, Unknown
  Description of Unknown: Integrase B771 sequence
  PTHR30461:SF3,IPR036162,PS51737,IPR011109,PTHR30461, PS00397,PF00239,G3DSA:1.10.10.2600,IPR006119,SSF53041, cd00338,SM00857,IPR025827,IPR038109,PS51736, IPR006118,PF13408,G3DSA:3.40.50.1390,PF07508,Coil
MGYVTKKAAQRFEEKKAAIYVRVSTQYQVDRASLPVQREELINYAKYALGISDYVIFEDAGYSAKNTDRPDYQQMMARIRTGEFSHLLVWKIDRISRNLLDFSVMYAELKELGVVFVSKNEQFDTSSAMGEAMLKIILIFAELERKTTSERVSAVFVSRANDGIWNGGKVPYGYSYDKESKTFSIAEDEAKIVRLIYSLYESEKSIVRVARIMNERGLKSRAGSDWSPTTVHTILSSPFYSGTYRYNYRDESNTKRFREKGKDEWVLVENHHPAIVSPERQAAVGVILESKRYNKNATYQRKNVHVFAGLLTCGCCGSTMAATTDKVRADGWRPSMYICSRRRKSEDCTNKYVSDVTLGPFVLNFFANLIKASNSFGRTTSIETLEKKLLRGEALARVDHIERPGLEELYNHLRSGFDEKRFESPTIAATESSADLSERDLLLSEKRRLERALNRLKTIYLYGDDEMASKDFNIERERITKALSEVDSRINELDIANAFDLSLSDEAFMQKASQFILTQQLLDKRYVNYERFIRKIDPKIVKDFLNETVSNFCIKDGLTTSILLKNGIELRFSYKTAE

SEQ ID NO: 771 - protein, 578 aa, Unknown
  Description of Unknown: Integrase B772 sequence
  PTHR30461:SF3,IPR036162,PS51737,IPR011109,PTHR30461, PS00397,PF00239,G3DSA:1.10.10.2600,IPR006119,SSF53041, cd00338,SM00857,IPR025827,IPR038109,PS51736, IPR006118,PF13408,G3DSA:3.40.50.1390,PF07508,Coil
MGYVTKKAAQRFEEKKAAIYVRVSTQYQIDRASLPVQREELINYAKYALGISDYVIFEDAGYSAKNTDRPDYQQMMARMRTGEFSHLLVWKIDRISRNLLDFSVMYAELKELGVVFVSKNEQFDTSSAMGEAMLKIILIFAELERKTTSERVSAVFVSRANDGIWNGGKVPYGYSYDKESKTFSIAEDEAKIVRLIYSLYESEKSIVRVARIMNERGLKSRAGNDWSPTTVHTILSSPFYSGTYRYNYRDESNTKRFREKGKDEWVLVENHHPAIVSPERQAAVGVILESKRYNKNATYQRKNVHVFAGLLTCGCCGATMAATTDKVRADGWRPSMYICSRRRKSEDCTNKYVSDVTLGPFVLNFFANLIKASNSFGRTTSIETLEKKLLRGEALSCVDHIERPGLEELYNHLRSGFDEKCFESPTIAATESSADLSERDLLLSEKRRLERALNRLKTIYLYGDDEMASKDFNIERQRITKALSEVDSRINELDIANAFDLSLSDEAFMQKASQFILTQQLLDKRYVNYERFIRKIDPKIVKDFLNETVSNFCIKDGLTTSILLKNGIELRFSYKTAE

SEQ ID NO: 772 - protein, 578 aa, Unknown
  Description of Unknown: Integrase B773 sequence
  PTHR30461:SF3,IPR036162,PS51737,IPR011109,PTHR30461, PS00397,PF00239,G3DSA:1.10.10.2600,IPR006119,SSF53041, SM00857,IPR025827,IPR038109,PS51736,cd03768, IPR006118,PF13408,G3DSA:3.40.50.1390,PF07508,Coil
MPRRRTSAKDCVPQQKEIKVAIYIRVSTTHQIDRDSIPMQKKDLMTYCEFILNTDNYVIFEDAGYSGKNTVRPAYQKMMDRVRNDEFTHILVWKIDRISRNLLDFASMYQELKKLGVVFISKNEQFDTGTAIGEAMLKIILVFAELERNMTSERVTATMISRASNGQWNGGRIPFGYSYDSNTSTFSVREDEAAICRKLRDLYLENKSLVYTARALNAEGFKTRAGVDWTPPAVWIIASSPFYAGIYRYNRYKGTVGRTINSENEWVVIPDHHPAIFSLAEHEAMKSLLKTNSRNIENPVGRLHTTSNVHIFQGIAYCGKCKSRLTSSPGRKSSTGFRASNYSCPLRRKSKKCNNKTINDIVLGEFVINYILNMLNAKKMFSKIKTPDELQKQLLCGSTFSDIDHIDTDGLNEYYNLLSRYSSDNSFIFAKRPQKKKAAVSKELASLRKEKERQERAMTRLQDLYLYSENAMSEKDFIIRKEDISYRLKEINHKLGVLSDDSDSFLSDEEFIKQASHFLIQSELKNKKYIYFKNLVNTVSPEILKSYIDTILDSVYITDSKVTSIVFKNGLTHNFIYK

SEQ ID NO: 773 - protein, 578 aa, Unknown
  Description of Unknown: Integrase B774 sequence
  PTHR30461:SF3,IPR036162,PS51737,IPR011109,PTHR30461, PS00397,PF00239,G3DSA:1.10.10.2600,IPR006119,SSF53041, cd00338,SM00857,IPR025827,IPR038109,PS51736, IPR006118,PF13408,G3DSA:3.40.50.1390,PF07508,Coil
MGYVTKKVAQRFEEKKAAIYVRVSTQYQVDRASLPVQREELINYAKYALGISDYVIFEDAGYSAKNTDRPDYQQMMARMRTGEFSHLLVWKIDRISRNLLDFSVMYAELKELGVVFVSKNEQFDTSSAMGEAMLKIILIFAELERKTTSERVSAVFVSRANDGIWNGGKVPYGYSYDKEGKTFSIAEDEAKIVRLIYSLYESEKSIVRVARIMNERGLKSRAGSDWSPTTVHTILSSPFYSGTYRYNYRDESNTKRFHEKGKDEWVLVENHHPAIVSPERQAAVGVILESKRYNKNATYQRKNVHVFAGLLTCGCCGSTMAATTDKVRADGWRPSMYICSRRRKSEDCTNKYVSDVSLGPFVLNFFANLIKASNSFGRTTSIETLEKKLLRGEALARVDHIERPGLEELYNHLRSGFDEKCFESPTIAATESSADLSERNLLLSEKRRLERALNRLKTIYLYGDDEMASKDFNIERERITKALSEVDSRINELDIANAFDLSLSDEAFMQKASQFILTQQLLDKRYVNYERFIRKIDPKIVKDFLNETVSNFCIKDGLTTSILLKNGIELRFSYKTAE

SEQ ID NO: 774 - protein, 578 aa, Unknown
  Description of Unknown: Integrase B775 sequence
  cd00338,SM00857,G3DSA:1.10.10.2600,IPR036162,PS51737, G3DSA:3.40.50.1390,IPR006119,IPR038109,PF07508,IPR011109, SSF53041,PTHR30461,PS51736,Coil,PF00239
MAKCILLVRVSTESKKQEISLREQETELFELALSKGYCEEDIIAICKQESALKRRYATSDEKDAIEIKQQGLQEMEDAIKNDSSINCVFAWEISRISRREKVLFDELEFLTDRKIQLVILKPYIELLNSDGSLNPSSKMQFSMFAALADAEMRNKSDRFRRTKESRRKEGKYVGGWLPFGYMVEPTTKKIIINEEEAAIVKYMFNEYLKGGTSIYKLANELQERGIISYDNKHSAFTFAYTILRNYSYAGLQGTVRQKDRKPSTNVYPAIVTKEMIDKAIEMSEQAKTKPKTNVKNIYYCKSLLKCADCERVYVARLNKAVYQCTNDNGKCNNAEISINLADTILWNVAMTLKISQMLHQTEEDKTAYQLQIEVLKQKIEKINIDIENNNKAYSILNKRIIMQKISEEDGELIEKELDSTKKELEKKLNEYNNKVAEIEQILFNMNTSIAFKHINIDDIADIEDDNLRYEIIHEIIDYCMVEKVANSIIKLELYAKHINTAYTYYVTTRNRKIYNKDFRIEEAYTSDNTHLVDFKILQRYKRQGKANKEYQKQYYQKNREKLIKQNVEAKRRRKSKPE

SEQ ID NO: 775 - protein, 578 aa, Unknown
  Description of Unknown: Integrase B776 sequence
  PTHR30461:SF3,IPR036162,PS51737,IPR011109,PTHR30461, PS00397,PF00239,G3DSA:1.10.10.2600,IPR006119,SSF53041, cd00338,SM00857,IPR025827,IPR038109, PS51736,IPR006118,PF13408,G3DSA:3.40.50.1390,PF07508,Coil
MGYVVKKAAQRFEEKKAAIYVRVSTQYQVDRASLPVQREELINYAKYALGISDYVIFEDAGYSAKNTDRPDYQQMMARMRTGEFSHLLVWKIDRISRNLLDFSVMYAELKELGVVFVSKNEQFDTSSAMGEAMLKIILIFAELERKTTSERVSAVFVSRANDGIWNGGKVPYGYSYDKESKTFSIAEDEAKIVRLIYSLYESEKSIVRVARIMNERGLKSRAGSDWSPTTVHTILSSPFYSGTYRYNYRDESNTKRFREKGKDEWVLVENHHPAIVSPERQAAVGVILESKRYNKNATYQRKNVHVFAGLLTCGCCGSTMAATTDKVRADGWRPSMYICSRRRKSEDCTNKYVSDVSLGPFVLNFFANLIKASNSFGRTTSIETLEKKLLRGEALSRVDHIERPGLEELYNHLRSGFDEKRFESPAIAATESSADLSERDLLLSEKRRLERALNRLKTIYLYGDDEMASKDFNIERERITKALSEVDSRIDELNIANAFDLSLSDEAFMQKASQFILTQQLLDKRSVNYERFIRKIDPKIVKDFLNETVSNFCIKDGLTTSILLKNGIELRFSYKTAE

SEQ ID NO: 776 - protein, 578 aa, Unknown
  Description of Unknown: Integrase B777 sequence
  PTHR30461:SF3,IPR036162,PS51737,IPR011109,PTHR30461, PS00397,PF00239,G3DSA:1.10.10.2600,IPR006119,SSF53041, cd00338,SM00857,IPR025827,IPR038109,PS51736, IPR006118,PF13408,G3DSA:3.40.50.1390,PF07508,Coil
MGYVVKKAAQRFEEKKAAIYVRVSTQYQVDRASLPVQREELINYAKYALGISDYVIFEDAGYSAKNTDRPDYQQMMARMRTGEFSHLLVWKIDRISRNLLDFSVMYAELKELGVVFVSKNEQFDTSSAMGEAMLKIILIFAELERKTTSERVSAVFVSRANDGIWNGGKVPYGYSYDKESKTFSIAEDEAKIVRLIYSLYESEKSIVRVARIMNERGLKSRAGNDWSPTTVHTILSSPFYSGTYRYNYRDESNTKRFREKGKDEWVLVENHHPAIVSPERQAAVGVILESKRYNKNATYQRKNVHVFAGLLTCGCCGSTMVATTDKVRADGWRPSMYICSRRRKSEDCTNKYVSDVALGPFVLNFFANLIKASNSFGRTTSIETLEKKLLRGEALSRVDHIERPGLEELYNHLRSGFDEKRFESPTIAATESSADLSERDLLLSEKRRLERALNRLKTIYLYGDDEMASKDFNIERERITKALSEVDSRIDELDIANAFDLSLSDEAFMQKASQFILTQQLLDKRSVNYERFIRKIDPKIVKDFLNETVSNFCIKDGLTTSILLKNGIELRFSYKTAE

SEQ ID NO: 777 - protein, 578 aa, Unknown
  Description of Unknown: Integrase B778 sequence
  PTHR30461:SF3,IPR036162,PS51737,IPR011109,PTHR30461, PS00397,PF00239,G3DSA:1.10.10.2600,IPR006119,SSF53041, cd00338,SM00857,IPR025827,IPR038109,PS51736, IPR006118,PF13408,G3DSA:3.40.50.1390,PF07508,Coil
MGYVTKKAAQRFEEKKAAIYVRVSTQYQVDRASLPVQREELINYAKYALGISDYVIFEDAGYSAKNTDRPDYQQMMARMRTGEFSHLLVWKIDRISRNLLDFSVMYAELKDLGVVFVSKNEQFDTSSAMGEAMLKIILIFAELERKTTSERVSAVFVSRANDGIWNGGKVPYGYSYDKKSKTFSIIEDEAKIVRLIYSLYESEKSIVRVAQIMNSRGLKSRAGNDWSPTAVHNVLSNPFYSGTYRYNYRDESSGKTYRTKDKDEWVLIENHHTPIVSPEQQAAAGAILESKHYNKNATYQRKNVHVFAGLLTCGCCGSTMAATTDRVRADGWRPSMYICSRRRKSEDCTNKYVSDVTLGPFVLNFFANLIKASNSFGRTTSIETLEKKLLRGEALARVDHIERPGLEELYNHLRSGFDEKRFESPTIAATESSADLSERDLLLSEKRRLERALNRLKAIYLYGDDEMASKDFNIERERITKALSEVDSRINELDIANAFNLSLSDEAFMQKASQFILTQQLLDKRYVNYERFIRKIDPKIVKDFLNETVSNFCIKDGLTTSILLKNGIELRFSYKTSE

SEQ ID NO: 778 - protein, 578 aa, Unknown
  Description of Unknown: Integrase B779 sequence
  PTHR30461:SF3,IPR036162,PS51737,IPR011109,PTHR30461, PS00397,PF00239,G3DSA:1.10.10.2600,IPR006119,SSF53041, cd00338,SM00857,IPR025827,IPR038109,PS51736, IPR006118,PF13408,G3DSA:3.40.50.1390,PF07508,Coil
MGYVVKKAAQRFEKKKAAIYVRVSTQYQVDRASLPVQREELINYAKYALGISDYVIFEDAGYSAKNTDRPDYQQMMARMRTGEFSHLLVWKIDRISRNLLDFSVMYAELKELGVVFVSKNEQFDTSSAMGEAMLKIILIFAELERKTTSERVSAVFVSRANDGIWNGGKVPYGYSYDKESKTFSIAEDEAKIVRLIYSLYESEKSIVRVARIMNERGLKSRAGSDWSPTTVHTILSSPFYSGTYRYNYRDESNTKRFREKGKDEWVLVENHHPAIVSPERQAAVGVILESKRYNKNATYQRKNVHVFAGLLTCGCCGSTMAATTDKVRADGWRPSMYICSRRRKSEDCTNKYVSDVTLGPFVLNFFANLIKASNSFGRTTSIETLEKKLLRGEALSRVDHIERPGLEELYNHLRSGFDEKRFESPTIAATESSADLSERDLLLSEKRRLERALNRLKTIYLYGDDEMASKDFNIERERITKALSEVDSRINELDIANAFDLSLSDEAFMQKASQFILTQQLLDKRYVNYERFIRKIDPKIVKDFLNETVSNFCIKDGLTTSILLKNGIELRFSYKTAE

SEQ ID NO: 779 - protein, 578 aa, Unknown
  Description of Unknown: Integrase B780 sequence
  cd03768,SM00857,G3DSA:1.10.10.2600,IPR036162,PS51737, G3DSA:3.40.50.1390,IPR006119,IPR038109,PF07508,SSF53041, IPR011109,PTHR30461,PS51736,Coil,PF00239
MKGAIYSRVSTEQQDYSKQTNELKDYAKRNGIEVVYVFEEKESGFNNNRPEFEKLRKLTKQDIDIILVWEISRISRRAIYLQQQVQEFTDKGICIYAKKDGFSTLNDDGSVNASTKMLIGFASIIAEQEAATLKERTISSKRNKILREGKSYTYYAPYGYDYNKETKMLSINEKQAQVVKRIFQLSIDGYSTERIAILLNAEKIPTKGKKENWTAGTVCNMLTNPVYKGEANYTLKKEKKAGSTYCKPMEVVTISTPAIIEKEQFELSLQKLAERTKRSNSFGTKYNPLLRGLIHCPHCDVKYVYNFGTNQYLCVNKYKKASNKNVHCTAKCISNKLDSIVWNVVKTFFYKELAAGKAQEQIEPLQAEIESYKRQILLLDGKQSELTARANIIVDAAIEIKIQFPNMPDLYANKMKEVEEINKEASKYQKEKERLEKLIHSNDARIKNINRASKESALVESITDETEKYDLVHKAIDKIMIFGEGKTSIIIVTFSTGQTIYLGYSSKSNSKYYTIFYPSSDIYFDIQTSKGYINHLKEKATINSDGSIYLGDLTGEVKEYSIIDFVNYLDIEENRRYY

SEQ ID NO: 780 - protein, 578 aa, Unknown
  Description of Unknown: Integrase B781 sequence
  PTHR30461:SF3,IPR036162,PS51737,IPR011109,PTHR30461, PS00397,PF00239,G3DSA:1.10.10.2600,IPR006119,SSF53041, cd00338,SM00857,IPR025827,IPR038109, PS51736,IPR006118,PF13408,G3DSA:3.40.50.1390,PF07508,Coil
MGYVTKKAAQRFEEKKAAIYVRVSTQYQVDRASLPVQREELINYAKYALGISDYVIFEDAGYSAKNTDRPDYQQMMARMRTGEFSHLLVWKIDRISRNLLDFSVMYAELKELGVVFVSKNEQFDTSSAMGEAMLKIILIFAELERKTTSERVSAVFVSRANDGIWNGGKVPYGYSYDKESKTFSIAEDEAKIVRLIYSLYESEKSIVRVARIMNERGLKSRAGSDWSPTTIHTILSSPFYSGTYRYNYRDESNTKRFREKGKDEWVLVENHHPAIVSPERQAAVGVILESKRYNKNATYQRKNVHVFAGLLTCGCCGSTMAATTDKVRADGWRPSMYICSRRRKSEDCTNKYVSDVTLGPFVLNFFANLIKASNSFGRTTSIETLEKKLLRGEALSRVDHIERPGLEELYNHLRSGFDEKRFESPTIAATESSADLSERDLLLSEKRRLERALNRLKTIYLYGDDEMASKDFNIERERITKALSEVDSRINELDIANAFDLSLSDEAFMQKASQFILTQQLLDKRYVNYERFIRKIDPKIVKDFLNETVSNFCIKDGLTTSILLKNGIELRFSYKTTE

SEQ ID NO: 781 - protein, 578 aa, Unknown
  Description of Unknown: Integrase B782 sequence
  PTHR30461:SF3,IPR036162,PS51737,IPR011109,PTHR30461, PS00397,PF00239,G3DSA:1.10.10.2600,IPR006119,SSF53041, SM00857,IPR025827,IPR038109,PS51736,cd03768, IPR006118,PF13408,G3DSA:3.40.50.1390,PF07508,Coil
MAYPMKNQTADNRIIAIYVRVSTGYQVDKDSLPFQKKELKAYCKHILHVDLSQVEIFEDAGRSGKNTKRPAYERMMEKVRAGLVSHVLVYKIDRISRNLVDFSLMYDDFKYNRVTFISLNEQFDTSSAIGEAVLKIILVFAELERKLTSERVKDIMIGRATEGKWNGARVPYGWDWDPDVEQPVHSKIEAPYARGMYEMYLKVRSTGKIRDYNNAHGIPTKRGGEWTSKTVSDFLRNPMNKGDYRYNYRESARGRKKPEDEVIYQEGIFEPLVDPEVWERVNRIMDDNASKRNTGGLHPIMKNCNVFAGLIQCAECGSGFQVVKKDRRRKNGFAPSMYGCTSRFRKIHCPAPNVSEVQIGPFVINYISAMVHATKERFKIHSPAALESMLLSDPIFADIAGIESQGLNETFALLTGVSVSGSALWRTDPVRQSDTAATSSEIENLKKQIQKYNRAKERLEDAYYFSDDAMSEKEYLEKKNKFDAARVAAENKLKELTEVQIASHVDDSGFMKSASAFLLAHQLHAGVHIEYRDFAVTVEEESLKEFMNLVLDHISVKDRRVVEIVFSNGLSHRFIYRE

SEQ ID NO: 782 - protein, 578 aa, Unknown
  Description of Unknown: Integrase B783 sequence
  PTHR30461:SF3,IPR036162,PS51737,IPR011109,PTHR30461, PS00397,PF00239,G3DSA:1.10.10.2600,IPR006119,SSF53041, cd00338,SM00857,IPR025827,IPR038109,PS51736, IPR006118,PF13408,G3DSA:3.40.50.1390,PF07508,Coil
MGYVVKKAAQRFEEKKAAIYVRVSTQYQVDRASLPVQREELINYAKYALGISDYVIFEDAGYSAKNTDRPDYQQMMARMRTGEFSHLLVWKIDRISRNLLDFSVMYAELKELGVVFVSKNEQFDTSSAMGEAMLKIILIFAELERKTTSERVSAVFVSRANDGIWNGGKVPYGYSYDKESKTFSIAEDEAKIVRLIYSLYESEKSIVRVARIMNERGLKSRAGSDWSPTTVHTILSSPFYSGTYRYNYRDESNTKRFREKGKDEWVLVENHHPAIVSPERQAAVGVILESKRYNKNATYQRKNVHVFAGLLTCGCCGSTMAATTDKVRADGWRPSMYICSRRRKSEDCTNKYVSDVTLGPFVLNFFANLIKASNSFGRTTSIETLEKKLLRGEALSRVDHIERPGLEELYNHLRSGFDEKRFESPTIAATESSADLSERDLLLSEKRRLERALNRLKTIYLYGDDEMASKDFNIERERITKALSEVDSRINELDIANAFDLSLSDEAFMQKASQFILTQQLLDKRYVNYERFIRKIDPKIVKDFLNETVSNFCIKDGLTTSILLKNGIELRFSYKTAE

SEQ ID NO: 783 - protein, 578 aa, Unknown
  Description of Unknown: Integrase B784 sequence
  PTHR30461:SF3,IPR036162,PS51737,IPR011109,PTHR30461, PS00397,PF00239,G3DSA:1.10.10.2600,IPR006119,SSF53041, SM00857,IPR025827,IPR038109,PS51736,cd03768, IPR006118,PF13408,G3DSA:3.40.50.1390,PF07508,Coil
MNTLSALNITPSPPRMCRVAIYIRVSTLQQVDKDSLPMQRKDLIAYSKLILNTDDYVIFEDAGYSGKNTIRPRYQDMMGQIRTGAFTHLLVWKIDRISRNLLDFAQMYQELKELNVTFVSKNEQFNTSTAMGEAMLKIILVFAELERNMTSERVTATMISRANTGKWNGGRVPYGYKYDQEEEDFLIIASESNVVKLIHDKYEELQSLVYLARYMNEHGYRTRSGNEWSPPSLAIILKSWWYCGCYEYNKRKAGNRQKLKDESEWIMIEDHHIAIISYDQKERVLAILKGNKRFATEHNLYVKGIHVHVFGGLCWCRNCGKKMTSTSSNKNRSWQYSKYLCSTRRRSLTKCRGRSTSDPVLGEFIFNYILNMLNAQKGFDSIHSPADLQAALLTGDAFSDIKSIDREELNDLYNTLSSNVSGNIYGRSFNVNKEKKNDEVQSSLTILKAEKKKLDRALDRLTNLYLYDDMAISEKDYMIKKTEIETRIAEIDEKIGIVNKNSVDDSITDEEFVDKASTFIITQKLTDRNYISYKRLATSIDPKILYMFTHDVIDYIDIYNGKVQRIVFRNGLSQTFIR

SEQ ID NO: 784 - protein, 578 aa, Unknown
  Description of Unknown: Integrase B785 sequence
  PTHR30461:SF3,IPR036162,PS51737,IPR011109,PTHR30461, PS00397,PF00239,G3DSA:1.10.10.2600,IPR006119,SSF53041, cd00338,SM00857,IPR025827,IPR038109,PS51736, IPR006118,PF13408,G3DSA:3.40.50.1390,PF07508,Coil
MGYVTKKAAQRFEEKKAAIYVRVSTQYQVDRASLPVQREELINYAKYALGISDYVIFEDAGYSAKNTDRPDYQQMMARMRTGEFSHLLVWKIDRISRNLLDFSVMYAELKELGVVFVSKNEQFDTSSAMGEAMLKIILIFAELERKTTSERVSAVFVSRANDGIWNGGKVPYGYSYDKEGKTFSIAEDEAKVVRLIYSLYESEKSIVRVARIMNERGLKSRAGSDWSPTTVHTILSSPFYSGTYRYNYRDESNTKRFREKGKDEWVLVENHHPAIVSPERQAAVGVILESKHYNKNATYQRKNVHVFAGLLTCGCCGSAMAATTDKVRADGWRPSMYICSRRRKSEDCTNKYVSDVSLGPFVLNFFANLIKASNSFGRTTSIETLEKKLLRGEALSRVDHIERPGLEELYNHLRSGFDEKRFESPTIAATESSADLSERDLLLSEKRRLERALNRLKTIYLYGDDEMASKDFNIERERITKALSEVDSRINELDIANAFDLSLSDEAFMQKASQFILTQQLLDKRYVNYERFIRKIDPKIVKDFLNETVSNFCIKDGLTTSILLKNGIELRFSYKTAE

SEQ ID NO: 785 - protein, 578 aa, Unknown
  Description of Unknown: Integrase B786 sequence
  PTHR30461:SF3,IPR036162,PS51737,IPR011109,PTHR30461, PS00397,PF00239,G3DSA:1.10.10.2600,IPR006119,SSF53041, cd00338,SM00857,IPR025827,IPR038109,PS51736, IPR006118,PF13408,G3DSA:3.40.50.1390,PF07508,Coil
MGYVTKKAAQRFEEKKAAIYVRVSTQYQVDRASLPVQREELINYAKYALGISDYVIFEDAGYSAKNTDRPDYQQMMARMRTGEFSHLLVWKIDRISRNLLDFSVMYAELKELGVVFVSKNEQFDTSSAMGEAMLKIILIFAELERKTTSERVSAVFVSRANDGIWNGGKVPYGYSYDKEGKTFSIAEDEAKIVRLIYSLYESEKSIVRVARIMNERGLKSRAGSDWSPTTVHTILSSPFYSGTYRYNYRNESNRKRFREKGKDEWVLVENHHPAIVSPERQAAVGVILESKRYNKNATYQRKNVHVFAGLLTCGCCGSTMAATTDKVRADGWRPSMYICSRRRKSEDCTNKYVSDVSLGPFVLNFFANLIKASNSFGRTTSIETLEKKLLRGEALSRVDHIERPGLEELYNHLRSGFDEKRFESPTIAATESSADLSERDLLLSEKRRLERALNRLKTIYLYGDDEMASKDFNIERERITKALSEVDSRINELDIANAFDLSLSDEAFMQKASQFILTQQLLDKRYVNYERFIRKIDPKIVKDFLNETVSNFCIKDGLTTSILLKNGIELRFSYKTAE

SEQ ID NO: 786 - protein, 578 aa, Unknown
  Description of Unknown: Integrase B787 sequence
  PTHR30461:SF3,IPR036162,PS51737,IPR011109,PTHR30461, PS00397,PF00239,G3DSA:1.10.10.2600,IPR006119,SSF53041, cd00338,SM00857,IPR025827,IPR038109,PS51736, IPR006118,PF13408,G3DSA:3.40.50.1390,PF07508,Coil
MGYVTKKAAQRFEEKKAAIYVRVSTQYQVDRASLPVQREELINYAKYALGISDYVIFEDAGYSAKNTDRPDYQQMMARMRTGEFSHLLVWKIDRISRNLLDFSVMYAELKELGVVFVSKNEQFDTSSAMGEAMLKIILIFAELERKTTSERVSAVFVSRANDGIWNGGKVPYGYSYDKESKTFSIAEDEAKIVRLIYSLYESEKSIVRVARIMNERGLKSRAGSDWSPTTVHTILSSPFYSGTYRYNYRDESNTKRFREKGKDEWVLVENHHPAIVSPERQAAVGVILESKRYNKNATYQRKNVHVFAGLLTCGCCGSTMAATTDKVRADGWRPSMYICSRRRKSEDCTNKYVSDVTLGPFVLNFFANLIKASNSFGRTTSIETLEKKLLRGEALARVDHIERPGLEELYNHLRSGFDEKRFESPTIAATESSADLSERDLLLSEKRRLERALNRLKTIYLYGDDEMASKDFNIERERITKALSEVDSRIDELNIANAFDLSLSDEAFMQKASQFILTQQLLDKRSVNYERFIRKIDPKIVKDFLNETVSNFCIKDGLTTSILLKNGIELRFSYKTAE

SEQ ID NO: 787 - protein, 578 aa, Unknown
  Description of Unknown: Integrase B788 sequence
  PTHR30461:SF3,IPR036162,PS51737,IPR011109,PTHR30461, PS00397,PF00239,G3DSA:1.10.10.2600,IPR006119,SSF53041, cd00338,SM00857,IPR025827,IPR038109,PS51736, IPR006118,PF13408,G3DSA:3.40.50.1390,PF07508,Coil
MGYVVKKAAQRFEEKKAAIYVRVSTQYQVDRASLPVQREELINYAKYALGISDYVIFEDAGYSAKNTDRPDYQQMMARMRTGEFSHLLVWKIDRISRNLLDFSVMYAELKELGVVFVSKNEQFDTSSAMGEAMLKIILIFAELERKTTSERVSAVFVSRANDGIWNGGKVPYGYSYDKESKTFSIAEDEAKIVRLIYSLYESEKSIVRVARIMNERGLKSRAGSDWSPTTVHAILSSPFYSGTYRYNYRDESNTKRFREKGKDEWVLVENHHPAIVSPERQAAVGVILESKRYNKNATYQRKNVHVFAGLLTCGCCGSTMAATTDKVRADGWRPSMYICSRRRKSEDCTNKYVSDVSLGPFVLNFFANLIKASNSFGRTTSIETLEKKLLRGEALSRVDHIERPGLEELYNHLRSGFDEKRFESPTIAATESSADLSERDLLLSEKRRLERALNRLKTIYLYGDDEMASKDFNIERERITKALSEVDSRINELDIANAFDLSLSDEAFMQKASQFILTQQLLDKRYVNYERFIRKIDPKIVKDFLNETVSNFCIKDGLTTSILLKNGIELRFSYKTAE

SEQ ID NO: 788 - protein, 578 aa, Unknown
  Description of Unknown: Integrase B789 sequence
  PTHR30461:SF3,IPR036162,PS51737,IPR011109,PTHR30461, PS00397,PF00239,G3DSA:1.10.10.2600,IPR006119,SSF53041, cd00338,SM00857,IPR025827,IPR038109,PS51736, IPR006118,PF13408,G3DSA:3.40.50.1390,PF07508,Coil
MGYVTKKAAQRFEEKKAAIYVRVSTQYQVDRASLPVQREELINYAKYALGISDYVIFEDAGYSAKNTDRPDYQQMMSRMRTGEFSHLLVWKIDRISRNLLDFSVMYAELKELGVVFVSKNEQFDTSSAMGEAMLKIILIFAELERKTTSERVSAVFVSRANDGIWNGGKVPYGYSYDKESKTFSIAEDEAKIVRLIYSLYESEKSIVRVARIMNERGLKSRAGNDWSPTTVHTILSSPFYSGTYRYNYRDESNTKRFREKGKDEWVLVENHHPAIVSPERQAAVGVILESKRYNKNATYQRKNVHVFAGLLTCGCCGSTMAATTDKVRTDGWRPSMYICSRRRKSDDCTNKYVSDVSLGPFVLNFFANLIKASNSFGRTTSIETLEKKLLRGEALSRVDHIERPGLEELYNHLRSGFEEKRFEPPTIAATEASADLSERDLLLSEKRRLERALNRLKTIYLYGDDEMASKDFNIERERITKALSEVDSRINELDIANAFDLSLSDEAFMQKASQFILTQQLLDKRYVNYERFIRKIDPKIVKDFLNETVSNFCIKDGLTTSILLKNGIELRFSCKTTE

SEQ ID NO: 789 - protein, 578 aa, Unknown
  Description of Unknown: Integrase B790 sequence
  PTHR30461:SF3,IPR036162,PS51737,IPR011109,PTHR30461, PS00397,PF00239,G3DSA:1.10.10.2600,IPR006119,SSF53041, SM00857,IPR025827,IPR038109,PS51736,cd03768, IPR006118,PF13408,G3DSA:3.40.50.1390,PF07508,Coil
MAYPMKNTAADNRIIAIYVRVSTGYQVDKDSLPFQKKELKAYCKHILHVDLSQVEIFEDAGRSGKNTKRPAYERMMEKVRAGLVSHVLVYKIDRISRNLVDFSLMYDDFKYNRVTFISLNEQFDTSSAIGEAVLKIILVFAELERKLTSERVKDIMIGRATEGKWNGARVPYGWDWDPDAEKPVHSKVEAPYARGMYKMYLEVRSTGKIRDYNNSHNIPTKRGGEWTSKTVSDFLRNPMNKGDYRYNYRESARGRKKPEDEVIYQEGVFEPLVDPEVWERVNRIIDDNASKRNTGGLHPIMKNCNVFAGLIQCADCGSGFQVVKKDRRRKNGFAPSMYGCTSRFRKIHCPAPNVSEVQIGPFVINYISAMVYATKERFKIHSPAALESMLLSDPIFANIAGIESQGLNETFALLTGVSVSGSALWRTDPVKQSDTAATSSEIENLKKQIQKYNRAKERLEDAYYFSDDAMSEKEYLEKKNKFDAARVEAENKLKELTEVQIASHVNDSGFMKSASAFLLAHQLHAGVHIEYRDFAVTVEEESLKEFMNLVLDHISVKDRRVVEIVFSNGLSHRFIYRE

SEQ ID NO: 790 - protein, 578 aa, Unknown
  Description of Unknown: Integrase B791 sequence
  PTHR30461:SF3,IPR036162,PS51737,IPR011109,PTHR30461, PS00397,PF00239,G3DSA:1.10.10.2600,IPR006119,SSF53041, cd00338,SM00857,IPR025827,IPR038109,PS51736, IPR006118,PF13408,G3DSA:3.40.50.1390,PF07508,Coil
MGYVTKKAAQRFEEKKAAIYVRVSTQYQVDRASLPVQREELINYAKYALGISDYVIFEDAGYSAKNTDRPDYQQMMARMRTGEFSHLLVWKIDRISRNLLDFSVMYAELKELGVVFVSKNEQFDTSSAMGEAMLKIILIFAELERKTTSERVSAVFVSRANDGIWNGGKVPYGYSYDKESKTFSIAEDEAKIVRLIYSLYESEKSIVRVARIMNERGLKSRAGSDWSPTTVHTILSSPFYSGTYRYNYRDESNTKRFREKGKDEWVLVENHHPAIVSPERQAAVGVILESKRYNKNATYQRKNVHVFAGLLTCGCCGSTMAATTDKVRADGWRPSMYICSRRRKSEDCTNKYVSDVTLGPFVLNFFANLIKASNSFGRTTSIETLEKKLLRGEALSRVDHIERPGLEELYNHLRSGFDEKRFESPTIAATESSADLSERDLLLSEKRRLERALNRLKTIYLYGDDEMASKDFNIERERITKALSEVDSRINELDIANAFDLSLSDEAFMQKASQFILTQQLLDKRYVNYERFIRKIDPKIVKDFLNETVSNFCIKDGLTTSILLKNGIELRFSYKTAE

SEQ ID NO: 791 - protein, 578 aa, Unknown
  Description of Unknown: Integrase B792 sequence
  PTHR30461:SF3,IPR036162,PS51737,IPR011109,PTHR30461, PS00397,PF00239,G3DSA:1.10.10.2600,IPR006119,SSF53041, SM00857,IPR025827,IPR038109,PS51736,cd03768, IPR006118,PF13408,G3DSA:3.40.50.1390,PF07508,Coil
MPRRRTSAKDCVPQQKEIKVAIYIRVSTTHQIDRDSIPMQKKDLMTYCEFILNTDNYVIFEDAGYSGKNTVRPAYQKMMDRVRNDEFTHILVWKIDRISRNLLDFASMYQELKKLGVVFISKNEQFDTGTAIGEAMLKIILVFAELERNMTSERVTATMISRASNGQWNGGRIPFGYSYDSNTSTFSVREDEAAICRKLRDLYLENKSLVYTARALNAEGFKTRAGVDWTPPAVWIIASSPFYAGIYRYNRYKGTVGRTINSENEWVVIPDHHPAIFSLAEHEAMKSLLKTNSRNIENPVGRLHTTSNVHIFQGIAYCGKCKSRLTSSPGRKSSTGFQASNYSCPLRRKSKKCNNKTINDIVLGEFVINYILNMLNAKKMFSKIKTPDELQKQLLCGSTFSDIDHIDTDGLNEYYNLLSRYSSDNSFIFAKRPQKKKAAVSKELASLRKEKERQERAMTRLQDLYLYSENAMSEKDFIVRKEDISYRLKEINHKLGVLSDDSDSFLSDEEFIKQASHFLIQSELKNKKYIYFKNLVNAVSPEILKSYIDTILDSVYITDSKVTSIVFKNGLTHNFIYK

SEQ ID NO: 792 - protein, 578 aa, Unknown
  Description of Unknown: Integrase B793 sequence
  PTHR30461:SF3,IPR036162,PS51737,IPR011109,PTHR30461, PF00239,G3DSA:1.10.10.2600,IPR006119,SSF53041,cd00338, SM00857,IPR025827,IPR038109,PS51736,mobidb-lite, PF13408,G3DSA:3.40.50.1390,PF07508,Coil
MSLASKTVTVPRENQLNAVIYARFSSERQTENSIEFQLRADKAYCEQKGFRVIGEYIDRAMTGTNDNRPEFQRMIADAKKRQFAFIVVYRFDRFARNRYDSAIYKKQLERSGVRVLSTEESVGTGDEGIILESIYEAMAESYSRKLSRIVTEGMKQKAIAGLSTGGKVPFGYKIVDHRLAIDEEKAPAVRLAFEMYADGKTKSEIMREMNSRGCRTQQGNKITVAFVTRMLENPTFMGTSSFCGVKRDNPAIVSPELFDKVQDLLKKNKQHHGKRTDGMYFALTGKVFCGHCGAAMIGDSGTGKSGRNYYYYSCINKKKRRACKKKSERQDWLEKYVCEQTVNFVLAPKNISYIAKRVAEASAADLGCGRIAELERELARIDRQFDALTESLIKTTNPTFLKKINEKAEALTAQKEAAEKEHAALCLRRELCVTPSDVEMYLRSFAHGDPSDPDYRRRLINTLVNAVYVWDDKILIYYNYNVENNTEMEFADACKDADKPLPPSRQDASDHLPLSPSPSPATAPTPPKCSDSLTIGSPTKKDGFCRPFLLLTHLDKSDPLKPAHGGLDGVCAQVSEEV

SEQ ID NO: 793 - protein, 578 aa, Unknown
  Description of Unknown: Integrase B794 sequence
  PTHR30461:SF3,IPR036162,PS51737,IPR011109,PTHR30461, PS00397,PF00239,G3DSA:1.10.10.2600,IPR006119,SSF53041, cd00338,SM00857,IPR025827,IPR038109,PS51736, IPR006118,PF13408,G3DSA:3.40.50.1390,PF07508,Coil
MGYVTKKAAQRFEEKKAAIYVRVSTQYQVDRASLPVQREELINYAKYALGISDYVIFEDAGYSAKNTDRPDYQQMMARMRTGEFSHLLVWKIDRISRNLLDFSVMYAELKELGVVFVSKNEQFDTSSAMGEAMLKIILIFAELERKTTSERVSAVFVSRANDGIWNGGKVPYGYSYDKESKTFSIAEDEAKIVRLIYSLYESEKSIVRVARIMNERGLKSRAGNDWSPTTVHTILSSPFYSGTYRYNYRDESNTKRFREKGKDEWVLVENHHPAIVSPERQAAVGVILESKSYNKNATYQRKNVHVFAGLLTCGCCGATMAATTDKVRADGWRPSMYICSRRRKSEDCTNKYVSDVTLGPFVLNFFANLIKASNSFGRTTSIETLEKKLLRGEALSRVDHIERPGLEELYNHLRSGFDEKRFESPTIAATESSADLSERDLLLSEKRRLERALNRLKTIYLYGDDEMASKDFNIERERITKALNEVDSRINELDIANAFDLSLSDEAFMQKASQFILTQQLLDKRYVNYERFIRKIDPKIVKDFLNETVSNFCIKDGLTTSILLKNGIELRFSYKAAE

SEQ ID NO: 794 - protein, 578 aa, Unknown
  Description of Unknown: Integrase B795 sequence
  PTHR30461:SF3,IPR036162,PS51737,IPR011109,PTHR30461, PS00397,PF00239,G3DSA:1.10.10.2600,IPR006119,SSF53041, cd00338,SM00857,IPR025827,IPR038109,PS51736, IPR006118,PF13408,G3DSA:3.40.50.1390,PF07508,Coil
MGYVVKKAAQRFEEKKAAIYVRVSTQYQVDRASLPVQREELINYAKYALGISDYVIFEDAGYSAKNTDRPDYQQMMARMRTGEFSHLLVWKIDRISRNLLDFSVMYAELKELGVVFVSKNEQFDTSSAMGEAMLKIILIFAELERKTTSERVSAVFVSRANDGIWNGGKVPYGYSYDKESKTFSIAEDEAKIVRLIYSLYESEKSIVRVARIMNERGLKSRAGSDWSPTTVHTILSSPFYSGTYRYNYRDESNTKRFREKGKDEWVLVENHHPAIVSPERQAAVGVILESKRYNKNATYQRKNVHVFAGLLTCGCCGSTMAATTDKVRADGWRPSMYICSRRRKSEDCTNKYVSDVSLGPFVLNFFANLIKASNSFGRTTSIETLEKKLLRGEALSRVDHIERPGLEELYNHLRSGFDEKHFESPTIAATESSADLSERDLLLSEKRRLERALNRLKTIYLYGDDEMASKDFNIERERITKALSEVDSRINELDIANAFDLSLSDEAFMQKASQFILTQQLLDKRYVNYERFIRKIDPKIVKDFLNETVSNFCIKDGLTTSILLKNGIELRFSYKTAE

SEQ ID NO: 795 - protein, 578 aa, Unknown
  Description of Unknown: Integrase B796 sequence
  PTHR30461:SF3,IPR036162,PS51737,IPR011109,PTHR30461, PS00397,PF00239,G3DSA:1.10.10.2600,IPR006119,SSF53041, SM00857,IPR025827,IPR038109,PS51736,cd03768, IPR006118,PF13408,G3DSA:3.40.50.1390,PF07508,Coil
MAYPTKNTAADNRIIAIYVRVSTGYQVDKDSLPFQKKELKAYCKHILHVDLSQVEIFEDAGRSGKNTKRPAYERMMEKVRAGLVSHVLVYKIDRISRNLVDFSLMYDDFKYNRVTFISLNEQFDTSSAIGEAVLKIILVFAELERKLTSERVKDIMIGRATEGKWNGARVPYGWDWDPDAEQPVHSKIEAPYARGMYEMYLKVRSTGKIRDYNNSHNIPTKRGGEWTSKTVSDFLRNPMNKGDYRYNYRESARGRKKPEDEVIYQEGVFEPLVDPEVWERVNRIIDDNASKRNTGGLHPIMKNCNVFAGLIQCADCGSGFQVVKKDRRRKNGFAPSMYGCTSRFRKIHCPAPNVSEVQIGPFVINYISAMVYATKERFKIHSPAALESMLLSDPIFANIAGIESQGLNETFALLTGVSVSGSALWRTDPVKQSDTAATSSEIENLKKQIQKYNRAKERLEDAYYFSDDAMSEKEYLEKKNKFDAARVAAENKLKELTEVQIASHVDDSGFMKSASAFLLAHQLHAGVHIEYRDFAVTVEEESLKEFMNLVLDHISVKDRRVVEIVFSNGLSHRFIYRE

SEQ ID NO: 796 - protein, 578 aa, Unknown
  Description of Unknown: Integrase B797 sequence
  PTHR30461:SF3,IPR036162,PS51737,IPR011109,PTHR30461, PS00397,PF00239,G3DSA:1.10.10.2600,IPR006119,SSF53041, cd00338,SM00857,IPR025827,IPR038109,PS51736, IPR006118,PF13408,G3DSA:3.40.50.1390,PF07508,Coil
MGYVTKKAAQRFEEKKAAIYVRVSTQYQVDRASLPVQREELINYAKYALGISDYVIFEDAGYSAKNTDRPDYQQMMARMRTGEFSHLLVWKIDRISRNLLDFSVMYAELKELGVVFVSKNEQFDTSSAMGEAMLKIILIFAELERKTTSERVSAVFVSRANDGIWNGGKVPYGYSYDKESKTFSIAEDEAKIVRLIYSLYESEKSIVRVARIMNERGLKSRAGNDWSPTTVHTILSSPFYSGTYRYNYRDESNTKRFREKGKDEWVLVENHHPAIVSPERQAAVGVILESKRYNKNATYQRKNVHVFAGLLTCGCCGATMAATTDKVRADGWRPSMYICSRRRKSEDCTNKYVSDVTLGPFVLNFFANLIKASNSFGRTTSIETLEKKLLRGEALSRVDHIERPGLEELYNHLRSGFDEKCFESPTIAATESSADLSERDLLLSEKRRLERALNRLKTIYLYGDDEMASKDFNIERERITKALSDVDSRINELDIANAFDLSLSDEAFIQKASQFILTQQLLDKRYVNYERFIRKIDPKIVKDFLNETVSNFCIKDGLTTSILLKNGIELRFSYKTAE

SEQ ID NO: 797 - protein, 578 aa, Unknown
  Description of Unknown: Integrase B798 sequence
  PTHR30461:SF3,IPR036162,PS51737,IPR011109,PTHR30461, PS00397,PF00239,G3DSA:1.10.10.2600,IPR006119,SSF53041, cd00338,SM00857,IPR025827,IPR038109,PS51736, IPR006118,PF13408,G3DSA:3.40.50.1390,PF07508,Coil
MGYVVKKAAQRFEEKKAAIYVRVSTQYQVDRASLPVQREELINYAKYALGISDYVIFEDAGYSAKNTDRPDYQQMMARMRTGEFSHLLVWKIDRISRNLLDFSVMYAELKELGVVFVSKNEQFDTSSAMGEAMLKIILIFAELERQTTSERVSAVFVSRANDGIWNGGKVPYGYFYDKESKTFSIVEDEAKIVRLIYSLYEAEKSIVRVARTMNERGIKTRAGNDWSPTTVHTVLSSPFYSGTYRYNYRDESNTKRFREKGKDEWVLVENHHPAIVSPERQAAVGVILESKRYNKNATYQRKNVHVFAGLLTCGCCGSTMAATTDKVRADGWRPSMYICSRRRKSEDCTNKYVSDVTLGPFVLNFFANLIKASNSFGRTTSIGTLEKKLLRGEVLSRVDHIERPGLEELYNHLRSGFDEKRFESPTIAATESSADLSERDLLLSEKRRLERALNRLKTIYLYGDDEMASKDFNIERERITKALSEVDSRINELDIANAFDLSLSDEAFMQKASQFILTQQLLDKRYVNYERFIRKIDPKIVKDFLNETVSNFCIKDGLTTSILLKNGIELRFSYKTAE

SEQ ID NO: 798 - protein, 578 aa, Unknown
  Description of Unknown: Integrase B799 sequence
  PTHR30461:SF3,IPR036162,PS51737,IPR011109,PTHR30461, PS00397,PF00239,G3DSA:1.10.10.2600,IPR006119,SSF53041, cd00338,SM00857,IPR025827,IPR038109,PS51736, IPR006118,PF13408,G3DSA:3.40.50.1390,PF07508,Coil
MGYVTKKAAQRFEEKKAAIYVRVSTQYQVDRASLPVQREELINYAKYALGISDYVIFEDAGYSAKNTDRPDYQQMMARMRTGEFSHLLVWKIDRISRNLLDFSVMYAELKELGVVFVSKNEQFDTSSAMGEAMLKIILIFAELERKTTSERVSAVFVSRANDGIWNGGKVPYGYSYDKEGKTFSIAEDEAKIVRLIYSLYESEKSIVRVARIMNERGLKSRAGNDWSPTTVHTILSSPFYSGTYRYNYRDESNTKRFREKGKDEWVLVENHHPAIVSPERQAAVGVILESKRYNKNATYQRKNVHVFAGLLTCGCCGSTMAATTDKVRADGWRPSMYICSRRRKSEDCTNKYVSDVTLGPFVLNFFANLIKASNSFGRTTSIETLEKKLLRGEALSRVDHIERPGLEELYNHLRSGFDEKRFESPTIAATESSADLSERDLLLSEKRRLERALNRLKTIYLYGDDEMASKDFNIERERITKALSEVDSRIDELDIANAFDLSLSDEAFMQKASQFILTQQLLDKRSVNYERFIRKIDPKIVKDFLNETVSNFCIKDGLTTSILLKNGIELRFSYKTAE

SEQ ID NO: 799 - protein, 578 aa, Unknown
  Description of Unknown: Integrase B800 sequence
  PTHR30461:SF3,IPR036162,PS51737,IPR011109,PTHR30461, PS00397,PF00239,G3DSA:1.10.10.2600,IPR006119,SSF53041, cd00338,SM00857,IPR025827,IPR038109,PS51736, IPR006118,PF13408,G3DSA:3.40.50.1390,PF07508,Coil
MGYVTKKAAQRFEEKKAAIYVRVSTQYQVDRASLPVQREELINYAKYALGISDYVIFEDAGYSAKNTDRPDYQQMMARMRTGEFSHLLVWKIDRISRNLLDFSVMYAELKELGVVFVSKNEQFDTSSAMGEAMLKIILIFAELERKTTSERVSAVFVSRANDGIWNGGKVPYGYSYDKESKTFSIAEDEAKIVRLIYSLYEFEKSIVRVARIMNERGLKSRAGNDWSPTTVHMILSSPFYSGTYRYNYRDESNTKCFREKGKDEWVLVENHHPAIVSPERQAAVGVILESKRYNKNATYQRKNVHVFAGLLTCGCCGSTMAATTDKVRADGWRPSMYICSRRRKSDDCTNKYVSDVSLGPFVLNFFANLIKASNSFGRTTSIETLEKKLLRGEALSRVDHIERPGLEELYNHLRSGFDEKRFESPTIAATESSADLSERDLLLSEKRRLERALNRLKTIYLYGDDEMASKDFNIERERITKALSEVDSRINELDIANAFDLSLSDEAFMQKASQFILTQQLLDKRYVNYERFIRKIDPKIVKDFLNETVSNFCIKDGLTTSILLKNGIELRFSYKTAE

SEQ ID NO: 800 - protein, 578 aa, Unknown
  Description of Unknown: Integrase B801 sequence
  PTHR30461:SF3,IPR036162,PS51737,IPR011109,PTHR30461, PS00397,PF00239,G3DSA:1.10.10.2600,IPR006119,SSF53041, SM00857,IPR025827,IPR038109,PS51736,cd03768, IPR006118,PF13408,G3DSA:3.40.50.1390,PF07508,Coil
MAYPMKNTAADNRIIAIYVRVSTGYQVDKDSLPFQKKELKAYCKHILHVDLSQVEIFEDAGRSGKNTKRPAYERMMEKVRAGLVSHVLVYKIDRISRNLVDFSLMYDDFKYNRVTFISLNEQFDTSSAIGEAVLKIILVFAELERKLTSERVKDIMIGRATEGKWNGARVPYGWDWDPDAEQPVHSKIEAPYARGMYEMYLKVRSTGKIRDYNNAHGIPTKRGGEWTSKTVSDFLRNPMNKGDYRYNYRESARGRKKPEDEVIYQEGVFEPLVDPEMWERANRIMDDNASKRNTGGLHPIMKNCNVFAGLIQCAECSSGFQVVKKDRRRKNGFAPSMYGCTSRFRKIHCPAPNVSEVQIGPFVINYISAMVHATKERFKIHSPAALESMLLSDPIFANIAGIESQGLNETFALLTGVSVSGSALWRTDPVKQSDTAATSSEIENLKKQIQKYNRAKERLEDAYYFSDDAMSEKEYLEKKNKFDAARVAAENKLKELTEVQIASHVDDSGFMKSASAFLLAHQLHAGVHIEYRDFAVTVEEESLKEFMNLVLDHISVKDRRVVEIVFSNGLSHRFIYRE

SEQ ID NO: 801 - protein, 578 aa, Unknown
  Description of Unknown: Integrase B802 sequence
  PTHR30461:SF3,IPR036162,PS51737,IPR011109,PTHR30461, PS00397,PF00239,G3DSA:1.10.10.2600,IPR006119,SSF53041, cd00338,SM00857,IPR025827,IPR038109,PS51736, IPR006118,PF13408,G3DSA:3.40.50.1390,PF07508,Coil
MGYVTKKAAQRFEEKKAAIYVRVSTQYQVDRASLPVQREELINYAKYALGISDYVIFEDAGYSAKNTDRPDYQQMMARMRTGEFSHLLVWKIDRISRNLLDFSVMYAELKELGVVFVSKNEQFDTSSAMGEAMLKIILIFAELERKTTSERVSAVFVSRANDGIWNGGKVPYGYSYDKESKTFSIAEDEAKIVRLIYSLYESEKSIVRVARIMNERGLKSRAGNDWSPTTVHTVLSSPFYSGTYRYNYRDESNTKRFREKGKDEWVLVENHHPAIVSPERQAAVGLILESKRYNKNATYQRKNVHVFAGLLTCGCCGATMAATTDKVRADGWRPSMYICSRRRKSEDCTNKYVSDVTLGPFVLNFFANLIKASNSFGRTTSIETLEKKLLRGEALSCVDHIERPGLEELYNHLRSGFDEKCFESPTIAATESSADLSERDLLLSEKRRLERALNRLKTIYLYGDDEMASKDFNIERERITKALSEVDSRINELDIANAFDLSLSDEAFMQKASQFILTQQLLDKRYVNYERFIRKIDPKIVKDFLNETVSNFCIKDGLTTSILLKNGIELRFSYKTAE

SEQ ID NO: 802 - protein, 578 aa, Unknown
  Description of Unknown: Integrase B803 sequence
  PTHR30461:SF3,IPR036162,PS51737,IPR011109,PTHR30461, PS00397,PF00239,G3DSA:1.10.10.2600,IPR006119,SSF53041, cd00338,SM00857,IPR025827,IPR038109,PS51736, IPR006118,PF13408,G3DSA:3.40.50.1390,PF07508,Coil
MGYVVKKAAQRFEEKKAAIYVRVSTQYQVDRASLPVQREELINYAKYALGISDYVIFEDAGYSAKNTDRPDYQQMMARMRTGEFSHLLVWKIDRISRNLLDFSVMYAELKELGVVFVSKNEQFDTSSAMGEAMLKIILIFAELERKTTSERVSAVFVSRANDGIWNGGKVPYGYSYDKESKTFSIAEDEAKIVRLIYSLYESEKSIVRVARIMNERGLKSRAGSDWSPTTVHTILSSPFYSGTYRYNYRDESNTKRFREKGKDEWVLVENHHPAIVSPERQAAVGVILESKRYNKNATYQRKNVHVFAGLLTCGCCGSTMAATTDKVRADGWRPSMYICSRRRKSEDCTNKYVSDVTLGPFVLNFFANLIKASNSFGRTTSIETLEKKLLRGEALSHVDHIERPGLEELYNHLRSGFDEKCFESPTIAATESSADLSERDLLLSEKRRLERALNRLKTIYLYGDDEMASKDFNIERERITKALSEVDSRINELDIANAFDLSLSDEAFMQKASQFILTQQLLDKRYVNYERFIRKIDPKIVKDFLNETVSNFCIKDGLTTSILLKNGIELRFSYKTAE

SEQ ID NO: 803 - protein, 578 aa, Unknown
  Description of Unknown: Integrase B804 sequence
  PTHR30461:SF3,IPR036162,PS51737,IPR011109,PTHR30461, PS00397,PF00239,G3DSA:1.10.10.2600,IPR006119,SSF53041, cd00338,SM00857,IPR025827,IPR038109,PS51736, IPR006118,PF13408,G3DSA:3.40.50.1390,PF07508,Coil
MGYVTKKAAQRFEEKKAAIYVRVSTQYQVDRASLPVQREELINYAKYALGISDYVIFEDAGYSAKNTDRPDYQQMMARMRTGEFSHLLVWKIDRISRNLLDFSVMYAELKELGVVFVSKNEQFDTSSAMGEAMLKIILIFAELERKTTSERVSAVFVSRANDGIWNGGKVPYGYSYDKESKTFSIAEDEAKIVRLIYSLYESEKSIVRVARIMNERGLKSRAGSDWSPTTVHTILSSPFYSGTYRYNYRDESNAKRFREKGKDEWVLVENHHPAIVSPERQAAVGVILESKRYNKNATYQRKNVHVFAGLLTCGCCGSTMAATTDKVRADGWRPSMYICSRRRKSEDCTNKYVSDVTLGPFVLNFFANLIKASNAFGRTTSIETLEKKLLRGEALARVDHIERPGLEELYNHLHSGFDEKRFESPTIAVTESSADLSERDLLLSEKRRLERALNRLKTIYLYGDDEMASKDFNIERERITKALSEVDSRINELDIANAFDLSLSDEAFMQKASQFILTQQLLDKRYVNYERFIRKIDPKIVKDFLNETVSNFCIKDGLTTSILLKNGIELRFSYKTAE

SEQ ID NO: 804 - protein, 578 aa, Unknown
  Description of Unknown: Integrase B805 sequence
  PTHR30461:SF3,IPR036162,PS51737,IPR011109,PTHR30461, PS00397,PF00239,G3DSA:1.10.10.2600,IPR006119,SSF53041, cd00338,SM00857,IPR025827,IPR038109,PS51736, IPR006118,PF13408,G3DSA:3.40.50.1390,PF07508,Coil
MGYVVKKAAQRFEEKKAAIYVRVSTQYQVDRASLPVQREELINYAKYALGISDYVIFEDAGYSAKNTDRPDYQQMMARMRTGEFSHLLVWKIDRISRNLLDFSVMYAELKELGVVFVSKNEQFDTSSAMGEAMLKIILIFAELERKTTSERVSAVFVSRANDGIWNGGKVPYGYSYDKESKTFSIAEDEAKIVRLIYSLYESEKSIVRVARIMNERGLKSRAGSDWSPTTVHTILSSPFYSGTYRYNYRDESNTKRFREKGKDEWVLVENHHPAIVSPERQAAVGVILESKRYNKNATYQRKNVHVFAGLLTCGCCGSTMAATTDKVRADGWRPSMYICSRRRKSDDCTNKYVSDVSLGPFVLNFFANLIKASNSFGRTTSIETLEKKLLRGEALSRVDHIERPGLEELYNHLRSGFDEKRFESPTIAATESSADLSERDLLLSEKRRLERALNRLKTIYLYGDDEMASKDFNIERERITKTLSEVDSRINELDIANAFDLSLSDEAFMQKASQFILTQQLLDKRYVNYERFIRKIDPKIVKDFLNETVSNFCIKDGLTTSILLKNGIELRFSYKTAE

SEQ ID NO: 805 - protein, 578 aa, Unknown
  Description of Unknown: Integrase B806 sequence
  PTHR30461:SF3,IPR036162,PS51737,IPR011109,PTHR30461, PS00397,PF00239,G3DSA:1.10.10.2600,IPR006119,SSF53041, SM00857,IPR025827,IPR038109,PS51736,cd03768, IPR006118,PF13408,G3DSA:3.40.50.1390,PF07508,Coil
MAYPTKNTAADNRIIAIYVRVSTGYQVDKDSLPFQKKELKAYCKHILHVDLSQVEIFEDAGRSGKNTKRPAYERMMEKVRAGLVSHVLVYKIDRISRNLVDFSLMYDDFKYNRVTFISLNEQFDTSSAIGEAVLKIILVFAELERKLTSERVKDIMIGRATEGKWNGARVPYGWDWDPDAEQPVHSKVEAPYARGMYEMYLEVQSTGKIRDYNNSHNIPTKRGGEWTSKTVSDFLRNPMNKGDYRYNYRESARGRKKPEDEVIYQEGVFEPLVDPEVWERVNRIMDDNARKRNTGGLHPIMKNCNVFAGLIQCEDCGSGFQVVKKDRRRKNGFAPSMYGCTSRYRKIHCPAPNVSEVQIGPFVINYISAMVHATNERFKIHSPAALEAMLLSDPIFANIAGIGSQGLNETFALLTGISVSGSALWRTDLVKQSCTAVSPEDIAALKKQIQKYNRAKERLEDVYYFSDDSMSEKEYLEKKNKFDAARVAAENKLKELTEVRIASHVDDSGFMKSASAFLLAHQLHAGVHIEYRDFAVTVEEESLKEFMNLVLDHISVKDRRVVEIVFSNGLSHRFIYRE

SEQ ID NO: 806 - protein, 578 aa, Unknown
  Description of Unknown: Integrase B807 sequence
  PTHR30461:SF3,IPR036162,PS51737,IPR011109,PTHR30461, PS00397,PF00239,G3DSA:1.10.10.2600,IPR006119,SSF53041, cd00338,SM00857,IPR025827,IPR038109,PS51736, IPR006118,PF13408,G3DSA:3.40.50.1390,PF07508,Coil
MGYVTKKAAQRFEEKKAAIYVRVSTQYQVDRASLPVQREELINYAKYALGISDYVIFEDAGYSAKNTDRPDYQQMMARMRTGEFSHLLVWKIDRISRNLLDFSVMYAELKELGVVFVSKNEQFDTSSAMGEAMLKIILIFAELERKTTSERVSAVFVSRANDGIWNGGKVPYGYSYDKESKTFSIAEDEAKIVRLIYSLYESEKSIVRVARIMNERGLKSRAGNDWSPTTVHTILSSPFYSGTYRYNYRDESNTKRFREKGKDEWVLVENHHPAIVSPERQAAVGLILESKRYNKNATYQRKNVHVFAGLLTCGCCGATMAATTDKVRADGWRPSMYICSRRRKSEDCTNKYVSDVTLGPFVLNFFANLIKASNSFGRTTSIETLEKKLLRGEALSRVDHIERPGLEELYNHLRSGFDEKCFESPTIAATESSADLSERDLLLSEKRRLERALNRLKTIYLYGDDEMASKDFNIERERITKALSEVDSRINELDIANAFDLSLSDEAFMQKASQFILTQQLLDKRYVNYERFIRKIDPKIVKDFLNETVSNFCIKDGLTTSILLKNGIELRFSYKTAE

SEQ ID NO: 807 - protein, 578 aa, Unknown
  Description of Unknown: Integrase B808 sequence
  PTHR30461:SF3,IPR036162,PS51737,IPR011109,PTHR30461, PS00397,PF00239,G3DSA:1.10.10.2600,IPR006119,SSF53041, cd00338,SM00857,IPR025827,IPR038109,PS51736, IPR006118,PF13408,G3DSA:3.40.50.1390,PF07508,Coil
MGYVVKKAAQRFEEKKAAIYVRVSTQYQVDRASLPVQREELINYAKYALGISDYVIFEDAGYSAKNTDRPDYQQMMARMRTGEFSHLLVWKIDRISRNLLDFSVMYAELKELGVVFVSKNEQFDTSSAMGEAMLKIILIFAELERKTTSERVSAVFVSRANDGIWNGGKVPYGYSYDKESKTFSIAEDEAKIVRLIYSLYESEKSIVRVARIMNERGLKSRAGSDWSPTTVHTILSSPFYSGTYRYNYRDESNAKRFREKGKDEWVLVENHHPAIVSPERQAAVGVILESKRYNKNATYQRKNVHVFAGLLTCGCCGSTMAATTDKVRADGWRPSMYICSRRRKSEDCTNKYVSDVTLGPFVLNFFANLIKASNSFGRTTSIETLEKKLLRGEALSRVDHIERPGLEELYNHLRSGFDEKRFEPPTIAATETSADLSERDLLLSEKRRLERALNRLKTIYLYGDDEMASKDFNIERERITKALSEVDSRINELDIANAFDLSLSDEAFMQKASQFILTQQLLDKRYVNYERFIRKIDPKIVKDFLNETVSNFCIKDGLTTSILLKNGIELRFSYKTAE

SEQ ID NO: 808 - protein, 578 aa, Unknown
  Description of Unknown: Integrase B809 sequence
  PTHR30461:SF3,IPR036162,PS51737,IPR011109,PTHR30461, PS00397,PF00239,G3DSA:1.10.10.2600,IPR006119,SSF53041, SM00857,IPR025827,IPR038109,PS51736,cd03768, IPR006118,PF13408,G3DSA:3.40.50.1390,PF07508,Coil
MAYPTKNTAADNRIIAIYVRVSTGYQVDKDSLPFQKKELKAYCKHILHVDLSQVEIFEDAGHSGKNTKRPAYERMMEKVRAGLVSHVLVYKIDRISRNLVDFSLMYDDFKYNRVTFISLNEQFDTSSAIGEAVLKIILVFAELERKLTSERVKDIMIGRATEGKWNGARVPYGWDWDPDAEQPVHSKVEAPYARGMYEMYLEVRSTGKIRDYNNAHGIPTKRGGEWTSKTVSDFLRNPMNKGDYRYNYRESARGRKKPEDEVIYQEGVFEPLVDPEVWERVNRIMDDNASKRNAGGLYPIMKNCNVFAGLIQCADCGSGFQVVKKDRRRKNGFAPSMYGCTSKHRKIRCPAPNVSEVQIGPFVINYISSMVHAANERFKIHSPAALEAMLLSDPIFANIAGIESQGLNETFALLTGVSVSGSALWRTDLVKQTEAAANPSEIAELKKQIQKYNRAKERLEDAYYFSDDAMSEKEYLEKKNKFDAARVAAENKLKELTEVQIASHVDDSGFMKSASAFLLAHQLHAGVHIEYRDFAVTVEEESLKEFMNLVLDHISVKDRRVVEIVFSNGLSHRFIYRE

SEQ ID NO: 809 - protein, 578 aa, Unknown
  Description of Unknown: Integrase B810 sequence
  PTHR30461:SF3,IPR036162,PS51737,IPR011109,PTHR30461, PS00397,PF00239,G3DSA:1.10.10.2600,IPR006119,SSF53041, cd00338,SM00857,IPR025827,IPR038109,PS51736, IPR006118,PF13408,G3DSA:3.40.50.1390,PF07508,Coil
MGYVTKKAAQRFEEKKAAIYVRVSTQYQVDRASLPVQREELINYAKYALGISDYVIFEDAGYSAKNTDRPDYQQMMARMRTGEFSHLLVWKIDRISRNLLDFSVMYAELKELGVVFVSKNEQFDTSSAMGEAMLKIILIFAELERKTTSERVSAVFVSRANDGIWNGGKVPYGYSYDKESKTFSIAEDEAKIVRLIYSLYESEKSIVRVARIMNERGLKSRAGNDWSPTTVHTILSSPFYSGTYRYNYRDESNTKRFREKGKDEWVLVENHHPAIVSPERQATVGVILESKRYNKNATYQRKNVHVFAGLLTCGCCGATMAATTDKVRADGWRPSMYICSRRRKSEDCTNKYVSDVTLGPFVLNFFANLIKASNSFGRTTSIETLEKKLLRGEALSRVDHIERPGLEELYNHLRSGFDEKCFESPTIAATESSADLSERDLLLSEKRRLERALNRLKTIYLYGDDEMASKDFNIERERITIALSEVDSRINELDIANAFDLSLSDEAFMQKASQFILTQQLLDKRYVNYERFIRKIDPKIVKDFLNETVSNFCIKDGLTTSILLRNGIELRFSYKTAE

SEQ ID NO: 810 - protein, 578 aa, Unknown
  Description of Unknown: Integrase B811 sequence
  PTHR30461:SF3,IPR036162,PS51737,IPR011109,PTHR30461, PS00397,PF00239,G3DSA:1.10.10.2600,IPR006119,SSF53041, cd00338,SM00857,IPR025827,IPR038109,PS51736, IPR006118,PF13408,G3DSA:3.40.50.1390,PF07508,Coil
MGYVTKKAAQRFEEKKAAIYVRVSTQYQVDRASLPVQREELINYAKYALGISDYVIFEDAGYSAKNTDRPDYQQMMARMRTGEFSHLLVWKIDRISRNLLDFSVMYAELKELGVVFVSKNEQFDTSSAMGEAMLKIILIFAELERKTTSERVSAVFVSRANDGIWNGGKVPYGYSYDKESKTFSIAEDEAKIVRLIYSLYESEKSIVRVARIMNERGLKSRAGSDWSPTTVHTILSSPFYSGTYRYNYRDESNAKRFREKGKDEWVLVENHHPAIVSPERQAAVGVILESKRYNKNATYQRKNVHVFAGLLTCGCCGSTMAATTDKVRADGWRPSMYICSRRRKSEDCTNKYVSDVSLGPFVLNFFANLIKASNSFGRTTSIETLEKKLLRGEALSRVDHIERPGLEELYDHLRSGFDEKRFESPTIAATESSADLSERDLLLSEKRRLERALNRLKTIYLYGDDEMASKDFNIERERITKALSEVDSRINELDIANAFDLSLSDEAFMQKASQFILTQQLLDKRYVNYERFIRKIDPKIVKDFLNETVSNFCIKDGLTTSILLKNGIELRFSYKTAE

SEQ ID NO: 811 - protein, 578 aa, Unknown
  Description of Unknown: Integrase B812 sequence
  PTHR30461:SF3,IPR036162,PS51737,IPR011109,PTHR30461, PS00397,PF00239,G3DSA:1.10.10.2600,IPR006119,SSF53041, cd00338,SM00857,IPR025827,IPR038109,PS51736, IPR006118,PF13408,G3DSA:3.40.50.1390,PF07508,Coil
MGYVTKKAAQRFEEKKAAIYVRVSTQYQVDRASLPVQREELINYAKYALGISDYVIFEDAGYSAKNTDRPDYQQMMARMRTGEFSHLLVWKIDRISRNLLDFSVMYAELKELGVVFVSKNEQFDTSSAMGEAMLKIILIFAELERKTTSERVSAVFVSRANDGIWNGGKVPYGYSYDKESKTFSIAEDEAKIVRLIYSLYESEKSIVRVARIMNERGLKSRAGNDWSPTTVHTILSSPFYSGTYRYNYRDESNTKRFREKGKDEWVLVENHHPAIVSPERQAAVGVILESKRYNKNATYQRKNVHVFAGLLTCGCCGATMAATTDKVRADGWRPSMYICSRRRKSEDCTNKYVSDVTLGPFVLNFFANLIKASNSFGRTTSIETLEKKLLRGEALSRVDHIERPGLEELYNHLRSGFDEKCFESPTIAATESSADLSERDLLLSEKRRLERALNRLKTIYLYGDDEMASKDFNIERERITKALSEVDSRINELDIANAFDLSLSDEAFMQKASQFILTQQLLDKRYVNYERFIRKIDPKIVKDFLNETVSNFCIKDGLTTSILLKNGIELRFSYKTAE

SEQ ID NO: 812 - protein, 578 aa, Unknown
  Description of Unknown: Integrase B813 sequence
  PTHR30461:SF3,IPR036162,PS51737,IPR011109,PTHR30461, PS00397,PF00239,G3DSA:1.10.10.2600,IPR006119,SSF53041, cd00338,SM00857,IPR025827,IPR038109,PS51736, IPR006118,PF13408,G3DSA:3.40.50.1390,PF07508,Coil
MGYVVKKAAQRFEEKKAAIYVRVSTQYQVDRASLPVQREELINYAKYALGISDYVIFEDAGYSAKNTDRPDYQQMMARMRTGEFSHLLVWKIDRISRNLLDFSVMYAELKELGVVFVSKNEQFDTSSAMGEAMLKIILIFAELERKTTSERVSAVFVSRANDGIWNGGKVPYGYFYDKESKNFSIVEDEAKIVRLIYSLYEAEKSIVRVARTMNERGIKTRAGNDWSPTTVHTVLSSPFYSGTYRYNYRDESNTKRFREKGKDEWVLVENHHPAIVSPERQAAVGVILESKRYNKNATYQRKNVHVFAGLLTCGCCGSTMAATTDKVRADGWRPSMYICSRRRKSEDCTNKYVSDVTLGPFVLNFFANLIKASNSFGRTTSIETLEKKLLRGEALSRVDHIERPGLEELYNHLRSGFDEKRFESPTIAATESSADLSERDLLLSEKRRLERALNRLKTIYLYGDDEMASKDFNIERERITKALSEVDSRINELDIANAFDLSLSDEAFMQKASQFILTQQLLDKRYVNYERFIRKIDPKIVKDFLNETVSNFCIKDGLTTSILLKNGIELRFSYKTAE

SEQ ID NO: 813 - protein, 578 aa, Unknown
  Description of Unknown: Integrase B814 sequence
  PTHR30461:SF3,IPR036162,PS51737,IPR011109,PTHR30461, PS00397,PF00239,G3DSA:1.10.10.2600,IPR006119,SSF53041, cd00338,SM00857,IPR025827,IPR038109,PS51736, IPR006118,PF13408,G3DSA:3.40.50.1390,PF07508,Coil
MGYVVKKAAQRFEEKKAAIYVRVSTQYQVDRASLPVQREELINYAKYALGISDYVIFEDAGYSAKNTDRPDYQQMMARMRTGEFSHLLVWKIDRISRNLLDFSVMYAELKELGVVFVSKNEQFDTSSAMGEAMLKIILIFAELERKTTSERVSAVFVSRANDGIWNGGKVPYGYSYDKESKTFSIAEDEAKIVRLIYSLYESEKSIVRVARIMNERGLKSRAGNDWSPTTVHMILSSPFYSGTYRYNYRDESNIKRIREKSKDEWVLVENHHPAIVSPERQAAVGVILESKRYNKNATYQRKNVHVFAGLLTCGCCGSTMAATTDKVRTDGWRPSMYICSRRRKSDDCTNKYVSDVSLGPFVLNFFANLIKASNSFGRTTSIETLEKKLLRGEALSRVDHIERPGLEELYNHLRSGFDEKRFEPPTIAATEASADLSERDLLLSEKRRLERALNRLKTIYLYGDDEMASKDFNIERERITKALSEVDSRINELDIANAFDLSLSDEAFMQKASQFILTQQLLDKRYVNYERFIRKIDPKIVKDFLNETVSNFCIKDGLTTSILLKNGIELRFSYKTAE

SEQ ID NO: 814 - protein, 578 aa, Unknown
  Description of Unknown: Integrase B815 sequence
  PTHR30461:SF3,IPR036162,PS51737,IPR011109,PTHR30461, PS00397,PF00239,G3DSA:1.10.10.2600,IPR006119,SSF53041, cd00338,SM00857,IPR025827,IPR038109,PS51736, IPR006118,PF13408,G3DSA:3.40.50.1390,PF07508,Coil
MGYVVKKAAQRFEEKKAAIYVRVSTQYQVDRASLPVQREELINYAKYALGISDYVIFEDAGYSAKNTDRPDYQQMMARMRTGEFSHLLVWKIDRISRNLLDFSVMYAELKELGVVFVSKNEQFDTSSAMGEAMLKIILIFAELERKTTSERVSAVFVSRANDGIWNGGKVPYGYSYDKESKTFSIAEDEAKIVRLIYSLYESEKSIVRVARIMNERGLKSRAGNDWSPTTVHMILSSPFYSGTYRYNYRDESNTKRFREKGKDEWVLVENHHPAIVSPERQAAVGVILESKRYNKNATYQRKNVHVFAGLLTCGCCGSTMAATTDKVRADGWRPSMYICSRRRKSEDCTNKYVSDVTLGPFVLNFFANLIKASNSFGRTTSIETLEKKLLRGEALSRVDHIERPGLEELYNHLRSGFDEKRFESPTIAATESSADLSERDLLLSEKRRLERALNRLKTIYLYGDDEMASKDFNIERERITKALSEVDSRINELDIANAFDLSLSDEAFMQKASQFILTQQLLDKRYVNYERFIRKIDPKIVKDFLNETVSNFCIKDGLTTSILLKNGIELRFSYKTAE

SEQ ID NO: 815 - protein, 578 aa, Unknown
  Description of Unknown: Integrase B816 sequence
  PTHR30461:SF3,IPR036162,PS51737,IPR011109,PTHR30461, PS00397,PF00239,G3DSA:1.10.10.2600,IPR006119,SSF53041, cd00338,SM00857,IPR025827,IPR038109,PS51736, IPR006118,PF13408,G3DSA:3.40.50.1390,PF07508,Coil
MGYVTKKAAQRFEEKKAAIYVRVSTQYQVDRASLPVQREELINYAKYALGISDYVIFEDAGYSAKNTDRPDYQQMMARMRTGEFSHLLVWKIDRISRNLLDFSVMYAELKELGVVFVSKNEQFDTSSAMGEAMLKIILIFAELERKTTSERVSAVFVSRANDGIWNGGKVPYGYSYDKEGKTFSIAEDEAKVVRLIYSLYESEKSIVRVARIMNERGLKSRAGNDWSPTTVHTILSSPFYSGTYRYNYRDESNTKRFREKGKDEWVLVENHHPAIVSPERQAAVGVILESKRYNKNATYQRKNVHVFAGLLTCGCCGSTMAATTDKVRADGWRPSMYICSRRRKSEDCTNKYVSDVSLGPFVLNFFANLIKASNSFGRTTSIETLEKKLLRGEALSRVDHIERPGLEELYNHLRSGFDEKRFESPTIAATESSADLSERDLLLSEKRRLERALNRLKTIYLYGDDEMASKDFNIERERITKALSEVDSRINELDIANAFDLSLSDEAFMQKASQFILTQQLLDKRYVNYERFIRKIDPKIVKDFLNETVSNFCIKDGLTTSILLKNGIELRFSYKTAE

SEQ ID NO: 816 - protein, 578 aa, Unknown
  Description of Unknown: Integrase B817 sequence
  PTHR30461:SF3,IPR036162,PS51737,IPR011109,PTHR30461, PS00397,PF00239,G3DSA:1.10.10.2600,IPR006119,SSF53041, cd00338,SM00857,IPR025827,IPR038109,PS51736, IPR006118,PF13408,G3DSA:3.40.50.1390,PF07508,Coil
MGYVTKKAAQRFEEKKAAIYVRVSTQYQVDRASLPVQREELINYAKYALGISDYVIFEDAGYSAKNTDRPDYQQMMARMRTGEFSHLLVWKIDRISRNLLDFSVMYAELKELSVVFVSKNEQFDTSSAMGEAMLKIILIFAELERKTTSERVSAVFVSRANDGIWNGGKVPYGYSYDKESKTFSIAEDEAKIVRLIYSLYESEKSIVRVARIMNERGLKSRAGSDWSPTTVHTILSSPFYSGTYRYNYRDESNTKRFREKGKDEWVLVENHHPAIVSPERQAAVGVILESKRYNKNATYQRKNVHVFAGLLTCGCCGSTMAATTDKVRADGWRPSMYICSRRRKSEDCTNKYVSDVTLGPFVLNFFANLIKASNSFGRTTSIETLEKKLLRGEALSRVDHIERPGLEELYNHLRSGFDEKRFESPTIAATESSADLSERDLLLSEKRRLERALNRLKTIYLYGDDEMASKDFNIERERITKALSEVDSRINELDIANAFDLSLSDEAFMQKASQFILTQQLLDKRYVNYERFIRKIDPKIVKDFLNETVSNFCIKDGLTTSILLKNGIELRFSYKTAE

SEQ ID NO: 817 - protein, 578 aa, Unknown
  Description of Unknown: Integrase B818 sequence
  PTHR30461:SF3,IPR036162,PS51737,IPR011109,PTHR30461, PS00397,PF00239,G3DSA:1.10.10.2600,IPR006119,SSF53041, cd00338,SM00857,IPR025827,IPR038109,PS51736, IPR006118,PF13408,G3DSA:3.40.50.1390,PF07508,Coil
MGYVTKKAAQRFEEKKAAIYVRVSTQYQVDRASLPVQREELINYAKYALGISDYVIFEDAGYSAKNTDRPDYQQMMARMRTGEFSHLLVWKIDRISRNLLDFSVMYAELKELGVVFVSKNEQFDTSSAMGEAMLKIILIFAELERKTTSERVSAVFVSRANDGIWNGGKVPYGYSYDKESKAFSIAEDEAKIVRLIYSLYESEKSIVRVARIMNERGLKSRAGSDWSPTTVHTILSSPFYSGTYRYNYRDESNAKRFREKGKDEWVLVENHHPAIVSPERQAAVGVILESKHYNKNATYQRKNVHVFAGLLTCGCCGSTMAATTDKVRADGWRPSMYICSRRRKSEDCTNKYVSDVTLGPFVLNFFANLIKASNSFGRTTSIETLEKKLLRGEALSHVDHIERPGLEELYNHLRSGFDEKCFESPTIAATESSADLSERDLLLSEKRRLERALNRLKTIYLYGDDEMASKDFNIERERITKALSEVDSRINELDIANAFDLSLSDEAFMQKASQFILTQQLLDKRYVNYERFIRKIDPKIVKDFLNETVSNFCIKDGLTTSILLKNGIELRFSYKTAE

SEQ ID NO: 818 - protein, 578 aa, Unknown
  Description of Unknown: Integrase B819 sequence
  PTHR30461:SF3,IPR036162,PS51737,IPR011109,PTHR30461, PS00397,PF00239,G3DSA:1.10.10.2600,IPR006119,SSF53041, cd00338,SM00857,IPR025827,IPR038109,PS51736, IPR006118,PF13408,G3DSA:3.40.50.1390,PF07508,Coil
MGYVTKKAAQRFEEKKAAIYVRVSTQYQVDRASLPVQREELINYAKYALGISDYVIFEDAGYSAKNTDRPDYQQMMARMRTGEFSHLLVWKIDRISRNLLDFSVMYAELKEHGVVFVSKNEQFDTSSAMGEAMLKIILIFAELERKTTSERVSAVFVSRANDGIWNGGKVPYWYSYDKESKTFSIAEDEAKIVRLIYSLYESEKSIVRVARIMNERGLKSRAGNDWSPTTVHTILSSPFYSGTYRYNYRDESNTKRFREKGKDEWVLVENHHPAIVSPERQATVGVILESKRYNKNATYQRKNVHVFAGLLTCGCCGATMAATTDKVRADGWRPSMYICSRRRKSEDCTNKYVSDVTLGPFVLNFFANLIKASNSFGRTTSIETLEKKLLRGEALSRVDHIERPGLEELYNHLRSGFDEKCFESPTIAATESSADLSERDLLLSEKRRLERALNRLKTIYLYGDDEMASKDFNIERERITKALSEVDSRINELDIANAFDLSLSDEAFMQKASQFILTQQLLDKRYVNYERFIRKIDPKIVKDFLNETVSNFCIKDGLTTSILLKNGIELRFSYKTAE

SEQ ID NO: 819 - protein, 578 aa, Unknown
  Description of Unknown: Integrase B820 sequence
  PTHR30461:SF3,IPR036162,PS51737,IPR011109,PTHR30461, PS00397,PF00239,G3DSA:1.10.10.2600,IPR006119,SSF53041, cd00338,SM00857,IPR025827,IPR038109,PS51736, IPR006118,PF13408,G3DSA:3.40.50.1390,PF07508,Coil
MGYVVKKAAQRFEEKKAAIYVRVSTQYQVDRASLPVQREELINYAKYALGISDYVIFEDAGYSAKNTDRPDYQQMMARMRTGEFSHLLVWKIDRISRNLLDFSVMYAELKELGVVFVSKNEQFDTSSAMGEAMLKIILIFAELERKTTSERVSAVFVSRANDGIWNGGKVPYGYSYDKESKTFSIAEDEAKIVRLIYSLYESEKSIVRVARIMNERGLKSRAGNDWSPTTVHMILSSPFYSGTYRYNYRDESNTKRFREKGKDEWVLVENHHPAIVSPERQAAVGVILESKRYNKNATYQRKNVHVFAGLLTCGCCGSTMAATTDKVRADGWRPSMYICSRRRKSDDCTNKYVSDVSLGPFVLNFFANLIKASNSFGRTTSIETLEKKLLRGEALSHVDHIERPGLEELYNHLRSGFDEKRFEPPTIAATEASADLSERDLLLSEKRRLERALNRLKTIYLYGDDEMASKDFNIERERITKALSEVDSRINELDIANAFDLSLSDEAFMQKASQFILTQQLLDKRYVNYERFIRKIDPKIVKDFLNETVSNFCIKDGLTTSILLKNGIELRFSYKTAE

SEQ ID NO: 820 - protein, 578 aa, Unknown
  Description of Unknown: Integrase B821 sequence
  PTHR30461:SF3,IPR036162,PS51737,IPR011109,PTHR30461, PS00397,PF00239,G3DSA:1.10.10.2600,IPR006119,SSF53041, SM00857,IPR025827,IPR038109,PS51736,cd03768, IPR006118,PF13408,G3DSA:3.40.50.1390,PF07508,Coil
MAYPMKNTAADNRIIAIYVRVSTGYQVDKDSLPFQKKELKAYCKHILHVDLSQVEIFEDAGRSGKNTKRPAYERMMDKVRAGLVSHVLVYKIDRISRNLVDFSLMYDDFKYNRVTFISLNEQFDTSSAIGEAVLKIILVFAELERKLTSERVKDIMIGRATEGKWNGARVPYGWDWDPDAEQPVHSKIEAPYARGMYEMYLEVRSTSKIRDYNNSHNIPTKRGGEWTSKTVSDFLRNPMNKGDYRYNYRESARGRKKPEDEVIYQEGIFEPLVDPKVWERVNRIMDDNASKRNTGGLHPIMKNCNVFAGLIQCADCGSGFQVVKKDRRRKNGFAPSMYGCTSRFRKIHCPAPNVSEVQIGPFVINYISAMVYATKERFKIHSPAALESMLLSDPIFANIAGIESQGLNETFALLTGVSVSGSALWRTDPVKQSDTAATSSEIENLKKQIQKYNRAKERLEDAYYFSDDAMSEKEYLEKKNKFDAARVAAENKLKELTEVQIASHVNDSGFMKSASAFLLAHQLHAGVHIEYRDFAVTVEEESLKEFMNLVLDHISVKDRRVVEIVFSNGLSHRFIYRE

SEQ ID NO: 821 - protein, 578 aa, Unknown
  Description of Unknown: Integrase B822 sequence
  PTHR30461:SF3,cd00338,SM00857,G3DSA:1.10.10.2600,IPR036162, PF13408,PS51737,IPR025827,G3DSA:3.40.50.1390,IPR006119, IPR038109,PF07508,SSF53041,IPR011109,PTHR30461, PS51736,Coil,PF00239
MAKKKKPAGGIAVIYARYSSHNQRDVSIEQQIEACRKHAAELGLTIIATYEDRAISGRTDNRPAFQRLMHDAEKGKFSYVLAWKSNRMGRNMMQAMVNESRLMDCGIKVYYAEEDFDDSAAGRFALRSMMNVNQFYSDNLAEDVRRGLMDNANKCMVNGRQPLGYKRGKDGKVVVDEPAAAIVREVYTRVASGELFTDIARDLNRRGIKTADKGEWNKNSFHRLCSNEKYRGIYIYGDVRIEGGIPTIIDDPLWYKVQEALRVKKLKRNGRHRPGDEDYLLTGKLRCGKCGGYMIGMSGRSKTGNIHYYYACQNRRVGRTCDKKNIRRDVIEPAVAQAIKEYCLTDDAIEWIADKTVEYWEKADRNLQLDSIEGDLVAVQSSISNVMKAIEMGVVTETTRDRLIELEKQRTDLKSKLALAKEEVVHVDRKKLISSLLLFRNGDIHDRQYQEDLFKTFLISVYVYDDDNNGHLKIVFNAFGDNNTVDLPIDFGETDNQSAFSDGAEKFDYSLHRSTRKPSDSFRWLFCFISRCVFGPVRHKALIFSRLPGLYCFLMQQGNTEDRSQANEHLGRIRQRTV

SEQ ID NO: 822 - protein, 578 aa, Unknown
  Description of Unknown: Integrase B823 sequence
  PTHR30461:SF3,IPR036162,PS51737,IPR011109,PTHR30461, PS00397,PF00239,G3DSA:1.10.10.2600,IPR006119,SSF53041, cd00338,SM00857,IPR025827,IPR038109,PS51736, IPR006118,PF13408,G3DSA:3.40.50.1390,PF07508,Coil
MGYVTKKAAQRFEEKKAAIYVRVSTQYQVDRASLPVQREELINYAKYALGISDYVIFEDAGYSAKNTDRPDYQQMMARMRTGEFSHLLVWKIDRISRNLLDFSVMYAELKELGVVFVSKNEQFDTSSAMGEAMLKIILIFAELERKTTSERVSAVFVSRANDGIWNGGKVPYGYSYDKESKTFSIAEDEAKIVRLIYSLYESEKSIVRVARIMNERGLKSRAGSDWSPTTVHTILSSPFYSGTYRYNYRDESNAKRFREKGKDEWVLVENHHPAIVSPERQAAVGVILESKRYNKNATYQRKNVHVFAGLLTCGCCGSTMAATTDKVRADGWRPSMYICSRRRKSEDCTNKYVSDVTLGPFVLNFFANLIKASNSFGRTTSIETLEKKLLRGEALSHVDHIERPGLEELYNHLRSGFDEKCFESPTIAATESSADLSERDLLLSEKRRLERALNRLKTIYLYGDDEMASKDFNIERERITKALSEVDSRINELDIANTFDLSLSDEAFMQKASQFILTQQLLDKRYVNYERFIRKIDPKIVKDFLNETVSNFCIKDGLTTSILLKNGIELRFSYKTAE

SEQ ID NO: 823 - protein, 578 aa, Unknown
  Description of Unknown: Integrase B824 sequence
  PTHR30461:SF3,SM00857,G3DSA:1.10.10.2600,IPR036162,PF13408, IPR025827,G3DSA:3.40.50.1390,PS51737,IPR006119,IPR038109, PF07508,SSF53041,IPR011109,PTHR30461,Coil, PS51736,cd00338,PF00239
MDIHDIRQQLRTKSIYDISLRVTYYARVSSESDEQLNSLGNQIQYYEDFIRRNAAWTFVPGYIDEGLSGISTKHRENFNRMVEDAAEDKFDLIITKEISRFARNTLDSIQFTRQLLSYGVGVFFQNDNINTFDEDSELRLSIMSSIAQDELRKLSSRVKFGHQQAIRNNVVLGNSRIFGYRKDQKRLVIDDEQAPMVRELFELYATDRYSMKQIETLFWEKGYRNLNGKKIAHTTMSNMISNPKYKGYYVGNKVKVVDMFTKKQKFLPPEEWVMFKDETGEIVPAIVSEELWEQANAVLRRRSDDVKNRQGVCNHANLLTGKLYCTCCGTAYYRRESQDRQGNKNSKWVCSGKIKNGADSCDSFPIYEDEIKPLLLDVFRDTEASAEALIEEYVELYKSLNRGGKLDKQIASLQKQLETVEQKRMKLLTYNAQGKLDDADFLAMNKKCSAEARELQTQLTEALTQQESTGSLKQQLDTIRTVLRNAQKDAAKGVITKEFVTRYIDKIFATPEEDGSLRLDIKIFTGESCEKHLQNLRRQAAAQTVVPQAVAAFSPAGDPEVFTGHTFKKMIESYEKNL

SEQ ID NO: 824 - protein, 578 aa, Unknown
  Description of Unknown: Integrase B825 sequence
  PTHR30461:SF3,IPR036162,PS51737,IPR011109,PTHR30461, PS00397,PF00239,G3DSA:1.10.10.2600,IPR006119,SSF53041, cd00338,SM00857,IPR025827,IPR038109,PS51736, IPR006118,PF13408,G3DSA:3.40.50.1390,PF07508,Coil
MGYVTKKAAQRFEEKKAAIYVRVSTQYQVDRASLPVQREELINYAKDALGISDYVIFEDAGYSAKNTDRPDYQQMMARMRTGEFSHLLVWKIDRISRNLLDFSIMYAELKELGVVFVSKNEQFDTSSAMGEAMLKIILIFAELERKTTSERVSAVFVSRANDGIWNGGKVPYGYSYDKEGKTFSIAEDEAKIVRLIYSLYESEKSIVRVARIMNERGLKSRAGNDWSPTTVHTILSSPFYSGTYRYNYRDESNTKRFHEKGKDEWVLVENHHPAIVSPERQAAVGVILESKRYNKNATYQRKNVHVFAGLLTCGCCGSTMAATTDKVRADGWRPSMYICSRRRKSEDCTNKYVSDVTLGPFVLNFFANLIKASNSFGRTTSIETLEKKLLRGEALARVDHIERPGLEELYNHLRSGFDEKRFESPTIAATESSADLSERDLLLSEKRRLERALNRLKTIYLYGDDEMASKDFNIERERITKALSEVDSRINELDIANAFDLSLSDEAFMQKASQFILTQQLLDKRYVNYERFIRKIDPKIVKDFLNETVSNFCIKDGLTTSILLKNGIELRFSYKTAE

SEQ ID NO: 825 - protein, 578 aa, Unknown
  Description of Unknown: Integrase B826 sequence
  PTHR30461:SF3,IPR036162,PS51737,IPR011109,PTHR30461, PS00397,PF00239,G3DSA:1.10.10.2600,IPR006119,SSF53041, cd00338,SM00857,IPR025827,IPR038109,PS51736, IPR006118,PF13408,G3DSA:3.40.50.1390,PF07508,Coil
MGYVVKKAAQRFEEKKAAIYVRVSTQYQVDRASLPVQREELINYAKYALGISDYVIFEDAGYSAKNTDRPDYQQMMARMRTGEFSHLLVWKIDRISRNLLDFSVMYAELKELGVVFVSKNEQFDTSSAMGEAMLKIILIFAELERQTTSERVSAVFVSRANDGIWNGGKVPYGYSYDKESKTFSIVEDEAKVVRLIYSLYEAEKSIVRVARTMNERGIKTRAGNDWSPTTVHTVLSSPFYSGTYRYNYRDESNAKVYRAKDKDEWVLVENHHPVIVSPERQAAVGVILESKHYNKNATYQRKNVHVFAGLLTCGCCGSTMAATTDKVRADGWRPSMYICSRRRKSDDCTNKYVSDVSLGPFVLNFFANLIKASNSFGRTTSIETLEKKLLRGEALSRVDHIERPGLEELYNHLRSGFDEKRFESPTIAATESSADLSERDLLLSEKRRLERALNRLKTIYLYGDDEMASKDFNIERERITKALSEVDSRINELDIANAFDLSLSDKAFMQKASQFILTQQLLDKRYVNYERFIRKIDPKIVKDFLNETVSNFCIKNGLTTSILLKNGIELRFSYKTAE

SEQ ID NO: 826 - protein, 578 aa, Unknown
  Description of Unknown: Integrase B827 sequence
  PTHR30461:SF3,IPR036162,PS51737,IPR011109,PTHR30461, PS00397,PF00239,G3DSA:1.10.10.2600,IPR006119,SSF53041, cd00338,SM00857,IPR025827,IPR038109,PS51736, IPR006118,PF13408,G3DSA:3.40.50.1390,PF07508,Coil
MGYVTKKAAQRFEEKKAAIYVRVSTQYQVDRASLPVQREELINYAKYALGISDYVIFEDAGYSAKNTDRPDYQQMMSRMRTGEFSHLLVWKIDRISRNLLDFSVMYAELKELGVVFVSKNEQFDTSSAMGEAMLKIILIFAELERKTTSERVSAVFVSRANDGIWNGGKVPYGYSYDKESKTFSIAEDEAKIVRLIYSLYESEKSIVRVARIMNERGLKSRAGNDWSPTTVHTILSSPFYSGTYRYNYRDESNTKRFREKGKDEWVLVENHHPAIVSPERQAAVGVILESKRYNKNATYQRKNVHVFAGLLTCGCCGATMAATTDKVRADGWRPSMYICSRRRKSEDCTNKYVSDVTLGPFVLNFFANLIKASNSFGRTTSIETLEKKLLRGEALSCVDHIERPGLEELYNHLRSGFDEKCFESPTIAATESSADLSERDLLLSEKRRLERALNRLKTIYLYGDDEMASKDFNIERERITKALSEVDSRINELDIANAFDLSLSDEAFMQKASQFILTQQLLDKRYVNYERFIRKIDPKIVKDFLNETVSNFCIKDGLTTSILLKNGIELRFSYKTAE

SEQ ID NO: 827 - protein, 578 aa, Unknown
  Description of Unknown: Integrase B828 sequence
  PTHR30461:SF3,IPR036162,PS51737,IPR011109,PTHR30461, PS00397,PF00239,G3DSA:1.10.10.2600,IPR006119,SSF53041, cd00338,SM00857,IPR025827,IPR038109,PS51736, IPR006118,PF13408,G3DSA:3.40.50.1390,PF07508,Coil
MGYVTKKVAQRFEEKKAAIYVRVSTQYQVDRASLPVQREELINYAKYALGISDYVIFEDAGYSAKNTDRPDYQQMMARMRTGEFSHLLVWKIDRISRNLLDFSVMYAELKELGVVFVSKNEQFDTSSAMGEAMLKIILIFAELERKTTSERVSAVFVSRANDGIWNGGKVPYGYSYDKESKTFSIAEDEAKIVRLIYSLYESEKSIVRVARIMNERGLKSRAGNDWSPTTVHMILSSPFYSGTYRYNYRDESNTKRFREKGKDEWVLVENHHPAIVSPERQAAVGVILESKRYNKNATYQRKNVHVFAGLLTCGCCGSTMAATTDKVRADGWRPSMYICSRRRKSDDCTNKYVSDVSLGPFVLNFFANLIKASNSFGRTTSIETLEKKLLRGEALSRVDRIERPGLEELYNHLRSGFEEKRFESPTIAATESSVDLSERDLLLSEKRRLERALNRLKTVYLYGDDEMASKDFNIEREHITKALSEVDSRINELDIANAFDLSLSDEAFMQKASQFILTQQLLDKRYVNYERFIRKIDPKIVKDFLNETVSNFCIKDGLTTSILLKNGIELRFSYKTAE

SEQ ID NO: 828 - protein, 578 aa, Unknown
  Description of Unknown: Integrase B829 sequence
  PTHR30461:SF3,cd00338,SM00857,G3DSA:1.10.10.2600,IPR036162, PF13408,PS51737,G3DSA:3.40.50.1390,IPR025827,IPR006119, IPR038109,PF07508,SSF53041,IPR011109,PTHR30461, PS51736,Coil,PF00239
MAKKKKPAGGIAVIYARYSSHNQRDVSIEQQIEACRKHAAELGLTIIATYEDRAISGRTDNRPAFQRLMHDAEKGKFSYVLAWKSNRMGRNMMQAMVNESRLMDCGIKVYYAEEDFDDSAAGRFALRSMMNVNQFYSDNLAEDVRRGLMDNANKCMVNGRQPLGYKRGKDGKVVVDEPAAAIVREVYTRVASGELFTDIARDLNRRGIKTADKGEWNKNSFHRLCSNEKYRGIYIYGDIRIEGGIPTIIDDTLWYKVQEALRVKKLKRNGRHRPGDEDYLLTGKLRCGKCGGYMIGMSGRSKTGDIHYYYACQNRRVGRTCDKKNIRRDVIEPAVAQAIKEYCLTDDAIEWIADKTVEYWEKADRNLQLDSIEGDLAAVQSSISNVMKAIEMGVVTETTRDRLIELEKQRTDLKSKLALAKEEVVHVDRKKLISSLLLFRNGDIHDRQYQEDLFKTFLISVYVYDDDDNGHLKIVFNAFGDNNTVDLPIDFGETDNQSAFSDGAEKFDYSLHRSTRKPSDSFRWLFCFVSRCVFGPVRHKALIFSRLPGLYCFLMQQGNTEDRSQANEHLGRIRQRTV

SEQ ID NO: 829 - protein, 578 aa, Unknown
  Description of Unknown: Integrase B830 sequence
  PTHR30461:SF3,IPR036162,PS51737,IPR011109,PTHR30461, PS00397,PF00239,G3DSA:1.10.10.2600,IPR006119,SSF53041, cd00338,SM00857,IPR025827,IPR038109,PS51736, IPR006118,PF13408,G3DSA:3.40.50.1390,PF07508,Coil
MGYVTKKAAQRFEEKKAAIYVRVSTQYQVDRASLPVQREELINYAKYALGISDYVIFEDAGYSAKNTDRPDYQQMMARMRTGEFSHLLVWKIDRISRNLLDFSVMYAELKELGVVFVSKNEQFDTSSAMGEAMLKIILIFAELERKTTSERVSAVFVSRANDGIWNGGKVPYGYSYDKESKTFSIAEDEAKIVRLIYSLYESEKSIVRVARIMNERGLKSRAGSDWSPTTVHTILSSPFYSGTYRYNYRDESNTKRFREKGKDEWVLVENHHPAIVPPERQAAVGVILESKRYNKNATYQRKNVHVFAGLLTCGCCGSTMAATTDKVRADGWRPSMYICSRRRKSEDCTNKYVSDVTLGPFVLNFFANLIKASNSFGRTTSIETLEKKLLRGEALSRVDHIERPGLEELYNHLRSGFDEKRFESPTIAATESSADLSERDLLLSEKRRLERALNRLKTIYLYGDDEMASKDFNIERERITKALSEVDSRINELDIANAFDLSLSDEAFMQKASQFILTQQLLDKRYVNYERFIRKIDPKIVKDFLNETVSNFCIKDGLTTSILLKNGIELRFSYKTAE

SEQ ID NO: 830 - protein, 578 aa, Unknown
  Description of Unknown: Integrase B831 sequence
  PTHR30461:SF3,IPR036162,PS51737,IPR011109,PTHR30461, PS00397,PF00239,G3DSA:1.10.10.2600,IPR006119,SSF53041, cd00338,SM00857,IPR025827,IPR038109,PS51736, IPR006118,PF13408,G3DSA:3.40.50.1390,PF07508,Coil
MGYVTKKAAQRFEEKKAAIYVRVSTQYQVDRASLPVQREELINYAKYALGISDYVIFEDAGYSAKNTDRPDYQQMMARMRTGEFSHLLVWKIDRISRNLLDFSVMYAELKELGVVFVSKNEQFDTSSAMGEAMLKIILIFAELERKTTSERVSAVFVSRANDGIWNGGKVPYGYSYDKESKTFSIAEDEAKIVRLIYSLYESEKSIVRVARIMNERGLKSRAGSDWSPTTVHTILSSPFYSGTYRYNYRDESNAKRFREKGKDEWVLVENHHPAIVSPERQAAVGVILESKRYNKNATYQRKNVHVFAGLLTCGCCSSTMAATTDKVRADGWRPSMYICSRRRKSEDCTNKYVSDVTLGPFVLNFFANLIKASNSFGRTTSIETLEKKLLRGEALSHVDHIERPGLEELYNHLRSGFDEKCFESPTIAATESSADLSERDLLLSEKRRLERALNRLKTIYLYGDDEMASKDFNIERERITKALSEVDSRINELDIANAFDLSLSDEAFMQKASQFILTQQLLDKRYVNYERFIRKIDPKIVKDFLNETVSNFCIKDGLTTSILLKNGIELRFSYKTAE

SEQ ID NO: 831 - protein, 578 aa, Unknown
  Description of Unknown: Integrase B832 sequence
  PTHR30461:SF3,IPR036162,PS51737,IPR011109,PTHR30461, PS00397,PF00239,G3DSA:1.10.10.2600,IPR006119,SSF53041, cd00338,SM00857,IPR025827,IPR038109,PS51736, IPR006118,PF13408,G3DSA:3.40.50.1390,PF07508,Coil
MGYVVKKAAQRFEEKKAAIYVRVSTQYQVDRASLPVQREELINYAKYALGISDYVIFEDAGYSAKNTDRPDYQQMMARMRTGEFSHLLVWKIDRISRNLLDFSVMYAELKELGVVFVSKNEQFDTSSAMGEAMLKIILIFAELERKTTSERVSAVFVSRANDGIWNGGKVPYGYSYDKEGKTFSIAEDEAKIVRLIYSLYESEKSIVRVARIMNERGLKSRAGNDWSPTTVHTILSSPFYSGTYRYNYRDESNTKRFREKGKDEWVLVENHHPAIVSPERQAAVGVILESKRYNKNATYQRKNVHVFAGLLTCGCCGSTMAATTDKVRADGWRPSMYICSRRRKSEDCTNKYVSDVALGPFVLNFFANLIKASNSFGRTTSIETLEKKLLHGEALSRVDHIERPGLEELYNHLRSGFDEKRFESPTIAATESSADLSERDLLLSEKRRLERALNRLKTIYLYGDDEMASKDFNIERERITKALSEVDSRIDELDIANAFDLSLSDEAFMQKASQFILTQQLLDKRSVNYERFIRKIDPKIVKDFLNETVSNFCIKDGLTTSILLKNGIELRFSYKTAE

SEQ ID NO: 832 - protein, 578 aa, Unknown
  Description of Unknown: Integrase B833 sequence
  PTHR30461:SF3,IPR036162,PS51737,IPR011109,PTHR30461, PS00397,PF00239,G3DSA:1.10.10.2600,IPR006119,SSF53041, cd00338,SM00857,IPR025827,IPR038109,PS51736, IPR006118,PF13408,G3DSA:3.40.50.1390,PF07508,Coil
MGYVTKKAAQRFEEKKAAIYVRVSTQYQVDRASLPVQREELINYAKYALGISDYVIFEDAGYSAKNTDRPDYQQMMARMRTGEFSHLLVWKIDRISRNLLDFSVMYAELKELGVVFVSKNEQFDTSSAMGEAMLKIILIFAELERKTTSERVSAVFVSRANDGIWNGGKVPYGYSYDKESKTFSIAEDEAKIVRLIYSLYESEKSIVRVARIMNERGLKSRAGNDWSPTTVHTILSSPFYSGTYRYNYRDESNTKRFREKGKDEWVLVENHHPAIVSPERQATVGVILESKRYNKNATYQRKNVHVFAGLLTCGCCGATMAATTDKVRADGWRPSMYICSRRRKSEDCTNKYVSDVTLGPFVLNFFANLIKASNSFGRTTSIETLEKKLLRGEALSRVDHIERPGLEELYNHLRSGFDEKCFESPTIAATESSADLSERDLLLSEKRRLERALNRLKTIYLYGDDEMASKDFNIERERITKALSEVDSRINELDIANAFDLSLSDEAFMQKASQFILTQQLLDKRYVNYERFIRKIDPKIVKDFLNETVSNFCIKDGLTTSILLKNGIELRFSYKTAE

SEQ ID NO: 833 - protein, 578 aa, Unknown
  Description of Unknown: Integrase B834 sequence
  PTHR30461:SF3,IPR036162,PS51737,IPR011109,PTHR30461, PS00397,PF00239,G3DSA:1.10.10.2600,IPR006119,SSF53041, cd00338,SM00857,IPR025827,IPR038109,PS51736, IPR006118,PF13408,G3DSA:3.40.50.1390,PF07508,Coil
MGYVVKKAAQRFEEKKAAIYVRVSTQYQVDRASLPVQREELINYAKYALGISDYVIFEDAGYSAKNTDRPDYQQMMARMRTGEFSHLLVWKIDRISRNLLDFSVMYAELKELGVVFVSKNEQFDTSSAMGEAMLKIILIFAELERKTTSERVSAVFVSRANDGIWNGGKVPYGYSYDKESKTFSIAEDEAKIVRLIYSLYESEKSIVRVARIMNERGLKSRAGSDWSPTTVHTILSSPFYSGTYRYNYRDESNAKRFREKGKDEWVLVENHHPAIVSPERQAAVGVILESKHYNKNATYQRKNVHVFAGLLTCGCCGSTMAATTDKVRADGWRPSMYICSRRRKSEDCTNKYVSDVTLGPFVLNFFANLIKASNSFGRTTSIETLEKKLLRGEALSHVDHIERPGLEELYNHLRSGFDEKCFESPTIAATESSADLSERDLLLSEKRRLERALNRLKTIYLYGDDEMASKDFNIERERITKALSEVDSRINELDIANAFDLSLSDEAFMQKASQFILTQQLLDKRYVNYERFIRKIDPKIVKDFLNETVSNFCIKDGLTTSILLKNGIELRFSYKTAE

SEQ ID NO: 834 - protein, 578 aa, Unknown
  Description of Unknown: Integrase B835 sequence
  PTHR30461:SF3,IPR036162,PS51737,IPR011109,PTHR30461, PS00397,PF00239,G3DSA:1.10.10.2600,IPR006119,SSF53041, cd00338,SM00857,IPR025827,IPR038109,PS51736, IPR006118,PF13408,G3DSA:3.40.50.1390,PF07508,Coil
MGYVTKKVAQRFEEKKAAIYVRVSTQYQVDRASLPVQREELINYAKYALGISDYVIFEDAGYSAKNTDRPDYQQMMARMRTGEFSHLLVWKIDRISRNLLDFSVMYAELKELGVVFVSKNEQFDTSSAMGEAMLKIILIFAELERKTTSERVSAVFVSRANDGIWNGGKVPYGYSYDKESKTFSIAEDEAKIVRLIYSLYESEKSIVRVARIMNERGLKSRAGNDWSPTTVHMILSSPFYSGTYRYNYRDESNTKRFREKGKDEWVLVENHHPAIVSPERQAAVGVILESKRYNKNATYQRKNVHVFAGLLTCGCCGSTMAATTDKVRADGWRPSMYICSRRRKSDDCTNKYVSDVSLGPFVLNFFANLIKASNSFGRTTSIETLEKKLLRGEALSRVDHIERPGLEELYNHLRSGFEEKRFESPTIAATESSADLSERDLLLSEKRRLERALNRLKTVYLYGDDEMASKDFNIERERITKALSEVDSRINELDIANAFDLSLSDEAFMQKASQFILTQQLLDKRYVNYERFIRKIDPKIVKDFLNETVSNFCIKDGLTTSILLKNGIELRFSYKTAE

SEQ ID NO: 835 - protein, 578 aa, Unknown
  Description of Unknown: Integrase B836 sequence
  PTHR30461:SF3,IPR036162,PS51737,IPR011109,PTHR30461, PS00397,PF00239,G3DSA:1.10.10.2600,IPR006119,SSF53041, cd00338,SM00857,IPR025827,IPR038109,PS51736, IPR006118,PF13408,G3DSA:3.40.50.1390,PF07508,Coil
MGYVTKKAAQRFEEKKAAIYVRVSTQYQVDRASLPVQREELINYAKYALGISDYVIFEDAGYSAKNTDRPDYQQMMSRMRTGEFSHLLVWKIDRISRNLLDFSVMYAELKELGVVFVSKNEQFDTSSAMGEAMLKIILIFAELERKTTSERVSAVFVSRANDGIWNGGKVPYGYSYDKESKTFSIAEDEAKIVRLIYSLYESEKSIVRVARIMNERGLKSRAGNDWSPTTVHTVLSSPFYSGTYRYNYRDESNTKRFREKGKDEWVLVENHHPAIVSPERQAAVGLILESKRYNKNATYQRKNVHVFAGLLTCGCCGATMAATTDKVRADGWRPSMYICSRRRKSEDCTNKYVSDVTLGPFVLNFFANLIKASNSFGRTTSIETLEKKLLRGEALSCVDHIERPGLEELYNHLRSGFDEKCFESPTIAATESSADLSERDLLLSEKRRLERALNRLKTIYLYGDDEMASKDFNIERQRITKALSEVDSRINELDIANAFDLSLSDEAFMQKASQFILTQQLLDKRYVNYERFIRKIDPKIVKDFLNETVSNFCIKDGLTTSILLKNGIELRFSYKTAE

SEQ ID NO: 836 - protein, 578 aa, Unknown
  Description of Unknown: Integrase B837 sequence
  PTHR30461:SF3,IPR036162,PS51737,IPR011109,PTHR30461, PS00397,PF00239,G3DSA:1.10.10.2600,IPR006119,SSF53041, cd00338,SM00857,IPR025827,IPR038109,PS51736, IPR006118,PF13408,G3DSA:3.40.50.1390,PF07508,Coil
MGYVTKKAAQRFEEKKAAIYVRVSTQYQVDRASLPVQREELINYAKYALGISDYVIFEDAGYSAKNTDRPDYQQMMARMRTGEFSHLLVWKIDRISRNLLDFSVMYAELKELGVVFVSKNEQFDTSSAMGEAMLKIILIFAELERKTTSERVSAVFVSRANDGIWNGGKVPYGYSYDKEGKTFSIAEDEAKIVRLIYSLYESEKSIVRVARIMNERGLKSRAGSDWSPTTVHTILSSPFYSGTYRYNYRNESNRKRFREKGKDEWVLVENHYPAIVSPERQAAVGVILESKRYNKNATYQRKNVHVFAGLLTCGCCGSTMAATTDKVRADGWRPSMYICSRRRKSEDCTNKYVSDVSLGPFVLNFFANLIKASNSFGRTTSIETLEKKLLRGEALSRVDHIERPGLEELYNHLRSGFDEKRFESPTIAATESSADLSERDLLLSEKRRLERALNRLKTIYLYGDDEMASKDFNIERERITKALSEVDSRINELDIANAFDLSLSDEAFMQKASQFILTQQLLDKRYVNYERFIRKIDPKIVKDFLNETVSNFCIKDGLTTSILLKNGIELRFSYKTAE

SEQ ID NO: 837 - protein, 578 aa, Unknown
  Description of Unknown: Integrase B838 sequence
  PTHR30461:SF3,IPR036162,PS51737,IPR011109,PTHR30461, PS00397,PF00239,G3DSA:1.10.10.2600,IPR006119,SSF53041, cd00338,SM00857,IPR025827,IPR038109,PS51736, IPR006118,PF13408,G3DSA:3.40.50.1390,PF07508,Coil
MGYVTKKAAQRFEEKKAAIYVRVSTQYQIDRASLPVQREELINYAKYALGISDYVIFEDAGYSAKNTDRPDYQQMMARMRTGEFSHLLVWKIDRISRNLLDFSVMYAELKELGVVFVSKNEQFDTSSAMGEAMLKIILIFAELERKTTSERVSAVFVSRANDGIWNGGKVPYGYSYDKESKTFSIAEDEAKIVRLIYSLYESEKSIVRVARIMNERGLKSRAGNDWSPTTVHTILSSPFYSGTYRYNYRDESNTKRFREKGKDEWVLVENHHPAIVSPERQAAVGGILESKRYNKNATYQRKNVHVFAGLLTCGCCGATMAATTDKVRADGWRPSMYICSRRRKSEDCTNKYVSDVTLGPFVLNFFANLIKASNSFGRTTSIETLEKKLLRGEALSCVDHIERPGLEELYNHLRSGFDEKCFESPTIAATESSADLSERDLLLSEKRRLERALNRLKTIYLYGDDEMASKDFNIERERITKALSEVDSRINELDIANAFDLSLSDEAFMQKASQFILTQQLLDKRYVNYERFIRKIDPKIVKDFLNETVSNFCIKDGLTTSILLKNGIELRFSYKTAE

SEQ ID NO: 838 - protein, 578 aa, Unknown
  Description of Unknown: Integrase B839 sequence
  PTHR30461:SF3,IPR036162,PS51737,IPR011109,PTHR30461, PS00397,PF00239,G3DSA:1.10.10.2600,IPR006119,SSF53041, cd00338,SM00857,IPR025827,IPR038109,PS51736, IPR006118,PF13408,G3DSA:3.40.50.1390,PF07508,Coil
MGYVTKKAAQRFEEKKAAIYVRVSTQYQVDRASLPVQREELINYAKYALGISDYVIFEDAGYSAKNTDRPDYQQMMARMRTGEFSHLLVWKIDRISRNLLDFSVMYAELKELGVVFVSKNEQFDTSSAMGEAMLKIILIFAELERKTTSERVSAVFVSRANDGIWNGGKVPYGYSYDKESKTFSIAEDEAKIVRLIYSLYESEKSIVRVARIMNERGLKSRAGNDWSPTTVHTILSSPFYSGTYRYNYRDESNTKRFREKGKDEWVLVENHHPAIVSPERQAAVGVILESKRYNKNATYQRKNVHVFAGLLTCGCCGATMAATTDKVRADGWRPSMYICSRRRKSEDCTNKYVSDVTLGPFVLNFFANLIKASNSFGRTTSIETLEKKLLRGEALSCVDHIERPGLEELYNHLRSGFDEKCFESPTIAATESSADLSERDLLLSEKRRLERALNRLKTIYLYGDDEMASKDFNIERERITKALSEVDSRINELDIANAFDLSLSDEAFMQKASQFILTQQLLDKRYVNYERFIRKIDPKIVKDFLNETVSNFCIKDGLTTSILLKNGIELRFSYKTAE

SEQ ID NO: 839 - protein, 578 aa, Unknown
  Description of Unknown: Integrase B840 sequence
  PTHR30461:SF3,IPR036162,PS51737,IPR011109,PTHR30461, PS00397,PF00239,G3DSA:1.10.10.2600,IPR006119,SSF53041, SM00857,IPR025827,IPR038109,PS51736,cd03768, IPR006118,PF13408,G3DSA:3.40.50.1390,PF07508,Coil
MAYPMKNTAADNRIIAIYVRVSTGYQVDKDSLPFQKKELKAYCKHILHVDLSQVEIFEDAGRSGKNTKRPAYERMMEKVRAGLVSHVLVYKIDRISRNLVDFSLMYDDFKYNRVTFISLNEQFDTSSAIGEAVLKIILVFAELERKLTSERVKDIMIGRATEGKWNGARVPYGWDWDPDAEQPVHSKIEAPYARGMYEMYLKVRSTGKIRDYNNAHGIPTKRGGEWTSKTVSDFLRNPMNKGDYRYNYRESARGRKKPEDEVIYQEGVFEPLVDPEMWERVNRIMDDNASKRNTGGLHPIMKNCNVFAGLIQCAECSSGFQVVKKDRRRKNGFAPSMYGCTSRFRKIHCPAPNVSEVQIGPFVINYISAMVHATKERFKIHSPAALEFMLLSDPIFANIAGIESQGLNETFALLTGVSVSGSALWRTDPVKQSDTAATSSEIENLKKQIQKYNRAKERLEDAYYFSDDAMSEKEYLEKKNKFDAARVAAENKLKELTEVQIASHVDDSGFMKSASAFLLAHQLHAGVHIEYRDFAVTVEEESLKEFMNLVLDHISVKDRRVVEIVFSNGLSHRFIYRE

SEQ ID NO: 840 - protein, 578 aa, Unknown
  Description of Unknown: Integrase B841 sequence
  PTHR30461:SF3,SM00857,G3DSA:1.10.10.2600,IPR036162,PF13408, IPR025827,G3DSA:3.40.50.1390,PS51737,IPR006119,IPR038109, PF07508,IPR011109,SSF53041,PTHR30461,Coil, PS51736,cd00338,PF00239
MDVVGYCRFSSEAQRDGYSIEAQVRAITEWAAREGHTIKKFYIDEARSGTNDNREDFQNMVADAASGTFRAVVVHKLDRFARDRYDSAVYRHKLKTHGVRVISVLEPLDDSPESVMMEAVLEGMAEYYSRNLSREVRKGKKEVALKAQHNGGPVPYGYRVDEQMRYVPIPEEAAVIREIFSRLDGGSSYADVTRWAISQGLRTRRGSYFNEAFIAHMTTNTMLVGRFSYGLRSKVGQEPIIIEDAIEPIVDANVFWRVHNATLARKRGPRPRVKEDDYILTGYLFCAHCGSHLFGFKSKKEYKSRNGADRLYEARFYRCARKDPMKHNRRHEPDVVLQRCHLRSIRKDVLETFVFSAIENVLFSQATMDWVVAELSVRLKQRKQNAQNNAADANAYRKELEKVRNQKARLLDLYLSEALDKATFALKSRELDSREGFLDGEIKRLSTPVSIFVEPDKIKTALEGFIKSPNADSSEYKKRLLATFVDSIAVSNEKIVIYFKFPIPGAGDKAERSFDDFVRKTTSVSTLEVCANISYKRMFSILYAPLSMFPLTILPFSCFKEPIRSPASRARVDGEQET

SEQ ID NO: 841 - protein, 578 aa, Unknown
  Description of Unknown: Integrase B842 sequence
  PTHR30461:SF3,IPR036162,PS51737,IPR011109,PTHR30461, PS00397,PF00239,G3DSA:1.10.10.2600,IPR006119,SSF53041, cd00338,SM00857,IPR025827,IPR038109,PS51736, IPR006118,PF13408,G3DSA:3.40.50.1390,PF07508,Coil
MGYVTKKAAQRFEEKKAAIYVRVSTQYQVDRASLPVQREELINYAKYALGISDYVIFEDAGYSAKNTDRPDYQQMMSRMRTGEFSHLLVWKIDRISRNLLDFSVMYAELKELGVVFVSKNEQFDTSSAMGEAMLKIILIFAELERKTTSERVSAVFVSRANDGIWNGGKVPYGYSYDKESKTFSIAEDEAKIVRLIYSLYESEKSIVRVARIMNERGLKSRAGNDWSPTTVHTVLSSPFYSGTYRYNYRDESNTKRFREKGKDEWVLVENHHPAIVSPERQVAVGLILESKRYNKNATYQRKNVHVFAGLLTCGCCGATMAATTDKVRADGWRPSMYICSRRRKSEDCTNKYVSDVTLGPFVLNFFANLIKASNSFGRTTSIETLEKKLLRGEALSRVDHIERPGLEELYNHLRSGFDEKCFESPTIAATESSADLSERDLLLSEKRRLERALNRLKTIYLYGDDEMASKDFNIERERITKALSEVDSRINELDIANAFDLSLSDEAFMQKASQFILTQQLLDKRYVNYERFIRKIDPKIVKDFLNETVSNFCIKDGLTTSILLKNGIELRFSYKTAE

SEQ ID NO: 842 - protein, 578 aa, Unknown
  Description of Unknown: Integrase B843 sequence
  PTHR30461:SF3,IPR036162,PS51737,IPR011109,PTHR30461, PS00397,PF00239,G3DSA:1.10.10.2600,IPR006119,SSF53041, SM00857,IPR025827,IPR038109,PS51736,cd03768, IPR006118,PF13408,G3DSA:3.40.50.1390,PF07508,Coil
MNTLSALNITPSPPRMCRVAIYIRVSTLQQVDKDSLPMQRKDLIAYSKLILNTDDYVIFEDAGYSGKNTIRPRYQDMMDQIRTGAFTHLLVWKIDRISRNLLDFAQMYQELKELNVTFVSKNEQFNTSTAMGEAMLKIILVFAELERNMTSERVTATMISRANTGKWNGGRVPYGYKYDQEEEDFLIIASESNVVKLIHDKYEELQSLVYLARYMNEHGYRTRSGNEWSPPSLAIILKSWWYCGCYEYNKRKAGNRQKLKDESEWIMIEDHHIAIISYDQKERVLAILKGNKRFATEHNLYVKGIHVHVFGGLCWCRNCGKKMTSTSSNKNRSWQYSKYLCSTRRRSLTKCRGRSTSDPVLGEFIFNYILNMLNAQKGFDSIHSPADLQAALLTGDAFSDIKSIDREELNDLYNTLSSNVSGNIYGRSFNVNKEKKNDEVQSSLTILKSEKKKLDRALDRLTNLYLYDDMAISEKDYMIKKTEIETRIAEIDEKIGIVNKNSVDDSITDEEFVDKASTFIITQKLTDRNYISYKRLATSIDPKILYMFTHDVIDYIDIYNGKVQRIVFRNGLSQTFIR

SEQ ID NO: 843 - protein, 578 aa, Unknown
  Description of Unknown: Integrase B844 sequence
  PTHR30461:SF3,IPR036162,PS51737,IPR011109,PTHR30461, PS00397,PF00239,G3DSA:1.10.10.2600,IPR006119,SSF53041, cd00338,SM00857,IPR025827,IPR038109,PS51736, IPR006118,PF13408,G3DSA:3.40.50.1390,PF07508,Coil
MGYVTKKAAQRFEEKKAAIYVRVSTQYQVDRASLPVQREELINYAKYALGISDYVIFEDAGYSAKNTDRPDYQQMMARMRTGEFSHLLVWKIDRISRNLLDFSVMYAELKELGVVFVSKNEQFDTSSAMGEAMLKIILIFAELERKTTSERVSAVFVSRANDGIWNGGKVPYGYSYDKESKTFSIAEDEAKIVRLIYSLYESEKSIVRVARIMNERGLKSRAGNDWSPTTVHTILSSPFYSGTYRYNYRDESNTKRFREKGKDEWVLVENHHPAIVSPERQAAVGLILESKRYNKNATYQRKNVHVFAGLLTCGCCGATMAATTDKVRADGWRPSMYICSRRRKSEDCTNKYVSDVTLGPFVLNFFANLIKASNSFGRTTSIETLEKKLLRGEALSCVDHIERPGLEELYNHLRSGFDEKCFESPTIAATESSADLSERDLLLSEKRRLERALNRLKTIYLYGDDEMASKDFNIERERITKALSEVDSRINELDIANAFDLSLSDEAFMQKASQFILTQQLLDKRYVNYERFIRKIDPKIVKDFLNETVSNFCIKDGLTTSILLKNGIELRFSYKTAE

SEQ ID NO: 844 - protein, 577 aa, Unknown
  Description of Unknown: Integrase B845 sequence
  PTHR30461:SF3,IPR036162,PS51737,IPR011109,PTHR30461, PS00397,PF00239,G3DSA:1.10.10.2600,IPR006119,SSF53041, SM00857,IPR025827,IPR038109,PS51736,cd03768, IPR006118,PF13408,G3DSA:3.40.50.1390,PF07508,Coil
MISNSAATHAKVAIYIRVSTLHQIDRDSLPMQRQDLIAYAKLILNTDDVTIFEDAGYSGKNTIRPEFQKMMSQLRTGTYTHLLVWKIDRISRNLLDFAEMYQELKDLGVTFVSKNEQFDTSTAMGEAMLKIILVFAELERNMTSERVTATMISRASNGQWNGGRIPYGYDYDPEEQDFSFNSDEYNIAHLIHDKYEELRSLVYLARYLNEHGYRTRAGNDWSPVSLDIILRSVFYCGDYQYNRLKEGDRQRPKDKSEWITVKDHHPAIVSREQKERILALLESNRRLKSFRKSGKSKYTHIFSGLLICGNCGQPMTSSISTIKKTTGRRYSLYFCPTHRKSKLWCTGKSTSDPIVGEFVFNYILNMLNAQKAFSPETSIQELEQQLLSGDTFSPVAAIAPDGLHDLFHTLRTGTIKGEVFGKDVKIKTGSEPPLQLSKLKKEKVRLERAIDRLNKLFLYSEKAMSESEYLTQKIQLSDSLEEVEDKLAFLASEGSLQQSITDDEFIAKASNFILSQKLTDRNYISFQSLSATVSPEVLDSFLSSIIDNIVFKDGAVNSITFRNGLSHTFIYREKPEV

SEQ ID NO: 845 - protein, 577 aa, Unknown
  Description of Unknown: Integrase B846 sequence
  PTHR30461:SF3,IPR036162,PS51737,IPR011109,PTHR30461, PS00397,PF00239,G3DSA:1.10.10.2600,IPR006119,SSF53041, SM00857,IPR025827,IPR038109,PS51736,cd03768, IPR006118,PF13408,G3DSA:3.40.50.1390,PF07508,Coil
MSINRNNTSETPKKAALYVRVSTNYQIDRDSLPMQRQELITYAQLMFGINDYVVFEDAGYSGKNTDRPEFQNMMRRIRAGEFTHLLCWKIDRISRNLLDFASMYQELKDLGVTFVSKNEQFDTSTAIGEAMLKIILVFAELERNMTSERVTATMLSRAQNGLWNGGRVPYGYDYDKDSKTFSINQEEAFLVRKMYDLYSEHRSLVMVSRALNEDGYASRAGNDWSPVSIFIILTNPFYTGIYRYNHYKIPGLKIEKDPSEWIEVPDHHPRIISDEQFGNVNRILQSNSRSKRLPGQQHTSKGIHIFGGLLYCGTCGSQYVSTPSRLLASGYRPSKYACPNLRKKKTCNTKSISDPVIGEFVLNYVLNMMHARAAFSSIHDTSELQDALLNGGTFQNVDHIGKDGLDSCFHMFSSTPLDGKRFRKPKKATTIDPELKRLRAEKRKTERALDRLMNLYLYADNPISEKDFVIRKQALDDYLKEINENLGMIDRGRGIETISDENFIKRASYFIMSKELAGKDYIYFKKLAMDMDAEILRDFFQEIIDSIVMEGSNVKEIVFRNGLAHTFFYKDTEKPEA

SEQ ID NO: 846 - protein, 577 aa, Unknown
  Description of Unknown: Integrase B847 sequence
  PTHR30461:SF3,IPR036162,PS51737,IPR011109,PTHR30461, PS00397,PF00239,G3DSA:1.10.10.2600,IPR006119,SSF53041, SM00857,IPR025827,IPR038109,PS51736,cd03768, IPR006118,PF13408,G3DSA:3.40.50.1390,PF07508,Coil
MISNSAATHAKVAIYIRVSTLHQIDRDSLPMQRQDLIAYAKLILNTDDVTIFEDAGYSGKNTIRPEFQKMMSQLRTGTYTHLLVWKIDRISRNLLDFAEMYQELKNLGVTFVSKNEQFDTSTAMGEAMLKIILVFAELERNMTSERVTATMISRASNGQWNGGRIPYGYDYDPEEQDFSFNSDEYNIAHLIHDKYEELRSLVYLARYLNEHGYRTRAGNDWSPVSLDIILRSVFYCGDYQYNRLKEGDRQRPKDKSEWITVKDHHPAIVSREQKERILALLESNRRLKSFRKSGKSKYTHIFSGLLICGNCGQPMTSSISTVKKTTGRRYSLYFCPTHRKSKLWCTGKSTSDPIIGEFVFNYILNMLNAQKAFSPETSIQELEQQLLSGDTFSPVAAIAPDGLQDLFHTLRTGTVKGEVFGKDVKIKTDSEPPLQLSKLKKEKIRLERAIDRLNKLFLYSEKAMSESEYLSQKIQLSDALEEVEDKLTFLASEDSLQQSITDNEFIAKASNFILSQKLTDRNYVSFQSLSATVSPEVLDSFLSSIIDNIVFKDGAIHSITFRNGLSHTFIYKEKPEV

SEQ ID NO: 847 - protein, 577 aa, Unknown
  Description of Unknown: Integrase B848 sequence
  PTHR30461:SF3,IPR036162,PS51737,IPR011109,PTHR30461, PS00397,PF00239,G3DSA:1.10.10.2600,IPR006119,SSF53041, SM00857,IPR025827,IPR038109,PS51736,cd03768, IPR006118,PF13408,G3DSA:3.40.50.1390,PF07508,Coil
MISNSAATHAKVAIYIRVSTLHQIDRDSLPMQRQDLIAYAKLILNTDDVTVFEDAGYSGKNTIRPEFQKMMSQLRTGTYTHLLVWKIDRISRNLLDFAEMYQELKDLGVTFVSKNEQFDTSTAMGEAMLKIILVFAELERNMTSERVAATMISRASNGQWNGGRIPYGYDYDPEEQTFSFNSDEYNIAHLIHDKYEELRSLVYLARYLNEHGYRTRAGNDWSPVSLDIILRSVFYCGDYQYNRLKEGDRQRPKDKSEWITVKDHHPAIVSRGQKERILALLESNRRLKSFRKSGKSKYTHIFSGLLICGNCGQPMTSSISTVKKTTGRRYSLYFCPTHRKSKLWCTGKSTSDPIIGEFVFNYILNMLNAQKAFSPETSIQELEQQLLSGDTFSPVAAIAPDGLHDLFHTLRTGTIKGEVFGKDVKIKTGSEPPLQLSKLKKEKVRLERAIDRLNKLFLYSEKAMSESEYLTQKIQLSDSLEEVEDKLAFLASEGSLQQSITDDEFIAKASNFILSQKLTDRNYISFQSLSATVSPEVLDSFLSSIIDNIVFKDGAVNSITFRNGLSHTFIYREKPEV

SEQ ID NO: 848 - protein, 577 aa, Unknown
  Description of Unknown: Integrase B849 sequence
  PTHR30461:SF3,IPR036162,PS51737,IPR011109,PTHR30461, PS00397,PF00239,G3DSA:1.10.10.2600,IPR006119,SSF53041, SM00857,IPR025827,IPR038109,PS51736,cd03768, IPR006118,PF13408,G3DSA:3.40.50.1390,PF07508,Coil
MISNSAATHAKVAIYIRVSTLHQIDRDSLPMQRQDLIAYAKLILNTDDVTIFEDAGYSGKNTIRPEFQKMMSQLRTGTYTHLLVWKIDRISRNLLDFAEMYQELKDLGVTFVSKNEQFDTSTAMGEAMLKIILVFAELERNMTSERVAATMISRASNGQWNGGRIPYGYDYDPEEQTFSFNSDEYNIAHLIHDKYEELRSLVYLARYLNEHGYRTRAGNDWSPVSLDIILRSVFYCGDYQYNRLKEGDRQRPKDKSEWITVKDHHPAIVSRGQKERILALLESNRRLKSFRKSGKSKYTHIFSGLLICGNCGQPMTSSISTVKKTTGRRYSLYFCPTHRKSKLWCTGKSTSDPIIGEFVFNYILNMLNAQKAFSPETSIQELEQQLLSGDTFSPVAAIAPDGLQDLFHTLRTGTVKGEVFGKDVKIKTDSEPPLQLSKLKKEKIRLERAIDRLNKLFLYSEKAMSESEYLTQKIQLSDSLEEVEDKLAFLASEDSLQQSITDDEFISKASNFILSQKLTDRNYVSFQSLSATVSPEVLDSFLSSIIDNIVFKDGAVHSITFRNGLSHTFIYKEKPEV

SEQ ID NO: 849 - protein, 577 aa, Unknown
  Description of Unknown: Integrase B850 sequence
  PTHR30461:SF3,IPR036162,PS51737,IPR011109,PTHR30461, PS00397,PF00239,G3DSA:1.10.10.2600,IPR006119,SSF53041, SM00857,IPR025827,IPR038109,PS51736,cd03768, IPR006118,PF13408,G3DSA:3.40.50.1390,PF07508,Coil
MSINRNNTSETPKKAALYVRVSTNYQIDRDSLPMQRQELITYAQLMFGINDYVVFEDAGYSGKNTDRPEFQNMMRRIRAGEFTHLLCWKIDRISRNLLDFASMYQELKDLGVTFVSKNEQFDTSTAIGEAMLKIILVFAELERNMTSERVTATMLSRAQNGLWNGGRVPYGYDYDKDSKTFSINQEEAFLVRKMYDLYSEHRSLVMVSRTLNEDGYASRAGNDWSPVSIFIILTNPFYTGIYRYNHYKIPGLKIEKDPSEWIEVPDHHPRIISDEQFDNVNRILQSNSRSKRLPGQQHTSKGTHIFGGLLYCGTCGSQYVSTPSRLLASGYRPSKYACPNLRKKKTCNTKSISDPVIGEFVLNYVLNMMHARAAFSSIHDTSELQDALLNGGTFQNVDHIGKDGLDSCFHMFSSTPLDGKRFRKPKKATTIDPELKRLRAEKRKTERALDRLMNLYLYADNPISEKDFVIRKQALDDYLKEINENLGMIDRGRGIETISDENFIKRASYFIMSKELAGKDYIYFKKLAMDMDAEILRDFFQEIIDSIVMEGSNVKEIVFRNGLAHTFFYKDTEKPEA

SEQ ID NO: 850 - protein, 577 aa, Unknown
  Description of Unknown: Integrase B851 sequence
  PTHR30461:SF3,IPR036162,PS51737,IPR011109,PTHR30461, PS00397,PF00239,G3DSA:1.10.10.2600,IPR006119,SSF53041, SM00857,IPR025827,IPR038109,PS51736,cd03768, IPR006118,PF13408,G3DSA:3.40.50.1390,PF07508,Coil
MISNSAAAHAKVAIYIRVSTLHQIDRDSLPMQRQDLIAYAKLILNTDDVTIFEDAGYSGKNTIRPEFQKMMSQLRTGTYTHLLVWKIDRISRNLLDFAEMYQELKNLGVTFVSKNEQFDTSTAMGEAMLKIILVFAELERNMTSERVTATMISRASNGQWNGGRIPYGYDYDSEEQAFSFNSDEYNIAHLIHDKYEELRSLVYLARYLNEHGYRTRAGNDWSPVSLDIILRSVFYCGDYQYNRLKEGDRQRPKDKSEWITVKDHHPAIVSREQKERILALLESNRRLKSFRKSGKSKYTHIFSGLLICGNCGQPMTSSISTIKKTTGRRYSLYFCPTHRKSKLWCIGKSTSDPIVGEFVFNYILNMLNAQKAFSPETSIQELEQQLLSGDTFSPVAAIAPDGLHDLFHTLRTGTIKGEVFGKDVKIKTGSEPPLQLSKLKKEKVRLERAIDRLNKLFLYSEKAMSESEYLTQKIQLSDSLEEVEDKLAFLASEGSLQQSITDDEFIAKASNFILSQKLTDRNYVSFQSLSATVSPEVLDSFLSSIIDNIVFKDGAIHSITFRNGLSHTFIYKEKPEV

SEQ ID NO: 851 - protein, 577 aa, Unknown
  Description of Unknown: Integrase B852 sequence
  PTHR30461:SF3,IPR036162,PS51737,IPR011109,PTHR30461, PS00397,PF00239,G3DSA:1.10.10.2600,IPR006119,SSF53041, SM00857,IPR025827,IPR038109,PS51736,cd03768, IPR006118,PF13408,G3DSA:3.40.50.1390,PF07508,Coil
MISNSAATHAKVAIYIRVSTLHQIDRDSLPMQRQDLIAYAKLILNTDDVTIFEDAGYSGKNTIRPEFQKMMSQLRTGTYTHLLVWKIDRISRNLLDFAEMYQELKNLGVTFVSKNEQFDTSTAMGEAMLKIILVFAELERNMTSERVTATMISRASNGQWNGGRIPYGYDYDPEEQAFSFNSDEYNIAHLIHDKYEELRSLVYLARYLNEHGYRTRAGNDWSPVSLDIILRSVFYCGDYQYNRLKEGDRQRPKDKSEWITVKDHHPAIVSREQKERILALLESNRRLKSFRKSGKSKYTHIFSGLLICGNCGQPMTSSISTIKKTTGRRYSLYFCPTHRKSKLWCTGKSTSDPIVGEFVFNYILNMLNAQKAFSPETSIQELEQQLLSGDTFSPVAAIAPDGLHDLFHTLRTGTIKGEVFGKDVKIKTGSEPPLQLSKLKKEKVRLERAIDRLNKLFLYSEKAMSESEYLTQKIQLSDSLEEVEDKLAFLASEDSLQQSITDDEFIAKASNFILSQKLTDRNYVSFQSLSATVSPEVLDSFLSSIIDNIVFKDGAVHSITFRNGLSHTFIYKEKPEV

SEQ ID NO: 852 - protein, 577 aa, Unknown
  Description of Unknown: Integrase B853 sequence
  SM00857,G3DSA:1.10.10.2600,IPR036162,PS51737,G3DSA:3.40.50.1390, IPR006119,IPR038109,PF07508,IPR011109,SSF53041, PTHR30461,Coil,PS51736,cd00338,PF00239
MIKKTRKLSHDEKIVEKRKQLAEKGKVAAIWTRVSSADQYKQNYSIDTQKAACREYCERNNIRIKGYFGGENESAKFAGEKFLDMIGTVGENPEYNTIVVFDFDRFSRNSIDGITYKSTLKRKGITIESVNQPIDTNNILAEQIENILIIMADIDNAMRRHKCHDGMVACIKRGELYSRPPFGYDSRKEGKRHIITINEDGKTLKKAFEWIVEEPEISQAEIIRRLEARGLNISKQKLSQCLHNSFYCGLLEHRYLNGEIIKGKQEAMISESTFYKVQDILAGNNKNYQQAEETPEFPLKMHVFCAKDNHALSGYTVKKKGLKYYKCGVKGCGTNVSAKELHSKYAEILNGLNVPESLLPIYKRVIERKFKEKENDNLISKNAIEKNLSTLKTKLKKAKMRFLTEDGIDNDDYNEVKSDLETKIANCEKELKDCSRDLSNLAEYTDVAFKIASSLGSTWGEMDFKVCQKIQNLAFPKGIKWDGEKRCYRTDGMNEFFRQIGLQRGSARGEGIKETGTDYSMSVLVAGEGHFTGIFGDSYPQLKAVQGRRTGAFGANLAHATAPSGRFPSTNMLIVLH

SEQ ID NO: 853 - protein, 577 aa, Unknown
  Description of Unknown: Integrase B854 sequence
  PTHR30461:SF3,SM00857,G3DSA:1.10.10.2600,IPR036162,PF13408, IPR025827,PS51737,G3DSA:3.40.50.1390,IPR006119,IPR038109, PF07508,IPR011109,SSF53041,PF00239, PTHR30461,PS51736,Coil,cd00338
MDIYKVRQLLKGQSIFDIPLRVVYYVRVSTDKEEQKNSTVNQDTFFEELIASHPAWTFVGKYIDDGASGIMADKREDFQRMISDGQNQMYDLILTKEISRFARNTLDSIRYTRLLLNCGIGVWFYTDNVNTINEDAELHLAILSSIAQNESLKTSTRVRMGHAQSIKRGVVMGNSMLYGYNKDHGKLVIDPYEAEMVRSIYEKYATGVYTTPMLEREIYASGYRNHYGEKISRTVIGHIITNPKYKGYYVGGKVKIIDMFTKKRKFIPKDEWIMYKDETGERVPAIIDEETWELANKYFVERGDAIKARRKVCTTPNTFTGKIYCGTDGAPYWLKHRVLRGKDDSTWYCSDKLKNGTDSCKSFPIKEDEIRSMVVDLITLSPSDIQKYCEMYLEMLRKNIDSSVDKSAKIAELNKEIENNMAKKQKLLDYNLQGILSDDEFISNTKLLNRKIERAQSLIDSFTSKSPVELKSNSVLDKAAKLLNDFSGVKSEDLDNKIVDELIDKIVITPQDTDYASVEFYLKTSEKVHKTYDRKAVLRNDNLLNIMLPVRSTVFYRHPRHLYGHETEIRYDYRLVI

SEQ ID NO: 854 - protein, 577 aa, Unknown
  Description of Unknown: Integrase B855 sequence
  PTHR30461:SF3,SM00857,G3DSA:1.10.10.2600,IPR036162,PF13408, IPR025827,PS51737,G3DSA:3.40.50.1390,IPR006119,IPR038109, PF07508,IPR011109,SSF53041,PTHR30461,Coil, PS51736,cd00338,PF00239
MDIYKVRQLLKGQSIFDIPLRVVYYVRVSTDKEEQKNSTVNQDAFFEELIASHPVWTFVGKYIDDGASGIMADKREDFQRMISDGQNQMYDLILTKEISRFARNTLDSIRYTRLLLNCGVGVWFYTDNVNTINEDAELHLAILSSIAQNESLKTSTRVRMGHAQSIKRGVVMGNSMLYGYNKDHGKLVIDPYEAEMVRSIYEKYATGVYTTPMLEREIYASGYRNHYGEKISRTVIGHIITNPKYKGYYVGGKVKIIDMFTKKRKFIPKDEWIMYKDETGERVPAIIDEETWELANKYFVERGDAIKARRKVCTTPNTFTGKIYCGTDGAPYWLKHRVLRGKDDSTWYCSDKLKNGTDSCKSFPIKEDEIRSMVVDLITLSPSDIQKYCEMYLEMLRKSIDSSVDKSAKIAELNKEIENNMAKKQKLLDYNLQGILSDDEFISNTKLLNRKIERAQSLIDSFTSKSPVELKSNSVLDKAAKLLNDFSGVKSEDLDNKIVDELIDKIVITPQDTDYASVEFYLKTSEKVHKTYDRKAVLRNDNLLNIMLPVRSTVFYRHPRHLYGHETEIRYDYRLVI

SEQ ID NO: 855 - protein, 577 aa, Unknown
  Description of Unknown: Integrase B856 sequence
  PTHR30461:SF3,IPR036162,PS51737,IPR011109,PTHR30461, PS00397,PF00239,G3DSA:1.10.10.2600,IPR006119,SSF53041, SM00857,IPR025827,IPR038109,PS51736,cd03768, IPR006118,PF13408,G3DSA:3.40.50.1390,PF07508,Coil
MNINKNIPNKHHKKAALYVRVSTNYQIDKDSLPMQRQDLITYAQLMFGIEDYVIFEDAGYSGKNTDRPEFQNMMRRIRAREFTHLLCWKIDRISRNLLDFASMYQELKDLGVTFVSKNEQFDTSTAIGEAMLKIILVFAELERNMTSERVTATMLSRAQNGLWNGGRVPYGYDYDKDSKSFSINQEEAKLVHKIYDLYSEHRSLIMVSRALNEDGYSSRAGNDWSPVSTFIILTNPFYTGKYRYNHYKDPGLKVEKDPSEWIEVPDHHPRIISDEQFQNVNRILQANSRSKRLPGQQHTSQNTHIFGGLLYCGTCGSQYVSTPSRTQASGYRPSKYACPNLRKKKTCNTKSVSDPVIGEFVINYVLNMMHAKDNFSSIHNSEDLQLSLLLGGTFQNVDHIGRDGLESYFHMLSTTPLDGKQFRKPKKAVTIDPELKRLRAEKRKTERALDRLMNLYLYSDNPISEKDFIIRKQALDDYLKEINENLGMIDRGHGIETISDENFIKRASYFIMNKELAGKNYIYFKKLAMDMDPEILKNFFHEIIDSIVMEGSNVKEIIFRNGLAHTFYYKDAEKPEA

SEQ ID NO: 856 - protein, 577 aa, Unknown
  Description of Unknown: Integrase B857 sequence
  PTHR30461:SF3,IPR036162,PS51737,IPR011109,PTHR30461, PS00397,PF00239,G3DSA:1.10.10.2600,IPR006119,SSF53041, SM00857,IPR025827,IPR038109,PS51736,cd03768, IPR006118,PF13408,G3DSA:3.40.50.1390,PF07508,Coil
MISNSAATHAKVAIYIRVSTLHQIDRDSLPMQRQDLIAYAKLILNTDDVTVFEDAGYSGKNTIRPEFQKMMSQLRTGTYTHLLVWKIDRISRNLLDFAEMYQELKDLGVTFVSKNEQFDTSTAMGEAMLKIILVFAELERNMTSERVAATMISRASNGQWNGGRIPYGYDYDPEEQTFSFNSDEYNIAHLIHDKYEELRSLVYLARYLNEHGYRTRAGNDWSPVSLDIILRSVFYCGDYQYNRLKEGDRQRPKDKSEWITVKDHHPAIVSRGQKERILALLESNRRLKSFRKSGKSKYTHIFSGLLICGNCGQPMTSSISTVKKTTGRRYSLYFCPTHRKSKLWCTGKSTSDPIIGEFVFNYILNMLNAQKAFSPETSIQELEQQLLSGDTFSPVAAIAPDGLQDLFHTLRTGTVKGEVFGKDVKIKTDSEPPLQLSKLKKEKIRLERAIDRLNKLFLYSEKAMSESEYLTQKIQLSDSLEEVEDKLAFLASEDSLQQSITDDEFISKASNFILSQKLTDRNYVSFQSLSATVSPEVLDSFLSSIIDNIVFKDGAVHSITFRNGLSHTFIYKEKPEV

SEQ ID NO: 857 - protein, 577 aa, Unknown
  Description of Unknown: Integrase B858 sequence
  PTHR30461:SF3,SM00857,G3DSA:1.10.10.2600,IPR036162,PF13408, PS51737,G3DSA:3.40.50.1390,IPR025827,IPR006119,IPR038109, PF07508,IPR011109,SSF53041,PTHR30461,Coil, PS51736,cd00338,PF00239
MDIYKVRQLLKGQSIFDIPLRVVYYVRVSTDKEEQKNSTVNQDTFFEELIASHPAWTFVGKYIDDGASGIMADKREDFQRMISDGQNQMYDLILTKEISRFARNTLDSIRYTRLLLNCGIGVWFYTDNVNTINEDAELHLAILSSIAQNESLKTSTRVRMGHAQSIKRGVVMGNSMLYGYNKDHGKLVIDPYEAEMVRSIYEKYATGVYTTPMLEREIYASGYRNHYGEKISRTVIGHIITNPKYKGYYVGGKVKIIDMFTKKRKFIPKDEWIMYKDETGERVPAIIDEETWELANKYFVERGDAIKARRKVCTTPNTFTGKIYCGTDGAPYWLKHRRLRGKDDSTWYCSDKLKNGTDSCKSFPIKEEEIRSMVIDLITISPSDIQKYCEMYLDMLRKNIDSSVDKSAKIAELNKEIENNMAKKQKLLDYNLQGILSDDEFISNTKLLNRKIERAQSLIDSFTSKSPVELKSNSVLDKAAKLLNDFSGVKSEDLDNKIVDELIDKIVITPQDTDYASVEFYLKTSEKVHKTYDRKAVLRNDNLLNIMLPVRSTVFYRHPRHLYGHETEIRYDYRLVI

SEQ ID NO: 858 - protein, 577 aa, Unknown
  Description of Unknown: Integrase B859 sequence
  PTHR30461:SF3,IPR036162,PS51737,IPR011109,PTHR30461, PS00397,PF00239,G3DSA:1.10.10.2600,IPR006119,SSF53041, SM00857,IPR025827,IPR038109,PS51736,cd03768, IPR006118,PF13408,G3DSA:3.40.50.1390,PF07508,Coil
MISNSAATHAKVAIYIRVSTLHQIDRDSLPMQRQDLIAYAKLILNTDDVTIFEDAGYSGKNTIRPEFQKMMSQLRTGTYTHLLVWKIDRISRNLLDFAEMYQELKNLGVTFVSKNEQFDTSTAMGEAMLKIILVFAELERNMTSERVTATMISRASNGQWNGGRIPYGYDYDPEEQAFSFNSDEYNIAHLIHDKYEELRSLVYLARYLNEHGYRTRAGNDWSPVSLDIILRSVFYCGDYQYNRLKEGDRQRPKDKSEWITVKDHHLAIVSREQKERILALLESNRRLKSFRKSGKSKYTHIFSGLLICGNCGQPMTSSISTVKKTTGRRYSLYFCPTHRKSKLWCTGKSTSDPIVGEFVFNYILNMLNAQKAFSPETSIQELEQQLLSGDTFSPVVAIAPDGLQDLFHTLRTGTVKGEVFGKDVKIKTDSEPPLQLSKLKKEKVRLERAIDRLNKLFLYSEKAMSESEYLTQRIQLSDALEEVEDKLAFLASEDSLQQSITDDEFIAKASNFILSQKLTDRNYVSFHSLSATVSPEVLDSFLSSIIDNIVFKDGAIHSITFRNGLSHTFIYKEKPEV

SEQ ID NO: 859 - protein, 577 aa, Unknown
  Description of Unknown: Integrase B860 sequence
  PTHR30461:SF3,IPR036162,PS51737,IPR011109,PTHR30461, PS00397,PF00239,G3DSA:1.10.10.2600,IPR006119,SSF53041, SM00857,IPR025827,IPR038109,PS51736,cd03768, IPR006118,PF13408,G3DSA:3.40.50.1390,PF07508,Coil
MISNSAATHAKVAIYIRVSTLHQIDRDSLPMQRQDLIAYAKLILNTDDVTIFEDAGYSGKNTIRPEFQKMMSQLRTGTYTHLLVWKIDRISRNLLDFAEMYQELKDLGVTFVSKNEQFDTSTAMGEAMLKIILVFAELERNMTSERVAATMISRASNGQWNGGRIPYGYDYDPEEQTFSFNSDEYNIAHLIHDKYEELRSLVYLARYLNEHGYRTRAGNDWSPVSLDIILRSVFYCGDYQYNRLKEGDRQRPKDKSEWITVKDHHPAIVSREQKERILALLESNRRLKSFRKSGKSKYTHIFSGLLICGNCGQPMTSSISTIKKTTGRRYSLYFCPTHRKSKLWCTGKSTSDPIIGEFVFNYILNMLNAQKAFSSETSIQELEQQLLSGDTFSPVAAIAPDGLQDLFHTLRTGTIKGEVFGKDVKIKTGSEPPLQLSKLKKEKVRLERAIDRLNKLFLYSEKAMSESEYLTQKIQLSDALEEVEDKLTFLASEDSLQQSITDDEFIAKASNFILSQKLTDRNYVSFQSLSATVSPEVLDSFLSSIIDNIVFKDGAIHSITFRNGLSHTFIYKEKPEV

SEQ ID NO: 860 - protein, 577 aa, Unknown
  Description of Unknown: Integrase B861 sequence
  PTHR30461:SF3,IPR036162,PS51737,IPR011109,PTHR30461, PS00397,PF00239,G3DSA:1.10.10.2600,IPR006119,SSF53041, SM00857,IPR025827,IPR038109,PS51736,cd03768, IPR006118,PF13408,G3DSA:3.40.50.1390,PF07508,Coil
MISNSAATHAKVAIYIRVSTLHQIDRDSLPMQRQDLIAYAKLILNTDDVTIFEDAGYSGKNTIRPEFQKMMSQLRTGTYTHLLVWKIDRISRNLLDFAEMYQELKDLGVTFVSKNEQFDTSTAMGEAMLKIILVFAELERNMTSERVTATMISRASNGQWNGGRIPYGYDYDPEEQAFSFNSDEYNIAHLIHDKYEELRSLVYLARYLNEHGYRTRAGNDWSPVSLDIILRSVFYCGDYQYNRLKEGDRQRPKDKSEWITVKDHHPAIVSREQKERILALLESNRRLKSFRKSGKSKYTHIFSGLLICGNCGQPMTSSISTVKKTTGRRYSLYFCPTHRKSKLWCTGKSTSDPIIGEFVFNYILNMLNAQKAFSPETSIQELEQQLLSGDTFSPVAAIAPDGLQDLFHTLRTGTVKGEVFGKDVKIKTDSEPPLQLSKLKKEKIRLERAIDRLNKLFLYSEKAMSESEYLTQKIQLSDSLEEIEDKLAFLASEDSLQQSITDDEFISKASNFILSQKLTDRNYVSFQSLSATVSPEVLDSFLSSIIDNIVFKDGAVHSITFRNGLSHTFIYKEKPEV

SEQ ID NO: 861 - protein, 577 aa, Unknown
  Description of Unknown: Integrase B862 sequence
  PTHR30461:SF3,IPR036162,PS51737,IPR011109,PTHR30461, PS00397,PF00239,G3DSA:1.10.10.2600,IPR006119,SSF53041, cd00338,SM00857,IPR025827,IPR038109,PS51736, IPR006118,PF13408,G3DSA:3.40.50.1390,PF07508,Coil
MALPKKTIPQIEQKRAAIYVRVSTQYQVDRASLPVQRSELVNYAKYALDIPDFVIFEDAGYSAKNTDRPDYQQMMARIRTGEFSHLLVWKIDRISRNLLDFAAMYSELKQLGVVFVSKNEQFDTSSAMGEAMLKIILVFAELERNMTAERVSAVFLSRANDGIWNGGKVPFGYAYDKQTKTFSILEDEAKTVRLIYALYESSKSLVTVSKALNERGIKTRNGSEWSPTTVHTMLSNPFYSGTYRYNYRNESDPHHHVPKKKEDWILVKNHHPAIVSPEHQAAVELILASKSYGKNQTYQRKNIHAFAGLLTCGYCGSTMAATIDRARADGWRPSVYICSRRRMSNDCQNKYVSDVTLGPFVLNFFANLIKASNSFGKSTSIETLEKKLLRGDALSIVDHIERPGLEELYNHLRSGFEEKPFDSLAVNAAEASSDVQERDLLLADKRRLERALKRLNAIYLYGDEEIPGKDFILDRKSITDSLQQIDDRLKELDAAAVFDVSLSDDEFMEKASQFILTQQLLDKRSVNYEKFIRKIDPRIVKDFLNETVSNFCIKDGLTTSVLFKNGIELRFCYKAQQ

SEQ ID NO: 862 - protein, 577 aa, Unknown
  Description of Unknown: Integrase B863 sequence
  PTHR30461:SF3,IPR036162,PS51737,IPR011109,PTHR30461, PS00397,PF00239,G3DSA:1.10.10.2600,IPR006119,SSF53041, SM00857,IPR025827,IPR038109,PS51736,cd03768, IPR006118,PF13408,G3DSA:3.40.50.1390,PF07508,Coil
MSINRNNTSETPKKAALYVRVSTNYQIDRDSLPMQRQELITYAQLMFGINDYVVFEDAGYSGKNTDRPEFQNMMRRIRAGEFTHLLCWKIDRISRNLLDFASMYQELKDLGVTFVSKNEQFDTSTAIGEAMLKIILVFAELERNMTSERVTATMLSRAQNGLWNGGRVPYGYDYDKDSKTFSINQEEAFLVRKMYDLYSEHRSLVMVSRTLNEDGYASRAGNDWSPVSIFIILTNPFYTGIYRYNHYKIPGLKIEKDPSEWIEVPDHHPRIISDEQFDNVNRILQSNSRSKRLPGQQHTSKGTHIFGGLLYCGTCGSQYVSTPSRLLASGYRPSKYACPNLRKKKTCNTKSISDPVIGEFVLNYVLNMMHARAAFSSIHDTSELQDALLSGGTFQNVDHIGKDGLDSCFHMFSSTPLDGKRFRKPKKATTIDPELKRLRAEKRKTERALDRLMNLYLYADNPISEKDFVIRKQALDDYLKEINENLGMIDRGRGIETISDENFIKRASYFIMSKELAGKDYIYFKKLAMDMDAEILRDFFQEIIDSIVMEGSNVKEIVFRNGLAHTFFYKDTEKPEA

SEQ ID NO: 863 - protein, 577 aa, Unknown
  Description of Unknown: Integrase B864 sequence
  IPR036162,PS51737,IPR011109,PTHR30461,PS00397, PF00239,G3DSA:1.10.10.2600,IPR006119,SSF53041,cd00338, SM00857,IPR025827,IPR038109,PS51736,IPR006118, PF13408,G3DSA:3.40.50.1390,PF07508,Coil
MAYRFSQQTAAPDTRTVALYVRVSTGYQVDKDSLPFQKQELRNYCRHVLHIEESRLEVFEDAGKSGKNTKRPAFERMMTKVKAGLVSHVIVYKIDRISRNLVDFSLMYDDFKYNRVTFISLNEQFDTSSAIGEAVLKIILIFAELERKLTSERVTDIMINRALSGQWNGARMPFGWDWDEEKKMPVHSDKEAPTVRLMYDMYEETRSSCRVRDYFNSHDIATKRGGEWTTKTIADLIRNPMNKGDYRYNYRESAKGRRKPDEEVVYVKNVFPPLVPPDQWDRCNQIMDHNAKLRCSSGFPHKGTHIHIFAGLLKCGKCGSYFQVEKRDRVRRNGFAPSLYRCGRRYRKQHCISKSCSEVVVGPFVLNYISAMIRASDMRSQIHSPEELEKILLSDSVFQNVAGIVSDGLNATYAMLSGTDSSVPYRPLPLASHNVQEDDNVQKWEQGIVRIDRAIERLKKVYLFDDAAMSEKEYLETKSELERERIELDNKIKEQESATFPVQTEDLAFIKSASSFLLAHRLKAGDHIQYNTFAPLVDDEVLKDFLNLVIKEIVVVDARITEITFQNGLTHKFLYRE

SEQ ID NO: 864 - protein, 577 aa, Unknown
  Description of Unknown: Integrase B865 sequence
  PTHR30461:SF3,IPR036162,PS51737,IPR011109,PTHR30461, PS00397,PF00239,G3DSA:1.10.10.2600,IPR006119,SSF53041, cd00338,SM00857,IPR025827,IPR038109,PS51736, IPR006118,PF13408,G3DSA:3.40.50.1390,PF07508,Coil
MALPKKTIPQIEQKRAAIYVRVSTQYQVDRASLPVQRSELVNYAKYALDIPDFVIFEDAGYSAKNTDRPDYQQMMARIRTGEFSHLLVWKIDRISRNLLDFAAMYSELKQLGVVFVSKNEQFDTSSAMGEAMLKIILVFAELERNMTAERVSAVFLSRANDGIWNGGKVPFGYAYDKQTKTFSILEDEAKTVRLIYALYESSKSLVTVSKALNERGIKTRNGSEWSPTTVHTMLSNPFYSGTYRYNYRNESDPHHHVPKKKEDWILVKNHHPAIVSPEHQAAVELILASKSYGKNQTYQRKNIHAFAGLLTCGYCGSTMAATIDRARADGWRPSVYICSRRRMSNDCQNKYVSDVTLGPFVLNFFANLIKASNSFGKSTSIETLEKKLLRGDALSIVDHIERPGLEELYNHLRSGFDEKPFDSLAVNAAEASSDVQEHDLLLADKRRLERALKRLNAIYLYGDEEIPGKDFILDRKSITDSLQQIDDRLKELDAAAVFDVSLSDDEFMEKASQFILTQRLLDKRSVNYEKFIRKIDPRIVKDFLNETVSNFCIKDGLTTSVLFKNGIELRFCYKAQQ

SEQ ID NO: 865 - protein, 577 aa, Unknown
  Description of Unknown: Integrase B866 sequence
  PTHR30461:SF3,IPR036162,PS51737,IPR011109,PTHR30461, PS00397,PF00239,G3DSA:1.10.10.2600,IPR006119,SSF53041, SM00857,IPR025827,IPR038109,PS51736,cd03768, IPR006118,PF13408,G3DSA:3.40.50.1390,PF07508,Coil
MISNSAATHAKVAIYIRVSTLHQIDRDSLPMQRQDLIAYAKLILNTDDVTIFEDAGYSGKNTIRPEFQKMMSQLRTGTYTHLLVWKIDRISRNLLDFAEMYQELKNLGVTFVSKNEQFDTSTAMGEAMLKIILVFAELERNMTSERVTATMISRASNGQWNGGRIPYGYDYDPEEQAFSFNFDEYNIAHLIHDKYEELRSLVYLARYLNEHGYRTRAGNDWSPVSLDIILRSVFYCGDYQYNRLKEGDRQRPKDKSEWITVKDHHPAIVSREQKERILALLESNRRLKSFRKSGKSKYTHIFSGLLICGNCGQPMTSSISTIKKTTGRRYSLYFCPTHRKSKLWCTGKSTSDPIVGEFVFNYILNMLNAQKAFSPETSIQELEQQLLSGDTFSPVAAIAPDGLHDLFHTLRTGTIKGEVFGKDVKIKTGSEPPLQLSKLKKEKVRLERAIDRLNKLFLYSEKAMSESEYLTQKIQLSDSLEEVEDKLAFLASEGSLQQSITDDEFIAKASNFILSQKLTDRNYVSFQSLSATVSPEVLDSFLSSIIDNIVFKDGAIHSITFRNGLSHTFIYKEKPEV

SEQ ID NO: 866 - protein, 577 aa, Unknown
  Description of Unknown: Integrase B867 sequence
  PTHR30461:SF3,IPR036162,PS51737,IPR011109,PTHR30461, PS00397,PF00239,G3DSA:1.10.10.2600,IPR006119,SSF53041, SM00857,IPR025827,IPR038109,PS51736,cd03768, IPR006118,PF13408,G3DSA:3.40.50.1390,PF07508,Coil
MISNSAATHAKVAIYIRVSTLHQIDRDSLPMQRQDLIAYAKLILNTDDVTIFEDAGYSGKNTIRPEFQKMMSQLRTGTYTHLLVWKIDRISRNLLDFAEMYQELKDLGVTFVSKNEQFDTSTAMGEAMLKIILVFAELERNMTSERVTATMISRASNGQWNGGRIPYGYDYDPEEQDFSFNSDEYNIAHLIHDKYEELRSLVYLARYLNEHGYRTRAGNDWSPVSLDIILRSVFYCGDYQYNRLKEGDRQRPKDKSEWITVKDHHPAIVSREQKERILALLESNRRLKSFRKSGKSKYTHIFSGLLICGNCGQPMTSSISTIKKTTGRRYSLYFCPTHRKSKLWCTGKSTSDPIVGEFVFNYILNMLNAQKAFSPETSIQELEQQLLSGDTFSPVAAIAPDGLHDLFHTLRTGTIKGEVFGKDVKIKTGSEPPLQLSKLKKEKVRLERAIDRLNKLFLYSEKAMSESEYLTQKIQLSDSLEEVEDKLAFLASEGSLQQSITDDEFIAKASNFILSQKLTNRNYISFQSLSATVSPEVLDSFLSSIIDNIVFKDGAVNSITFRNGLSHTFIYREKPEV

SEQ ID NO: 867 - protein, 577 aa, Unknown
  Description of Unknown: Integrase B868 sequence
  PTHR30461:SF3,SM00857,G3DSA:1.10.10.2600,IPR036162,PF13408, IPR025827,G3DSA:3.40.50.1390,PS51737,IPR006119,IPR038109, PF07508,SSF53041,IPR011109,PF00239,PTHR30461, PS51736,Coil,cd00338
MDIYKVRQLLKEQSIFDIPLRVVYYVRVSTDKEEQKNSTVNQDTFFEDLIASHPAWTFVGKYIDDGASGIMADKREDFQRMISDGQNKMYDLILTKEISRFARNTLDSIRYTRLLLNCGVGVWFYTDNVNTINEDAELHLAILSSIAQNESLKTSTRVRMGHAQSIKRGVVMGNSMLYGYNKDHGRLVIDPYEAEMVRSIYEKYATGVYTTPMLEREIYASGYRNHYGEKISRTVIGHIITNPKYKGYYVGGKVKIIDMFTKKRKFIPKDEWIMYKDETGERVPAIIDEGTWELANKYFVERGDAIKARRKVCTTPNTFTGKIYCGTDGAPYWLKHRVLRGKDDSTWYCSDKLKNGTDSCKSFPIKEDEIRSMVVDLITLSPSDIQKYCEMYLEMLRKSIDSSVDKSAKIAELNKEIENNMAKKQKLLDYNLQGILSDDEFISNTKLLNRKIERAQSLIDSFTSKSPVELKSNSVLDKAAKLLNDFSGVKSEDLDNKIVDELIDKIVITPQDTDYASVEFYLKTSEKVHKTYDRKAVLRNDNLLNIMLPVRSTVFYRHPRHLYGHETEIRYDYRLVI

SEQ ID NO: 868 - protein, 577 aa, Unknown
  Description of Unknown: Integrase B869 sequence
  PTHR30461:SF3,IPR036162,PS51737,IPR011109,PTHR30461, PS00397,PF00239,G3DSA:1.10.10.2600,IPR006119,SSF53041, SM00857,IPR025827,IPR038109,PS51736,cd03768, IPR006118,PF13408,G3DSA:3.40.50.1390,PF07508,Coil
MSINRNNTSETPKKAALYVRVSTNYQIDRDSLPMQRQELITYAQLMFGINDYVVFEDAGYSGKNTDRPEFQNMMRRIRAGEFTHLLCWKIDRISRNLLDFASMYQELKDLGVTFVSKNEQFDTSTAIGEAMLKIILVFAELERNMTSERVTATMLSRAQNGLWNGGRVPYGYDYDKDSKTFSINQEEAFLVHKMYDLYSEHHSLVLVSRDLNEDGYASRAGNDWSPVSIFIILTNPFYTGVYRYNHYKIPGLKIEKDPSEWIEVPDHHPRIISDEQFDNVNRILQANSRSKRLPGQQHTSKGIHIFGGLLYCGTCGSQYVSTPSRLLASGYRPSKYACPNLRKKKTCNTKSISDPVIGEFVLNYVLNMMHARAAFSSIHDTSDLQDALLNGGTFQNVDHIGNDGLDSCFHMFSSTPLDGKRFRKPKKAATIDPELKRLRAEKRKTERALDRLMNLYLYADNPISEKDFVIRKQALDDYLKEINENLGMIDRGRGIETISDENFIKRASYFIMSKELAGKDYIYFKKLAMDMDAEILRDFFQEIIDSIVMEGSNVKEIVFRNGLAHTFFYKGEEKPEA

SEQ ID NO: 869 - protein, 577 aa, Unknown
  Description of Unknown: Integrase B870 sequence
  PTHR30461:SF3,IPR036162,PS51737,IPR011109,PTHR30461, PS00397,PF00239,G3DSA:1.10.10.2600,IPR006119,SSF53041, SM00857,IPR025827,IPR038109,PS51736,cd03768, IPR006118,PF13408,G3DSA:3.40.50.1390,PF07508,Coil
MISNSAATHAKVAIYIRVSTLHQIDRDSLPMQRQDLIAYAKLILNTDDVTIFEDAGYSGKNTIRPEFQKMMSQLRTGTYTHLLVWKIDRISRNLLDFAEMYQELKDLGVTFVSKNEQFDTSTAMGEAMLKIILVFAELERNMTSERVTATMISRASNGQWNGGRIPYGYDYDPEEQDFSFNSDEYNIAHLIHDKYEELRSLVYLARYLNEHGYRTRAGNDWSPVSLDIILRSVFYCGDYQYNRLKEGDRQRPKDKSEWITVKDHHPAIVSREQKERILALLESNRRLKSFHKSGKSKYTHIFSGLLICGNCGQPMTSSISTIKKTTGRRYSLYFCPTHRKSKLWCTGKSTSDPIVGEFVFNYILNMLNAQKAFSPETSIQELEQQLLSGDTFSPVAAIAPDGLHDLFHTLRTGTIKGEVFGKDVKIKTGSEPPLQLSKLKKEKVRLERAIDRLNKLFLYSEKAMSESEYLTQKIQLSDSLEEVEDKLAFLASEGSLQQSITDDEFIAKASNFILSQKLTDRNYISFQSLSATVSPEVLDSFLSSIIDNIVFKDGAVNSITFRNGLSHTFIYREKPEV

SEQ ID NO: 870 - protein, 577 aa, Unknown
  Description of Unknown: Integrase B871 sequence
  PTHR30461:SF3,IPR036162,PS51737,IPR011109,PTHR30461, PS00397,PF00239,G3DSA:1.10.10.2600,IPR006119,SSF53041, SM00857,IPR025827,IPR038109,PS51736,cd03768, IPR006118,PF13408,G3DSA:3.40.50.1390,PF07508,Coil
MISNSAATHAKVAIYIRVSTLHQIDRDSLPMQRQDLIAYAKLILNTDDVTIFEDAGYSGKNTIRPEFQKMMSQLRTGTYTHLLVWKIDRISRNLLDFAEMYQELKNLGVTFVSKNEQFDTSTAMGEAMLKIILVFAELERNMTSERVTATMISRASNGQWNGGRIPYGYDYDPEEQAFSFNSDEYNIAHLIHDKYEELRSLVYLARYLNEHGYRTRAGNDWSPVSLDIILRSVFYCGDYQYNRLKEGDRQRPKDKSEWITVKDHHPAIVSREQKERILALLESNRRLKSFRKSGKSKYTHIFSGLLICGNCGQPMTSSISTIKKTTGRRYSLYFCPTHRKSKLWCTGKSTSDPIVGEFVFNYILNMLNAQKAFSPETSIQELEQQLLSGDTFSPVAAIAPDGLHDLFHTLRTGTIKGEVFGKDVKIKTGSEPPLQLSKLKKEKVRLERAIDRLNKLFLYSEKAMSESEYLTQKIQLSDSLEEVEDKLAFLASEGSLQQSITDDEFIAKASNFILSQKLTDRNYVSFQSLSATVSPEVLDSFLSSIIDNIVFKDGAIHSITFRNGLSHTFIYKEKPEV

SEQ ID NO: 871 - protein, 577 aa, Unknown
  Description of Unknown: Integrase B872 sequence
  PTHR30461:SF3,SM00857,G3DSA:1.10.10.2600,IPR036162,PF13408, IPR025827,G3DSA:3.40.50.1390,PS51737,IPR006119,IPR038109, PF07508,IPR011109,SSF53041,PF00239,PTHR30461, PS51736,Coil,cd00338
MDIYKVRQLLKEQSIFDIPLRVVYYVRVSTDKEEQKNSTVNQDTFFEELIASHPAWTSVGKYIDDGASGIMADKREDFQRMISDGQNQMYDLILTKEISRFARNTLDSIRYTRLLLNCGVGVWFYTDNVNTINEDAELHLAILSSIAQNESLKTSTRVRMGHAQSIKRGVVMGNSMLYGYNKDHGKLVIDPYEAEMVRSIYEKYATGVYTTPMLEREIYASGYRNHYGEKISRTVIGHIITNPKYKGYYVGGKVKIIDMFTKKRKFIPKDEWIMYKDETGERVPAIIDEETWELANKYFVERGDAIKARRKVCTTPNTFTGKIYCGTDGAPYWLKHRVLRGKDDSTWYCSDKLKNGTDSCKSFPIKEDEIRSMVVDLITLSPSDIQKYCEMYLEMLRKSIDSSVDKSAKIAELNKEIENNMAKKQKLLDYNFQGILSDDEFISNTKLLNRKIERAQSLIDSFTSKSPVELKSNSVLDKAAKLLNDFSGVKSEDLDNKIVDELIDKIVITPQDTDYASVEFYLKTSEKVHKTYDRKAVLRNDNLLNIMLPVRSTVFYRHPRHLYGHETEIRYDYRLVI

SEQ ID NO: 872 - protein, 577 aa, Unknown
  Description of Unknown: Integrase B873 sequence
  PTHR30461:SF3,IPR036162,PS51737,IPR011109,PTHR30461, PS00397,PF00239,G3DSA:1.10.10.2600,IPR006119,SSF53041, SM00857,IPR025827,IPR038109,PS51736,cd03768, IPR006118,PF13408,G3DSA:3.40.50.1390,PF07508,Coil
MISNSSATHAKVAIYIRVSTLHQIDRDSLPMQRQDLIAYAKLILNTDDVTIFEDAGYSGKNTIRPEFQKMMSQLRAGTYTHLLVWKIDRISRNLLDFAEMYQELKDLGVTFVSKNEQFDTSTAMGEAMLKIILVFAELERNMTSERVTATMISRASNGLWNGGRIPYGYDYDPAEQEFSFNSDEYNIALLIHDKYEELRSLVYLARYLNEHGYRTRSGNDWSPVSLDIILRSVFYCGDYQYNRLKEGDRQRPKDKSEWITVKDHHPAIVSREQKERILALLESNRRLKSFRKSGKSKYIHIFSGLLICGNCGQPMTSTISTVKKTTSRRYSLYFCPTHRKSKLWCTGKSTSDPIVGEFVFNYILNMLNAQKAFSPETSIQDLEQQLLSGDTFSPVAAIAPDGLQDLFHTLRTGTVKGEVFGKDVKIKTDSEPPLQLSKLKKEKIRLERAIDRLNKLFLYSEKAMSESEYLTQKIQFSDALEEVEDKLAFLASEDSLQQSITDDEFIAKASNFILSQKLTDRNYVSFHSLSTTVSPEVLDSFLSSIIDNIVFKDGAVHSITFRNGLSHTFIYKEKPEV

SEQ ID NO: 873 - protein, 577 aa, Unknown
  Description of Unknown: Integrase B874 sequence
  PTHR30461:SF3,IPR036162,PS51737,IPR011109,PTHR30461, PS00397,PF00239,G3DSA:1.10.10.2600,IPR006119,SSF53041, SM00857,IPR025827,IPR038109,PS51736,cd03768, IPR006118,PF13408,G3DSA:3.40.50.1390,PF07508,Coil
MISNSAATHAKVAIYIRVSTLHQIDRDSLPMQRQDLIAYAKLILNTDDVTIFEDAGYSGKNTIRPEFQKMMSQLRTGTYTHLLVWKIDRISRNLLDFAEMYQELKDLGVTFVSKNEQFDTSTAMGEAMLKIILVFAELERNMTSERVTATMISRASNGQWNGGRIPYGYDYDPEEQDFSFNSDEYNIAHLIHDKYEELRSLVYLARYLNEHGYRTRAGNDWSPVSLDIILRSVFYCGDYQYNRLKEGDRQRPKDKSEWITVKDHHPAIVSREQKERILALLESNRRLKSFRKSGKSKYTHIFSGLLICGNCGQPMTSSISTIKKTIGRRYSLYFCPTHRKSKLWCTGKSTSDPIIGEFVFNYILNMLNAQKAFSSETSIQELEQQLLSGDTFSPVAAIAPDGLQDLFHTLRTGTIKGEVFGKDVKIKTGSEPPLQLSKLKKEKIRLERAIDRLNKLFLYSEKAMSESEYLTQKIQLSDALEEVEDKLTFLASEDSLQQSITDDEFIAKASNFILSQKLTDRNYVSFQSLSATVSPEVLDSFLSSIIDNIVFKDGAIHSITFRNGLSHTFIYKEKPEV

SEQ ID NO: 874 - protein, 577 aa, Unknown
  Description of Unknown: Integrase B875 sequence
  PTHR30461:SF3,IPR036162,PS51737,IPR011109,PTHR30461, PS00397,PF00239,G3DSA:1.10.10.2600,IPR006119,SSF53041, SM00857,IPR025827,IPR038109,PS51736,cd03768, IPR006118,PF13408,G3DSA:3.40.50.1390,PF07508,Coil
MISNSAATHAKVAIYIRVSTLHQIDRDSLPMQRQDLIAYAKLILNTDDVTVFEDAGYSGKNTIRPEFQKMMSQLRTGTYTHLLVWKIDRISRNLLDFAEMYQELKDLGVTFVSKNEQFDTSTAMGEAMLKIILVFAELERNMTSERVAATMISRASNGQWNGGRIPYGYDYDPEEQTFSFNSDEYNIAHLIHDKYEELRSLVYLARYLNEHGYRTRAGNDWSPVSLDIILRSVFYCGDYQYNRLKEGDRQRPKDKSEWITVKDHHPAIVSREQKERILALLESNRRLKSFRKSGKSKYTHIFSGLLICGNCGQPMTSSISTVKKTTGRRYSLYFCPTHRKSKLWCTGKSTSDPIIGEFVFNYILNMLNAQKAFSPETSIQELEQQLLSGDTFSPVAAIAPDGLQDLFHTLRTGTVKGEVFGKDVKIKTDSEPPLQLSKLKKEKIRLERAIDRLNKLFLYSEKAMSESEYLTQKIQLSDSLEEIEDKLAFLASEDSLQQSITDDEFISKASNFILSQKLTDRNYVSFQSLSATVSPEVLDSFLSSIIDNIVFKDGAVHSITFRNGLSHTFIYKEKPEV

SEQ ID NO: 875 - protein, 577 aa, Unknown
  Description of Unknown: Integrase B876 sequence
  PTHR30461:SF3,IPR036162,PS51737,IPR011109,PTHR30461, PS00397,PF00239,G3DSA:1.10.10.2600,IPR006119,SSF53041, SM00857,IPR025827,IPR038109,PS51736,cd03768, IPR006118,PF13408,G3DSA:3.40.50.1390,PF07508,Coil
MISNSAATHAKVAIYIRVSTLHQIDRDSLPMQRQDLIAYAKLILNTDNVTIFEDAGYSGKNTIRPEFQKMMSQLRTGTYTHLLVWKIDRISRNLLDFAEMYQELKDLGVTFVSKNEQFDTSTAMGEAMLKIILVFAELERNMTSERVTATMISRASNGQWNGGRIPYGYDYDPEEQDFSFNSDEYNIAHLIHDKYEELRSLVYLARYLNEHGYRTRAGNDWSPVSLDIILRSVFYCGDYQYNRLKEGDRQRPKDKSEWITVKDHHPAIVSREQKERILALLESNRRLKSFRKSGKSKYTHIFSGLLICGNCGQPMTSSISTIKKTTGRRYSLYFCPTHRKSKLWCTGKSTSDPIVGEFVFNYILNMLNAQKAFSPETSIQELEQQLLSGDTFSPVAAIVPDGLQDLFHTLRTGTIKGEVFGKDVKIKTGSEPPLQLSKLKKEKVRLERAIDRLNKLFLYSEKAMSESEYLTQKIQLSDALEEVEDKLTFLASEDSLQQSITDDEFIAKASNFILSQKLTDRNYVSFQSLSATVSPEVLDSFLSSIIDNIVFKDGAIHSITFRNGLSHTFIYKEKPEV

SEQ ID NO: 876 - protein, 577 aa, Unknown
  Description of Unknown: Integrase B877 sequence
  PTHR30461:SF3,IPR036162,PS51737,IPR011109,PTHR30461, PS00397,PF00239,G3DSA:1.10.10.2600,IPR006119,SSF53041, SM00857,IPR025827,IPR038109,PS51736,cd03768, IPR006118,PF13408,G3DSA:3.40.50.1390,PF07508,Coil
MISNSAATHAKVAIYIRVSTLHQIDRDSLPMQRQDLIAYAKLILNTDDVTIFEDAGYSGKNTIRPEFQKMMSQLRTGTYTHLLVWKIDRISRNLLDFAEMYQELKNLGVTFVSKNEQFDTSTAMGEAMLKIILVFAELERNMTSERVTATMISRASNGQWNGGRIPYGYDYDPEEQAFSFNSDEYNIAHLIHDKYEELRSLVYLARYLNEHGYRTRAGNDWSPVSLDIILRSVFYCGDYQYNRLKEGDRQRPKDKSEWITVKDHHPAIVSREQKERILALLESNRRLKSFRKSGKSKYTHIFSGLLICGNCGQPMTSSISTIKKTTGRRYSLYFCPTHRKSKLWCTGKSTSDPIVGEFVFNYILNMLNAQKAFSPETSIQELEQQLLSGDTFSPVAAIAPDGLHDLFHTLRTGTIKGEVFGKDVKIKTGSEPPLQLSKLKKEKVRLERAIDRLNKLFLYSEKAMSESEYLTQKIQLSDSLEEVEDKLAFLASEGSLQQSITDDEFIAKASNFILSQKLTDRNYVSFQSLSATVSPEVLDSFLSSIIDNIVFKDGAIHSIAFRNGLSHTFIYKEKPEV

SEQ ID NO: 877 - protein, 577 aa, Unknown
  Description of Unknown: Integrase B878 sequence
  PTHR30461:SF3,SM00857,G3DSA:1.10.10.2600,IPR036162,PF13408, PS51737,G3DSA:3.40.50.1390,IPR025827,IPR006119,IPR038109, PF07508,IPR011109,SSF53041,PF00239,PTHR30461, PS51736,Coil,cd00338
MKKENEIRAVVYARYSSHSQTEQSIEGQISAAQIYAKAKGYTIVKEYVDRAKTGKNDNREAFQQMLSDTAKHEFSVIIVWKVDRFGRNREEITFNKYRCKKNDVRVEYIAEAVPDSPEGVILESVLEGMAEYYSLQLAQNIRRGIRASAEKCQAIGGHCSLGYAIDPKTKKYVIDPDTAPTVQLIFEKYAEGYTGMDIVRMLNEKGLRTVRGKPFTKNSLWTILKNERYAGVYLFKDEVRVEGGIPALVSREMFDKVQEMLEINHRSPVNTWNRATYLLTDKLFCGHCGSKMVGECGTSRTGATYNYYICAGKKRERNCSKKAVRQDWIEKVVLQQIRRVLFDQEFLEFIAHKAYTYYLEEKKKLDQSAAIKAQLSSVESSIDNLIRAMEAGIFSASTKSRLDDLENQKAALTRTLAEIKLSEESFDLTEDRILFFLESMRGLDMDDVDSRKRLVKTFVNAVYLYDDKITLAFNFTDSCEKPEIIELTDIADGVVEKFVHRASCSTKKALYFVGSMVLFFLLKPIFGGCIASPAPFSGFCRRFLYNPQRLTLHHFQKGMFSARFFSRLLYHPLQCTA

SEQ ID NO: 878 - protein, 577 aa, Unknown
  Description of Unknown: Integrase B879 sequence
  PTHR30461:SF3,IPR036162,PS51737,IPR011109,PTHR30461, PS00397,PF00239,G3DSA:1.10.10.2600,IPR006119,SSF53041, SM00857,IPR025827,IPR038109,PS51736,cd03768, IPR006118,PF13408,G3DSA:3.40.50.1390,PF07508,Coil
MISNSAATHAKVAIYIRVSTLHQIDRDSLPMQRQDLIAYAKLILNTDDVTIFEDAGYSGKNTIRPEFQKMMSQLRTGTYTHLLVWKIDRISRNLLDFAEMYQELKDLGVTFVSKNEQFDTSTAMGEAMLKIILVFAELERNMTSERVTATMISRASNGQWNGGRIPYGYDYDPEEQDFSLNSDEYNIAHLIHDKYEELRSLVYLARYLNEHGYRTRAGNDWSPVSLDIILRSVFYCGDYQYNRLKEGDRQRPKDKSEWITVKDHHPAIVSREQKERILALLESNRRLKSFRKGGKSKYTHIFSGLLICGNCGQPMTSSISTIKKTTGRRYSLYFCPTHRKSKLWCTGKSTSDPIIGEFVFNYILNMLNAQKAFSSETSIQELEQQLLSGDTFSPVAAIAPDGLQDLFHTLRTGTIKGEVFGKDVKIKTGSEPPLQLSKLKKEKVRLERAIDRLNKLFLYSEKAMSESEYLTQKIQLSDALEEVEDKLTFLASEDSLQQSITDDEFIAKASNFILSQKLTDRNYVSFQSLSATVSPDVLDSFLSSIIDNIVFKDGAIHSITFRNGLSHTFIYKEKPEV

SEQ ID NO: 879 - protein, 577 aa, Unknown
  Description of Unknown: Integrase B880 sequence
  IPR036162,PS51737,IPR011109,PTHR30461,PS00397, PF00239,G3DSA:1.10.10.2600,IPR006119,SSF53041,cd00338, SM00857,IPR025827,IPR038109,PS51736,IPR006118, PF13408,G3DSA:3.40.50.1390,PF07508,Coil
MAYRFSQQTAAPDTRTVALYVRVSTGYQVDKDSLPFQKQELRNYCRHVLHIEESRLEVFEDAGKSGKNTKRPAFERMMTKVKAGLVSHVIVYKIDRISRNLVDFSLMYDDFKYNRVTFISLNEQFDTSSAIGEAVLKIILIFAELERKLTSERVTDIMINRALSGQWNGARMPFGWDWDEEKKMPVHSDKEAPIVRLMYDMYEETRSSCRVCDYFNSHDIATKRGGEWTTKTIADLIRNPMNKGDYRYNYRESAKGRRKPDEEVVYVKNVFPPLVPPDQWDRCNQIMDYNAKLRCSSGFPHKGTHIHIFAGLLKCGKCGSYFQVEKRDRVRRNGFAPSLYRCGRRYRKQHCISKSCSEVVVGPFVLNYISAMIRASDMRSQIHSPEELEKILLSDNVFQNVAGIVSDGLNATYAMLSGTDSSVPYRPLPLASHNVQEDDNVQKWEQGIVRIDRAIERLKKVYLFDDTAMSEKEYLETKNELERERIELDNKIKEQESTAFPVQTEDLAFIKSASSFLLAHRLKAGDHIQYNAFAPLVDDEVLKDFLNLVIKEIVVVDARITEITFQNGLTHKFLYRE

SEQ ID NO: 880 - protein, 577 aa, Unknown
  Description of Unknown: Integrase B881 sequence
  PTHR30461:SF3,IPR036162,PS51737,IPR011109,PTHR30461, PS00397,PF00239,G3DSA:1.10.10.2600,IPR006119,SSF53041, SM00857,IPR025827,IPR038109,PS51736,cd03768, IPR006118,PF13408,G3DSA:3.40.50.1390,PF07508,Coil
MISNSAATHAKVAIYIRVSTLHQIDRDSLPMQRQDLIAYAKLILNTDDVTIFEDAGYSGKNTIRPEFQKMMSQLRTGTYTHLLVWKIDRISRNLLDFAEMYQELKDLGVTFVSKNEQFDTSTAMGEAMLKIILVFAELERNMTSERVTATMISRASNGQWNGGRIPYGYDYDPEEQDFSFNSDEYNIAHLIHDKYEELRSLVYLARYLNEHGYRTRAGNDWSPVSLDIILRSVFYCGDYQYNRLKEGDRQRPKDKSEWITVKGHHPAIVSREQKERILALLESNRRLKSFHKSGKSKYTHIFSGLLICGNCGQPMTSSISTVKKTTGRRYSLYFCPTHRKSKLWCTGKSTSDPIIGEFVFNYILNMLNAQKAFSPETSIQKLEQQLLSGDTFSPVVAIAPDGLQDLFHTLRTGTVKGEVFGKDVKIKTDSEPPLQLSKLKKEKIRLERAIDRLNKLFLYSEKAMSESEYLTQKIQLSDSLEEVEDKLAFLASEDSLQQSITDDEFIAKASNFILSQKLTDRNYVSFQSLSATVSPEVLDSFLSSIIDNIVFKDGAVHSITFRNGLSHTFIYKEKPEV

SEQ ID NO: 881 - protein, 577 aa, Unknown
  Description of Unknown: Integrase B882 sequence
  PTHR30461:SF3,IPR036162,PS51737,IPR011109,PTHR30461, PS00397,PF00239,G3DSA:1.10.10.2600,IPR006119,SSF53041, SM00857,IPR025827,IPR038109,PS51736,cd03768, IPR006118,PF13408,G3DSA:3.40.50.1390,PF07508,Coil
MISNSAATHAKVAIYIRVSTLHQIDRDSLPMQRQDLIAYAKLILNTDDVTIFEDAGYSGKNTIRPEFQKMMSQLRTGTYTHLLVWKIDRISRNLLDFAEMYQELKDLGVTFVSKNEQFDTSTAMGEAMLKIILVFAELERNMTSERVTATMISRASNGQWNGGRIPYGYDYDPEEQDFSFNSDEYNIAHLIHDKYEELRSLVYLARYLNEHGYRTRAGNDWSPVSLDIILRSVFYCGDYQYNRLKEGDRQRPKDKSEWITVKDHHPAIVSREQKERILALLESNRRLKSFRKSGKSKYTHIFSGLLICGNCGQPMTSSISTIKKTTGRRYSLYFCPTHRKSKLWCTGKSTSDPIVGEFVFNYILNMLNAQKAFSPETSIQELEQQLLSGDTFSPVVAIAPDGLQDLFHTLRTGTVKGEVFGKDVKIKTDSEPPLQLSKLKKEKVRLERAIDRLNKLFLYSEKAMSESEYLTQKIQLSDALEEVEDKLAFLASEDSLQQSITDDEFIAKASNFILSQKLTDRNYVSFQSLSATVSPEVLDSFLSSIIDNIVFKDGAIHSITFRNGLSHTFIYKEKPEV

SEQ ID NO: 882 - protein, 577 aa, Unknown
  Description of Unknown: Integrase B883 sequence
  PTHR30461:SF3,SM00857,G3DSA:1.10.10.2600,IPR036162,PF13408, IPR025827,G3DSA:3.40.50.1390,PS51737,IPR006119,IPR038109, PF07508,IPR011109,SSF53041,PTHR30461,Coil, PS51736,cd00338,PF00239
MDIYKVRQLLKGQSIFDIPLRVVYYVRVSTDKEEQKNSTVNQDTFFEELIASHPAWTFVGKYIDDGASGIMADKREDFQRMISDGQNQMYDLILTKEISRFARNTLDSIRYTRLLLNCGIGVWFYTDNVNTINEDAELHLAILSSIAQNESLKTSTRVRMGHAQSIKRGVVMGNSMLYGYNKDHGKLVIDPYEAEMVRSIYEKYATGVYTTPMLEREIYASGYRNHYGEKISRTVIGHIITNPKYKGYYVGGKVKIIDMFTKKRKFIPKDEWIMYKDETGERVPAIIDEETWELANKYFVERGDAIKARRKVCTTPNTFTGKIYCGTDGAPYWLKHRVLRGKDDSTWYCSDKLKNGTDSCKSFPIKEDEIRSMVVDLITLSPSDIQKYCEMYLEMLRKSIDSSVDKSAKIAELNKEIENNMAKKQKLLDYNLQGILSDDEFISNTKLLNRKIERAQSLIDSFTSKSPVELKSNSVLDKAAKLLNDFSGVKSEDLDNKIVDELIDKIVITPQDTDYASVEFYLKTSEKVHKTYDRKAVLRNDNLLNIMLPVRSTVFYRHPRHLYGHETEIRYDYRLVI

SEQ ID NO: 883 - protein, 577 aa, Unknown
  Description of Unknown: Integrase B884 sequence
  PTHR30461:SF3,IPR036162,PS51737,IPR011109,PTHR30461, PS00397,PF00239,G3DSA:1.10.10.2600,IPR006119,SSF53041, SM00857,IPR025827,IPR038109,PS51736,cd03768, IPR006118,PF13408,G3DSA:3.40.50.1390,PF07508,Coil
MISNSAATHAKVAIYIRVSTLHQIDRDSLPMQRQDLIAYAKLILNTDDVTIFEDAGYSGKNTIRPEFQKMMSQLRTGTYTHLLVWKIDRISRNLLDFAEMYQELKNLGVTFVSKNEQFDTSTAMGEAMLKIILVFAELERNMTSERVTATMISRASNGQWNGGRIPYGYDYDPEEQAFSFNSDEYNIAHLIHDKYEELRSLVYLARYLNEHGYRTRAGNDWSPVSLDIILRSVFYCGDYQYNRLKEGDRQRPKDKSEWITVKDHHLAIVSREQKERILALLESNRRLKSFRKSGKSKYTHIFSGLLICGNCGQPMTSSISTVKKTTGRRYSLYFCPTHRKSKLWCTGKSTSDPIVGEFVFNYILNMLNAQKAFSPETSIQELEQQLLSGDTFSPVVAIAPDGLQDLFHTLRTGTVKGEVFGKDVKIKTDSEPPLQLSKLKKEKVRLERAIDRLNKLFLYSEKAMSESEYLTQKIQLSDALEEVEDKLAFLASEDSLQQSITDDEFIAKASNFILSQKLTDRNYVSFQSLSATVSPEVLDSFLSSIIDNIVFKDGAIHSITFRNGLSHTFIYKEKPEV

SEQ ID NO: 884 - protein, 577 aa, Unknown
  Description of Unknown: Integrase B885 sequence
  PTHR30461:SF3,IPR036162,PS51737,IPR011109,PTHR30461, PS00397,PF00239,G3DSA:1.10.10.2600,IPR006119,SSF53041, SM00857,IPR025827,IPR038109,PS51736,cd03768, IPR006118,PF13408,G3DSA:3.40.50.1390,PF07508,Coil
MISNSAATHAKVAIYIRVSTLHQIDRDSLPMQRQDLIAYAKLILNTDDVTIFEDAGYSGKNTIRPEFQKMMSQLRTGTYTHLLVWKIDRISRNLLDFAEMYQELKNLGVTFVSKNEQFDTSTAMGEAMLKIILVFAELERNMTSERVTATMISRASNGQWNGGRIPYGYDYDSEEQAFSFNSDEYNIAHLIHDKYEELRSLVYLARYLNEHGYRTRAGNDWSPVSLDIILRSVFYCGDYQYNRLKEGDRQRPKDKSEWITVKDHHPAIVSREQKERILALLESNRRLKSFRKSGKSKYTHIFSGLLICGNCGQPMTSSISTIKKTTGRRYSLYFCPTHRKSKLWCTGKSTSDPIVGEFVFNYILNMLNAQKAFSPETSIQELEQQLLSGDTFSPVAAIAPDGLHDLFHTLRTGTIKGEVFGKDVKIKTGSEPPLQLSKLKKEKVRLERAIDRLNKLFLYSEKAMSESEYLTQKIQLSDSLEEVEDKLAFLASEGSLQQSITDDEFIAKASNFILSQKLTDRNYVSFQSLSATVSPEVLDSFLSSIIDNIVFKDGAIHSITFRNGLSHTFIYKEKPEV

SEQ ID NO: 885 - protein, 577 aa, Unknown
  Description of Unknown: Integrase B886 sequence
  SM00857,G3DSA:1.10.10.2600,IPR036162,PF13408,PS51737, G3DSA:3.40.50.1390,IPR025827,IPR006119,IPR038109,PF07508, IPR011109,SSF53041,PTHR30461,Coil,PS51736, cd00338,PF00239
MNIYHTRERLRTRSIYDLNLRVAFYARVSTDSEDQQVSIAHQTQYYKEFIKSNRNWKFAKGYIDNGISGIQTKHREQFKEMLEDAKNGKFDMLITKEITRFARNTLDSIQYTRQMLSWGVCVWFQNDNINTIDEDSELRLTIMAGVAQDEVRKLSNRVKFGHKQSIKNGVVLGNSRIYGYDKKDGKLTINESEAQMVRMIFEDYASGEWTTPQLEKKLYNMGYRNYKGGKIDRNVIRHIIRNPKYKGYYAGGKVKIVDMFTKKQEFLPESEWVMFKDDGSHVPQIVDEEVWKKANEYIDARGEIVKTRRTSIKKSENVFTGMLICGNDGASYWLKQRTLRGKEDVKWVCSRKIKEGAASCDSFYIDDGELREVIAKLICESSGDIEQIAEKFIKIYHSSINQADASTEIKRLEKQINVAERKSDKLLEYNLDGAISDAVFIEKSQKLETQIEEYKKQIEKLSTIQDDIVPIENQIRAIAHSVKQLDGISPDDITKTVVDSFLKKIVVNPIGEKEAKLVFYLKDGITTEMSFVSGKSMRCSVNLFNPIFTERSTTFYRALRSFPGHKEPVKYTYFFAF

SEQ ID NO: 886 - protein, 577 aa, Unknown
  Description of Unknown: Integrase B887 sequence
  PTHR30461:SF3,IPR036162,PS51737,IPR011109,PTHR30461, PS00397,PF00239,G3DSA:1.10.10.2600,IPR006119,SSF53041, SM00857,IPR025827,IPR038109,PS51736,cd03768, IPR006118,PF13408,G3DSA:3.40.50.1390,PF07508,Coil
MISNSAATHAKVAIYIRVSTLHQIDRDSLPMQRQDLIAYAKLILNTDDVTVFEDAGYSGKNTIRPEFQKMMSQLRTGTYTHLLVWKIDRISRNLLDFAEMYQELKDLGVTFVSKNEQFDTSTAMGEAMLKIILVFAELERNMTSERVAATMISRASNGQWNGGRIPYGYDYDPEEQTFSFNSDEYNIAHLIHDKYEELRSLVYLARYLNEHCYRTRAGNDWSPVSLDIILRSVFYCGDYQYNRLKEGDRQRPKDKSEWITVKDHHPAIVSREQKERILALLESNRRLKSFRKSGKSKYTHIFSGLLICGNCGQPMTSSISTIKKTTGRRYSLYFCPTHRKSKLWCTGKSTSDPIVGEFVFNYILNMLNAQKAFSSETSIQELEQQLLSGDTFSPVAAIAPDGLQDLFHTLRTGTIKGEVFGKDVKIKTGSEPPLQLSKLKKEKVRLERAIDRLNKLFLYSEKAMSESEYLTQKIQLSDALEEVEDKLTFLASEDSLQQSITDNEFIAKASNFILSQKLTDRNYVSFQSLSATVSPEVLDSFLSSIIDNIVFKDGAIHSITFRNGLSHTFIYKEKPEV

SEQ ID NO: 887 - protein, 577 aa, Unknown
  Description of Unknown: Integrase B888 sequence
  PTHR30461:SF3,IPR036162,PS51737,IPR011109,PTHR30461, PS00397,PF00239,G3DSA:1.10.10.2600,IPR006119,SSF53041, SM00857,IPR025827,IPR038109,PS51736,cd03768, IPR006118,PF13408,G3DSA:3.40.50.1390,PF07508,Coil
MSINRNNTSETPKKAALYVRVSTNYQIDRDSLPMQRQELITYAQLMFGINDYVIFEDAGYSGKNTDRPEFQNMMRRIRAGEFTHLLCWKIDRISRNLLDFASMYQELKDLGVTFVSKNEQFDTSTAIGEAMLKIILVFAELERNMTSERVTATMLSRAQNGLWNGGRVPYGYDYDKDSKTFSINQEEAFLVRKMYDLYSEHRSLVMVSRTLNEDGYASRAGNDWSPVSIFIILTNPFYTGIYRYNHYKIPGLKIEKDPSEWIEVPDHHPRIISDEQFDNVNRILQSNSRSKRLPGQQHTSKGTHIFGGLLYCGTCGSQYVSTPSRLLASGYRPSKYACPNLRKKKTCNTKSISDPVIGEFVLNYVLNMMHARAAFSSIHDTSELQDALLNGGTFQNVDHIGKDGLDSCFHMFSSTPLDGKRFRKPKKATTIDPELKRLRAEKRKTERALDRLMNLYLYADNPISEKDFVIRKQALDDYLKEINENLGMIDRGRGIETISDENFIKRASYFIMSKELAGKDYIYFKKLAMDMDAEILRDFFQEIIDSIVMEGSNVKEIVFRNGLAHTFFYKDTEKPEA

SEQ ID NO: 888 - protein, 577 aa, Unknown
  Description of Unknown: Integrase B889 sequence
  SM00857,G3DSA:1.10.10.2600,IPR036162,PF13408,IPR025827, G3DSA:3.40.50.1390,PS51737,IPR006119,IPR038109,PF07508, IPR011109,SSF53041,PTHR30461,Coil,PS51736, cd00338,PF00239
MNIYHTRERLRTRSIYDLNLRVAFYARVSTDSEDQQVSIEHQTQYYKEFIKSNRNWKFAKGYIDNGISGIQTKHREQFKEMLEDAKNGKFDMLITKEITRFARNTLDSIQYTRQMLSWGVCVWFQNDNINTIDEDSELRLTIMAGVAQDEVRKLSNRVKFGHKQSIKNGVVLGNSRIYGYDKKDGKLTINESEAQMVRMIFEDYASGEWTTPQLEKKLYNMGYRNYKGGKIDRNVIRHIIRNPKYKGYYAGGKVKIVDMFTKKQEFLPESEWVMFKDDGSHVPQIVDEEVWKKANEYIDARGEIVKTRRTSIKKSENVFTGMLICGNDGASYWLKQRTLRGKEDVKWVCSKKIKEGAASCDSFYIDDRELREVIAKLIRESSGDIEQIAEKFIKIYHSSMNQADASTEIKRLEKQINVAERKSDKLLEYNLDGAISDAVFIEKSQKLEAQIEEYKKQIEKLSTIQDDIVPIENQIRAIAHSVKQLDGISPDDITKTVVDSFLKKIVVNPIGEKEAKLVFYLKDGITTEMSFVSGKSMRCSVNLFNPIFTERSTTFYRALRSFPGHKEPVKYTYFFAF

SEQ ID NO: 889 - protein, 577 aa, Unknown
  Description of Unknown: Integrase B890 sequence
  SM00857,G3DSA:1.10.10.2600,IPR036162,PF13408,IPR025827, G3DSA:3.40.50.1390,PS51737,IPR006119,IPR038109,PF07508, IPR011109,SSF53041,PTHR30461,Coil,PS51736, cd00338,PF00239
MNIYHTRERLRTRSIYDLNLRVAFYARVSTDSEDQQVSIEHQTQYYKEFIKSNRNWKFAKGYIDNGISGIQTKHREQFKEMLEDAKNGKFDMLITKEITRFARNTLDSIQYTRQMLSWGVCVWFQNDNINTIDEDSELRLTIMAGVAQDEVRKLSNRVKFGHKQSIKNGVVLGNSRIYGYDKKDGKLTINESEAQMVRMIFEDYASGEWTTPQLEKKLYNMGYRNYKGGKIDRNVIRHIIRNPKYKGYYAGGKVKIVDMFTKKQEFLPESEWVMFKDDGSHVPQIVDEEVWKKANEYIDARGEIVKTRRTSIKKSENVFTGMLICGNDGASYWLKQRTLRGKEDVKWVCSKKIKEGAASCDSFYIDDRELREVIAKLIRESSGDIEQIAEKFIKIYHSSMNQADASTEIKRLEKQINVAERKSDKLLEYNLDGAISDAVFIEKSQKLEAQIEEYKKQIEKLSTIQDDIVPIENQIRAIAHSVKQLDGIGPDDITKTVVDSFLKKIVVNPIGEKEAKLVFYLKDGITTEMSFVSGKSMRCSVNLFNPIFTERSTTFYRALRSFPGHKEPVKYTYFFAF

SEQ ID NO: 890 - protein, 577 aa, Unknown
  Description of Unknown: Integrase B891 sequence
  PTHR30461:SF3,IPR036162,PS51737,IPR011109,PTHR30461, PS00397,PF00239,G3DSA:1.10.10.2600,IPR006119,SSF53041, SM00857,IPR025827,IPR038109,PS51736,cd03768, IPR006118,PF13408,G3DSA:3.40.50.1390,PF07508,Coil
MISNSAATHAKVAIYIRVSTLHQIDRDSLPMQRQDLIAYAKLILNTDDVTIFEDAGYSGKNTIRPEFQKMMSQLRTGTYTHLLVWKIDRISRNLLDFAEMYQELKDLGVTFVSKNEQFDTSTAMGEAMLKIILVFAELERNMTSERVTATMISRASNGQWNGGRIPYGYDYDPEEQDFSFNSDEYNIAHLIHDKYEELRSLVYLARYLNEHGYRTRAGNDWSPVSLDIILRSVFYCGDYQYNRLKEGDRQRPKDKSEWITVKDHHPAIVSREQKERILALLESNRRLKSFRKSGKSKYTHIFSGLLICGNCGQPMTSSISTIKKTTGRRYSLYFCPTHRKSKLWCTGKSTSDPIIGEFVFNYILNMLNAQKAFSSETSIQELEQQLLSGDTFSPVAAIAPDGLQDLFHTLRTGTIKGEVFGKDVKIKTGSEPPLQLSKLKKEKVRLERAIDRLNKLFLYSEKAMSESEYLTQKIQLSDALEEVEDKLAFLASEDSLQQSITDDEFIAKASNFILSQKLTDRNYVSFQSLSATVSPEVLDSFLSSIIDNIVFKDGAVHSITFRNGLSHTFIYKEKPEV

SEQ ID NO: 891 - protein, 577 aa, Unknown
  Description of Unknown: Integrase B892 sequence
  PTHR30461:SF3,IPR036162,PS51737,IPR011109,PTHR30461, PS00397,PF00239,G3DSA:1.10.10.2600,IPR006119,SSF53041, SM00857,IPR025827,IPR038109,PS51736,cd03768, IPR006118,PF13408,G3DSA:3.40.50.1390,PF07508,Coil
MISNSTATHAKVAIYIRVSTLHQIDRDSLPMQRQDLIAYAKLILNTDDVTIFEDAGYSGKNTIRPEFQKMMSQLRTGTYTHLLVWKIDRISRNLLDFAEMYQELKDLGVTFVSKNEQFDTSTAMGEAMLKIILVFAELERNMTSERVTATMISRASNGQWNGGRIPYGYDYDPEEQAFSFNSDEYNIAHLIHDKYEELRSLVYLARYLNEHGYRTRAGNDWSPVSLDIILRSVFYCGDYQYNRLKEGDRQRPKDKSEWITVKDHHLAIVSREQKERILALLESNRRLKSFRKSGKSKYTHIFSGLLICGNCGQPMTSSISTVKKTTGRRYSLYFCPTHRKSKLWCTGKSTSDPIVGEFVFNYILNMLNAQKAFSPETSIQELEQQLLSGDTFSPVVAIAPDGLQDLFHTLRTGTVKGEVFGKDVKIKTDSEPPLQLSKLKKEKVRLERAIDRLNKLFLYSEKAMSESEYLTQKIQLSDALEEVEDKLAFLASEDSLQQSITDDEFIAKASNFILSQKLTDRNYVSFHSLSATVSPEVLDSFLSSIIDNIVFKDGAIHSITFRNGLSHTFIYKEKPEV

SEQ ID NO: 892 - protein, 577 aa, Unknown
  Description of Unknown: Integrase B893 sequence
  PTHR30461:SF3,IPR036162,PS51737,IPR011109,PTHR30461, PS00397,PF00239,G3DSA:1.10.10.2600,IPR006119,SSF53041, SM00857,IPR025827,IPR038109,PS51736,cd03768, IPR006118,PF13408,G3DSA:3.40.50.1390,PF07508,Coil
MISNSSATHAKVAIYIRVSTLHQIDRDSLPMQRHDLIAYAKLILNTDDVTIFEDAGYSGKNTIRPEFQKMMSQLRTGTYTHLLVWKIDRISRNLLDFAEMYQELKDLGVTFVSKNEQFDTSTAMGEAMLKIILVFAELERNMTSERVTATMISRASNGQWNGGRIPYGYDYDPEEQGFSFNSDEYNIAHLIHDKYEELRSLVYLARYLNEHGYRTRAGNDWSPVSLDIILRSVFYCGDYQYNRLKEGDRQRPKDKSEWITVKDHHPAIVSREQKERILALLESNRRLKSFRKSGKSKYTHIFSGLLICGNCGQPMTSSISTIKKTTGRRYSLYFCPTHRKSKLWCTGKSTSDPIVGEFVFNYILNMLNAQKAFSPETSIQELEQQLLSGDTFSPVAAIAPDGLHDLFHTLRTGTIKGEVFGKDVKIKTGSEPPLQLSKLKKEKVRLERAIDRLNKLFLYSEKAMSESEYLTQKIQLSDSLEEVEDKLAFLASEGSLQQSITDDEFIAKASNFILSQKLTDRNYISFQSLSATVSPEVLDSFLSSIIDNIVFKDGAVNSITFRNGLSHTFIYREKPEV

SEQ ID NO: 893 - protein, 577 aa, Unknown
  Description of Unknown: Integrase B894 sequence
  PTHR30461:SF3,IPR036162,PS51737,IPR011109,PTHR30461, PS00397,PF00239,G3DSA:1.10.10.2600,IPR006119,SSF53041, SM00857,IPR025827,IPR038109,PS51736,cd03768, IPR006118,PF13408,G3DSA:3.40.50.1390,PF07508,Coil
MISNSAATHAKVAIYIRVSTLHQIDRDSLPMQRQDLIAYAKLILNTDDVTVFEDAGYSGKNTIRPEFQKMMSQLRTGTYTHLLVWKIDRISRNLLDFAEMYQELKDLGVTFVSKNEQFDTSTAMGEAMLKIILVFAELERNMTSERVAATMISRASNGQWNGGRIPYGYDYNPEEQDFSFNSDEYNIAHLIHDKYEELRSLVYLARYLNEHGYRTRAGNDWSPVSLDIILRSVFYCGDYQYNRLKEGDRQRPKDKSEWITVKDHHPAIVSREQKERILALLESNRRLKSFRKSGKSKYTHIFSGLLICGNCGQPMTSSISTVKKTTGRRYSLYFCPTHRKSKLWCTGKSTSDPIIGEFVFNYILNMLNAQKAFSPETSIQELEQQLLSGDTFSPVAAIAPDGLQDLFHTLRTGTVKGEVFGKDVKIKTDSEPPLQLSKLKKEKIRLERAIDRLNKLFLYSEKAMSESEYLTQKIQLSDSLEEIEDKLAFLASEDSLQQSITDDEFISKASNFILSQKLTDRNYVSFQSLSATVSPEVLDSFLSSIIDNIVFKDGAVHSITFRNGLSHTFIYKEKPEV

SEQ ID NO: 894 - protein, 577 aa, Unknown
  Description of Unknown: Integrase B895 sequence
  PTHR30461:SF3,IPR036162,PS51737,IPR011109,PTHR30461, PS00028,PF00239,G3DSA:1.10.10.2600,IPR006119,SSF53041, IPR013087,cd00338,SM00857,IPR025827,IPR038109, PS51736,PF13408,G3DSA:3.40.50.1390,PF07508,Coil
MRQKFKIDLSMLTPEEQQQFRDDPTTLTKGEVDVALYLRFSSERQKEQSIEGQLRDCIAYCKRKSFRIVAIYVDRATTARKDVEKRVHFQEMISDSIHHLWNFVVVWKLDRFARNREDSAVFKMRLRKNGVRVKSATETISENPEGIILESVLEGIAEYYSADLSQKITRGLRESAMKGHSVGGHVPLGYKIEDHKLVINPATAHIVQEAFQLYANGESMAEICRIFNNKGYRTAKNSEFNRSSFKSMFKNVRYIGTYIYKDIEKENAIPAIIDKDLFETVQRRLSLTADAPARGKAKVDYLLSGKLFCGHCGAAMNGDSGTGRHGETHNYYKCFSRKKHKNCNKKPLKKDFIERIVAQDAMALLTNDVIEELADMAMSQADRDLKENTRIPELSTRLTEVEQGINNITKAVEKGIASDALLNRLTELEKEKKDLTSQLREEEKYIYRIDRDQVVFWLTKFQGGDIEDEDCRRRIIDLLVNSVTVWDEPDGYKITTAYNLTSCKTKTFRVSNNADSPSGEGFGFGELSSTMKADLFRQVCFSYALMQTFVLSFAPPLHAACNCWNCSKDTLNSTSSV

SEQ ID NO: 895 - protein, 577 aa, Unknown
  Description of Unknown: Integrase B896 sequence
  PTHR30461:SF3,SM00857,G3DSA:1.10.10.2600,IPR036162,PF13408, PS51737,G3DSA:3.40.50.1390,IPR025827,IPR006119,IPR038109, PF07508,IPR011109,SSF53041,PF00239,PTHR30461, PS51736,Coil,cd00338
MRVSVNLNAQKPDTTTNAVIYARYSSHGQTEQSIEGQLAKGHEYAAAQGYTVVHEYIDRAMTGRNDNREAFQKMLSDTGKHQFQVVIVWKVDRFGRNREEIAFNKHTCKKNGVRVEYVAESLPNSPEAVILESVLEGMAEYYSIQLSQNIRRGQLESAKKCQCVGGSVPLGYTLDSDKHFVIDPQTAPVVKKIFDLYAEGATISEITGQLNEQGIRTIRKQLFTKNSLTKLLKNEKYIGVYTYKDIVRVEGGVPAIVDKSTFDRVQELLKINRRAPSHTWTKVEYLLTDKLFCGHCGSPMVGESGFSHTGAKYSYYGCIKRRREKACDKKPVRQDWIEALVLDETVKLLHDDELMEYIIDRTWEYYQVTDKVQEEKAVLEAQLAEVDKAINNLVRAIEAGIFNAATKSRMDELDAQKAALTTSLADLELTSGIRITRDHIEYFLLRLRDLDVKDRECQKRLVQTFVNAVFVYDDGRVKITYNYSGQSSTITLNQIASAEKGKGFVCCLPCSTSRNPWRCKGFGFFSAAVYPHHTHKRFRFHTHEKPLCAQFCVSYSVPMNFSILAAAFCDIWLLTCP

SEQ ID NO: 896 - protein, 577 aa, Unknown
  Description of Unknown: Integrase B897 sequence
  PTHR30461:SF3,IPR036162,PS51737,IPR011109,PTHR30461, PS00397,PF00239,G3DSA:1.10.10.2600,IPR006119,SSF53041, SM00857,IPR025827,IPR038109,PS51736,cd03768, IPR006118,PF13408,G3DSA:3.40.50.1390,PF07508,Coil
MISNSAATHAKVAIYIRVSTLHQIDRDSLPMQRQDLIAYAKLILNTDDVTIFEDAGYSGKNTIRPEFQKMMSQLRTGTYTHLLVWKIDRISRNLLDFAEMYQELKDLGVTFVSKNEQFDTSTAMGEAMLKIILVFAELERNMTSERVTATMISRASNGQWNGGRIPYGYDYDPEEQDFSFNSDEYNIAHLIHDKYEELRSLVYLARYLNEHGYRTRAGNDWSPVSLDIILRSVFYCGDYQYNRLKEGDRQRPKDKSKWITVKDHHPAIVSREQKERILALLESNRRLKSFRKSGKSKYTHIFSGLLICGNCGQPMTSSISTIKKTTGRRYSLYFCPTHRKSKLWCTGKSTSDPIVGEFVFNYILNMLNAQKAFSPETSIQELEQQLLSGDTFSPVAAIAPDGLHDLFHTLRTGTIKGEVFGKDVKIKTGSEPPLQLSKLKKEKVRLERAIDRLNKLFLYSEKAMSESEYLTQKIQLSDSLEEVEDKLAFLASEGSLQQSITDDEFIAKASNFILSQKLTDRNYISFQSLSATVSPEVLDSFLSSIIDNIVFKDGAVNSITFRNGLSHTFIYREKPEV

SEQ ID NO: 897 - protein, 577 aa, Unknown
  Description of Unknown: Integrase B898 sequence
  PTHR30461:SF3,IPR036162,PS51737,IPR011109,PTHR30461, PS00397,PF00239,G3DSA:1.10.10.2600,IPR006119,SSF53041, SM00857,IPR025827,IPR038109,PS51736,cd03768, IPR006118,PF13408,G3DSA:3.40.50.1390,PF07508
MNQNYEMPESGTEKRVRVAIYVRVSTVYQIDKDSLPMMKQDLTSYCKYILNTDDYVIFEDAGYSGKNTARPAYQKMMSQIREGLFTHLLVWKIDRISRNLLDFANMYQELKDLGVTFVSKNEQFDTSTAIGEAMLKIILIFAELERNMTSERVTATMINRASNGVWNGGRVPYGYDYDKENQIFSINPEENVIYNFLLDTYEKTGSMVITARTLNDSGYRTRNNNLWSPVGVCIILHNPWYKGVYRYNYYKIPGRKAVKDQDEWVVVENHHPASIDPERFEHIQKLIASNARNRNAPGRKTTRKNTHVFSNLLWCAECGAAFVASPGKIRASGYRPSKYGCPNVRKTEKCHAKYVSDGTLGEFLLNYILNILNVQKNFASIQSIEDLQKQLLHGSTFENVDHINEDGLLSLYTMLEKFPGKESVLTRPVTVKPKVDPEIKRLVADQKKQQRALERLDHLYLYSDNPMSEREYVIRKQQILDCLQEINETLGMTSQEPWTRIVSDNEFIRQASSFILTQKLSDRQYIYYDTLAESIQPEILKNFFLSLLDSVILKDGLPQTIVFRNGLCHTFTYKNNS

SEQ ID NO: 898 - protein, 577 aa, Unknown
  Description of Unknown: Integrase B899 sequence
  PTHR30461:SF3,SM00857,G3DSA:1.10.10.2600,IPR036162,PF13408, IPR025827,G3DSA:3.40.50.1390,PS51737,IPR006119,IPR038109, PF07508,IPR011109,SSF53041,PF00239,PTHR30461, PS51736,Coil,cd00338
MDIYKVRQLLKEQSIFDIPLRVVYYVRVSTDKEEQKNSTVNQDTFFEDLIASHPAWTFVGKYIDDGASGIMADKREDFQRMISDGQNKMYDLILTKEISRFARNTLDSIRYTRLLLNCGIGVWFYTDNVNTINEDAELHLAILSSIAQNESLKTSTRVRMGHAQSIKRGVVMGNSMLYGYNKDHGKLVIDPYEAEMVRSIYEKYATGVYTTPMLEREIYASGYRNHYGEKISRTVIGHIITNPKYKGYYVGGKVKIIDMFTKKRKFIPKDEWIMYKDETGERVPAIIDEETWELANKYFVERGDAIKARRKVCTTPNTFTGKIYCGTDGAPYWLKHRVLRGKDDSTWYCSDKLKNGTDSCKSFPIKEDEIRSMVVDLITLSPSDIQKYCEMYLEMLRKNIDSSVDKSAKIAELNKEIENNMAKKQKLLDYNLQGILSDDEFISNTKLLNRKIERAQSLIDSFTSKSPVELKSNSVLDKAAKLLNDFSGVKSEDLDNKIVDELIDKIVITPQDTDYASVEFYLKTSEKVHKTYDRKAVLRNDNLLNIMLPVQSTVFYRHPRHLYGHETEIRYDYRLVI

SEQ ID NO: 899 - protein, 577 aa, Unknown
  Description of Unknown: Integrase B900 sequence
  PTHR30461:SF3,IPR036162,PS51737,IPR011109,PTHR30461, PS00397,PF00239,G3DSA:1.10.10.2600,IPR006119,SSF53041, SM00857,IPR025827,IPR038109,PS51736,cd03768, IPR006118,PF13408,G3DSA:3.40.50.1390,PF07508,Coil
MISNSAATHTKVAIYIRVSTLHQIDRDSLPMQRQDLIAYAKLILNTDDVTIFEDAGYSGKNTIRPEFQKMMSQLRTGTYTHLLVWKIDRISRNLLDFAEMYQELKNLGVTFVSKNEQFDTSTAMGEAMLKIILVFAELERNMTSERVTATMISRASNGQWNGGRIPYGYDYDPEEQAFSFNSDEYNIAHLIHDKYEELRSLVYLARYLNEHGYRTRAGNDWSPVSLDIILRSVFYCGDYQYNRLKEGDRQRPKDKSEWITVKDHHPAIVSREQKERILALLESNRRLKSFRKSGKSKYTHIFSGLLICGNCGQPMTSSISTIKKTTGRRYSLYFCPTHRKSKLWCTGKSTSDPIVGEFVFNYILNMLNAQKAFSPETSIQELEQQLLSGDTFSPVAAIAPDGLHDLFHTLRTGTIKGEVFGKDVKIKTGSEPPLQLSKLKKEKVRLERAIDRLNKLFLYSEKAMSESEYLTQKIQLSDSLEEVEDKLAFLASEGSLQQSITDDEFIAKASNFILSQKLTDRNYVSFQSLSATVSPEVLDSFLSSIIDNIVFKDGAIHSITFRNGLSHTFIYKEKPEV

SEQ ID NO: 900 - protein, 577 aa, Unknown
  Description of Unknown: Integrase B901 sequence
  PTHR30461:SF3,SM00857,G3DSA:1.10.10.2600,IPR036162,PF13408, PS51737,G3DSA:3.40.50.1390,IPR025827,IPR006119,IPR038109, PF07508,SSF53041,IPR011109,PF00239,PTHR30461, Coil,cd00338
MDIYNVANQMKLERKTIFDLNIRVTFYARVSTTRDEQENSIENQIAYFTEMIKGNKNWEYVEGYVDRIRGESAENRTEFMQMINDGKGGKFDLIITKEVSRFARDTVDSLNYTRDLLRCGVGVFFQNDNICTVDTDSELRLTIMASIAADEVRKLSERIRWGHRRSIESGNVLGNNRIFGYDLYDKKLHINEREAEMVKLIFELYSSGHYSVRKIEQKLYDEGFRGRNGNRIHHNTISGIIQNPKYKGYFCGGKVKITDFRTRQQRFLPEEEWIMHKDLTGETVPAIVSEDLWDRCNQIFKERSEIVKSKERSIKDRSVFTGKIWCAVDGKAYWRTSYSNSKQKGKSIYQWICSEKKRINAKACPSFSILESELYQMVGEFFQSVVPSIESYTDNFISIYQKNDSAAVIRKQLREIEDKIGREKAKKDKLFELYLDEIITKNEFKKRNDDSDSLIASLESNAKELNRESSSDKTVETIKEITAYIKDVYSPGEPMPKELVDDLVETIIDRIDVEPVNDNSMKVSIKLRTGEKQDYKYSNSGRRLRNNEIGNLCSSGIMSFTIWPPIEPACFAVSSPL

SEQ ID NO: 901 - protein, 577 aa, Unknown
  Description of Unknown: Integrase B902 sequence
  PTHR30461:SF3,IPR036162,PS51737,IPR011109,PTHR30461, PS00397,PF00239,G3DSA:1.10.10.2600,IPR006119,SSF53041, SM00857,IPR025827,IPR038109,PS51736,cd03768, IPR006118,PF13408,G3DSA:3.40.50.1390,PF07508,Coil
MISNSAATHAKVAIYIRVSTLHQIDRDSLPMQRQDLIAYAKLILNTDDVTIFEDAGYSGKNTIRPEFQKMMSQLRTGTYTHLLVWKIDRISRNLLDFAEMYQELKDLGVTFVSKNEQFDTSTAMGEAMLKIILVFAELERNMTSERVTATMISRASNGQWNGGRIPYGYDYDPEEQDFSFNSDEYNIAHLIHDKYEELRSLVYLARYLNEHGYRTRAGNDWSPVSLDIILRSVFYCGDYQYNRLKEGDRQRPKDKSEWITVKDHHPAIVSREQKERILALLESNRRLKSFRKSGKSKYTHIFSGLLICGNCGQPMTSSISTIKKTTGRRYSLYFCPTHRKSKLWCTGKSTSDPIVGEFVFNYILNMLNAQKAFSPETSIQELEQQLLSGDTFSPVAAIAPDGLHDLFHTLRTGTIKGEVFGKDVKIKTGSEPPLQLSKLKKEKVRLERAIDRLNKLFLYSEKAMSESEYLTQKIQLSDSLEEVEDKLAFLASEDSLQQSITDDEFIAKASNFILSQKLTDRNYVSFQSLSATVSPEVLDSFLSSIIDNIVFKDGAVHSITFRNGLSHTFIYKEKPEV

SEQ ID NO: 902 - protein, 577 aa, Unknown
  Description of Unknown: Integrase B903 sequence
  PTHR30461:SF3,IPR036162,PS51737,IPR011109,PTHR30461, PS00397,PF00239,G3DSA:1.10.10.2600,IPR006119,SSF53041, SM00857,IPR025827,IPR038109,PS51736,cd03768, IPR006118,PF13408,G3DSA:3.40.50.1390,PF07508,Coil
MISNSAATHAKVAIYIRVSTLHQIDRDSLPMQRQDLIAYAKLILNTDDVTVFEDAGYSGKNTIRPEFQKMMSQLRTGTYTHLLVWKIDRISRNLLDFAEMYQELKDLGVTFVSKNEQFDTSTAMGEAMLKIILVFAELERNMTSERVAATMISRASNGQWNGGRIPYGYDYDTEEQTFSFNSDEYNIAHLIHDKYEELRSLVYLARYLNEHGYRTRAGNDWSPVSLDIILRSVFYCGDYQYNRLKEGDRQRPKDKSEWITVKDHHPAIVSRGQKERILALLESNRRLKSFRKSGKSKYTHIFSGLLICGNCGQPMTSSISTVKKTTGRRYSLYFCPTHRKSKLWCTGKSTSDPIIGEFVFNYILNMLNAQKAFSPETSIQELEQQLLSGDTFSPVAAIAPDGLQDLFHTLRTGTVKGEVFGKDVKIKTDSEPPLQLSKLKKEKIRLERAIDRLNKLFLYSEKAMSESEYLTQKIQLSDSLEEVEDKLAFLASEDSLQQSITDDEFISKASNFILSQKLTDRNYVSFQSLSATVSPEVLDSFLSSIIDNIVFKDGAVHSITFRNGLSHTFIYKEKPEV

SEQ ID NO: 903 - protein, 577 aa, Unknown
  Description of Unknown: Integrase B904 sequence
  PTHR30461:SF3,IPR036162,PS51737,IPR011109,PTHR30461, PS00397,PF00239,G3DSA:1.10.10.2600,IPR006119,SSF53041, SM00857,IPR025827,IPR038109,PS51736,cd03768, IPR006118,PF13408,G3DSA:3.40.50.1390,PF07508,Coil
MSINRNNTNETPKKAALYVRVSTNYQIDRDSLPMQRQELITYAQLMFGINDYVVFEDAGYSGKNTDRPEFQNMMRRIRAGEFTHLLCWKIDRISRNLLDFASMYQELKDLGVTFVSKNEQFDTSTAIGEAMLKIILVFAELERNMTSERVTATMLSRAQNGLWNGGRVPYGYDYDKDSKTFSINQEEAFLVHKMYDLYSEHRSLVMVSRALNEDGYASRAGNDWSPVSIFIILTNPFYTGKYRYNHYKIPGLKIEKDPSEWIEVPDHHPRIISDEQFGNVNRILQANSRSKRLPGQQHTSKGTHIFGGLLYCGTCGSQYVSTPSRLLASGYRPSKYACPNLRKKKTCNTKSISDPVIGEFVLNYVLNMMHARAAFSSIHDTSELQDALLNGGTFQNVDHIGKDGLDGCFHMFSSTPLDGKRFRKPKKATTIDPELKRLRAEKRKTERALDRLMNLYLYADNPISEKDFIIRKQALDDYLKEINENLGMIDRGRGIETISDENFIKRASYFIMSKELAGKDYIYFKKLAMDMDAEILRDFFQEIIDSIVMEGSNVKEIVFRNGLAHTFFYKDAEKPEA

SEQ ID NO: 904 - protein, 577 aa, Unknown
  Description of Unknown: Integrase B905 sequence
  PTHR30461:SF3,SM00857,G3DSA:1.10.10.2600,IPR036162,PF13408, IPR025827,PS51737,G3DSA:3.40.50.1390,IPR006119,IPR038109, PF07508,IPR011109,SSF53041,PF00239,PTHR30461, PS51736,Coil,cd00338
MDIYKVRQLLKGQSIFDIPLRVVYYVRVSTDKEEQKNSTVNQDTFFEELIASHPAWTFVGKYIDDGASGIMADKREDFQRMISDGQNQMYDLILTKEISRFARNTLDSIRYTRLLLNCGIGVWFYTDNVNTINEDAELHLAILSSIAQNESLKTSTRVRMGHAQSIKRGVVMGNSMLYGYNKDHGKLVIDPYEAEMVRSIYEKYATGVYTTPMLEREIYASGYRNHYGEKISRTVIGHIITNPKYKGYYVGGKVKIIDMFTKKRKFIPKDEWIMYKDETGERVPAIIDEETWELANKYFVERGDAIKARRKVCTTPNTFTGKIYCGTDGAPYWLKHRVLRGKDDSTWYCSDKLKNGTDSCKSFPIKEDEIRSMVVDLITLSPSDIQKYCEMYLEMLRKNIDSSVDKSAKIAELNKEIENNMAKKQKLLDYNLQGILSDDEFISNTKLLNRKIERAQSLIDSFTSKSPVELKSNSVLDKAAKLLNDFSGVKSEDLDNKIVDELIDKIVITPQDTDYASVEFYLKTSEKVHKTYDRKAVLRNDNLLNIMLPVRSTVFYRHPRHLYGHETGIRYDYRLVI

SEQ ID NO: 905 - protein, 577 aa, Unknown
  Description of Unknown: Integrase B906 sequence
  PTHR30461:SF3,IPR036162,PS51737,IPR011109,PTHR30461, PS00397,PF00239,G3DSA:1.10.10.2600,IPR006119,SSF53041, SM00857,IPR025827,IPR038109,PS51736,cd03768, IPR006118,PF13408,G3DSA:3.40.50.1390,PF07508,Coil
MISNSAATHAKVAIYIRVSTLHQIDRDSLPMQRQDLIAYAKLILNTDDVTIFEDAGYSGKNTIRPEFQKMMSQLRTGTYTHLLVWKIDRISRNLLDFAEMYQELKNLGVTFVSKNEQFDTSTAMGEAMLKIILVFAELERNMTSERVTATMISRASNGQWNGGRIPYGYDYDPEEQAFSFNSDEYNIAHLIHDKYEELRSLVYLARYLNEHGYRTRAGNDWSPVSLDIILRSVFYCGDYQYNRLKEGDRQRPKDKSEWITVKDHHPAIVSREQKERILALLESNRRLKSFRKSGKSKYTHIFSGLLICGNCGQPMTSSISTVKKTTGRRYSLYFCPTHRKSKLWCTGKSTSDPIIGEFVFNYILNMLNAQKAFSPETSIQKLEQQLLSGDTFSPVVAIAPDGLQDLFHTLRTGTVKGEVFGKDVKIKTDSEPPLQLSKLKKEKIRLERAIDRLNKLFLYSEKAMSESEYLTQKIQLSDSLEEVEDKLAFLASEDSLQQSITDDEFIAKASNFILSQKLTDRNYVSFQSLSATVSPEVLDSFLSSIIDNIVFKDGAVHSITFRNGLSHTFIYKEKPEV

SEQ ID NO: 906 - protein, 577 aa, Unknown
  Description of Unknown: Integrase B907 sequence
  PTHR30461:SF3,IPR036162,PS51737,IPR011109,PTHR30461, PS00397,PF00239,G3DSA:1.10.10.2600,IPR006119,SSF53041, SM00857,IPR025827,IPR038109,PS51736,cd03768, IPR006118,PF13408,G3DSA:3.40.50.1390,PF07508,Coil
MISNSAATHAKVAIYIRVSTLHQIDRDSLPMQRQDLIAYAKLILNTDDVTIFEDAGYSGKNTIRPEFQKMMSQLRTGTYTHLLVWKIDRISRNLLDFAEMYQELKNLGVTFVSKNEQFDTSTAMGEAMLKIILVFAELERNMTSERVTATMISRASNGHWNGGRIPYGYDYNPEEQDFSFNSDEYNIAHLIHDKYEELHSLVYLARYLNEHGYRTRAGNDWSPVSLNIILRSVFYCGDYQYNRLKEGDRQRPKDKSEWITVKDHHPAIVSREQKERILALLESNRRLKSFRKSGKSKYTHIFSGLLICGNCGQPMTSSISTIKRTTGRRYSLYFCPTHRKSKLWCTGKSTSDPIVGEFVFNYILNMLNAQKAFSPETSIQELEQQLLSGDTFSPVAAIAPDGLHDLFHTLRTGTIKGEVFGKDVKIKTGSEPPLQLSKLKKEKVRLERAIDRLNKLFLYSEKAMSESEYLTQKIQLSDSLEEVEDKLAFLASEGSLQQSITDDEFIAKASNFILSQKLTDRNYVSFQSLSATVSPEVLDSFLSSIIDNIVFKDGTVNSITFRNGLSHTFIYREKPEV

SEQ ID NO: 907 - protein, 577 aa, Unknown
  Description of Unknown: Integrase B908 sequence
  PTHR30461:SF3,IPR036162,PS51737,IPR011109,PTHR30461, PS00397,PF00239,G3DSA:1.10.10.2600,IPR006119,SSF53041, SM00857,IPR025827,IPR038109,PS51736,cd03768, IPR006118,PF13408,G3DSA:3.40.50.1390,PF07508,Coil
MSINRNNTSETPKKAALYVRVSTNYQIDRDSLPMQRQELITYAQLMFGINDYVIFEDAGYSGKNTDRPEFQNMMRRIRAGEFTHLLCWKIDRISRNLLDFASMYQELKDLGVTFVSKNEQFDTSTAIGEAMLKIILVFAELERNMTSERVTATMLSRAQNGLWNGGRVPYGYDYDKDSKTFSINQEEAFLVRKMYDLYSEHRSLVMVSRTLNEDGYASRAGNDWSPVSIFIILTNPFYTGIYRYNHYKIPGLKIEKDPSEWIEVPDHHPRIISDEQFDNVNRILQSNSRSKRLPGQQHTSKGTHIFGGLLYCGTCGSQYVSTPSRLLASGYRPSKYACPNLRKKKTCNTKSISDPVIGEFVLNYVLNMMHARAAFSSIHDTSELQDALLSGGTFQNVDHIGKDGLDSCFHMFSSTPLDGKRFRKPKKATTIDPELKRLRAEKRKTERALDRLMNLYLYADNPISEKDFVIRKQALDDYLKEINENLGMIDRGRGIETISDENFIKRASYFIMSKELAGKDYIYFKKLAMDMDAEILRDFFQEIIDSIVMEGSNVKEIVFRNGLAHTFFYKGTEKPEA

SEQ ID NO: 908 - protein, 577 aa, Unknown
  Description of Unknown: Integrase B909 sequence
  PTHR30461:SF3,IPR036162,PS51737,IPR011109,PTHR30461, PS00397,PF00239,G3DSA:1.10.10.2600,IPR006119,SSF53041, cd00338,SM00857,IPR025827,IPR038109,PS51736, IPR006118,PF13408,G3DSA:3.40.50.1390,PF07508,Coil
MALPKKTIPQIEQKRAAIYVRVSTQYQVDRASLPVQRSELVNYAKYALDIPDFVIFEDAGYSAKNTDRPDYQQMMARIRTGEFSHLLVWKIDRISRNLLDFAAMYSELKQLGVVFVSKNEQFDTSSAMGEAMLKIILVFAELERNMTAERVSAVFLSRANDGIWNGGKVPFGYAYDKQTKTFSILEDEAKTVRLIYALYESSKSLVTVSKALNERGIKTRNGSEWSPTTVHTMLSNPFYSGTYRYNYRNESDPHHHVPKKKEDWILVKNHHPAIVSPEHQAAVELILASKSYGKNQTYQRKNIHAFAGLLTCGYCGSTMAATIDRARADGWRPSVYICSRRRMSNDCQNKYVSDVTLGPFVLNFFANLIKASNSFGKSTSIETLEKKLLRGDALSIVDHIERPGLEELYNHLRSGFDEKPFDSLAVNAAEASSDVQERDLLLADKRRLERALKRLNAIYLYGDEEIPGKDFILDRKSITDSLQQIDDRLKELDAAAVFDVSLSDDEFMEKASQFILTQQLLDKRSVNYEKFIRKIDPRIVKDFLNETVSNFCIKDGLTTSVLFKNGIELRFCYKAQQ

SEQ ID NO: 909 - protein, 577 aa, Unknown
  Description of Unknown: Integrase B910 sequence
  PTHR30461:SF3,IPR036162,PS51737,IPR011109,PTHR30461, PS00397,PF00239,G3DSA:1.10.10.2600,IPR006119,SSF53041, SM00857,IPR025827,IPR038109,PS51736,cd03768, IPR006118,PF13408,G3DSA:3.40.50.1390,PF07508,Coil
MISNSAATHAKVAIYIRVSTLHQIDRDSLPMQRQDLIAYAKLILNTDDVTVFEDAGYSGKNTIRPEFQKMMSQLRTGTYTHLLVWKIDRISRNLLDFAEMYQELKDLGVTFVSKNEQFDTSTAMGEAMLKIILVFAELERNMTSERVAATMISRASNGQWNGGRIPYGYDYDPEEQTFSFNSDEYNIAHLIHDKYEELRSLVYLARYLNEHGYRTRAGNDWSPVSLDIILRSVFYCGDYQYNRLKEGDRQRPKDKSEWITVKDHHPAIVSREQKERILALLESNRRLKSFRKSGKSKYTHIFSGLLICGNCGQPMTSSISTIKKTTGRRYSLYFCPTHRKSKLWCTGKSTSDPIVGEFVFNYILNMLNAQKAFSSETSIQELEQQLLSGDTFSPVAAIAPDGLQDLFHTLRTGTIKGEVFGKNVKIKTGSEPPLQLSKLKKEKVRLERAIDRLNKLFLYSEKAMSESEYLTQKIQLSDALEEVEDKLTFLASEDSLQQSITDDEFIAKASNFILSQKLTDRNYVSFQSLSATVSPEVLDSFLSSIIDNIVFKDGAIHSITFRNGLSHTFIYKEKPEV

SEQ ID NO: 910 - protein, 577 aa, Unknown
  Description of Unknown: Integrase B911 sequence
  PTHR30461:SF3,IPR036162,PS51737,IPR011109,PTHR30461, PS00397,PF00239,G3DSA:1.10.10.2600,IPR006119,SSF53041, SM00857,IPR025827,IPR038109,PS51736,cd03768, IPR006118,PF13408,G3DSA:3.40.50.1390,PF07508,Coil
MISNSAATHAKVAIYIRVSTLHQIDRDSLPMQRQDLIAYAKLILNTDDVTVFEDAGYSGKNTIRPEFQKMMSQLRTGTYTHLLVWKIDRISRNLLDFAEMYQELKDLGVTFVSKNEQFDTSTAMGEAMLKIILVFAELERNMTSERVAATMISRASNGQWNGGRIPYGYDYDPEEQTFSFNSDEYNIAHLIHDKYEELRSLVYLARYLNEHGYRTRAGNDWSPVSLDIILRSVFYCGDYQYNRLKEGDRQRPKDKSEWITVKDHHPAIVSREQKERILALLESNRRLKSFRKSGKSKYTHIFSGLLICGNCGQPMTSSISTIKKTTGRRYSLYFCPTHRKSKLWCTGKSTSDPIVGEFVFNYILNMLNAQKAFSSETSIQELEQQLLSGDTFSPVAAIAPDGLQDLFHTLRTGTIKGEVFGKDVKIKTGSEPPLQLSKLKKEKVRLERAIDRLNKLFLYSEKAMSESEYLTQKIQLSDALEEVEDKLTFLASEDSLQQSITDDEFIAKASNFILFQKLTDRNYVSFQSLSATVSPEVLDSFLSSIIDNIVFKDGAIHSITFRNGLSHTFIYKEKPEV

SEQ ID NO: 911 - protein, 577 aa, Unknown
  Description of Unknown: Integrase B912 sequence
  PTHR30461:SF3,IPR036162,PS51737,IPR011109,PTHR30461, PS00397,PF00239,G3DSA:1.10.10.2600,IPR006119,SSF53041, SM00857,IPR025827,IPR038109,PS51736,cd03768, IPR006118,PF13408,G3DSA:3.40.50.1390,PF07508,Coil
MSINRNNTNETPKKAALYVRVSTNYQIDRDSLPMQRQELITYAQLMFGINDYVVFEDAGYSGKNTDRPEFQNMMRRIRAGEFTHLLCWKIDRISRNLLDFASMYQELKDLGVTFVSKNEQFDTSTAIGEAMLKIILVFAELERNMTSERVTATMLSRAQNGLWNGGRVPYGYDYDKDSKTFSINQEEAFLVRKMYNLYSEHRSLVIVSRALNEDGYASRAGNDWSPVSIFIILTNPFYTGIYRYNHYKIPGLKIEKDPSEWIEVPDHHPRIISDEQFDNVNRILQANSRSKRLPGQQHTSKGIHIFGGLLYCGTCGSQYVSTPSRLLASGYRPSKYACPNLRKKKTCNTKSISDPVIGEFVLNYVLNMMHARVAFSSIHDTSELQDALLNGGTFQNVDYIGKDGLDSCFHMFSSTPLDGKRFRKPKKATTIDPELKRLRAEKRKTERALDRLMNLYLYADNPISEKDFVIRKQALDDYLKEINENLGMIDRGRGIETISDENFIKRASYFIMSKELAGKDYIYFKKLAMDMDAEILRDFFQEIIDSIVMEGSNVKEIVFRNGLAHTFFYKDEEKPEA

SEQ ID NO: 912 - protein, 577 aa, Unknown
  Description of Unknown: Integrase B913 sequence
  PTHR30461:SF3,SM00857,G3DSA:1.10.10.2600,IPR036162,PF13408, PS51737,G3DSA:3.40.50.1390,IPR025827,IPR006119,IPR038109, PF07508,IPR011109,SSF53041,PTHR30461,Coil, PS51736,cd00338,PF00239
MDIYKVRQLLKEQSIFDIPLRVVYYVRVSTDKEEQKNSTVNQDTFFEDLIASHPAWTFVGKYIDDGASGIMADKREDFQRMISDGQNKMYDLILTKEISRFARNTLDSIRYTRLLLNCGVGVWFYTDNVNTINEDAELHLAILSSIAQNESLKTSTRVRMGHAQSIKRGVVMGNSMLYGYNKDHGRLVIDPYEAEMVRSIYEKYATGVYTTPMLEREIYASGYRNHYGEKISRTVIGHIITNPKYKGYYVGGKVKIIDMFTKKRKFIPKDEWIMYKDETGERVPAIIDEETWELANKYFVERGDAIKARRKVCTTPNTFTGKIYCGVDGAPYWLKHRRLRGKDDSTWYCSDKLKNGTDSCKSFPIKEEEIRSMVIDLITISPSDIQKYCEMYLEMLRKSIDSSVDKSAKIAELNKEIENNMAKKQKLLDYNLQGILSDDEFISNTKLLNRKIERAQSIIDSFTSKSPVELKSNSVLDKSAKLLNDFSGVKSEDLDNKIVDELIDKIVITPQDTDYASVEFYLKTSEKVHKTYDRKAVLRNDNLLNIMLPVRSTVFYRHPRHLYGHETEIRYDYRLVI

SEQ ID NO: 913 - protein, 577 aa, Unknown
  Description of Unknown: Integrase B914 sequence
  PTHR30461:SF3,IPR036162,PS51737,IPR011109,PTHR30461, PS00397,PF00239,G3DSA:1.10.10.2600,IPR006119,SSF53041, SM00857,IPR025827,IPR038109,PS51736,cd03768, IPR006118,PF13408,G3DSA:3.40.50.1390,PF07508,Coil
MISNSAATHAKVAIYIRVSTLHQIDRDSLPMQRQDLIAYAKLILNTDDVTVFEDAGYSGKNTIRPEFQKMMSQLRTGTYTHLLVWKIDRISRNLLDFAEMYQELKDLGVTFVSKNEQFDTSTAMGEAMLKIILVFAELERNMTSERVAATMISRASNGQWNGGRIPYGYDYDPEEQTFSFNSDEYNIAHLIHDKYEELRSLVYLARYLNEHGYRTRAGNDWSPVSLDIILRSVFYCGDYQYNRLKEGDRQRPKDKSEWITVKDHHPAIVSREQKERILALLESNRRLKSFRKSGKSKYTHIFSGLLICGNCGQPMTSSISTVKKTTGRRYSLYFCPTHRKSKLWCTGKSTSDPIIGEFVFNYILNMLNAQKAFSPETSIQELEQQLLSGDTFSPVAAIAPDGLQDLFHTLRTGTVKGEVFGKDVKIKTDSEPPLQLSKLKKEKIRLERAIDRLNKLFLYSEKAMSESEYLTQKIQLSDSLEEVEDKLAFLASEDSLQQSITDDEFISKASNFILSQKLTDRNYVSFQSLSATVSPEVLDSFLSSIIDNIVFKDGAVHSITFRNGLSHTFIYKEKPEV

SEQ ID NO: 914 - protein, 577 aa, Unknown
  Description of Unknown: Integrase B915 sequence
  PTHR30461:SF3,cd00338,SM00857,G3DSA:1.10.10.2600,IPR036162, PF13408,IPR025827,G3DSA:3.40.50.1390,PS51737,IPR006119, IPR038109,PF07508,IPR011109,SSF53041,PTHR30461, Coil,PF00239
MDECRIKRYTECGNGRYYKPSHCRTFFDNEIKPIPTFYDESEEFTMTKNNNRVCCLYRVSTDKQVDFNSNHEADLPMQRKACHKFAESKGWVIVHEEQEEGVSGHKVRAAARDKLQIIKDYARKGKFDILLVFMFDRIGRIADETPFVVEWFVRNGIRVWSTQEGEQRFDNHTDKLLNYIRFWQADGESEKTSVRTRTSLRQLVEEGHFKGGNAPYGYDLVRSGRINKRKHELYELHINEQEAAVVRIVFDKYVYEGYGPQHIATYLNNSGYRARSGKCWHPSSIRGMVQNLTYTGVLRCGDARSELMPDLQIVPQEQFENAQRIRNERSVRSTAEAENRLPLNIHGKSLLAGNAYCGHCGAKLELTSSRKWRKMADGSLDDTLRIRYTCYGKLRKQTNCTGQTGYTVHILDEIIDKAVRQIFSKMRGIPKEQIVTKRYEKENAERKNHLQDLQTQRNKAEKDLLALKTEVLACIKGESVLPRETLAEMITAQEEKLTELENLCEAASEELEKTAELMDKVSRLYDELISYADLYDSANFEAKKMIVNQLIRRVDVYRGYQINISFNFDLTPYIEGE

SEQ ID NO: 915 - protein, 577 aa, Unknown
  Description of Unknown: Integrase B916 sequence
  SM00857,G3DSA:1.10.10.2600,IPR036162,PF13408,PS51737, G3DSA:3.40.50.1390,IPR025827,IPR006119,IPR038109,PF07508, IPR011109,SSF53041,PTHR30461,Coil,PS51736, cd00338,PF00239
MNIYHTRERLRTRSIYDLNLRVAFYARVSTDSEDQQVSIEHQTQYYKEFIKSNRNWKFAKGYIDNGISGIQTKHREQFKEMLEDAKNGKFDMLITKEITRFARNTLDSIQYTRQMLSWGVCVWFQNDNINTIDEDSELRLTIMAGVAQDEVRKLSNRVKFGHKQSIKNGVVLGNSRIYGYDKKDGKLTINESEAQMVRMIFEDYASGEWTTPQLEKKLYNMGYRNYKGGKIDRNVIRHIIRNPKYKGYYAGGKVKVVDMFTKKQEFLPESEWVMFKDDGSHVPQIVDEEVWKKANEYIDARGEIVKTRRTSIKKSENVFTGMLICGNDGASYWLKQRTLRGKEDVKWVCSKKIKEGAASCDSFYIDDGELREVIAKLIRESSGDIEQIAEKFIKIYHSSMSQADASTEIKRLEKQINVAERKSDKLLEYNLDGAISDAVFIEKSQKLEAQIEEYKKQIEKLSTIQDDIVPIENQIRAIAHSVKQLDGIGPDDITKTVVDSFLKKIVVNPIGEKEAKLVFYLKDGITTEMSFVSGKSMRCSVNLFNPIFTERSTTFYRALRSFPGHKEPVKYTYFFAF

SEQ ID NO: 916 - protein, 577 aa, Unknown
  Description of Unknown: Integrase B917 sequence
  PTHR30461:SF3,IPR036162,PS51737,IPR011109,PTHR30461, PS00397,PF00239,G3DSA:1.10.10.2600,IPR006119,SSF53041, SM00857,IPR025827,IPR038109,PS51736,cd03768, IPR006118,PF13408,G3DSA:3.40.50.1390,PF07508,Coil
MISNSAATHAKVAIYIRVSTLHQIDRDSLPMQRQDLIAYAKLILNTDDVTIFEDAGYSGKNTIRPEFQKMMSQLRTGTYTHLLVWKIDRISRNLLDFAEMYQELKNLGVTFVSKNEQFDTSTAMGEAMLKIILVFAELERNMTSERVTATMISRASNGQWNGGRIPYGYDYDSEEQAFSFNSDEYNIAHLIHDKYEELRSLVYLARYLNEHGYRTRAGNDWSPVSLDIILRSVFYCGDYQYNRLKEGDRQRPKDKSEWITVKDHHPAIVSREQKERILALLESNRRLKSFRKSGKSKYTHIFSGLLICGNCGQPMTSSISTIKKTTGRRYSLYFCPTHRKSKLWCTGKSTSDPIVGEFVFNYILNMLNAQKAFSLETSIQELEQQLLSGDTFSPVAAIAPDGLHDLFHTLRTGTIKGEVFGKDVKIKTGSEPPLQLSKLKKEKVRLERAIDRLNKLFLYSEKAMSESEYLTQKIQLSDSLEEVEDKLAFLASEGSLQQSITDDEFIAKASNFILSQKLTDRNYVSFQSLSATVSPEVLDSFLSSIIDNIVFKDGAVNSITFRNGLSHTFIYKEKPEV

SEQ ID NO: 917 - protein, 577 aa, Unknown
  Description of Unknown: Integrase B918 sequence
  PTHR30461:SF3,IPR036162,PS51737,IPR011109,PTHR30461, PS00397,PF00239,G3DSA:1.10.10.2600,IPR006119,SSF53041, SM00857,IPR025827,IPR038109,PS51736,cd03768, IPR006118,PF13408,G3DSA:3.40.50.1390,PF07508,Coil
MISNSAAAHAKVAIYIRVSTLHQIDRDSLPMQRQDLIAYAKLILNTDDVTIFEDAGYSGKNTIRPEFQKMMSQLRTGTYTHLLVWKIDRISRNLLDFAEMYQELKNLGVTFVSKNEQFDTSTAMGEAMLKIILVFAELERNMTSERVTATMISRASNGQWNGGRIPYGYDYDPEEQAFSFNSDEYNIAHLIHDKYEELRSLVYLARYLNEHGYRTRAGNDWSPVSLDIILRSVFYCGDYQYNRLKEGDRQRPKDKSEWITVKDHHPAIVSREQKERILALLESNRRLKSFRKSGKSKYTHIFSGLLICGNCGQPMTSSISTIKKTTGRRYSLYFCPTHRKSKLWCIGKSTSDPIVGEFVFNYILNMLNAQKAFSPETSIQELEQQLLSGDTFSPVAAIAPDGLHDLFHTLRTGTIKGEVFGKDVKIKTGSEPPLQLSKLKKEKVRLERAIDRLNKLFLYSEKAMSESEYLTQKIQLSDSLEEVEDKLAFLASEGSLQQSITDDEFIAKASNFILSQKLTDRNYVSFQSLSATVSPEVLDSFLSSIIDNIVFKDGAIHSITFRNGLSHTFIYKEKPEV

SEQ ID NO: 918 - protein, 577 aa, Unknown
  Description of Unknown: Integrase B919 sequence
  PTHR30461:SF3,IPR036162,PS51737,IPR011109,PTHR30461, PS00397,PF00239,G3DSA:1.10.10.2600,IPR006119,SSF53041, SM00857,IPR025827,IPR038109,PS51736,cd03768, IPR006118,PF13408,G3DSA:3.40.50.1390,PF07508,Coil
MISNSAATHAKVAIYIRVSTLHQIDRDSLPMQRQDLIAYAKLILNTDDVTIFEDAGYSGKNTIRPEFQKMMSQLRTGTYTHLLVWKIDRISRNLLDFAEMYQELKDLGVTFVSKNEQFDTSTAMGEAMLKIILVFAELERNMTSERVAATMISRASNGQWNGGRIPYGYDYDPEEQTFSFNSDEYNIAHLIHDKYEELRSLVYLARYLNEHGYRTRAGNDWSPVSLDIILRSVFYCGDYQYNRLKEGDRQRPKDKSEWITVKDHHPAIVSREQKERILALLESNRRLKSFRKSGKSKYTHIFSGLLICGNCGQPMTSSISTIKKTTGRRYSLYFCPTHRKSKLWCTGKSTSDPIVGEFVFNYILNMLNAQKAFSSETSIQELEQQLLSGDTFSPVAAIAPDGLQDLFHTLRTGTIKGEVFGKDVKIKTGSEPPLQLSKLKKEKVRLERAIDRLNKLFLYSEKAMSESEYLTQKIQLSDALEEVEDKLTFLASEDSLQQSITDDEFIAKASNFILSQKLTDRNYVSFQSLSATVSPEVLDSFLSSIIDNIVFKDGAIHSITFRNGLSHTFIYKEKPEV

SEQ ID NO: 919 - protein, 577 aa, Unknown
  Description of Unknown: Integrase B920 sequence
  PTHR30461:SF3,IPR036162,PS51737,IPR011109,PTHR30461, PS00397,PF00239,G3DSA:1.10.10.2600,IPR006119,SSF53041, SM00857,IPR025827,IPR038109,PS51736,cd03768, IPR006118,PF13408,G3DSA:3.40.50.1390,PF07508,Coil
MISNSAATHAKVAIYIRVSTLHQIDRDSLPMQRQDLIAYAKLILNTDDVTVFEDAGYSGKNTIRPEFQKMMSQLRTGTYTHLLVWKIDRISRNLLDFAEMYQELKDLGVTFVSKNEQFDTSTAMGEAMLKIILVFAELERNMTSERVAATMISRASNGQWNGGRIPYGYDYDPEEQTFSFNSDEYNIAHLIHDKYEELRSLVYLARYLNEHGYRTRAGNDWSPVSLDIILRSVFYCGDYQYNRLKEGDRQRPKDKSEWITVKDHHPAIVSREQKERILALLESNRRLKSFRKSGKSKYTHIFSGLLICGNCGQPMTSSISTVKKTTGRRYSLYFCPTHRKSKLWCTGKSTSDPIIGEFVFNYILNMLNAQKAFSPETSIQELEQQLLSGDTFSPVAAIAPDGLQDLFHTLRTGTVKGEVFGKDVKIKTDSEPPLQLSKLKKEKIRLERAIDRLNKLFLYSEKAMSESEYLTQKIQLSDSLEEVEDKLAFLASEDSLQQSITDDEFISKASNFILSQKLTDRNYVSFQSLSATVSPEILDSFLSSIIDNIVFKDGAVHSITFRNGLSHTFIYKEKPEV

SEQ ID NO: 920 - protein, 577 aa, Unknown
  Description of Unknown: Integrase B921 sequence
  PTHR30461:SF3,SM00857,G3DSA:1.10.10.2600,IPR036162,PS51737, G3DSA:3.40.50.1390,IPR006119,IPR038109,PF07508,IPR011109, SSF53041,PF00239,PTHR30461,PS51736,Coil, cd00338
MKKRVYTLYRVSTIGQVEKDDIPMQKEACHEFAERQGWEIVKEFSEKGVSGFKKSAKDRDQLQLLQQAAAAGEFDVLLVFMFDRLGRRDDETPFIVEWFTKQGVEVWSVNEGQQRFDSHVDKLMNYIRYWQASGESIKTSIRTRTRIEQLTEEGHYTGGTVAFGYKRVQKGRLNKKNQAVCDLEIDEEEAAIVRLIFQKYVYEGYGVKRICNYLVENHIMGRNGKNIPTTTLVRMVRNKCYTGYLINGNVEKECPELRIIEQEVFDRAQELRDTRRREKGEDSDSYSPHALLCGKVFCAHCGNRLNITSSGRTRLRADGSTVKEKRFRYSCHYNVRHPGQCDGQSGYGVTKLDAIVESIVCTKFSEILECSKSKLLQDMLRKDMEVAQKEVSRAKSELDLKDDERNALKDEMIRVIREKSSIDRDMIQQLLDENQAAIQAAQDALTAAQNKLEEIEQENKKAENDCSNLFTWASTYQNASFQQRQAILNQFIKEVRVGRDYDIEIILNVPLEEFEEFKSHSLSVRTPSGRKMDLKQAPVRGLGTPNGGIVVFDKTSGEAMNIMPKSSAHVTLRCQDE

SEQ ID NO: 921 - protein, 577 aa, Unknown
  Description of Unknown: Integrase B922 sequence
  PTHR30461:SF3,IPR036162,PS51737,IPR011109,PTHR30461, PS00397,PF00239,G3DSA:1.10.10.2600,IPR006119,SSF53041, SM00857,IPR025827,IPR038109,PS51736,cd03768, IPR006118,PF13408,G3DSA:3.40.50.1390,PF07508,Coil
MISNSAATHAKVAIYIRVSTLHQIDRDSLPMQRQDLIAYAKLILNTDDVTIFEDAGYSGKNTIRPEFQKMMAQLRTGTYTHLLVWKIDRISRNLLDFAEMYQELKDLGVTFVSKNEQFDTSTAMGEAMLKIILVFAELERNMTSERVTATMISRASNGQWNGGRIPYGYDYDPEEQDFSFNSDEYNIAHLIHDKYEELRSLVYLARYLNEHGYRTRAGNDWSPVSLDIILRSVFYCGDYQYNRLKEGDRQRPKDKSEWITVKDHHPAIVSREQKERILALLESNRRLKSFRKSGKSKYTHIFSGLLICGNCGQPMTSSISTIKKTTGRRYSLYFCPTHRKSKLWCTGKSTSDPIIGEFVFNYILNMLNAQKAFSSETSIQELEQQLLSGDTFSPVAAIAPDGLQDLFHTLRTGTIKGEVFGKNVKIKTGSEPPLQLSKLKKEKVRLERAIDRLNKLFLYSEKAMSESEYLTQKIQLSDALEEVEDKLAFLASEDSLQQSITDDEFIAKASNFILSQKLTDRNYVSFQSLSATVSPEILDSFLSSIIDNIVFKDGAVHSITFRNGLSHTFIYKEKPEV

SEQ ID NO: 922 - protein, 577 aa, Unknown
  Description of Unknown: Integrase B923 sequence
  PTHR30461:SF3,IPR036162,PS51737,IPR011109,PTHR30461, PS00397,PF00239,G3DSA:1.10.10.2600,IPR006119,SSF53041, SM00857,IPR025827,IPR038109,PS51736,cd03768, IPR006118,PF13408,G3DSA:3.40.50.1390,PF07508,Coil
MISNSAATHAKVAIYIRVSTLHQIDRDSLPMQRQDLIAYAKLILNTDDVTVFEDAGYSGKNTIRPEFQKMMSQLRTGTYTHLLVWKIDRISRNLLDFAEMYQELKDLGVTFVSKNEQFDTSTAMGEAMLKIILVFAELERNMTSERVTATMISRASNGQWNGGRIPYGYDYDPEEQGFSFNSDEYNIAHLIHDKYEELRSLVYLARYLNEHGYRTRAGNDWSPVSLDIILRSVFYCGDYQYNRLKEGDRQRPKDKSEWITVKDHHPAIVSREQKERILALLESNRRLKSFRKSGKSKYTHIFSGLLICGNCGQPMTSSISTIKKTTGRRYSLYFCPTHRKSKLWCTGKSTSDPIVGEFVFNYILNMLNAQKAFSPETSIQELEQQLLSGDTFSPVAAIAPDGLHDLFHTLRTGTIKGEVFGKDVKIKTGSEPPLQLSKLKKEKVRLERAIDRLNKLFLYSEKAMSESEYLTQKIQLSDSLEEVEDKLAFLASEGSLQQSITDDEFIAKASNFILSQKLTDRNYISFQSLSATVSPEVLDSFLSSIIDNIVFKDGAVNSITFRNGLSHTFIYREKPEV

SEQ ID NO: 923 - protein, 577 aa, Unknown
  Description of Unknown: Integrase B924 sequence
  PTHR30461:SF3,SM00857,G3DSA:1.10.10.2600,IPR036162,PF13408, PS51737,IPR025827,G3DSA:3.40.50.1390,IPR006119,IPR038109, PF07508,IPR011109,SSF53041,PF00239,PTHR30461, PS51736,Coil,cd00338
MDIYKVRQLLKEQSIFDIPLRVVYYVRVSTDKEEQKNSTVNQDTFFEDLIASHPAWTFVGKYIDDGASGIMADKREDFQRMISDGQNKMYDLILTKEISRFARNTLDSIRYTRLLLNCGVGVWFYTDNVNTINEDAELHLAILSSIAQNESLKTSTRVRMGHAQSIKRGVVMGNSMLYGYNKDHGRLVIDPYEAEMVRSIYEKYATGVYTTPMLEREIYASGYRNHYGEKISRTVIGHIITNPKYKGYYVGGKVKIIDMFTKKRKFIPKDEWIMYKDETGERVPAIIDEETWELANKYFVERGDAIKARRKVCTTPNTFTGKIYCGTDGAPYWLKHRVLRGKDDSTWYCSDKLKNGTDSCKSFPIKEDEIRSMVVDLITLSPSDIQKYCEMYLEMLRKSIDSSVDKSAKIAELNKEIENNMAKKQKLLDYNLQGILSDDEFISNTKLLNRKIERAQSLIDSFTSKSPVELKSNSILDKAAKLLNDFSGVKSEDLDNKIVDELIDKIVITPQDTDYASVEFYLKTSEKVHKTYDRKAVLRNDNLLNIMLPVRSTVFYRHPRHLYGHETEIRYDYRLVI

SEQ ID NO: 924 - protein, 577 aa, Unknown
  Description of Unknown: Integrase B925 sequence
  PTHR30461:SF3,IPR036162,PS51737,IPR011109,PTHR30461, PS00397,PF00239,G3DSA:1.10.10.2600,IPR006119,SSF53041, SM00857,IPR025827,IPR038109,PS51736,cd03768, IPR006118,PF13408,G3DSA:3.40.50.1390,PF07508,Coil
MISNSAATHAKVAIYIRVSTLHQIDRDSLPMQRQDLIAYAKLILNTDDVTIFEDAGYSGKNTIRPEFQKMMSQLRTGTYTHLLVWKIDRISRNLLDFAEMYQELKDLGVTFVSKNEQFDTSTAMGEAMLKIILVFAELERNMTSERVTATMISRASNGQWNGGRIPYGYDYDPEEQDFSFNSDEYNIAHLIHDKYEELRSLVYLARYLNEHGYRTRAGNDWSPVSLDIILRSVFYCGDYQYNRLKEGDRQRPKDKSEWITVKDHHPAIVSREQKERILALLESNRRLKSFRKSGKSKYTHIFSGLLICGNCGQPMTSSISTIKKTTGRRYSLYFCPTHRKSKLWCTGKSTSDPIIGEFVFNYILNMLNAQKAFSSETSIQELEQQLLSGDTFSPVAAIAPDGLQDLFHTLRTGTIKGEVFGKDVKIKTGSEPPLQLSKLKKEKIRLERAIDRLNKLFLYSEKAMSESEYLTQKIQLSDALEEVEDKLTFLASEDSLQQSITDDEFIAKASNFILSQKLTDRNYVSFQSLSATVSPEVLDSFLSSIIDNIVFKDGAIHSITFRNGLSHTFIYKEKPEV

SEQ ID NO: 925 - protein, 577 aa, Unknown
  Description of Unknown: Integrase B926 sequence
  SM00857,G3DSA:1.10.10.2600,IPR036162,PF13408,PS51737, G3DSA:3.40.50.1390,IPR025827,IPR006119,IPR038109,PF07508, IPR011109,SSF53041,PTHR30461,Coil,PS51736, cd00338,PF00239
MNIYHTRERLRTRSIYDLNLRVAFYARVSTDSEDQQVSIEHQTQYYKEFIKSNRNWKFAKGYIDNGISGIQTKHREQFKEMLEDAKNGKFDMLITKEITRFARNTLDSIQYTRQMLSWGVCVWFQNDNINTIDEDSELRLTIMAGVAQDEVRKLSNRVKFGHKQSIKNGVVLGNSRIYGYDKKDGKLTINESEAQMVRMIFEDYASGEWTTPQLEKKLYNMGYRNYKGGKIDRNVIRHIIRNPKYKGYYAGGKVKIVDMFTKKQEFLPESEWVMFKDDGSHVPQIVDEEVWKKANEYIDARGEIVKTRRTSIKKSENVFTGMLVCGNDGASYWLKQRTLRGKEDVKWVCSRKIKEGAASCDSFYIDDRELREVIAKLIRESSGDIEQIAEKFIKIYHSSMNQADTSTEIKRLEKQINVAERKSDKLLEYNLDGAISDAVFIEKSQKLETQIEEYKKQIEKLSTIQDDIVPIENQIRAIAHSVKQLDGISPDDITKTVVDSFLKKIVVNPIGEKEAKLVFYLKDGITTEMSFVGGKSMRCSVNLFNPIFTERSTTFYRALRSFPGHKEPVKYTYFFAF

SEQ ID NO: 926 - protein, 577 aa, Unknown
  Description of Unknown: Integrase B927 sequence
  PTHR30461:SF3,IPR036162,PS51737,IPR011109,PTHR30461, PS00397,PF00239,G3DSA:1.10.10.2600,IPR006119,SSF53041, SM00857,IPR025827,IPR038109,PS51736,cd03768, IPR006118,PF13408,G3DSA:3.40.50.1390,PF07508,Coil
MISNSAATHAKVAIYIRVSTLHQIDRDSLPMQRQDLIAYAKLILNTDDVTIFEDAGYSGKNTIRPEFQKMMSQLRTGTYTHLLVWKIDRISRNLLDFAEMYQELKNLGVTFVSKNEQFDTSTAMGEAMLKIILVFAELERNMTSERVTATMISRASNGHWNGGRIPYGYDYDPEEQDFSFNSDEYNIAHLIHDKYEELHSLVYLARYLNEHGYRTRAGNDWSPVSLNIILRSVFYCGDYQYNRLKEGDRQRPKDKSEWITVKDHHPAIVSREQKERILALLESNRRLKSFRKSGKSKYTHIFSGLLICGNCGQPMTSSISTIKRTTGRRYSLYFCPTHRKSKLWCTGKSTSDPIIGEFVFNYILNMLNAQKAFSPETSIQKLEQQLLSGDTFSPVVAIAPDGLQDLFHTLRTGTVKGEVFGKDVKIKTDSEPPLQLSKLKKEKIRLERAIDRLNKLFLYSEKAMSESEYLTQKIQLSDSLEEVEDKLTFLASEDSLQQSITDDEFIAKASNFILSQKLTDRNYVSFQSLSATVSPEVLDSFLSSIIDNIVFKDGAVHSITFRNGLSHTFIYKEKPEV

SEQ ID NO: 927 - protein, 577 aa, Unknown
  Description of Unknown: Integrase B928 sequence
  PTHR30461:SF3,IPR036162,PS51737,IPR011109,PTHR30461, PS00397,PF00239,G3DSA:1.10.10.2600,IPR006119,SSF53041, SM00857,IPR025827,IPR038109,PS51736,cd03768, IPR006118,PF13408,G3DSA:3.40.50.1390,PF07508,Coil
MSVNRNIAKEKPKKAALYVRVSTSYQADKDSLPMQRQELVAYAKLMFDIEDYVIFEDAGYSGKNTDRPEFQNMMRRVRAGEFTHLLCWKIDRVSRNLLDFASMYQELKDLGVTFVSKNEQFDTSTAIGEAMLKIILVFAELERNMTSERVTATMLSRAQNGFWNGGRIHYGYDYDKDSKQHSINEQEALVVHKMADLYEEYKSLLVVSRMLNEEGYRTRAGNEWSPVTICTILSNPFYTGRYRYNHYKTPGVRIEKDPSEWIVIQDHHPRILSDEQFDKISCILRANSRSKRKPGQQHTSQNTHIFGGLLYCGTCGCQYISTPSRMQASGYKPSKYACPNLRKKKSCNTKSVSDPVIGEFIINYVLNMMHARRDFSKIHNPSDLQDALLKGGTFENVDRIGKDGLDSCFNMFTTTPLEGKRFRKPKTVNTIDPELKRLRAEKRKTERALDRLMNMYLYDDNPIGEKDFIIRKQALDDYLKEINESLGMIDRGHGIETISDENFIKRASYFIMGKELADKDYIYFKKLAMDIDSEILRDFFHEIIDSIIMEGSNVREIVFKNGLSHIFFYKDKKEPGA

SEQ ID NO: 928 - protein, 577 aa, Unknown
  Description of Unknown: Integrase B929 sequence
  PTHR30461:SF3,IPR036162,PS51737,IPR011109,PTHR30461, PS00397,PF00239,G3DSA:1.10.10.2600,IPR006119,SSF53041, SM00857,IPR025827,IPR038109,PS51736,cd03768, IPR006118,PF13408,G3DSA:3.40.50.1390,PF07508,Coil
MISNSAATHAKVAIYIRVSTLHQIDRDSLPMQRQDLIAYAKLILNTDDVTVFEDAGYSGKNTIRPEFQKMMSQLRTGTYTHLLVWKIDRISRNLLDFAEMYQELKNLGVTFVSKNEQFDTSTAMGEAMLKIILVFAELERNMTSERVTATMISRASNGQWNGGRIPYGYDYDPEEQEFSFNSDEYNIAHLIHDKYEELRSLVYLARYLNEHGYRTRAGNDWSPVSLDIILRSVFYCGDYQYNRLKEGDRQRPKDKSEWITVKDHHPAIVSREQKERILALLESNRRLKSFRKSGKSKYTHIFSGLLICGNCGQPMTSSISTVKKTTGRRYSLYFCPTHRKSKLWCTGKSTSDPIVGEFVFNYILNMLNAQKAFSPETSIQELEQQLLSGDTFSPVAAIAPDGLQDLFHTLRTGTVKGEVFGKDVKIKTDSEPPLQLSKLKKEKIRLERAIDRLNKLFLYSEKAMSESEYLTQKIQLSDSLEEVEDKLAFLASEDSLQQSITDDEFIAKASNFILSQKLTDRNYVSFQSLSATVSLEVLDSFLSSIIDNIVFKDGAVHSITFRNGLSHTFIYKEKPEV

SEQ ID NO: 929 - protein, 577 aa, Unknown
  Description of Unknown: Integrase B930 sequence
  PTHR30461:SF3,SM00857,G3DSA:1.10.10.2600,IPR036162,PF13408, IPR025827,G3DSA:3.40.50.1390,PS51737,IPR006119,IPR038109, PF07508,IPR011109,SSF53041,PTHR30461,mobidb-lite, cd00338,PF00239
MPTSKNTARKYAAGGGSDNSCGVEPLRAVIYARYSSSGQREESIEGQLRDCYEFAKKHGIIVIGEYIDKAMTGRVDRRPDFQRMMKDSEKGRFNCVLLWKMDRFARNRYDSAMYKYKLKKNGIRIFYAKETIPDGPEGIILESVMEGYAEYYSENLAQNVKRGNYDSALELKTLGKTCLGLKTGPDGRYMIDQAEAAIVRRIFEEYAEGERAKDIYERQNSGGYRTGRGGKFNKNSLRRILSNKKYIGVYEYEDIYVENGIPAIITDRDLFERVQKMLKINHDAPARGKAQNFLLTTKLFCGLCGSPMIGDGGTSHTGKAYAYYSCTKRKRGRSCKKESVPKDWIEDLVVGELVKIVHNDELIEQIADRVMEYQKREKDQSGLHALEIRQKENEKAISNMLAAIEAGIITPSTKTRLMELEADRADIEKGIAHELLAEPEFERDQIIYFLERFRSGDINDEAYRIMLVDTFLNSVYLYDDDHLVLVMNYSGENCKVDLKLVEGAVSGDGCKGSAFAPSSALETRKASQMGCFFVSKRLRLLNPWVQGLLAINGSSVGSVGKRSTGPFSDSTSPHLPR

SEQ ID NO: 930 - protein, 577 aa, Unknown
  Description of Unknown: Integrase B931 sequence
  SM00857,G3DSA:1.10.10.2600,IPR036162,PF13408,IPR025827, G3DSA:3.40.50.1390,PS51737,IPR006119,IPR038109,PF07508, IPR011109,SSF53041,PTHR30461,Coil,PS51736, cd00338,PF00239
MNIYHTRERLRTRSIYDLNLRVAFYARVSTDSEDQQVSIEHQTQYYKEFIKSNRNWKFAKGYIDNGISGIQTKHREQFKEMLEDAKNGKFDMLITKEITRFARNTLDSIQYTRQMLSWGVCVWFQNDNINTIDEDSELRLTIMAGVAQDEVRKLSNRVKFGHKQSIKNGVVLGNSRIYGYDKKDGKLTINESEAQMVRMIFEDYASGEWTTPQLEKKLYNMGYRNYKGGKIDRNVIRHIIRNPKYKGYYAGGKVKIVDMFTKKQEFLPESEWVMFKDDGSHVPQIVDEEVWKKANEYIDARGEIVKTRRTSIKKSENVFTGMLICGNDGASYWLKQRTLRGKEDVKWVCSKKIKEGAASCDSFYIDDRELREVIAKLIRESSGDIEQIAEKFIKIYHSSMNQADASTEIKRLEKQINVAERKSDKLLEYNLDGAISDAVFIEKSQKLEAQIEEYKKQIEKLSTIQDDIVPIENQIRAIAHSVKQLDGIGPDDITKTVVDSFLKKIVVNPIGEKEAKLVFYLKDGITTEMSFVSGKSMRCSVNLFNPIFTERNTTFYRALRSFPGHKEPVKYTYFFAF

SEQ ID NO: 931 - protein, 577 aa, Unknown
  Description of Unknown: Integrase B932 sequence
  PTHR30461:SF3,SM00857,G3DSA:1.10.10.2600,IPR036162,PF13408, IPR025827,PS51737,G3DSA:3.40.50.1390,IPR006119,IPR038109, PF07508,SSF53041,IPR011109,PTHR30461,Coil, cd00338,PF00239
MDIYNVANQMKLERKTIFDLNIRVTFYARVSTTRDEQENSIENQIAYFTEMIKGNKNWEYVEGYVDRIRGESAENRTEFMQMINDGKGGKFDLIITKEVSRFARDTVDSLNYTRDLLRCGVGVFFQNDNICTVDTDSELRLTIMASIAADEVRKLSERIRWGHRRSIESGNVLGNNRIFGYDLYDKKLHINEREAEMVKLIFELYSSGHYSVRKIEQKLYDEGFRGRNGNRIHHNTISGIIQNPKYKGYFCGGKVKITDFRTRQQRFLPEEEWIMHKDLTGETVPAIVSEDLWDRCNQIFKERSEIVKSKERSIKDRSVFTGKIWCAVDGKAYWRTSYSNSKQKGKSIYQWICSEKKRINAKACPSFSILESELYQMVGEFFQSVVPSIESYVDNFISIYQKNDSAAVIRKQLREIEDKIGREKSKKDKLFELYLDEIITKNEFKKRNDDSDSLIASLENNARELKRESSSDKTIETIKEITAYIKDVYNPGEPMPKELVDDLVETIIDRIDVEPVNDNSMRVSIKLRTGEKQDYKYSNSGRRLRNNEIGNRCSSGIMSFTIWPPIEPACFAVSSPL

SEQ ID NO: 932 - protein, 577 aa, Unknown
  Description of Unknown: Integrase B933 sequence
  PTHR30461:SF3,IPR036162,PS51737,IPR011109,PTHR30461, PS00397,PF00239,G3DSA:1.10.10.2600,IPR006119,SSF53041, SM00857,IPR025827,IPR038109,PS51736,cd03768, IPR006118,PF13408,G3DSA:3.40.50.1390,PF07508,Coil
MISNSAATHAKVAIYIRVSTLHQIDRDSLPMQRQDLIAYAKLILNTDDVTVFEDAGYSGKNTIRPEFQKMMSQLRTGTYTHLLVWKIDRISRNLLDFAEMYQELKDLGVTFISKNEQFDTSTAMGEAMLKIILVFAELERNMTSERVAATMISRASNGQWNGGRIPYGYDYDPEEQTFSFNSDEYNIAHLIHDKYEELRSLVYLARYLNEHGYRTRAGNDWSPVSLDIILRSVFYCGDYQYNRLKEGDRQRPKDKSEWITVKDHHPAIVSREQKERILALLESNRRLKSFRKSGKSKYAHIFSGLLICGNCGQPMTSSISTIKKTTGRRYSLYFCPTHRKSKLWCTGKSTSDPIIGEFVFNYILNMLNAQKAFSSETSIQELEQQLLSGDTFSPVAAIAPDGLQDLFHTLRTGTIEGEVFGKDVKIKTGSEPPLQLSKLKKEKVRLERAIDRLNKLFLYSEKAMSESEYLTQKIQLSDALEEVEDKLTFLASEDSLQQSITDDEFIAKASNFILSQKLTDRNYVSFQSLSATVSPEVLDSFLSSIIDNIVFKDGAIHSITFRNGLSHTFIYKEKPEV

SEQ ID NO: 933 - protein, 577 aa, Unknown
  Description of Unknown: Integrase B934 sequence
  PTHR30461:SF3,IPR036162,PS51737,IPR011109,PTHR30461, PS00397,PF00239,G3DSA:1.10.10.2600,IPR006119,SSF53041, cd00338,SM00857,IPR025827,IPR038109,PS51736, IPR006118,PF13408,G3DSA:3.40.50.1390,PF07508,Coil
MALPKKTIPQIEQKRAAIYVRVSTQYQVDRASLPVQRSELVNYAKYALDIPDFVIFEDAGYSAKNTDRPDYQQMMARIRTGEFSHLLVWKIDRISRNLLDFAAMYSELKQLGVVFVSKNEQFDTSSAMGEAMLKIILVFAELERNMTAERVSAVFLSRANDGIWNGGKVPFGYAYDKQAKTFSILEDEAKTVRLIYALYESSKSLVTVSKALNERGIKTRNGSEWSPTTVHTMLSNPFYSGTYRYNYRNESDPHHHVPKKKEDWILVKNHHPAIVSPEHQAAVELILASKSYGKNQTYQRKNIHAFAGLLTCGYCGSTMAATIDRARADGWRPSVYICSRRRMSNDCQNKYVSDVTLGPFVLNFFANLIKASNSFGKSTSIETLEKKLLRGDALSIVDHIERPGLEELYNHLRSGFDEKPFDSLAVNAAEASSDVQERDLLLADKRRLERALKRLNAIYLYGDEEIPGKDFILDRKSITDSLQQIDDRLKELDAAAVFDVSLSDDEFMEKASQFILTQQLLDKRSVNYEKFIRKIDPRIVKDFLNETVSNFCIKDGLTTSVLFKNGIELRFCYKAQQ

SEQ ID NO: 934 - protein, 577 aa, Unknown
  Description of Unknown: Integrase B935 sequence
  PTHR30461:SF3,SM00857,G3DSA:1.10.10.2600,IPR036162,PF13408, IPR025827,PS51737,G3DSA:3.40.50.1390,IPR006119,IPR038109, PF07508,IPR011109,SSF53041,PTHR30461,Coil, PS51736,cd00338,PF00239
MDIYKVRQLLKGQSIFDIPLRVVYYVRVSTDKEEQKNSTVNQDAFFEELIASHPVWTFVGKYIDDGASGIMADKREDFQRMISDGQNQMYDLILTKEISRFARNTLDSIRYTRLLLNCGVGVWFYTDNVNTINEDAELHLAILSSIAQNESLKTSTRVRMGHAQSIKRGVVMGNSMLYGYNKDHGKLVIDPYEAEMVRSIYEKYATGVYTTPMLEREIYASGYRNHYGEKISRTVIGHIITNPKYKGYYVGGKVKIIDMFTKKRKFIPKDEWIMYKDETGERVPAIIDEETWELANKYFVERGDAIKARRKVCTTPNTFTGKIYCGTDGAPYWLKHRVLRGKDDSTWYCSDKLKNGTDSCKSFPIKEDEIRSMVVDLITLSPSDIQKYCEMYLEMLRKSIDSSVDKSAKIAELNKEIENNMAKKQKLLDYNLQGILSDDEFISNTKLLNRKIERAQSLIDSFTSKSPVELKSNSVLDKAAKLLNDFSGVKSEDLDNKIVDELIDKIVITPQDTDYASVEFYLKTSEKVHKTYDRKAVLRNDNLLNIMLPVRSAVFYRHPRHLYGHETEIRYDYRLVI

SEQ ID NO: 935 - protein, 577 aa, Unknown
  Description of Unknown: Integrase B936 sequence
  PTHR30461:SF3,cd00338,SM00857,G3DSA:1.10.10.2600,IPR036162, PS51737,G3DSA:3.40.50.1390,IPR006119,IPR038109,PF07508, IPR011109,SSF53041,PTHR30461,PS51736,Coil, PF00239
MRVAVYARVSTEHEAQINALENQLEWYKIECSRHSDWEIVEVYVDQGITGTQAQKRPEFLRMMEDAQKGKFDLIITREVSRFARNTVDTLSYTRELKARGVDVFFINDGINTATNDGELRLTIMSSMAQDESRKISERVKAGQKISREKHVLYGSGNILGYRRENGTYVPDPDQAETVRLIFQMYSTGENGLVKIVNELYRLGRLDAGGHVSWDASKVSRVLHNATYKGCICYNKSHSDGYLTQKRVKNLDESSYIYVKGDFEPLVSEEMWDRCQQILASKSARVIDENGKKHKYMRNTPKSVWTAKLRCSCGAGFIQFKWRVNRDGAVVHGFQCYRRTRRPSISYLQEHGLDLGISCQIRAICEWKLDLMAAKVFEHLTFDKGKTVKEVYKILNRCMAEEKTVRISRKAMLENSIARQRERLDKYIDLCADGIITKQELAERRKGLDAQIAELQSQYENVEQEDERSGTLDMNLIAQKLDEWQKASRNDVDRELINSCVAQITPLTNEEYRWVLDFQLTEVQSRNSATCTLDGFMEMARFRISFEEAKAFKASRNQGIRKNEWHDLTVAVGIRTKA

SEQ ID NO: 936 - protein, 577 aa, Unknown
  Description of Unknown: Integrase B937 sequence
  SM00857,G3DSA:1.10.10.2600,IPR036162,PF13408,IPR025827, G3DSA:3.40.50.1390,PS51737,IPR006119,IPR038109,PF07508, IPR011109,SSF53041,PTHR30461,Coil,PS51736, cd00338,PF00239
MNIYHTRERLRTRSIYDLNLRVAFYARVSTDSEDQQVSIEHQTQYYKEFIKSNRNWKFAKGYIDNGISGIQTKHREQFKEMLEDAKNGKFDMLITKEITRFARNTLDSIQYTRQMLSWGVCVWFQNDNINTIDEDSELRLTIMAGVAQDEVRKLSNRVKFGHKQSIKNGVVLGNSRIYGYDKKDGKLTINESEAQMVRMIFEDYASGEWTTPQLEKKLYNMGYRNYKGGKIDRNVIRHIIRNPKYKGYYAGGKVKIVDMFTKKQEFLPESEWVMFKDDGSHVPQIVDEEVWKKANEYIDARGEIVKTRRTSIKKSENVFTGMLICGNDGASYWLKQRTLRGKEDVKWVCSKKIKEGAASCDSFYIDDRELREVIAKLIRESSGDIEQIAEKFIKIYHSSMNQADASTEIKRLEKQINVAERKSDKLLEYNLDGAISDAVFIEKSQKLEAQIEEYKKQIEKLSTIQDDIVPIENQIRAIAHSIKQLDGISPDDITKTVVDSFLKKIVVNPIGEKEAKLVFYLKDGITTEMSFVSGKSMRCSVNLFNPIFTERSTTFYRALRSFPGHKEPVKYTYFFAF

SEQ ID NO: 937 - protein, 577 aa, Unknown
  Description of Unknown: Integrase B938 sequence
  PTHR30461:SF3,IPR036162,PS51737,IPR011109,PTHR30461, PS00397,PF00239,G3DSA:1.10.10.2600,IPR006119,SSF53041, SM00857,IPR025827,IPR038109,PS51736,cd03768, IPR006118,PF13408,G3DSA:3.40.50.1390,PF07508,Coil
MISNSAATHAKVAIYIRVSTLHQIDRDSLPMQRQDLIAYAKLILNTDDVTIFEDAGYSGKNTIRPEFQKMMSQLRTGTYTHLLVWKIDRISRNLLDFAEMYQELKDLGVTFVSKNEQFDTSTAMGEAMLKIILVFAELERNMTSERVTATMISRASNGQWNGGRIPYGYDYDPEEQDFSFNSDEYNIAHLIHDKYEELRSLVYLARYLNEHGYRTRAGNDWSPVSLDIILRSVFYCGDYQYNRLKEGDRQRPKDKSEWITVKDHHPAIVSREQKERILALLESNRRLKSFRKSGKSKYTHIFSGLLICGNCGQPMTSSISTIKKTTGRRYSLYFCPTHRKSKLWCTGKSTSDPIIGEFVFNYILNMLNAQKAFSPETSMQELEQQLLSGDTFSPVAAIAPDGLQDLFHTLRTGTIKGEVFGKDVKIKTGSEPPLQLSKLKKEKVRLERAIDRLNKLFLYSEKAMSESEYLTQKIQLSDALEEVEDKLTFLASEDSLQQSITDNEFIAKASNFILSQKLTDRNYVSFQSLSATVSPEVLDSFLSSIIDNIVFKDGAIHSITFRNGLSHTFIYKEKPEV

SEQ ID NO: 938 - protein, 577 aa, Unknown
  Description of Unknown: Integrase B939 sequence
  PTHR30461:SF3,IPR036162,PS51737,IPR011109,PTHR30461, PS00397,PF00239,G3DSA:1.10.10.2600,IPR006119,SSF53041, SM00857,IPR025827,IPR038109,PS51736,cd03768, IPR006118,PF13408,G3DSA:3.40.50.1390,PF07508,Coil
MISNSAATHAKVAIYIRVSTLHQIDRDSLPMQRQDLIAYAKLILNTDDVTVFEDAGYSGKNTIRPEFQKMMSQLRTGTYTHLLVWKIDRISRNLLDFAEMYQELKDLGVTFVSKNEQFDTSTAMGEAMLKIILVFAELERNMTSERVAATMISRASNGQWNGGRIPYGYDYDPEEQTFSFNSGEYNIAHLIHDKYEELRSLVYLARYLNEHGYRTRAGNDWSPVSLDIILRSVFYCGDYQYNRLKEGDRQRPKDKSEWITVKDHHPAIVSREQKERILALLESNRRLKSFRKSGKSKYTHIFSGLLICGNCGQPMTSSISTIKKTTGRRYSLYFCPTHRKSKLWCTGKSTSDPIVGEFVFNYILNMLNAQKAFSSETSIQELEQQLLSGDTFSPVAAIAPDGLQDLFHTLRTGTIKGEVFGKDVKIKTGSEPPLQLSKLKKEKVRLERAIDRLNKLFLYSEKAMSESEYLTQKIQLSDALEEVEDKLTFLASEDSLQQSITDDEFIAKASNFILSQKLTDRNYVSFQSLSATVSPEVLDSFLSSIIDNIVFKDGAIHSITFRNGLSHTFIYKEKPEV

SEQ ID NO: 939 - protein, 577 aa, Unknown
  Description of Unknown: Integrase B940 sequence
  PTHR30461:SF3,IPR036162,PS51737,IPR011109,PTHR30461, PS00397,PF00239,G3DSA:1.10.10.2600,IPR006119,SSF53041, SM00857,IPR025827,IPR038109,PS51736,cd03768, IPR006118,PF13408,G3DSA:3.40.50.1390,PF07508,Coil
MISNSSATHAKVAIYIRVSTLHQIDRDSLPMQRHDLIAYAKLILNTDDVTIFEDAGYSGKNTIRPEFQKMMSQLRTGTYTHLLVWKIDRISRNLLDFAEMYQELKDLGVTFVSKNEQFDTSTAMGEAMLKIILVFAELERNMTSERVTATMISRASNGQWNGGRIPYGYDYDPEEQGFSFNSDEYNIAHLIHDKYEELRSLVYLARYLNEHGYRTRAGNDWSPVSLDIILRSVFYCGDYQYNRLKEGDRQRPKDKSEWITVKDHHPAIVSREQKERILALLESNRRLKSFRKSGKSKYTHIFSGLLICGNCGQPMTSSISTIKKTTGRRYSLYFCPTHRKSKLWCTGKSTSDPIVGEFVFNYILNMLNAQKAFSPETSIQELEQQLLSGDTFSPVAAIAPDGLHDLFHTLRTGTIKGEVFGKDVKIKTGSEPPLQLSKLKKEKVRLERAIDRLNKLFLYSEKAMSESEYLTQKIQLSDSLEEVEDKLAFLASEGSLQQSITDDEFIAKASNFILSQKLTDRNYISFQSLSATVSPEVLDSFLSSIIDNIVFKDGAVHSITFRNGLSHTFIYKEKPEV

SEQ ID NO: 940 - protein, 577 aa, Unknown
  Description of Unknown: Integrase B941 sequence
  PTHR30461:SF3,IPR036162,PS51737,IPR011109,PTHR30461, PS00397,PF00239,G3DSA:1.10.10.2600,IPR006119,SSF53041, cd00338,SM00857,IPR025827,IPR038109,PS51736, IPR006118,PF13408,G3DSA:3.40.50.1390,PF07508,Coil
MALPKKTIPQIKQKRAAIYVRVSTQYQVDRASLPVQRSELVNYAKYALDIPDFVIFEDAGYSAKNTDRPDYQQMMARIRTGEFSHLLVWKIDRISRNLLDFAAMYSELKQLGVVFVSKNEQFDTSSAMGEAMLKIILVFAELERNMTAERVSAVFLSRANDGIWNGGKVPFGYAYDKQTKTFSILEDEAKTVRLIYALYESSKSLVTVSKALNERGIKTRSGSEWSPTTVHTMLSNPFYSGTYRYNYRNESDPHHHVPKKKEDWILVKNHHPAIVSPEHQASVELILASKSYGKNQTYQRKNIHAFAGLLTCGYCGSTMAATIDRARADGWRPSVYICSRRRMSNDCQNKYVSDVTLGPFVLNFFANLIKASNSFGKSTSIETLEKKLLRGDALSIVDHIERPGLEELYNHLRSGFDEKPFDSLAVNAAEASSDVQERDLLLAEKRRLERALKRLNAIYLYGDEEIPGKDFILDRKSITDSLQQIDDRLKELDAAAVFDVSLSDDEFMEKASQFILTQQLLDKRSVNYEKFIRKIDPRIVKDFLNETVSNFCIKDGLTTSVLLKNGIELRFCYKAQQ

SEQ ID NO: 941 - protein, 577 aa, Unknown
  Description of Unknown: Integrase B942 sequence
  PTHR30461:SF3,IPR036162,PS51737,IPR011109,PTHR30461, PS00397,PF00239,G3DSA:1.10.10.2600,IPR006119,SSF53041, SM00857,IPR025827,IPR038109,PS51736,cd03768, IPR006118,PF13408,G3DSA:3.40.50.1390,PF07508,Coil
MSINRNNTSETPKKAALYVRVSTNYQIDRDSLPMQRQELITYAQLMFGINDYVIFEDAGYSGKNTDRPEFQNMMRRIRAGEFTHLLCWKIDRISRNLLDFASMYQELKDLGVTFVSKNEQFDTSTAIGEAMLKIILVFAELERNMTSERVTATMLSRAQNGLWNGGRVPYGYDYDKDSKTFSINQEEAFLVRKMYDLYSEHRSLVMVSRTLNEDGYASRAGNDWSPVSIFIILTNPFYTGIYRYNHYKIPGLKIEKDPSEWIEVPDHHPRIISDEQFDNVNRILQSNSRSKRLPGQQHTSKGTHIFGGLLYCGTCGSQYVSTPSRLLASGYRPSKYACPNLRKKKTCNTKSISDPVIGEFVLNYVLNMMHARAAFSSIHDTSELQDALLNGGTFQNVDHIGKDGLDSCFHMFSSTPLDGKRFRKPKKAITIDPELKRLRAEKRKTERALDRLMNLYLYADNPISEKDFVIRKQALDDYLKEINENLGMIDRGRGIETISDENFIKRASYFIMSKELAGKDYIYFKKLAMDMDAEILRDFFQEIIDSIVMEGSNVKEIVFRNGLAHTFFYKGTEKPEA

SEQ ID NO: 942 - protein, 577 aa, Unknown
  Description of Unknown: Integrase B943 sequence
  SM00857,G3DSA:1.10.10.2600,IPR036162,PF13408,IPR025827, G3DSA:3.40.50.1390,PS51737,IPR006119,IPR038109,PF07508, IPR011109,SSF53041,PTHR30461,Coil,PS51736, cd00338,PF00239
MNIYHTRERLRTRSIYDLNLRVAFYARVSTDSEDQQVSIEHQTQYYKEFIKSNRNWKFAKGYIDNGISGIQTKHREQFKEMLEDAKNGKFDMLITKEITRFARNTLDSIQYTRQMLSWGVCVWFQNDNINTIDEDSELRLTIMAGVAQDEVRKLSNRVKFGHKQSIKNGVVLGNSRIYGYDKKDGKLTINESEAQMVRMIFEDYASGEWTTPQLEKKLYNMGYRNYKGGKIDRNVIRHIIRNPKYKGYYAGGKVKIVDMFTKKQEFLPESEWVMFKDDGSHVPQIVDEEVWKKANEYIDARGEIVKTRRTSIKKSENVFTGMLICGNDGASYWLKQRTLRGKEDVKWVCSKKIKEGAASCDSFYIDDRELREVIAKLIRESSGDIEQIAEKFIKIYHSSMNQADASTEIKRLEKQINVAERKSDKLLEYNLDGAISDAVFIEKSQKLEAQIEEYKKQIEKLSTIQDDIVPVENQIRAIAHSVKQLDGISPDDITKTVVDSFLKKIVVNPIGEKEAKLVFYLKDGITTEMSFVSGKSMRCSVNLFNPIFTERSTTFYRALRSFPGHKEPVKYTYFFAF

SEQ ID NO: 943 - protein, 577 aa, Unknown
  Description of Unknown: Integrase B944 sequence
  IPR036162,PS51737,IPR011109,PTHR30461,PS00397, PF00239,G3DSA:1.10.10.2600,IPR006119,SSF53041,cd00338, SM00857,IPR025827,IPR038109,PS51736,IPR006118, PF13408,G3DSA:3.40.50.1390,PF07508,Coil
MAYRFSQQTAAPDTRTVALYVRVSTGYQVDKDSLPFQKQELRNYCRHVLHIEENRLEVFEDAGKSGKNTKRPAFERMMTKVKAGLVSHVIVYKIDRISRNLVDFSLMYDDFKYNRVTFISLNEQFDTSSAIGEAVLKIILIFAELERKLTSERVTDIMINRALSGQWNGARMPFGWDWNEEKKMPVHSDKEAPTVRLMYDMYEETRSSCRVRDYFNSHDIATKRGGEWTTKTIADLIRNPMNKGDYRYNYRESAKGRRKPDEEVVYVKNVFPPLVPPDQWDRCNQIMDRNAKLRCSSGFSHKSTHVHIFAGLLKCGKCGSYFQVEKMDRVRRNGFAPSLYRCGRRYRKQSCISKSCSEVVIGPFVLNYISAMIRASDMRSQIRSPEELEKILLSDTVFQNVAGIVSDGLNATYAMLSGTDSSAPYRPLPLTSHNVQTDDNIQKWEQGIVRIDRAIERLKKVYLFDDAAMSEKEYLETKSELERERIELDNKIKEQESTAFPVQTEDLAFIKSASSFLLAHRLKAGDHIQYNTFAPLVDDEVLKDFVNLVIKEIVVVDARITEIIFQNGLTHKFLYRE

SEQ ID NO: 944 - protein, 577 aa, Unknown
  Description of Unknown: Integrase B945 sequence
  PTHR30461:SF3,IPR036162,PS51737,IPR011109,PTHR30461, PS00397,PF00239,G3DSA:1.10.10.2600,IPR006119,SSF53041, SM00857,IPR025827,IPR038109,PS51736,cd03768, IPR006118,PF13408,G3DSA:3.40.50.1390,PF07508,Coil
MISNSSATHSKVAIYIRVSTLHQIDRDSLPMQRHDLIAYAKLILNTDDVTIFEDAGYSGKNTIRPEFQKMMSQLRTGTYTHLLVWKIDRISRNLLDFAEMYQELKDLGVTFVSKNEQFDTSTAMGEAMLKIILVFAELERNMTSERVTATMISRASNGQWNGGRIPYGYDYDPEEQGFSFNSDEYNIAHLIHDKYEELRSLVYLARYLNEHGYRTRAGNDWSPVSLDIILRSVFYCGDYQYNRLKEGDRQRPKDKSEWITVKDHHPAIVSREQKERILALLESNRRLKSFRKSGKSKYTHIFSGLLICGNCGQPMTSSISTIKKTTGRRYSLYFCPTHRKSKLWCTGKSTSDPIVGEFVFNYILNMLNAQKAFSPETSIQELEQQLLSGDTFSPVAAIAPDGLHDLFHTLRTGTIKGEVFGKDVKIKTGSEPPLQLSKLKKEKVRLERAIDRLNKLFLYSEKAMSESEYLTQKIQLSDSLEEVEDKLAFLASEGSLQQSITDDEFIAKASNFILSQKLTDRNYISFQSLSATVSPEVLDSFLSSIIDNIVFKDGAVNSITFRNGLSHTFIYREKPEV

SEQ ID NO: 945 - protein, 577 aa, Unknown
  Description of Unknown: Integrase B946 sequence
  SM00857,G3DSA:1.10.10.2600,IPR036162,PF13408,IPR025827, G3DSA:3.40.50.1390,PS51737,IPR006119,IPR038109,PF07508, IPR011109,SSF53041,PTHR30461,Coil,PS51736, cd00338,PF00239
MNIYHTRERLRTRSIYDLNLRVAFYARVSTDSEDQQVSIEHQTQYYKEFIKSNRNWKFAKGYIDNGISGIQTKHREQFKEMLEDAKNGKFDMLITKEITRFARNTLDSIQYTRQMLSWGVCVWFQNDNINTIDEDSELRLTIMAGVAQDEVRKLSNRVKFGHKQSIKNGVVLGNSRIYGYDKKDGKLTINESEAQMVRMIFEDYASGEWTTPQLEKKLYNMGYRNYKGGKIDRNVIRHIIRNPKYKGYYAGGKVKIVDMFTKKQEFLPESEWVMFKDDGSHVPQIVDEEVWKKANEYIDARGEIVKTRRTSIKKSENVFTGMLICGNDGASYWLKQRTLRGKEDVKWVCSKKIKEGAASCDSFYIDDRELREVIAKLIRESSGDIEQIAEKFIKIYHSSMNQADASTEIKRLEKQINVAERKSDKLLEYNLDGAISDAVFIEKSQKLEAQIEEYKKQIEKLSTIQDDIVPIENRIRAIAHSVKQLDGISPDDITKTVVDSFLKKIVVNPIGEKEAKLVFYLKDGITTEMSFVSGKSMRCSVNLFNPIFTERSTTFYRALRSFPGHKEPVKYTYFFAF

SEQ ID NO: 946 - protein, 577 aa, Unknown
  Description of Unknown: Integrase B947 sequence
  PTHR30461:SF3,SM00857,G3DSA:1.10.10.2600,IPR036162,PF13408, IPR025827,G3DSA:3.40.50.1390,PS51737,IPR006119,IPR038109, PF07508,SSF53041,IPR011109,PTHR30461,cd00338, PF00239
MDIYNVANQMKLERKTIFDLNIRVTFYARVSTTRDEQENSIENQIAYFTEMIKGNKNWEYVEGYVDRIRGESAENRTEFMQMINDGKGGKFDLIITKEVSRFARDTVDSLNYTRDLLRCGVGVFFQNDNICTVDTDSELRLTIMASIAADEVRKLSERIRWGHRRSIESGNVLGNNRIFGYDLYDKKLHINEREAEMVKLIFELYSSGHYSVRKIEQKLYDEGFRGRNGNRIHHNTISGIIQNPKYKGYFCGGKVKITDFRTRQQRFLPEEEWIMHKDLTGETVPAIVSEDLWDRCNQIFKERSEIVKSKERSIKDRSVFTGKIWCAVDGKAYWRTSYSNSKQKGKSIYQWICSEKKRINAKACPSFSILESELYQMVGEFFQSVVPSIESYVDNFISIYQKNDSAAVIRKQLREIEDKIGREKSKKDKLFELYLDEIITKNEFKKRNDDSDSLIASLGNNARELKRESSSDKTIETIKEITAYIKDVYNPGEPMPKELVDDLVETIIDRIDVEPVNDNSMRVSIKLRTGEKQDYKYSNSGRRLRNNEIGNRCSSGIMSFTIWPPIEPACFAVSSPL

SEQ ID NO: 947 - protein, 577 aa, Unknown
  Description of Unknown: Integrase B948 sequence
  PTHR30461:SF3,IPR036162,PS51737,IPR011109,PTHR30461, PS00397,PF00239,G3DSA:1.10.10.2600,IPR006119,SSF53041, SM00857,IPR025827,IPR038109,PS51736,cd03768, IPR006118,PF13408,G3DSA:3.40.50.1390,PF07508,Coil
MISNSSATHAKVAIYIRVSTLHQIDRDSLPMQRHDLIAYAKLILNTDDVTIFEDAGYSGKNTIRPEFQKMMSQLRTGTYTHLLVWKIDRISRNLLDFAEMYQELKDLGVTFVSKNEQFDTSTAMGEAMLKIILVFAELERNMTSERVTATMISRASNGQWNGGRIPYGYDYDPEEQAFSFNSDEYNIAHLIHDKYEELRSLVYLARYLNEHGYRTRAGNEWSPVSLDIILRSVFYCGDYQYNRLKEGDRQRPKDKSEWITVKDHHLAIVSREQKERILALLESNRRLKSFRKSGKSKYTHIFSGLLICGNCGQPMTSSISTVKKTTGRRYSLYFCPTHRKSKLWCTGKSTSDPIVGEFVFNYILNMLNAQKAFSPETSIQELEQQLLSGDTFSPVVAIAPDGLQDLFHTLRTGTVKGEVFGKDVKIKTDSEPPLQLSKLKKEKVRLERAIDRLNKLFLYSEKAMSESEYLTQKIQLSDALEEVEDKLAFLASEDSLQQSITDDEFIAKASNFILSQKLTDRNYVSFQSLSATVSPEVLDSFLSSIIDNIVFKDGAVHSITFRNGLSHTFIYKEKPEV

SEQ ID NO: 948 - protein, 577 aa, Unknown
  Description of Unknown: Integrase B949 sequence
  PTHR30461:SF3,IPR036162,PS51737,IPR011109,PTHR30461, PS00397,PF00239,G3DSA:1.10.10.2600,IPR006119,SSF53041, cd00338,SM00857,IPR025827,IPR038109,PS51736, IPR006118,PF13408,G3DSA:3.40.50.1390,PF07508,Coil
MALPKKTIPQIEQKRAAIYVRVSTQYQVDRASLPVQRSELVNYAKYALDIPDFVIFEDAGYSAKNTDRPDYQQMMARIRTGEFSHLLVWKIDRISRNLLDFAAMYSELKQLGVVFVSKNEQFDTSSAMGEAMLKIILVFAELERNMTAERVSAVFLSRANDGIWNGGKVPFGYAYDKQTKTFSILEDEAKTVRLIYALYESYKSLVTVSKALNERGIKTRNGSEWSPTTVHTMLSNPFYSGTYRYNYRNESDPHHHVPKKKEDWILVKNHHPAIVSPEHQAAVELILASKSYGKNQTYQRKNIHAFAGLLTCGYCGSTMAATIDRARADGWRPSVYICSRRRMSNDCQNKYVSDVTLGPFVLNFFANLIKASNSFGKSTSIETLEKKLLRGDALSIVDHIERPGLEELYNHLRSGFDEKPFDSLAVNAAEASSDVQERDLLLADKRRLERALKRLNAIYLYGDEEIPGKDFILDRKSITDSLQQIDDRLKELDAAAVFDVSLSDDEFMEKASQFILTQQLLDKRSVNYEKFIRKIDPRIVKDFLNETVSNFCIKDGLTTSVLFKNGIELRFCYKAQQ

SEQ ID NO: 949 - protein, 577 aa, Unknown
  Description of Unknown: Integrase B950 sequence
  PTHR30461:SF3,IPR036162,PS51737,IPR011109,PTHR30461, PS00397,PF00239,G3DSA:1.10.10.2600,IPR006119,SSF53041, SM00857,IPR025827,IPR038109,PS51736,cd03768, IPR006118,PF13408,G3DSA:3.40.50.1390,PF07508,Coil
MISNSAATHAKVAIYIRVSTLHQIDRDSLPMQRQDLIAYAKLILNTDDVTVFEDAGYSGKNTIRPEFQKMMSQLRTGTYTHLLVWKIDRISRNLLDFAEMYQELKDLGVTFVSKNEQFDTSTAMGEAMLKIILVFAELERNMTSERVAATMISRASNGQWNGGRIPYGYDYDPEEQTFSFNSDEYNIAHLIHDKYEELRSLVYLARYLNEHGYRTRAGNDWSPVSLDIILRSVFYCGDYQYNRLKEGDRQRPKDKSEWITVKDHHPAIVSREQKERILALLESNRRLKSFRKSGKSKYTHIFSGLLICGNCGQPMTSSISTIKKTTGRRYSLYFCPTHRKSKLWCTGKSTSDPIVGEFVFNYILNMLNAQKAFSSETSIQELEQQLLSGDTFSPVAAIAPDGLQDLFHTLRTGTIKGEVFGKDVKIKTGSEPPLQLSKLKKEKVRLERAIDRLNKLFLYSEKAMSESEYLTQKIQLSDALEEVEDKLTFLASEDSLQQSITDNEFIAKASNFILSQKLTDRNYVSFQSLSATVSPEVLDSFLSSIIDNIVFKDGAIHSITFRNGLSHTFIYKEKPEV

SEQ ID NO: 950 - protein, 577 aa, Unknown
  Description of Unknown: Integrase B951 sequence
  PTHR30461:SF3,IPR036162,PS51737,IPR011109,PTHR30461, PS00397,PF00239,G3DSA:1.10.10.2600,IPR006119,SSF53041, SM00857,IPR025827,IPR038109,PS51736,cd03768, IPR006118,PF13408,G3DSA:3.40.50.1390,PF07508,Coil
MISNSAATHAKVAIYIRVSTLHQIDRDSLPMQRQDLIAYAKLILNTDDVTIFEDAGYSGKNTIRPEFQKMMSQLRTGTYTHLLVWKIDRISRNLLDFAEMYQELKNLGVTFVSKNEQFDTSTAMGEAMLKIILVFAELERNMTSERVTATMISRASNGQWNGGRIPYGYDYDSEEQAFSFNSDEYNIAHLIHDKYEELRSLVYLARYLNEHGYRTRAGNDWSPVSLDIILRSVFYCGDYQYNRLKEGDRQRPKDKSEWITVKDHHPAIVSREQKERILALLESNRRLKSFRKSGKSKYTHIFSGLLICGNCGQPMTSSISTIKKTTGRRYSLYFCPTHRKSKLWCIGKSTSDPIVGEFVFNYILNMLNAQKAFSPETSIQELEQQLLSGDTFSPVAAIAPDGLHDLFHTLRTGTIKGEVFGKDVKIKTGSEPPLQLSKLKKEKVRLERAIDRLNKLFLYSEKAMSESEYLTQKIQLSDSLEEVEDKLAFLASEGSLQQSITDDEFIAKASNFILSQKLTDRNYVSFQSLSATVSPEVLDSFLSSIIDNIVFKDGAIHSITFRNGLSHTFIYKEKPEV

SEQ ID NO: 951 - protein, 577 aa, Unknown
  Description of Unknown: Integrase B952 sequence
  PTHR30461:SF3,IPR036162,PS51737,IPR011109,PTHR30461, PS00397,PF00239,G3DSA:1.10.10.2600,IPR006119,SSF53041, SM00857,IPR025827,IPR038109,PS51736,cd03768, IPR006118,PF13408,G3DSA:3.40.50.1390,PF07508,Coil
MISNSAATHAKVAIYIRVSTLHQIDRDSLPMQRQDLIAYAKLILNTDDVTVFEDAGYSGKNTIRPEFQKMMSQLRTGTYTHLLVWKIDRISRNLLDFAEMYQELKDLGVTFVSKNEQFDTSTAMGEAMLKIILVFAELERNMTSERVAATMISRASNGQWNGGRIPYGYDYDPEEQTFSFNSDEYNIAHLIHDKYEELRSLVYLARYLNEHGYRTRAGNDWSPVSLDIILRSVFYCGDYQYNRLKEGDRQRPKDKSEWITVKDHHPAIVSREQKERILALLESNRRLKSFRKSGKSKYTHIFSGLLICGNCGQPMTSSISTIKKTTGRRYSLYFCPTHRKSKLWCTGKSTSDPIIGEFVFNYILNMLNAQKAFSSETSIQELEQQLLSGDTFSPVAAIAPDGLQDLFHTLRTGTIKGEVFGKDVKIKTGSEPPLQLSKLKKEKVRLERAIDRLNKLFLYSEKAMSESEYLTQKIQLSDALEEVEDKLAFLASEDSLQQSITDDEFIAKASNFILSQKLTDRNYVSFQSLSATVSPEVLDSFLSSIIDNIVFKDGAVHSITFRNGLSHTFIYKEKPEV

SEQ ID NO: 952 - protein, 577 aa, Unknown
  Description of Unknown: Integrase B953 sequence
  SM00857,G3DSA:1.10.10.2600,IPR036162,PF13408,IPR025827, G3DSA:3.40.50.1390,PS51737,IPR006119,IPR038109,PF07508, IPR011109,SSF53041,PTHR30461,Coil,PS51736, cd00338,PF00239
MNIYHTRERLRTRSIYDLNLRVAFYARVSTDSEDQQVSIEHQTQYYKEFIKSNRNWKFAKGYIDNGISGIQTKHREQFKEMLEDAKNGKFDMLITKEITRFARNTLDSIQYTRQMLSWGVCVWFQNDNINTIDEDSELRLTIMAGVAQDEVRKLSNRVKFGHKQSIKNGVVLGNSRIYGYDKKDGKLTINESEAQMVRMIFEDYASGEWTTPQLEKKLYNMGYRNYKGGKIDRNVIRHIIRNPKYKGYYAGGKVKIVDMFTKKQEFLPESEWVMFKDDGSHVPQIVDEEVWKKANEYIDARGEIVKTRRTSIKKSENVFTGMLICGNDGASYWLKQRTLRGKEDVKWVCSRKIKEGAASCDSFYIDDRELREVIAKLIRESSGDIEQIAEKFIKIYHSAMNQADASTEIERLKKQINVAERKSDKLLEYNLDGTISDAVFIEKSQKLEAQIEEYKKQIKKLSTIQDDIVPIENQIRAIAHSVKQLDGISPDDITKTVVDSFLEKIVVNPIGEKEAKLVFYLKDGITTEMPFFSGKNMRCSVNLFNPIFTERSTTFYRALRSFPGHKEPVKYTYFFAF

SEQ ID NO: 953 - protein, 577 aa, Unknown
  Description of Unknown: Integrase B954 sequence
  SM00857,G3DSA:1.10.10.2600,IPR036162,PF13408,IPR025827, G3DSA:3.40.50.1390,PS51737,IPR006119,IPR038109,PF07508, IPR011109,SSF53041,PTHR30461,Coil,PS51736, cd00338,PF00239
MNIYHTRERLRTRSIYDLNLRVAFYARVSTDSEDQQVSIEHQTQYYKEFIKSNRNWKFAKGYIDNGISGIQTKHREQFKEMLEDAKNGKFDMLITKEITRFARNTLDSIQYTRQMLSWGVCVWFQNDNINTIDEDSELRLTIMAGVAQDEVRKLSNRVKFGHKQSIKNGVVLGNSRIYGYDKKDGKLTINESEAQMVRMIFEDYASGEWTTPQLEKKLYNMGYRNYKGGKIDRNVIRHIIRNPKYKGYYAGGKVKIVDMFTKKQEFLPESEWVMFKDDGSHVPQIVDEEVWKKANEYIDARGEIVKTRRTSIKKSENVFTGMLICGNDGASYWLKQRTLRGKEDVKWVCSKKIKEGAASCDSFYIDDRELREVIAKLIRESSGDIEQIAEKFIKIYHSSMNQADASTEIKRLEKQINVAERKSDKLLEYNLDGAISDAVFIEKSQKLEAQIEEYKKQIQKLSTIQDDIVPIENQIRAIAHSVKQLDGISPDDITKTVVDSFLKKIVVNPIGEKEAKLVFYLKDGITTEMSFVSGKSMRCSVNLFNPIFTERSTTFYRALRSFPGHKEPVKYTYFFAF

SEQ ID NO: 954 - protein, 577 aa, Unknown
  Description of Unknown: Integrase B955 sequence
  PTHR30461:SF3,IPR036162,PS51737,IPR011109,PTHR30461, PS00397,PF00239,G3DSA:1.10.10.2600,IPR006119,SSF53041, SM00857,IPR025827,IPR038109,PS51736,cd03768, IPR006118,PF13408,G3DSA:3.40.50.1390,PF07508,Coil
MSKLTDKLNSIRVAIYVRVSTHYQIDKDSLPVQKEELAAYAKYVLNASSYEVFEDAGYSAKNTDRPDYQKMMSRVRSGEFTHILVWKLDRISRNLLDFAAMYDELKKLGVTFVSKNEQFDTSSAMGEAMLKIILVFAELERKMTAERVTAVMVARAGNGQWNGGRVPYGYSWDKDTETFSIAEEEAKVVLRMYDMYEERHSLLYVAKTLNTAGIHPRSGKEWSPTAVSIILKNMFYTGAYRYNYFDMSKRGSRQDIKPESEWVIVEEHHPAIVPKERWRNVVLTLERNRRGWGASGKTYNRKNIHVFAGLLTCGCCGANMSATSNCRELKGGYRPSIYACMSHRKNSGCPNKYITDTTLGPFALNYIANLIKAKESFGKTTSPEALQKKLLRGEMFENVACIKEHGLMELYSLYKSQVSGIKYTPKLSGEEDADNASERDILLSERRRIERALSRLKSLYLYSEEDMAEKDYIIEKKQLDEQLEKVNARLDELSEGLTSQFSISDDELMAKASYFIMSQKLSDKRFVNYRRLLEETDPRILKDFINSVSSNFCIENGKIRSITFKNGIIHEFVYKDD

SEQ ID NO: 955 - protein, 577 aa, Unknown
  Description of Unknown: Integrase B956 sequence
  PTHR30461:SF3,IPR036162,PS51737,IPR011109,PTHR30461, PS00397,PF00239,G3DSA:1.10.10.2600,IPR006119,SSF53041, SM00857,IPR025827,IPR038109,PS51736,cd03768, IPR006118,PF13408,G3DSA:3.40.50.1390,PF07508,Coil
MISNSAATHAKVAIYIRVSTLHQIDRDSLPMQRQDLIAYAKLILNTDDVTIFEDAGYSGKNTIRPEFQKMMSQLRTGTYTHLLVWKIDRISRNLLDFAEMYQELKNLGVTFVSKNEQFDTSTAMGEAMLKIILVFAELERNMTSERVTATMISRASNGQWNGGRIPYGYDYDPEEQAFSFNSDEYNIAHLIHDKYEELRSLVYLARYLNEHGYRTRAGNDWSPVSLDIILRSVFYCGDYQYNRLKEGDRQRPKDKSEWITVKDHHPAIVSREQKERILALLESNRRLKSFRKSGKSKYTHIFSGLLICGNCGQPMTSSISTIKKTTGRRYSLYFCPTHRKSKLWCTGKSTSDPIIGEFVFNYILNMLNAQKAFSPETSIQKLEQQLLSGDTFSPVVAIAPDGLQDLFHTLRTGTVKGEVFGKDVKIKTDSEPPLQLSKLKKEKIRLERAIDRLNKLFLYSEKAMSESEYLTQKIQLSDSLEEVEDKLAFLASEDSLQQSITDDEFIAKASNFILSQKLTDRNYVSFQSLSATVSPEVLDSFLSSIIDNIVFKDGAVHSITFRNGLSHTFIYKEKPEV

SEQ ID NO: 956 - protein, 577 aa, Unknown
  Description of Unknown: Integrase B957 sequence
  PTHR30461:SF3,IPR036162,PS51737,IPR011109,PTHR30461, PS00397,PF00239,G3DSA:1.10.10.2600,IPR006119,SSF53041, SM00857,IPR025827,IPR038109,PS51736,cd03768, IPR006118,PF13408,G3DSA:3.40.50.1390,PF07508,Coil
MISNSAATHAKVAIYIRVSTLHQIDRDSLPMQRQDLIAYAKLILNTDDVTIFEDAGYSGKNTIRPEFQKMMSQLRTGTYTHLLVWKIDRISRNLLDFAEMYQELKDLGVTFVSKNEQFDTSTAMGEAMLKIILVFAELERNMTSERVTATMISRASNGQWNGGRIPYGYDYDPEEQDFSFNSDEYNIAHLIHDKYEELRSLVYLARYLNEHGYRTRAGNDWSPVSLDIILRSVFYCGDYQYNRLKEGDRQRPKDKSEWITVKDHHPAIVSREQKERILALLESNRRLKSFRKSGKSKYTHIFSGLLICGNCGQPMTSSISTIKKTTGRRYSLYFCPTHRKSKLWCTGKSTSDPIVGEFVFNYILNMLNAQEAFSPETSIQELEQQLLSGDTFSPVVAIAPDGLQDLFHTLRTGTVKGEVFGKDVKIKTDSEPPLQLSKLKKEKVRLERAIDRLNKLFLYSEKAMSESEYLTQKIQLSDALEEVEDKLAFLASEDSLQQSITDDEFIAKASNFILSQKLTDRNYVSFQSLSATVSPEVLDSFLSSIIDNIVFKDGAIHSITFRNGLSHTFIYKEKPEV

SEQ ID NO: 957 - protein, 576 aa, Unknown
  Description of Unknown: Integrase B958 sequence
  PTHR30461:SF3,SM00857,G3DSA:1.10.10.2600,IPR036162,PF13408, IPR025827,PS51737,G3DSA:3.40.50.1390,IPR006119,IPR038109, PF07508,IPR011109,SSF53041,PF00239,PTHR30461, PS51736,Coil,cd00338
MKKFPIDLSCLTEEEISQFQEDPYTLYNGDQNVAIYLRYSSTGQSDQSIEGQLRDCRTFCKANHYRIVAIYVDRATTARKDVEKRVHLMEMISDSAKQNWEYVIVWKLDRFARNRNDSAIMKMRLRKNGVKVLSATEHLTDSPESIILESVLEGMAEFFSAELSQKVTRGMRESALKCHSVGGHIPLGYKVENHKLVVDPDTAHIVQEAFSLYANGESVAAICRKFNSAGYKTAKNTEFNRSSFKAMFRNTRYIGTYTYKDIVIENGIPAIIDKELFETVQRRLSKTATAPARGKAKVDYLLSGKLFCGRCGASMNGESGAGRHGKVYHYYSCYTKKRKLGCDKRPLKKDYIEGIVARDALNLLTDQLIDEIADMAIRQSEQDLINDTHIPQLTAQLSEVEKSITNITAAIEKGIASETLMNRLVQLEHEKKTLNKEIKAEEKFVYRIDRDQIVFWLSQFKYGNIEDENFRRRLIDLLVNSVTVWDEPDGYKITTAYNLTSCKTKTFRVEKNPAAEEATGFDFGESECTSSKIPETFWFPGFLFSFCRVGQHVCHFLLATPEVSLSAAAIGPLEGI

SEQ ID NO: 958 - protein, 576 aa, Unknown
  Description of Unknown: Integrase B959 sequence
  PTHR30461:SF3,IPR036162,PS51737,IPR011109,PTHR30461, PS00397,PF00239,G3DSA:1.10.10.2600,IPR006119,SSF53041, SM00857,IPR025827,IPR038109,PS51736,cd03768, IPR006118,PF13408,G3DSA:3.40.50.1390,PF07508,Coil
MKNNFKMPGSGSETHIRVAIYVRVSTVYQIDKDSLPMMKQDLTSYCKYILNTDDFVIFEDAGYSGKNTDRPAYQKMMSQIRQGLFTHLLVWKIDRISRNLLDFANMYAELKDLGVTFVSKNEQFDTSTAIGEAMLKIILVFAELERNMTSERVTATMINRASNGVWNGGRIPFGYSYDKPTQVFSIDPEENKIYNFMVETYEDTQSIVHTSRRLNEAGYRSRNGNMWSPVAVWTILRNPWYKGVYRYNYYKIPGRKAIKDESEWVIVENHHPASIDPDRFDRIQATLDKNARYRNTPGRKTAQKNVHVFSGLVWCAECGSAFTASPGKLHVSGYRPSKYGCPNVRKTKTCHAKYTSDVVLGEFLLNYILNILNAQKQFAYIHSTDDLQKRLLHGSTFSNVDHVDPDGLASLLNMLEKCSGSDPVLLKRPRSKPKMDPELKRMMADQKKQQRALDRLNDLYLYSDDSISEREYLVRKQQITDRLQEINEAIGMMSQEPWMRTMNDEEFIRQASSFILTQKLADKQYIYYESLAESLDPEILKNFFVSILDSIILRDGRPETVVFRNGLSHTFTYKDS

SEQ ID NO: 959 - protein, 576 aa, Unknown
  Description of Unknown: Integrase B960 sequence
  PTHR30461:SF3,IPR036162,PS51737,IPR011109,PTHR30461, PS00397,PF00239,G3DSA:1.10.10.2600,IPR006119,SSF53041, SM00857,IPR025827,IPR038109,PS51736,cd03768, IPR006118,PF13408,G3DSA:3.40.50.1390,PF07508,Coil
MKKNFKMPGSGSETPIRVAIYVRVSTVYQIDKDSLPMMKQDLTSYCKYILNTDDFVIFEDAGYSGKNTDRPAYQKMMSQIRQGLFTHLLVWKIDRISRNLLDFANMYAELKDLGVTFVSKNEQFDTSTAIGEAMLKIILVFAELERNMTSERVTATMINRASNGVWNGGRIPFGYSYDKPTQVFSIDPEENKIYNFMVETYEDTQSIVHTSRRLNEAGYRSRNGNMWSPVAVWTILRNPWYKGVYRYNYYKIPGRKAIKDESEWVIVENHHPASIDPDRFDRIQATLDKNARYRNTPGRKTAQKNVHVFSGLVWCAECGSAFTASPGKLHVSGYRPSKYGCPNVRKTKTCHAKYTSDVVLGEFLLNYILNILNAQKQFAYIHSTDDLQKRLLHGSTFSNVDHVDPDGLASLLNMLEKCSGSDPVLLKRPRSKPKMDPELKRMMADQKKQQRALDRLNDLYLYSDDSISEREYLVRKQQITDRLQEINEAIGMMSQEPWMRTMNDEEFIRQASSFILTQKLADKQYIYYESLAESLDPEILKNFFVSILDSIILRDGRPETVVFRNGLSHTFTYKDS

SEQ ID NO: 960 - protein, 576 aa, Unknown
  Description of Unknown: Integrase B961 sequence
  PTHR30461:SF3,IPR036162,PS51737,IPR011109,PTHR30461, PS00397,PF00239,G3DSA:1.10.10.2600,IPR006119,SSF53041, SM00857,IPR025827,IPR038109,PS51736,cd03768, IPR006118,PF13408,G3DSA:3.40.50.1390,PF07508,Coil
MKKNFKMPGSGSETPIRVAIYVRVSTVYQIDKDSLPMMKQDLTSYCKYILNTDDFVIFEDAGYSGKNTDRPAYQKMMSQIRQGLFTHLLVWKIDRISRNLLDFANMYAELKDLGVTFVSKNEQFDTSTAIGEAMLKIILVFAELERNMTSERVTATMINRASNGVWNGGRIPFGYSYDKPTQVFSIDPEENKIYNFMVETYEDTQSIVHTSRRLNEAGYRSRNGNMWSPVAVWTILRNPWYKGVYRYNYYKIPGRKAIKDESEWVIVENHHPASIDPDRFDRIQATLDKNARYRNTPGRKTAQKNVHVFSGLVWCAECGSAFTASPGKLHVSGYRPSKYGCPNVRKTKTCHAKYTSDVVLGEFLLNYILNILNAQKQFAYIHSTDDLQKRLLHGSTFSNVDHVDPDGLASLLNMLEKCSGSDPVLLKRPRSKPKMDPELKRMMADQKKQQRALDRLNDLYLYSDDSISEREYLVRKQQITDRLQEINEAIGMMSQEPWMRTMNDEEFIRQASSFILTQKLADKQYIYYENLAESLDPEILKNFFVSILDSIILRDGRPETVVFRNGLSHTFTYKDS

SEQ ID NO: 961 - protein, 576 aa, Unknown
  Description of Unknown: Integrase B962 sequence
  PTHR30461:SF3,IPR036162,PS51737,IPR011109,PTHR30461, PS00397,PF00239,G3DSA:1.10.10.2600,IPR006119,SSF53041, SM00857,IPR025827,IPR038109,PS51736,cd03768, IPR006118,PF13408,G3DSA:3.40.50.1390,PF07508,Coil
MLRGNTENGSNQRIRVAIYVRVSTVYQIDKDSLPMMKQDLTAYCKYILNTEDYVIFEDAGYSGKNMDRPAYQKMMSQVRQGLFTHILVWKIDRISRNLLDFANMYAELKELGVTFVSKNEQFDTSTAIGEAMLKIILVFAELERNMTSERVTATMINRANNGIWNGGRVPFGYTYDKESQVFSFDEAEQKIVRLIFDTYEKTGSIVHTSRKLNDSGFLTRGGNIWSATAVWIILRNPWYKGVYRYNYYKIPGRKAVKDKKEWVIVENHHKPSIDPERFDKIQLTLTNNARYRRSPGRSNVQKNVHIFAGLLWCGECGAAFTSSPGKLHASGYRPSKYGCPNVRKTKTCHAKYTSDVVVGEFIINYILNIINAHKDIKLVRSPEDLQQHLLRGSTFSDICSIDSDGLSDMYDMLTSCSKSGMLFKRVKPKFKVDPELKQLQSEQKKQQRALDRLNELYLYSDESMSEREYIVRKQQITDKLDEINDAIGMMSQEPWMHTMGDSEFIQQASSFILNQKLHDRQYVYFTSLAESVDAEILKAFFGSIIDSIVITSGKIQRVTFRNGISHTFTYKNKPED

SEQ ID NO: 962 - protein, 576 aa, Unknown
  Description of Unknown: Integrase B963 sequence
  PTHR30461:SF3,IPR036162,PS51737,IPR011109,PTHR30461, PS00397,PF00239,G3DSA:1.10.10.2600,IPR006119,SSF53041, SM00857,IPR025827,IPR038109,PS51736,cd03768, IPR006118,PF13408,G3DSA:3.40.50.1390,PF07508,Coil
MKKNFKMPGSGSETPIRVAIYVRVSTVYQIDKDSLPMMKQDLTSYCKYILNTDDFVIFEDAGYSGKNTDRPAYQKMMSQIRQGLFTHLLVWKIDRISRNLLDFANMYAELKDLGVTFVSKNEQFDTSTAIGEAMLKIILVFAELERNMTSERVTATMINRASNGVWNGGRIPFGYSYDKPNQVFSIDPEENKIYNFMVETYEDTQSIVHTSRRLNEAGYRSRNGNMWSPVAVWTILRNPWYKGVYRYNYYKIPGRKAIKDESEWVIVENHHPASIDPDRFDRIQATLDKNARYRNTPGRKTAQKNVHVFSGLVWCAECGSAFTASPGKLHVSGYRPSKYGCPNVRKTKTCHAKYTSDVVLGEFLLNYILNILNAQKQFAYIHSTDDLQKRLLHGSTFSNVDHVDPDGLASLLNMLEKCSGSDPVLLKRPRSKPKMDPELKRMMADQKKQQRALDRLNDLYLYSDDSISEREYLVRKQQITDRLQEINEAIGMMSQEPWMRTMNDEEFIRQASSFILTQKLADKQYIYYESLAESLDPEILKNFFVSILDSIILRDGRPETVVFRNGLSHTFTYKDS

SEQ ID NO: 963 - protein, 576 aa, Unknown
  Description of Unknown: Integrase B964 sequence
  cd03768,SM00857,G3DSA:1.10.10.2600,IPR036162,PF13408, IPR025827,G3DSA:3.40.50.1390,PS51737,IPR006119,IPR038109, PF07508,IPR011109,SSF53041,PTHR30461,PS51736, Coil,PF00239
MRGAIYSRVSTIDQDYNRQTNELKEYAKYMGIEITHVFEEKESGFNDDRPEFAKLKELTKDDIDIVLVWELSRLSRRSLYLQQQIEYFTKKGICVYAKKENLRTLDENGEEDRNTKFIIGIIAMIAEQEVATLKSRSISSKRNKIIKEGNSYTYKAPYGYDYSTETKKLSINEEEAKTVRRVIELSANDYSSARIALILNAENIPTRSKTKIWTMGTINTMLSNPVYKGEAEYMLKGTEPKKGKRYKRPIEVAIVKTPAIVSAELFDLSREKMKGRAFRSKSTGVKHFQLLRGLIYCPYCKIKYTYEGGRDLYVCHDKHKKAKNKPDCFSKAIKATRIEKIVWELVRLLFSQELATGKAQEQEEPLRQEIEAHKKLLIGIENKLNDLTAQANAIVNAAIDIKREMPNMPDLYINKLREAASLDKESKKYQYEKDRLNKLILSCEDKIKAINSLSNEKVLVDSITDDMERYELIHKVIDHMVIYGEDSIYSLVVVTFKTGQEVYIGYKSKGYQYYTIFHPSQSVWFDTEKRLGYITTMKSPDSLVLSLETVTKEYSVTNFIKVLDVPKNRRYYENQS

SEQ ID NO: 964 - protein, 576 aa, Unknown
  Description of Unknown: Integrase B965 sequence
  PTHR30461:SF3,SM00857,G3DSA:1.10.10.2600,IPR036162,PF13408, PS51737,IPR025827,G3DSA:3.40.50.1390,IPR006119,IPR038109, PF07508,SSF53041,IPR011109,PTHR30461,Coil, PS51736,cd00338,PF00239
MKITAPARSARAVSLEAFVDNLNLANVVIYARYSSAGQNDQSIDGQLAKCREYAQQRGYRVVGEYCDRALSGRYAETRPEFQRLIADSAKRAFDFVLVWKLDRFSRDRYDSAIYKKKLRTNGVRVLSVTEGVGDSSESVLLEAILEAMAEEYSRQLAQNVRRGMRQNAEKGLSLGGLAPLGYRVVNKQYEINEDEARIVRFIHEQYADGAGQKQIVADCARLGYRNQRGNPLTLTSVKRILANERYAGRYDYLGEIVIEDAFPAIVSKDLKKRVRDRLKANAKAPGHAKAKVEYLLHGKLFCGECGAPMIGECGRGRHGATYYYYTCAARKKQHTCKKRNERKDELEASIVDYIGSCVLTDSWIDGAAERVVAEYQKSYDASGIKPLEKQIRDADKEIDQLVDALISATAEAARRRINERIETAEARKQALEADLASLRIASRVQIRKEDIVVWLNQFRTGDRSDLEYRKKVIDLFVNAIYLYDDSFKLFLNVADSSQVTYADALALAPPSVSDFGVSGVPEKQLISFWNQLLFFFVLYYRRSTKRLPLYARGAVGVSVYLLVQTIRLDGKNRISS

SEQ ID NO: 965 - protein, 576 aa, Unknown
  Description of Unknown: Integrase B966 sequence
  PTHR30461:SF3,IPR036162,PS51737,IPR011109,PTHR30461, PF00239,G3DSA:1.10.10.2600,IPR006119,SSF53041,cd00338, SM00857,IPR025827,IPR038109,mobidb-lite,PS51736, PF13408,G3DSA:3.40.50.1390,PF07508,Coil
MAQQKKAVGAVFDGTPRAVIYARYSSTHQRERSIEDQIADCRAYAERCGLMVVGIYADRAISGKTDERPDFQRMIDDSKKRQFDRVIVWKLDRFARNRYDSALYKHKLKQNGVSVLSAMENIGEGDESIILEAILEASAEYYSRDLRKKVLRGMTTSAKKGLHNTGSVPYGYRLEGESAIPDGDRAEFVKHVFEAYAKGETPAELYREMQRRGLDTKVNGRKVSDNIIGSILRNEKYTGRGMWRGIPVEWPRLIDDELFEAARSRTEKNRRAPAAYKAAEPFILCGKAFCGYCGAPLMSGGGKGRSGKYYRHYICRTKKRERACGKKTEDKDFLEWYIVEQTCAYVLAPERLEYIADRVVECYKESFDGQRVSALEARIAKLDRDLDKTTDLLFAAPSAAAVDRINKHVVELEAQKNELEAELSGLKIAAAITYTRDEVVAWLKQFCNGDPLEAEFRRRIVETFINSVYVYDDRIVIYFNVRGGKQISYAEMLESAGDVDPLPPGPENKKSGGPDNGTAASNSKERFLHGKNTEQTAESAVRFCSGLVHQIPTKTNQSFIFVNGVFGIVVAREPSN

SEQ ID NO: 966 - protein, 576 aa, Unknown
  Description of Unknown: Integrase B967 sequence
  PTHR30461:SF3,IPR036162,PS51737,IPR011109,PTHR30461, PS00397,PF00239,G3DSA:1.10.10.2600,IPR006119,SSF53041, SM00857,IPR025827,IPR038109,PS51736,cd03768, IPR006118,PF13408,G3DSA:3.40.50.1390,PF07508,Coil
MKKNFKMPGSGSETPIRVAIYVRVSTVYQIDKDSLPMMKQDLTSYCKYILNTDDFVIFEDAGYSGKNTDRPAYQKMMSQIRQGLFTHLLVWKIDRISRNLLDFANMYAELKDLGVTFVSKNEQFDTSTAIGEAMLKIILVFAELERNMTSERVTATMINRASNGVWNGGRIPFGYSYDKPTQVFSIDPEENKVYDFLVETYEDTQSIVHTSRKLNEAGYRSRNGNMWSPVAVWTILRNPWYKGVYRYNYYKIPGRKAIKDESEWVIVENHHPASIDPDRFDRIQATLDKNARYRNTPGRKTAQKNVHVFSGLIWCAECGSAFTASPGKLHVSGYRPSKYGCPNVRKTKTCHAKYTSDVVLGEFLLNYILNILNAQKQFAYIHSTDDLQKRLLHGSTFSNVDHVDPDGLASLLNMLEKCSGSDPVLLKRPRSKPKMDPELKRMMADQKKQQRALDRLNDLYLYSDDSISEREYLVRKQQITDRLQEINEAIGMMSQEPWMRTMNDEEFIRQASSFILTQKLADKQYIYYESLAESLDPEILKNFFVSILDSIILRDGRPETVVFRNGLSHTFTYKDS

SEQ ID NO: 967 - protein, 576 aa, Unknown
  Description of Unknown: Integrase B968 sequence
  PTHR30461:SF3,SM00857,G3DSA:1.10.10.2600,IPR036162,PF13408, PS51737,G3DSA:3.40.50.1390,IPR025827,IPR006119,IPR038109, PF07508,IPR011109,SSF53041,PF00239,PTHR30461, Coil,cd00338
MYEEIKTACLYLRYSSSNQTEQSIEGQMHVCQDFCKRHNIRIVEMYIDRATSASKDIEKRVEFLKMIKDSEKGNFNAVIVYKLDRFARSRYDSATYKYRLKRNGVQLISATENITQDPEGIILESVLEGMAEFYSAELSQKINRGMRESAMKHNSIGGAIPLGYKTVDKKLVIDETTAPIVREAFQMYADGESVAEICRTFNNRGYKTSKGTRFGKSSFTKIFRNEKYIGVYKYHDYRAEDVIPPIIDKDLWDRVQVRVGKIKKAPARNKARHTYLLTGKLFCGHCGSAMNADGNSQGYLYYRCYGKKNLDKQCNKRNMEKNLIERLVAQDAMSFLTDEYIEKIATIACDRNKQEIESDSPIPVIRDRIRQVDVSLNNLLKAIETGSAPDMLVKRMGELETEKKDMEVQLKKEMAHQVYIDKEQVIFWLEKFREGDINDEEFCQTVIDLFVNSVTVWDEPDDKFKITIAYNLTSIPQKTYRLSKDGRLSDYASNTPDRESQKDLVIRTHIHLFFHNRRSIFFITHFHTASGFFIHPVKIKLCIWNFRLNLKQIRFYFLCDHLCYFFCCSACTEKCH

SEQ ID NO: 968 - protein, 576 aa, Unknown
  Description of Unknown: Integrase B969 sequence
  PTHR30461:SF3,IPR036162,PS51737,IPR011109,PTHR30461, PF00239,G3DSA:1.10.10.2600,IPR006119,SSF53041,cd00338, SM00857,IPR025827,IPR038109,mobidb-lite,PS51736, PF13408,G3DSA:3.40.50.1390,PF07508,Coil
MPRAAQAAGAEFDGTPRAVIYARYSSTHQRERSIEDQIADCRAYAERCGLMVVGIYADRAISGKTDERPDFQRMIDDSKKRQFDRVIVWKLDRFARNRYDSALYKHKLKQNGVSVLSAMENIGEGDESIILEAILEASAEYYSRDLRKKVLRGMTTSAKKGLHNTGSVPYGYRLEGESAVPDGDRAEFVKHVFEAYAKGETPAELYREMRSRGLDTKVNGRKVSDNIIGSILRNEKYTGRGMWRGIPVEWPRLIDDELFDAARARTEKNRRAPAAYKAAEPFILCGKAFCGYCGAPLMSGGGKGRSGKYYRHYICRTKKRERACGKKTEDKDFLEWYTVEQTCAYVLAPERLEYIAERVVECYKESFDGQRVSALEARIAKLDRDLDKTTDLLFAAPSAAAVDRINKHVVELEAQKSELEAELSGLKIAAAITYTRDEVVAWLKQFCNGDPLEAEFRRRIVETFINSVYVYDDRIVIYFNVRGGKQISYAEMLESSGDVEPLPPGPENKKSGGPDNGTAASNSKERFLHGKNTEQTAESAVRFCSGLVHQTQTKTNQSFIFVNGVFGIVVAREPGN

SEQ ID NO: 969 - protein, 576 aa, Unknown
  Description of Unknown: Integrase B970 sequence
  PTHR30461:SF3,SM00857,G3DSA:1.10.10.2600,IPR036162,PF13408, PS51737,IPR025827,G3DSA:3.40.50.1390,IPR006119,IPR038109, PF07508,IPR011109,SSF53041,PTHR30461,Coil, PS51736,cd00338,PF00239
MKITAPARSARAVSLEAFVDNLNLANVVIYARYSSAGQNDQSIDGQLAKCREYAQQRGYRVVGEYCDRALSGRYAETRPEFQRLIADSAKRAFDFVLVWKLDRFSRDRYDSAIYKKKLRANGVRVLSVTEGVGDSSESVLLEAILEAMAEEYSRQLAQNVRRGMRQNAEKGLSLGGLAPLGYRVVNKQYEINEDEARIVRFIHEQYADGAGQKQIVADCARLGYRNQRGNPLTLASVKRILANERYVGMYDYLGEIVIEDAFPSIVSKDLKKRVRDRLKANAKAPGHAKAKVEYLLHGKLFCGECGAPMIGECGRGRHGATYYYYTCAARKKQHTCKKRNERKDELEASIVDYIGSCVLTDSWIDGAAERVVAEYQKSYDASGIKPLEKQIRDADKEIDQLVDALISATAEAARRRINERIETAEARKQALEADLASLRIASRVQIKKEDIVVWLNQFRTGDRSDLEYRKKVIDLFVNAIYLYDDSFKLFLNVADSAQVTYADAVALAPPSVSDFGASGVPEKQLISFWNQLLFFFVLHYRRSTKRLPLYARGAVGASVYLLVQTIRLDGKNRISS

SEQ ID NO: 970 - protein, 576 aa, Unknown
  Description of Unknown: Integrase B971 sequence
  PTHR30461:SF3,IPR036162,PS51737,IPR011109,PTHR30461, PS00397,PF00239,G3DSA:1.10.10.2600,IPR006119,SSF53041, SM00857,IPR025827,IPR038109,PS51736,cd03768, IPR006118,PF13408,G3DSA:3.40.50.1390,PF07508,Coil
MKKNFKMLESGSETSIRVAIYVRVSTVYQIDKDSLPMMKQDLTSYCKYILNTDDFVIFEDAGYSGKNTDRPAYQKMMSQIRQGLFTHLLVWKIDRISRNLLDFANMYAELKDLGVTFVSKNEQFDTSTAIGEAMLKIILVFAELERNMTSERVTATMINRASNGVWNGGRIPYGYSYDKPAQVFSIDPGENKVYNFLVETYEDTQSIVHTSRKLNEAGYRSRNGNMWSPVAVWTILRNPWYKGVYRYNYYKIPGRKAIKDESEWVIVENHHPASIDTDRFDRIQATLDKNARYRNTPGRKTTQKNVHVFSGLVWCAECGSAFTASPGKLHVSGYRPSKYGCPNVRKTKTCHAKYTSDVVLGEFLLNYILNILNAQKQFAYIHSTDDLQKYLLRGSTFSNVDHVDPDGLASLLNMLKKCSGSDPVLLKRPRSKPKIDPELKRMMADQKKQQRALDRLNDLYLYSDDSISEREYLVRKQQITDRLQEINETIGMMSQEPWMHTMNDEEFIRQASSFILTQKLADKQYIYYENLAESLDPEILKNFFVSILDSIILRDGRPETVVFRNGLSHTFTYKDS

SEQ ID NO: 971 - protein, 576 aa, Unknown
  Description of Unknown: Integrase B972 sequence
  PTHR30461:SF3,IPR036162,PS51737,IPR011109,PTHR30461, PS00397,PF00239,G3DSA:1.10.10.2600,IPR006119,SSF53041, SM00857,IPR025827,IPR038109,PS51736,cd03768, IPR006118,PF13408,G3DSA:3.40.50.1390,PF07508,Coil
MKKNFKMPGSGSETPIRVAIYVRVSTVYQIDKDSLPMMKQDLTSYCKYILNTDDFVIFEDAGYSGKNTDRPAYQKMMSQIRQGLFTHLLVWKIDRISRNLLDFANMYAELKDLGVTFVSKNEQFDTSTAIGEAMLKIILVFAELERNMTSERVTATMINRASNGVWNGGRIPFGYSYDKPTQVFSIDPEENKIYNFMVETYEDTQSIVHTSRRLNEAGYRSRNGNMWSPVAVWTILRNPWYKGVYRYNYYKIPGRKAIKDESEWVIVENHHTASIDPDRFDRIQATLDKNARYRNTPGRKTAQKNVHVFSGLVWCAECGSAFTASPGKLHVSGYRPSKYGCPNVRKTKTCHAKYTSDVVLGEFLLNYILNILNAQKQFAYIHSTDDLQKRLLHGSTFSNVDHVDPDGLASLLNMLEKCSGSDPVLLKRPRSKPKMDPELKRMMADQKKQQRALDRLNDLYLYSDDSISEREYLVRKQQITDRLQEINEAIGMMSQEPWMRTMNDEEFIRQASSFILTQKLADKQYIYYENLAESLDPEILKNFFVSILDSIILRDGRPETVVFRNGLSHTFTYKDS

SEQ ID NO: 972 - protein, 576 aa, Unknown
  Description of Unknown: Integrase B973 sequence
  PTHR30461:SF3,IPR036162,PS51737,IPR011109,PTHR30461, PS00397,PF00239,G3DSA:1.10.10.2600,IPR006119,SSF53041, SM00857,IPR025827,IPR038109,PS51736,cd03768, IPR006118,PF13408,G3DSA:3.40.50.1390,PF07508,Coil
MKKNFKMPGSGSETPIRVAIYVRVSTVYQIDKDSLPMMKQDLTSYCKYILNTDDFVIFEDAGYSGKNTDRPAYQKMMSQIRQGLFTHLLVWKIDRISRNLLDFANMYAELKDLGVTFVSKNEQFDTSTAIGEAMLKIILVFAELERNMTSERVTATMINRASNGVWNGGRIPFGYSYDKPTQVFSINPEENKIYNFMVETYEDTQSIVHTSRRLNEAGYRSRNGNMWSPVAVWTILRNPWYKGVYRYNYYKIPGRKAIKDESEWVIVENHHPASIDPDRFDRIQATLDKNARYRNTPGRKTAQKNVHVFSGLVWCAECGSAFTASPGKLHVSGYRPSKYGCPNVQKTKTCHAKYTSDVVLGEFLLNYILNILNAQKQFAYIHSTDDLQKRLLHGSTFSNVDHVDPDGLASLLNMLEKCSGSDPVLLKRPRSKPKMDPELKRMMADQKKQQRALDRLNDLYLYSDDSISEREYLVRKQQITDRLQEINEAIGMMSQEPWMRTMNDEEFIRQASSFILTQKLADKQYIYYENLAESLDPEILKNFFVSILDSIILRDGRPETVVFRNGLSHTFTYKDS

SEQ ID NO: 973 - protein, 576 aa, Unknown
  Description of Unknown: Integrase B974 sequence
  PTHR30461:SF3,IPR036162,PS51737,IPR011109,PTHR30461, PS00397,PF00239,G3DSA:1.10.10.2600,IPR006119,SSF53041, SM00857,IPR025827,IPR038109,PS51736,cd03768, IPR006118,PF13408,G3DSA:3.40.50.1390,PF07508,Coil
MKKNFKMPGSGSETPIRVAIYVRVSTVYQIDKDSLPMMKQDLTSYCKYILNTDDFVIFEDAGYSGKNTDRPAYQKMMSQIRQGLFTHLLVWKIDRISRNLLDFANMYAELKDLGVTFVSKNEQFDTSTAIGEAMLKIILVFAELERNMTSERVTATMINRASNGVWNGGRIPFGYSYDKPTQVFSIDPEENKIYNFMVETYEDTQSIVHTSRRLNEAGYRSRNGNMWSPVAVWTILRNPWYKGVYRYNYYKIPGRKAIKDESEWVIVENHHPASIDPDRFDRIQATLDKNARYRNTPGRKTAQKNVHVFSGLVWCAECGSAFTASPGKLHVSGYRPSKYGCPNVRKTKTCHAKYTSDVVLGEFLLNYILNILNAQKQFAYIHSTDDLQKRLLHGSTFSNVDHVDPDGLASLLNMLEKCSGSDPVLLKRPRSKPKMDPELKRMMADQKKQQRALDRLNDLYLYSDDSISEREYLVRKQQITDRLQEINEAIGMMSQEPWMRTMNDEEFIRQASSFILTQKLADKQYIYYENLAESLDPEILKNFFVSILDSIILRDGRPETLVFRNGLSHTFTYKDS

SEQ ID NO: 974 - protein, 576 aa, Unknown
  Description of Unknown: Integrase B975 sequence
  PTHR30461:SF3,IPR036162,PS51737,IPR011109,PTHR30461, PS00397,PF00239,G3DSA:1.10.10.2600,IPR006119,SSF53041, SM00857,IPR025827,IPR038109,PS51736,cd03768, IPR006118,PF13408,G3DSA:3.40.50.1390,PF07508,Coil
MKKNFKMPGSGSETPIRVAIYVRVSTVYQIDKDSLPMMKQDLTSYCKYILNTDDFVIFEDAGYSGKNTDRPAYQKMMSQIRQGLFTHLLVWKIDRISRNLLDFANMYAELKDLGVTFVSKNEQFDTSTAIGEAMLKIILVFAELERNMTSERVTATMINRASNGVWNGGRIPYGYSYDKPTQVFSIDPEENKIYNFMVETYEDTQSIVHTSRRLNEAGYRSRNGNMWSPVAVWTILRNPWYKGVYRYNYYKIPGRKAIKDESEWVIVENHHPASIDSDRFDRIQATLDKNARYRNTPGRKTAQKNVHVFSGLVWCAECGSAFTASPGKLHVSGYRPSKYGCPNVRKTKTCHAKYTSDVVLGEFLLNYILNILNAQKQFAYIHSTDDLQKRLLHGSTFSNVDHVDPDGLASLLNMLEKCSGSDPVLLKRPRSKPKMDPELKRMMADQKKQQRALDRLNDLYLYSDDSISEREYLVRKQQITDRLQEINEAIGMMSQEPWMRTMNDEEFIRQASSFILTQKLADKQYIYYENLAESLDPEILKNFFVSILDSIILRDGRPETVVFRNGLSHTFTYKDS

SEQ ID NO: 975 - protein, 576 aa, Unknown
  Description of Unknown: Integrase B976 sequence
  PTHR30461:SF3,IPR036162,PS51737,IPR011109,PTHR30461, PS00397,PF00239,G3DSA:1.10.10.2600,IPR006119,SSF53041, SM00857,IPR025827,IPR038109,PS51736,cd03768, IPR006118,PF13408,G3DSA:3.40.50.1390,PF07508,Coil
MIRENTENGSNRRIRVAIYVRVSTVYQIDKDSLPMMKQDLTAYCKYILNTEDYVIFEDAGYSGKNMDRPAYQKMMSQVRQGLFTHILVWKIDRISRNLLDFANMYAELKELGVTFVSKNEQFDTSTAIGEAMLKIILVFAELERNMTSERVTATMINRANNGIWNGGRVPFGYTYDKESQTFSFDEAEQKIVRLIFDTYEKTGSIVHTSRKLNDSGFLTRGGNIWSATAVWIILRNPWYKGVYRYNYYKIPGRKAVKDKKEWVIVENHHKPSIDSERFDKIQLTLTNNARYRRSPGRSNVQKNVHIFAGLLWCGECGAAFTSSPGKLHTSGYRPSKYGCPNVRKTKTCHAKYTSDVVVGEFVINYILNIINAHKDIKLVRSPEDLQQHLLRGSTFSDICSIDSDGLSAMYDMLTCCSKSGMLFKRVKPKFKVDPELKHLQSEQKKQQRALDRLNELYLYSDESMSEREYIVRKQQITDKLDEINDAIGMMSQEPWMHTMGDSEFIQQASSFILNQKLHDRQYVYFTSLAESVDAEILKAFFGSIIDSIVITSGKIQRVTFRNGISHTFTYKNKPED

SEQ ID NO: 976 - protein, 576 aa, Unknown
  Description of Unknown: Integrase B977 sequence
  PTHR30461:SF3,IPR036162,PS51737,IPR011109,PTHR30461, PS00397,PF00239,G3DSA:1.10.10.2600,IPR006119,SSF53041, SM00857,IPR025827,IPR038109,PS51736,cd03768, IPR006118,PF13408,G3DSA:3.40.50.1390,PF07508,Coil
MKKNFKMPGSGSETPIRVAIYVRVSTVYQIDKDSLPMMKQDLTSYCKYILNTDDFVIFEDAGYSGKNTDRPAYQKMMSQIRQGLFTHLLVWKIDRISRNLLDFANMYAELKDLGVTFVSKNEQFDTSTAIGEAMLKIILVFAELERNMTSERVTATMINRASNGVWNGGRIPFGYSYDKPTQVFSINPEENKIYNFMVETYEDTQSIVHTSRRLNEAGYRSRNGNMWSPVAVWTILRNPWYKGVYRYNYYKIPGRKAIKDESEWVIVENHHPASIDPDRFDRIQATLDKNARYRNAPGRKTAQKNVHVFSGLVWCAECGSAFTASPGKLHVSGYRPSKYGCPNVRKTKTCHAKYTSDVVLGEFLLNYILNILNAQKQFAYIHSTDDLQKRLLHGSTFSNVDHVDPDGLASLLNMLEKCSGSDPVLLKRPRSKPKMDPELKRMMADQKKQQRALDRLNDLYLYSDDSISEREYLVRKQQITDRLQEINEAIGMMSQEPWMRTMNDEEFIRQASSFILTQKLADKQYIYYENLAESLDPEILKNFFVSILDSIILRDGRPETVVFRNGLSHTFTYKDS

SEQ ID NO: 977 - protein, 576 aa, Unknown
  Description of Unknown: Integrase B978 sequence
  PTHR30461:SF3,IPR036162,PS51737,IPR011109,PTHR30461, PS00397,PF00239,G3DSA:1.10.10.2600,IPR006119,SSF53041, SM00857,IPR025827,IPR038109,PS51736,cd03768, IPR006118,PF13408,G3DSA:3.40.50.1390,PF07508,Coil
MKKNFKMPGSGSETPIRVAIYVRVSTVYQIDKDSLPMMKQDLTSYCKYILNTDDFVIFEDAGYSGKNTDRPAYQKMMSQIRQGLFTHLLVWKIDRISRNLLDFANMYAELKDLGVTFVSKNEQFDTSTAIGEAMLKIILVFAELERNMTSERVTATMINRASNGVWNGGRIPYGYSYDKPTQVFSIDPEENKVYNFLVETYEDTQSIVHTSRKLNEAGYRSRNGNMWSPVAVWTILRNPWYKGVYRYNYYKIPGRKAIKDESEWVIVENHHPASIDPDRFDRIQATLDKNARYRNTPGRKTAQKNVHVFSGLVWCAECGSAFTASPGKLHVSGYRPSKYGCPNVRKTKTCHAKYTSDVVLGEFLLNYILNILNAQKQFAYIHSTDDLQKHLLHGSTFSNVDHVDPDGLASLLNMLEKCFGSDPVLLKRPRSKPKMDPELKRMMADQKKQQRALDRLNDLYLYSDDSISEREYLVRKQQITDRLQEINEAIGMMSQEPWMRTMNDEEFIRQASSFILTQKLADKQYIYYENLAESLDPEILKNFFVSILDSIILRDGRPETVVFRNGLSHTFTYKDS

SEQ ID NO: 978 - protein, 576 aa, Unknown
  Description of Unknown: Integrase B979 sequence
  PTHR30461:SF3,SM00857,G3DSA:1.10.10.2600,IPR036162,PF13408, PS51737,IPR025827,G3DSA:3.40.50.1390,IPR006119,IPR038109, PF07508,SSF53041,IPR011109,PTHR30461,Coil, PS51736,cd00338,PF00239
MKKRVRILLRVSSNQQLEADGDLSVQREIVLDYISKQNNWKLDNKEYFEGSNSGYKNAVKDRDVLQEALFDAKNNEYDILVVYKDDRIGRRMWEIGSYVMQLKSYGVDIYTTKDGCISPENNDVMGQMMLALRYGNAQKSSSDTGQRVKDTAQKLVKRGKFMGGKAPYGYELILSGELSKHGRALHKLKKIPEKVEVVKKIYDLSINKEFGSSKIARILNEDTYYHSLAPKDDWKSGTITSILTNPIYCGITAYKRREKIDGKYHSLDSQDWIYAEEINEEIAIIDKDIWNDIQEKRSNRSIKYRKDVLKEKGVNVLLRNDGELALIDVAYCGYCGGKLTNGSKYNYWTLKGTGEKRASKIPAYKCQTAWAGVPHDKTRMFRADKIEDIVFKYVAQYISVLQDNSEVYEKIQTNNKKEKESFNQRIKKEKQELKKITDGIEVMKSHIPDAMLGNYPLSVEVIADTIKQFEEKEKIQKQKIQELEQQYEEMEIEEQDWDEVCKIIPSWIEVFNDADKKTKRVLINKLVDKVIVKKDEITVKFKINLSKPRHRQSRMSEYNGVSKQRIRFYNYFIYSI

SEQ ID NO: 979 - protein, 576 aa, Unknown
  Description of Unknown: Integrase B980 sequence
  PTHR30461:SF3,IPR036162,PS51737,IPR011109,PTHR30461, PS00397,PF00239,G3DSA:1.10.10.2600,IPR006119,SSF53041, SM00857,IPR025827,IPR038109,PS51736,cd03768, IPR006118,PF13408,G3DSA:3.40.50.1390,PF07508,Coil
MIRENTENGSNQRIRVAIYVRVSTVYQIDKDSLPMMKQDLTAYCKYILNTEDYVIFEDAGYSGKNMDRPAYQKMMSQVRQGLFTHILVWKIDRISRNLLDFANMYAELKELSVTFVSKNEQFDTSTAIGEAMLKIILVFAELERNMTSERVTATMINRANNGIWNGGRVPFGYAYDKESQTFSFDETEQKIVQLIFDTYEKTGSIVHTSRKLNDSGFLTRGGNVWSATAVWIILRNPWYKGVYRYNYYKIPGRKAVKDKKEWVIVENHHKPSIDSERFDKIQLTLTNNARYRRSPGRSNVQKNVHIFAGLLWCGECGAAFTSSPGKLHASGYRPSKYGCPNVRKTKTCHAKYTSDVVVGEFVINYILNIINAHKDIKLVRSPEDLQQHLLRGSTFSDICSIDSDGLSAMYDMLTCCSKSGMLFKRVKPKFKVDPELKHLQSEQKKQQRALDRLNELYLYSDESMSEREYIVRKQQITDKLDEINDAIGMMSQEPWMHTMGDSEFIQQASSFILNQKLHDRQYVYFTSLAESVDAEILKAFFGSIIDSIVITSGKIQRVTFRNGISHTFTYKNKPEN

SEQ ID NO: 980 - protein, 576 aa, Unknown
  Description of Unknown: Integrase B981 sequence
  PTHR30461:SF3,cd00338,SM00857,G3DSA:1.10.10.2600,IPR036162, PF13408,IPR025827,G3DSA:3.40.50.1390,PS51737,IPR006119, IPR038109,PF07508,SSF53041,IPR011109,PTHR30461, PS51736,Coil,PF00239
MAQVEIIAANLKDKNNNITIANKKKRVCAYGRVSTDDEEQITSYNSQIKYYTEKIKSNPEWEFVGIYADEGISGTQVKNRCEFQRMIDDALNGKIDIILAKSISRFARNTLDTLKYCRELRDKKVDVFFEKENIHTIDLDSEMFLTLYSAFAQAESESTSQNVKLGLKAMMKRGEYVGSPDCYGYDWNKETKQLDINEEQAEVVRMVFNWYCEGLGCRRIANKLEEMKIPSYTGARWSTSSISNMIHQEKYVGDLLQNKSYTVSPITHKCVKNKGEKEKYYVKDHHEPIISREVWDKVQELSKKRYEGITFNKNDYKSRETRKYAFSGKIKCAFCGTNFCRRQSSYSKKHPKYNYYWTCFKKREHSDACPDSVGISENKLEETFVMIYNDIIKNKHKTKNALIKAIKDVINNNDYQDKLNNLLKEKETIEQRLSKIIDMELDNDIDRKELFIRKERELLDKLNQVKEEINNYQQLLDENRGLSKQLKSIDEYFDNYHTTLKKFNREAFENMIECIIVGDYDSDGNKLPRVARFVLKTGKEYKFEISGNSNKDNSNNDKNNDVSLCTRNVSLFNCTC

SEQ ID NO: 981 - protein, 576 aa, Unknown
  Description of Unknown: Integrase B982 sequence
  PTHR30461:SF3,IPR036162,PS51737,IPR011109,PTHR30461, PS00397,PF00239,G3DSA:1.10.10.2600,IPR006119,SSF53041, SM00857,IPR025827,IPR038109,PS51736,cd03768, IPR006118,PF13408,G3DSA:3.40.50.1390,PF07508,Coil
MGKNFKMPGSGSETPIRVAIYVRVSTVYQIDKDSLPMMKQDLTSYCKYILNTDDFVIFEDAGYSGKNTDRPAYQKMMSQIRQGLFTHLLVWKIDRISRNLLDFANMYAELKDLGVTFVSKNEQFDTSTAIGEAMLKIILVFAELERNMTSERVTATMINRASNGVWNGGRIPFGYSYDKPTQVFSIDPEENKIYNFMVETYEDTQSIVHTSRRLNEAGYRSRNGNMWSPVAVWTILRNPWYKGVYRYNYYKIPGRKAIKDESEWVIVENHHPASIDPDRFDRIQATLDKNARYRNTPGRKTAQKNVHVFSGLVWCAECGSAFTASPGKLHVSGYRPSKYGCPNVRKTKTCHAKYTSDVVLGEFLLNYILNILNAQKQFAYIHSTDDLQKRLLHGSTFSNVDHVDPDGLASLLNMLEKCSGSDPVLLKRPRSKPKMDPELKRMMADQKKQQRALDRLNDLYLYSDDSISEREYLVRKQQITDRLQEINEAIGMMSQEPWMRTMNDEEFIRQASSFILTQKLADKQYIYYESLAESLDPEILKNFFVSILDSIILRDGRPETVVFRNGLSHTFTYKDS

SEQ ID NO: 982 - protein, 576 aa, Unknown
  Description of Unknown: Integrase B983 sequence
  cd00338,SM00857,G3DSA:1.10.10.2600,IPR036162,PF13408, IPR025827,G3DSA:3.40.50.1390,PS51736,PS51737,IPR006119, IPR038109,PF07508,SSF53041,IPR011109,PTHR30461, mobidb-lite,Coil,PF00239
MSVDIKWQVPKAQPEASELAVVYARYSSHSQGEQSIEGQLSNARDYAAAHGYTIVHEYVDRAKSGRTDNRAEFQQMLKDTAKRQFSVIILWKVDRFGRNREEIAINKMKCRKNGVRVEYVAETIPDSPEGVILESVLEGFAEYYSLQLSQNIRRGRAESAEKCQSLGGNRPLGYKTGPDKKFVIDENTAPTVKMIFTMYADGKTVTEIVDKLNEMGLRTLRGGPFTKNSLHSILKNKKYIGIYEYQGREIKNGVPRIIEDDVFNKVQEMLKINKRAPAKTWSRADYILTDKLFCGKCGALMFGESGTSKTGAKHNYYICSNKKRFRSCDKKAVRQADIEDTVLNATHELLQDDELLDYIVDRTWEYYLAQDNSQEELRNLQRQLAQTDTAISNLIRAIEAGILTEETKKRMDELTQQKADLKASIADREIARGFHLQKSHIAFYLRSLRDADWSDKEAQKRLIQTFVNAVFVYDDHITLTYNFSGDKSTVTLRDMQRFEDGEEFGCRASRSTNNKRTALAVLLLLKKHRIIRTPSSPKGLKRFAPEETTESVQTDAQTGVQNPRRSLSYAREEIYP

SEQ ID NO: 983 - protein, 576 aa, Unknown
  Description of Unknown: Integrase B984 sequence
  PTHR30461:SF3,SM00857,G3DSA:1.10.10.2600,IPR036162,PF13408, PS51737,IPR025827,G3DSA:3.40.50.1390,IPR006119,IPR038109, PF07508,IPR011109,SSF53041,PTHR30461,Coil, PS51736,cd00338,PF00239
MKKRVRILLRVSSNQQLEADGDLSVQREIVLDYISKQNDWKLDNKEYFEGSNSGYKNAVKDRDVLQEALFDAKNNEYDILVVYKDDRIGRRMWEIGSYVMQLKSYGVDIYTTKDGCISPENNDVMGQMMLALRYGNAQKSSSDTGQRVKDTAQKLVKRGKFMGGKAPYGYELILSGELSKHGRALHKLKKIPEKVEVVKKIYDLSINKEFGSSKIARILNEDTYYHSLAPKDDWKSGTITSILTNPIYCGITAYKRREKIDGKYHSLDSQDWIYAEEINEEIAIIDKDIWNNIQEKRSNRSIKYRKDVLKEKGVNVLLRNDGELALIDVAYCGYCGGKLTNGSKYNYWTLKGTGEKRASKIPAYKCQTAWAGVPHDKTRMFRADKIEDIVFKYVAQYISVLQDNSEVYEKIQTNNKKEKESFNQRIKKEKQELKKITDGIEVMKSHIPDAMLGNYPLSVEVIADTIKQFEEKEKIQKQKIQELEQQYEEMEIEEQDWDEVCKIIPSWIEVFNDADKKTKRVLINKLVDKVIVKKDEITVKFKINLSKPRHRQSRMSGYNGVSKQRIRFYNYFIYSI

SEQ ID NO: 984 - protein, 576 aa, Unknown
  Description of Unknown: Integrase B985 sequence
  PTHR30461:SF3,IPR036162,PS51737,IPR011109,PTHR30461, PF00239,G3DSA:1.10.10.2600,IPR006119,SSF53041,cd00338, SM00857,IPR025827,IPR038109,PS51736,mobidb-lite, PF13408,G3DSA:3.40.50.1390,PF07508,Coil
MKKRINTNSAARAVIYARYSSANQRDCSIEQQVEKCRELAAREGVTVIEIYADRAISGKTDRRPNFQRMMKDASLRQFDVVLAWKSNRMGRNMLQAMMNEEQLRGNGIRTIYAEEDFDDTAAGRFALRNMMNVNQFYSENMAEDISRGLMDNASKCMSNGSLPLGYKTGKDQKVVLDEAEAAIVQEIFTRVSCYEPFIDIARDLNRRGIKTKKGAEWGRSSFHTICRNERYRGIYIYRDIRVEGGMPRIVSDELFYKVQEVLKVKKNPQGRRKRSGYEEYLLTGKLYCGHCGSPMTGIAGTSKTGAMHYYYTCQKRRTDHSCDKKAVRRDQIEKAVAIAIQQQLLTDENIQMMADETMAYNARTEIKYRLQSLQQQLYSNETSTANIMKAIEMGIITDTTKARLLALEQEHGQLLAKIDTAKAEMVPINREDFVSLLDIYRTGDVNNKKYLAALFDTFLVRVDLYDDHFKITFDPTGGKMLVDIPIGAEDSPESPGDSPESSDFEASPQDAEKFVLALHNRTKRKAPNLGSGLFVWSCGEEDLNRATAPQRRGKLSCGQFASLRENPFIRTKILER

SEQ ID NO: 985 - protein, 576 aa, Unknown
  Description of Unknown: Integrase B986 sequence
  PTHR30461:SF3,IPR036162,PS51737,IPR011109,PTHR30461, PS00397,PF00239,G3DSA:1.10.10.2600,IPR006119,SSF53041, SM00857,IPR025827,IPR038109,PS51736,cd03768, IPR006118,PF13408,G3DSA:3.40.50.1390,PF07508,Coil
MIRENTENGSNQRIRVAIYVRVSTVYQIDKDSLPMMKQDLTSYCKYILNTDDFVIFEDAGYSGKNTDRPAYQKMMSQIRQGLFTHLLVWKIDRISRNLLDFANMYAELKDLGVTFVSKNEQFDTSTAIGEAMLKIILVFAELERNMTSERVTATMINRANNGIWNGGRVPFGYAYDKESQTFSFDETEQKIVQLIFDTYEKTGSIVHTSRKLNDSGFLTRGGNIWSATAVWIILRNPWYKGVYRYNYYKIPGRKAVKDKKEWVIVENHHKPSIDPERFDKIQLTLTNNARYRRSPGRSNVQKNVHIFAGLLWCGECGAAFTSSPGKLHASGYRPSKYGCPNVRKTKTCHAKYTSDVVVGEFIINYILNIINAHKDIKLVRSPEDLQQHLLRGSTFSDICSIDSDGLSAMYDMLTCCSKSGMLFKRVKPKFKVDPELKHLQSEQKKQQRALDRLNELYLYSDESMSEREYIVRKQQITDKLDEINDAIGMMSQEPWMHTMGDSEFIQQASSFILNQKLHDRQYVYFTSLAESVDAEILKAFFGSIIDSIVITSGKIQRVIFRNGISHTFTYKNKPEN

SEQ ID NO: 986 - protein, 576 aa, Unknown
  Description of Unknown: Integrase B987 sequence
  PTHR30461:SF3,IPR036162,PS51737,IPR011109,PTHR30461, PS00397,PF00239,G3DSA:1.10.10.2600,IPR006119,SSF53041, SM00857,IPR025827,IPR038109,PS51736,cd03768, IPR006118,PF13408,G3DSA:3.40.50.1390,PF07508,Coil
MKKNFKMPGSGSETPIRVAIYVRVSTVYQIDKDSLPMMKQDLTSYCKYILNTDDFVIFEDAGYSGKNTDRPAYQKMMSQIRQGLFTHLLVWKIDRISRNLLDFANMYAELKDLGVTFVSKNEQFDTSTAIGEAMLKIILVFAELERNMTSERVTATMINRASNGVWNGGRIPFGYSYDKPTQVFSIDPEENKVYNFLVETYEDTQSIVHTSRKLNEAGYRSRNGNMWSPVAVWTILRNPWYKGVYRYNYYKIPGRKAIKDESEWVIIENHHPASIDPDRFDRIQATLDKNARYRNTPGRKTAQKNVHVFSGLIWCAECGSAFTASPGKLHVSGYRPSKYGCPNVRKTKTCHAKYTSDVVLGEFLLNYILNILNAQKQFAYIHSTDDLQKRLLHGSTFSNVDHVDPDGLASLLNMLEKCSGSDPVLLKRPRSKPKMDPELKRMMADQKKQQRALDRLNDLYLYSDDSISEREYLVRKQQITDRLQEINEAIGMMSQEPWMRTMNDEEFIRQASSFILTQKLADKQYIYYENLAESLDPEILKNFFVSILDSIILRDGRPETVVFRNGLSHTFTYKDS

SEQ ID NO: 987 - protein, 576 aa, Unknown
  Description of Unknown: Integrase B988 sequence
  PTHR30461:SF3,IPR036162,PS51737,IPR011109,PTHR30461, PS00397,PF00239,G3DSA:1.10.10.2600,IPR006119,SSF53041, SM00857,IPR025827,IPR038109,PS51736,cd03768, IPR006118,PF13408,G3DSA:3.40.50.1390,PF07508,Coil
MKKNFKMPGSGSETPIRVAIYVRVSTVYQIDKDSLPMMKQDLTSYCKYILNTDDFVIFEDAGYSGKNTDRPAYQKMMSQIRQGLFTHLLVWKIDRISRNLLDFANMYAELKDLGVTFVSKNEQFDTSTAIGEAMLKIILVFAELERNMTSERVTATMINRASNGVWNGGRIPFGYSYDKPTQVFSIDPEENKIYNFMVETYEDTQSIVHTSRRLNEAGYRSRNGNMWSPVAVWTILRNPWYKGVYRYNYYKIPGRKAIKHESEWVIVENHHPASIDPDRFDRIQATLDKNARYRNTPGRKTAQKNVHVFSGLVWCAECGSAFTASPGKLHVSGYRPSKYGCPNVRKTKTCHAKYTSDVVLGEFLLNYILNILNAQKQFAYIHSTDDLQKRLLHGSTFSNVDHVDPDGLASLLNMLEKCSGSDPVLLKRPRSKPKMDPELKRMMADQKKQQRALDRLNDLYLYSDDSISEREYLVRKQQITDRLQEINEAIGMMSQEPWMRTMNDEEFIRQASSFILTQKLADKQYIYYENLAESLDPEILKNFFVSILDSIILRDGRPETVVFRNGLSHTFTYKDS

SEQ ID NO: 988 - protein, 576 aa, Unknown
  Description of Unknown: Integrase B989 sequence
  PTHR30461:SF3,IPR036162,PS51737,IPR011109,PTHR30461, PS00397,PF00239,G3DSA:1.10.10.2600,IPR006119,SSF53041, SM00857,IPR025827,IPR038109,PS51736,cd03768, IPR006118,PF13408,G3DSA:3.40.50.1390,PF07508,Coil
MKKNFKMPGSGSETPIRVAIYVRVSTVYQIDKDSLPMMKQDLTSYCKYILNTDDFVIFEDAGYSGKNTDRPAYQKMMSQIRQGLFTHLLVWKIDRISRNLLDFANMYAELKDLGVTFVSKNEQFDTSTAIGEAMLKIILVFAELERNMTSERVTATMINRASNGVWNGGRIPFGYSYDKPTQVFSINPEENKIYNFMVETYEDTQSIVHTSRRLNEAGYRSRNGNMWSPVAVWTILRNPWYKGVYRYNYYKIPGRKAIKDESEWVIVENHHPASIDPDRFDRIQATLDKNARYRNTPGRKTAQKNVHVFSGLVWCAECGSAFTASPGKLHVSGYRPSKYGCPNVRKTKTCHAKYTSDVVLGEFLLNYILNILNAQKQFAYIHSTDDLQKRLLHGSTFSNVDHVDPDGLASLLNMLEKCSGSDPVLLKRPRSKPKMDPELKRMMADQKKQQRALDRLNDLYLYSDDSISEREYLVRKQQITDRLQEINEAIGMMSQEPWMRTMNDEEFIRQASSFILTQKLADKQYIYYENLAESLDPEILKNFFVSILDSIILRDGRPETVVFRNGLSHTFTYKDS

SEQ ID NO: 989 - protein, 576 aa, Unknown
  Description of Unknown: Integrase B990 sequence
  PTHR30461:SF3,IPR036162,PS51737,IPR011109,PTHR30461, PS00397,PF00239,G3DSA:1.10.10.2600,IPR006119,SSF53041, SM00857,IPR025827,IPR038109,PS51736,cd03768, IPR006118,PF13408,G3DSA:3.40.50.1390,PF07508,Coil
MKKNFKMPGSSSETPIRVAIYVRVSTVYQIDKDSLPMMKQDLTSYCKYILNTDDFVIFEDAGYSGKNTDRPAYQKMMSQIRQGLFTHLLVWKIDRISRNLLDFANMYAELKDLGVTFVSKNEQFDTSTAIGEAMLKIILVFAELERNMTSERVTATMINRASNGVWNGGRIPFGYSYDKPTQVFSINPEENKIYNFMVETYEDTQSIVHTSRRLNEAGYRSRNGNMWSPVAVWTILRNPWYKGVYRYNYYKIPGRKAIKDESEWVIVENHHPASIDPDRFDRIQATLDKNARYRNTPGRKTAQKNVHVFSGLVWCAECGSAFTASPGKLHVSGYRPSKYGCPNVRKTKTCHAKYTSDVVLGEFLLNYILNILNAQKQFAYIHSTDDLQKRLLHGSTFSNVDHVDPDGLASLLNMLEKCSGSDPVLLKRPRSKPKMDPELKRMMADQKKQQRALDRLNDLYLYSDDSISEREYLVRKQQITDRLQEINEAIGMMSQEPWMRTMNDEEFIRQASSFILTQKLADKQYIYYENLAESLDPEILKNFFVSILDSIILRDGRPETVVFRNGLSHTFTYKDS

SEQ ID NO: 990 - protein, 576 aa, Unknown
  Description of Unknown: Integrase B991 sequence
  PTHR30461:SF3,IPR036162,PS51737,IPR011109,PTHR30461, PS00397,PF00239,G3DSA:1.10.10.2600,IPR006119,SSF53041, SM00857,IPR025827,IPR038109,PS51736,cd03768, IPR006118,PF13408,G3DSA:3.40.50.1390,PF07508,Coil
MKKNFKMPGSGSETPIRVAIYVRVSTVYQIDKDSLPMMKQDLTSYCKYILNTDDFVIFEDAGYSGKNTDRPAYQKMMSQIRQGLFTHLLVWKIDRISRNLLDFANMYAELKDLGVTFVSKNEQFDTSTAIGEAMLKIILVFAELERNMTSERVTATMINRASNGVWNGGRIPYGYSYDKPTQVFSIDPEENKVYNFLVETYEDTQSIVHTSRKLNEAGYCSRNGNMWSPVAVWTILRNPWYKGVYRYNYYKIPGRKAIKDESEWVIVENHHPASIDTDRFDRIQATLDKNARYRNTPGRKTTQKNVHVFSGLVWCAECGSAFTASPGKLHVSGYRPSKYGCPNVRKTKTCHAKYTSDVVLGEFLLNYILNILNAQKQFAYIHSTDDLQKRLLHGSTFSNVDHVDPDGLASLLNMLEKCSGSDPVLLKRPRSKPKMDPELKRMMADQKKQQRALDRLNDLYLYSDDSISEREYLVRKQQITDRLQEINEAIGMMSQEPWMRTMNDEEFIRQTSSFILTQKLADKQYIYYENLAESLDPEILKNFFVSILDSIILRDGRPETVVFRNGLSHTFTYKDS

SEQ ID NO: 991 - protein, 576 aa, Unknown
  Description of Unknown: Integrase B992 sequence
  PTHR30461:SF3,IPR036162,PS51737,IPR011109,PTHR30461, PS00397,PF00239,G3DSA:1.10.10.2600,IPR006119,SSF53041, SM00857,IPR025827,IPR038109,PS51736,cd03768, IPR006118,PF13408,G3DSA:3.40.50.1390,PF07508,Coil
MLRENTENGSNQRIRVAIYVRVSTVYQIDKDSLPMMKQDLTAYCKYILNTEDYVIFEDAGYSGKNMDRPAYQKMMSQVRQGLFTHILVWKIDRISRNLLDFANMYAELKELGVTFVSKNEQFDTSTAIGEAMLKIILVFAELERNMTSERVTATMINRANNGIWNGGRVPFGYAYDKESQTFSFDEAEQKIVRLIFDTYEKTGSIVHTSRKLNDSGFLTRSGNVWSATAVWIILRNPWYKGVYRYNYYKIPGRKAVKDKKEWVIVENHHKPSIDPERFDKIQLTLTNNARYRRSPGRSNVQKNVHIFAGLLWCGECGAAFTSSPGKLHASGYRPSKYGCPNVRKTKTCHAKYTSDVVVGEFVINYILNIINAHKDIKLVRSPEDLQQHLLRGSTFSDICSIDSGGLSDMYDMLTSCSKSGMLFKRVKPKFKVDPELKQLQSEQKKQQRALDRLNELYLYSDESMSEREYIVRKQQITDKLDEINDAIGMMSQEPWMHTMGDSEFIQQASSFILNQKLHDRQYVYFTSLAESVDAEILKAFFGSIIDSIVITSGKIQRVTFRNGISHTFTYKNKPED

SEQ ID NO: 992 - protein, 576 aa, Unknown
  Description of Unknown: Integrase B993 sequence
  PTHR30461:SF3,IPR036162,PS51737,IPR011109,PTHR30461, PS00397,PF00239,G3DSA:1.10.10.2600,IPR006119,SSF53041, SM00857,IPR025827,IPR038109,PS51736,cd03768, IPR006118,PF13408,G3DSA:3.40.50.1390,PF07508,Coil
MKKNFKMPGSGSETPIRVAIYVRVSTVYQIDKDSLPMMKQDLTSYCKYILNTDDFVIFEDAGYSGKNTDRPAYQKMMSQIRQGLFTHLLVWKIDRISRNLLDFANMYAELKDLGVTFVSKNEQFDTSTAIGEAMLKIILVFAELERNMTSERVTATMINRASNGVWNGGRIPFGYSYDKPTQVFSIDPEENKVYNFLVETYEDTQSIVHTSRRLNEAGYRSRNGNMWSPVAVWTILRNPWYKGVYRYNYYKIPGRKAIKDESEWVIVENHHPASIDPDRFDRIQATLDKNARYRNTPGRKTAQKNVHVFSGLVWCAECGSAFTASPGKLHVSGYRPSKYGCPNVRKTKTCHAKYTSDVVLGEFLLNYILNILNAQKQFAYIHSTDDLQKRLLHGSTFSNVDHVNPDGLASLLNMLEKCSGSDPVLLKRPRSKPKMDPELKRMMADQKKQQRALDRLNDLYLYSDDSISEREYLVRKQQITDRLQEINEAIGMMSQEPWMRTMNDEEFIRQASSFILTQKLADKQYIYYENLAESLDPEILKNFFVSILDSIILRNGRPETVVFRNGLSHTFTYKDS

SEQ ID NO: 993 - protein, 576 aa, Unknown
  Description of Unknown: Integrase B994 sequence
  PTHR30461:SF3,IPR036162,PS51737,IPR011109,PTHR30461, PS00397,PF00239,G3DSA:1.10.10.2600,IPR006119,SSF53041, SM00857,IPR025827,IPR038109,PS51736,cd03768, IPR006118,PF13408,G3DSA:3.40.50.1390,PF07508,Coil
MKKNFKMPGSGSETSIRVAIYVRVSTVYQIDKDSLPMMKQDLTSYCKYILNTDDFVIFEDAGYSGKNTDRPAYQKMMSQIRQGLFTHLLVWKIDRISRNLLDFANMYAELKDLGVTFVSKNEQFDTSTAIGEAMLKIILVFAELERNMTSERVTATMINRASNGVWNGGRIPFGYSYDKPTQVFSIDPEENKIYNFILETYEDTQSIVHTSRRLNEAGYRSRNGNMWSPVAVWTILRNPWYKGVYRYNYYKTPGRKAIKDESEWVIVENHHPASIDPDRFDRIQATLDKNARYRNTPGRKTAQKNVHVFSGLVWCAECGSAFTASPGKLHVSGYRPSKYGCPNVRKTKTCHAKYTSDVVLGEFLLNYILNILNAQKQFAYIHSTDDLQKYLLRGSTFSNVDHVDPDGLASLLNMLEKCSGSDPVLLKRPRSKPKIDPELKRMMADQKKQQRALDRLNDLYLYSDDSISEREYLVRKQQITDRLQEINEAIGMMSQEPWMHTMNDEEFIRQASSFILTQKLADKQYIYYENLAESLDPEILKNFFVSILDSIILRDGRPETVVFRNGLSHTFTYKDS

SEQ ID NO: 994 - protein, 576 aa, Unknown
  Description of Unknown: Integrase B995 sequence
  PTHR30461:SF3,cd00338,SM00857,G3DSA:1.10.10.2600,IPR036162, PF13408,PS51737,G3DSA:3.40.50.1390,IPR025827,IPR006119, IPR038109,PF07508,SSF53041,IPR011109,PTHR30461, PS51736,Coil,PF00239
MKITKFPIDLSMLTEEEIDQFRQDPSTLFEGDTDVCLYLRFSSERQREQSIEGQLRDCRTFCKLNSYRITAIYVDRATTARKDVEKRVHFQEMIRDSEKKPWEYVVVWKLDRFARNRTDSALFKFRLRKNGVKVISATENISEKPEGIILEAVLEGMAEFYSADLSQKITRGMRESALKCHSIGGHVPLGYKIEDHKLVINPATAHIVQEAFELYANGETVADICRIFNTKGYRTAKGVEFNRNSFKSMFRNKRYIGVYTYKDIEVEGGVPAIIDKELFETVGHRLSKNAEAPARGKAKVDYLLAGKLFCGHCGGSMNGESGTSKTGAIHNYYTCYTRKRKHACDKKPLKKDWIEYIVAQDAMELLTDDTIQELADMAISQTEQDLRENTRIPELTDRMKETESGITNITKAIEKGIASDALMNRLVELEKEKKNLLRLLAEEEKYVCKIERSQIVYWLTEFKGGRIEDERYRRIIIDLMINSVTVWDEPDGFRITTAYNLTSCKSKTFRIAPSGEKGFGFEGSECTKKERHDLGRVFLFLLSVAGVGLPFIWFEDPALGRDPFLSQLIWKIFEME

SEQ ID NO: 995 - protein, 576 aa, Unknown
  Description of Unknown: Integrase B996 sequence
  PTHR30461:SF3,cd00338,SM00857,G3DSA:1.10.10.2600,IPR036162, PF13408,PS51737,G3DSA:3.40.50.1390,IPR025827,IPR006119, IPR038109,PF07508,SSF53041,IPR011109,PTHR30461, PS51736,Coil,PF00239
MAKKKKPAGGIAVIYARYSSHNQRDVSIEQQIEACRKHAAELGLTIIATYEDRAISGRTDNRPAFQRLMHDAEKGKFSYVLAWKSNRMGRNMMQAMVNESRLMDCGIKVYYAEEDFDDSAAGRFALRSMMNVNQFYSDNLAEDVRRGLMDNANKCMVNGRQPLGYKRGKDGKVVVDEPAAAIVREVYTRVASGELFTDIARDLNRRGIKTADKGEWNKNSFHRLCSNEKYRGIYIYGDVRIEGGIPTIIDDPLWYKVQEALRVKKLKRNGRHRPGDEDYLLTGKLRCGKCGGYMIGMSGRSKTGDIHYYYACQNRRVGRTCDKKNIRRDVIEPAVAQAIKEYCLTDDAIEWIADKTVEYWEKADRNLQLDSIEGDLAAVQSSISNVMKAIEMGVVTETTRDRLIELEKQRTDLKSKLALAKEEVVHVDRKKLISSLLLFRNGDIHDRQYQEDLFKTFLISVYVYDDDDNGHLKIVFNAFGDNNTVDLPIDFGETDNQSAFSDGVEKFDYSLHRSTKKTSEHFGCLFLFCFVYRESQKERYSKRCIALFTLTVISNSDRSRCGSSCRRHRSRRSCRP

SEQ ID NO: 996 - protein, 576 aa, Unknown
  Description of Unknown: Integrase B997 sequence
  cd03768,SM00857,G3DSA:1.10.10.2600,IPR036162,PF13408, IPR025827,G3DSA:3.40.50.1390,PS51737,IPR006119,IPR038109, PF07508,IPR011109,SSF53041,PTHR30461,PS51736, Coil,PF00239
MKKAVIYSRVSTLEQDYTSQTAELKKEAERMGYEVTHIYEEKESGFVDDRPELAKVLALTNADTDAVFVWEISRLSRRTVMVLSTIEDIEKKGILIYAKNENYRSWNEKGVKDSTSKLVLTLYASIAEAEALKFKERVKRGKRYRVLVEKKSYCNTSVFGYMKDENGRLVINEEEAEIVRDIFNKALEGYSGRRLKLYLKSKWGLDWSANTLNYLLHNTAYMGQKKVGGKTYYKAEKKKLEEGSKIRFFNPETDVVETPAIISAEVFNKVQTAILNRKTRSNAKEARNAKPKLLKGLVLCGRCGKVYTNTGRMYTCTSGTNEYSERCGSTSVATASLDSAVWNVTKEIFSEAMAKELAAQKSEPIAAEIARLKEEIEGYNEAISNLKKQVGNLLRIASKADDVADDIIEKINILKKEQQMAKAEIADREAKIALLQKRLDAPAEMTEITDEDEKFEYLHKVIEAVFVYGEHKHKILAIQYLNGITAYCIRLWKDWYWFLDRGDLVISDAVALQKNSPADLKINDSILIEVTDSNSAYYSGEDTDVEIYGRYTTEAFFAAMMKNKQLKPVAGVKKDK

SEQ ID NO: 997 - protein, 576 aa, Unknown
  Description of Unknown: Integrase B998 sequence
  PTHR30461:SF3,IPR036162,PS51737,IPR011109,PTHR30461, PS00397,PF00239,G3DSA:1.10.10.2600,IPR006119,SSF53041, SM00857,IPR025827,IPR038109,PS51736,cd03768, IPR006118,PF13408,G3DSA:3.40.50.1390,PF07508,Coil
MIRENTENGSNQRIRVAIYVRVSTVYQIDKDSLPMMKQDLTSYCKYILNTDDFVIFEDAGYSGKNTDRPAYQKMMSQIRQGLFTHLLVWKIDRISRNLLDFANMYAELKDLGVTFVSKNEQFDTSTAIGEAMLKIILVFAELERNMTSERVTATMINRANNGIWNGGRVPFGYAYDKESQTFSFDETEQKIVQLIFDTYEKTGSIVHTSRKLNDSGFLTRGGNIWSATAVWIILRNPWYKGVYRYNYYKIPGRKAVKDKKEWVIVENHHKPSIDPERFDKIQLTLTNNARYRRSPGRSNVQKNVHIFAGLLWCGECGAAFTSSPGKLHASGYRPSKYGCPNVRKTKTCHAKYTSDVVVGEFIINYILNIINAHKDIKLVRSPEDLQQHLLRGSTFSDICSIDSDGLSAMYDMLTCCSKSGMLFKRVKPKFKVDPELKHLQSEQKKQQRALDRLNELYLYSDESMSEREYIVRKQQITDKLDEINDAIGMMSQEPWMHTMGDSEFIQQASSFILNQKLHDRQYVYFTSLAESVDAEILKAFFGSIIDSIVITSGKIQRVTFRNGISHTFTYKNKPED

SEQ ID NO: 998 - protein, 576 aa, Unknown
  Description of Unknown: Integrase B999 sequence
  PTHR30461:SF3,cd00338,SM00857,G3DSA:1.10.10.2600,IPR036162, PF13408,PS51737,IPR025827,G3DSA:3.40.50.1390,IPR006119, IPR038109,PF07508,IPR011109,SSF53041,PTHR30461, PS51736,Coil,PF00239
MKKKPIEPEMQDAVIYTRYSSHNQRDCSIEQQVADCEIFARQNNLRVVKVYADRHLSGTTDNRPQFQQMLKDAAHGHWAYVICWKIDRFARNRYDSATYKFRLKKAGVRVLYAKESIPDGPEGILLESVLEGSAEYYSAALAQNIRRGMKFNAEQCKVNSGSIPFGYCKGPDGRFAIHEANAEVVREIFRKAAAGMPFVDIANDLNSRGLKTSRGGRWNKGSFRLLMNEAYIGVYHFSDTRIEGGMPALIDQGTFWAANERLKANSSVRGRHQDGGDYLLTGKLKCAHCGSYMLGFSGTGKSGELHYYYGCQKRRRERACKKANVPREWIERVVVKAALDYVLRPEVMEWIADAVMEYQEREAASAQLAALTAELEENRKATDNVMKAIEAGIITSTTKQRLLDLEAKAQDLKRAIELEKLSHVRLERDQILFWLDRFRGGSLQSQEFRRKVIDAFVSVVYLFDDHLRIAFNYSGGSNAEADFDLVMDAEAAAGELSKKFAQGHVASTKQEPDEPCVFAQGRLCSANENRLDSLKSRRFSFFRPHFWVIVCISRFWFLATTWTGDACLLHSPSDTD

SEQ ID NO: 999 - protein, 576 aa, Unknown
  Description of Unknown: Integrase B1000 sequence
  PTHR30461:SF3,SM00857,IPR036162,PF13408,IPR025827, G3DSA:3.40.50.1390,IPR006119,PF07508,IPR011109,SSF53041, PTHR30461,Coil,PS51736,cd00338,PF00239
MKKQQKCYIYTRVSTSMQVDGYSLDAQKDKLRKYAEYQEMSIAGEYSDEGKSGKSVEGRPQFKQMLADVESGKDNVDYVLVFKLSRFGRNAADVLSSLQKMQDYGVNLICVEDGIDSSKDVGKLMISVLSAVAEIERENILVQTIEGFSTSFVKGVLDNPIYCGKLAFGRRKNEKIPGTRNEYHIVKQKDYLLSDGVHEAIISEEMWNQAHRKRQETGVLQVKTHSLEHEHILSGIIKCPVCGSGMYGNVNRKKHPDGGYYKDYFYYACKHRKLVDGHRCTYKRQWNEDRINAAVEEIIRKFVKNPKFEQEIRKQIGSSIDTSELDKEYDGLKDRLSQTTGAKNRLADQMDHLSVSDKNYDKKYNDMQERLDKLYDEITDIEDAMEEVETRLYNIRQDKISEDNVYQFLLFFDKLYDKFTDLEKKTFLKSFLSDVFIYEEEQKDGRILKGLRFKFPIYMNGRNVLGVDWDNESTDETVVKLSLKKDTPKIEVTMKPDEESNYTPEEKARYPKIKEYVKNKYGVNVHTSYIAQVKRMCGLDMGENYNKSKKKNPEVKQCPQEKVEYIKDALRYFKLI

SEQ ID NO: 1000 - protein, 576 aa, Unknown
  Description of Unknown: Integrase B1001 sequence
  PTHR30461:SF3,SM00857,G3DSA:1.10.10.2600,IPR036162,PF13408, PS51737,G3DSA:3.40.50.1390,IPR025827,IPR006119,IPR038109, PF07508,SSF53041,IPR011109,PTHR30461, Coil,PS51736,cd00338,PF00239
MSYDEIVSAVIRGENLRNLPLRVTYYCRVSTDSDVQINSLENQLDYYRNYIRSNPNWTFVEGYYDEGITGVVITKRDDFKRMIRDAKLNKFDLIVTKEVSRFARDLEDSIHTIRELKEHGVGLFFENQALNTFDPNSEMILNTLFSVAQEESKKLSSRVKFGHKQAMEKGHVLGSSNITGYKKDKCKLVIVEEEAKFIRTLFELYATGEYGFHKLSKKLSAMGYLNKKGRMYDKDSLKRMIMNPKYKGFYRSHEHEIMDYRTKRRKKLPIEEQKIYKTEEEIIPAIVSEELWDKANEILITRTKSYQNNNYWSGGLKYPFSSKIYCKDCNANFQRSHGSRRKNRPTWSCGMYLQYRIEACESPIIAEIDLYNILKQIMDNIIPNKSSIVDNMLELYNNIDKTNQYDKDLAAIDKDIKVIEDKKALAFDMVFNGELTRDALKSQFDSFEENLQRLKNRKEEVLKQIEILKQSNDNIDKMSKSIQEEIDGGSIEEFIRKFVDEIIVSKVDGDRYNIKLDIFLNLFGTERSHTKGAKYIGGPLENEILYMKNQKCDTIEHKRTEHTPNQFTYDVYVETL

SEQ ID NO: 1001 - protein, 576 aa, Unknown
  Description of Unknown: Integrase B1002 sequence
  PTHR30461:SF3,IPR036162,PS51737,IPR011109,PTHR30461, PS00397,PF00239,G3DSA:1.10.10.2600,IPR006119,SSF53041, SM00857,IPR025827,IPR038109,PS51736,cd03768, IPR006118,PF13408,G3DSA:3.40.50.1390,PF07508,Coil
MKRNYKMPNSGSETHIRVAIYVRVSTVYQIDKDSLPMMKQDLTSYCKYILNTDDFVIFEDAGYSGKNTDRPAYQKMMSQIRQGLFTHLLVWKIDRISRNLLDFANMYAELKELGVTFVSKNEQFDTSTAIGEAMLKIILVFAELERNMTSERVTATMINRASNGVWNGGRIPFGYTYDKPSQVFSIDPVENKIYNFLVDTYEDTQSIVHTSRKLNEAGYRSRNGNLWSPVAVWTILRNPWYKGVYRYNYYKIPGRKAIKDESEWVVIENHHPASIDPDRFDRIQVTLDKNARYRNTPGRKTSQKNVHVFSGLIWCAECGSAFTASPGRLHKSGYRPSKYGCPNVRKTKTCHAKYTSDVVLGEFLLNYILNILNAQKQFATIRSPEDLQDHLLRGSTFSDVDYVDPDGLVSLFNMLEKCSGSDPVLLKRPRSKPKVDPELKRMMADQKKQQRALDRLNDLYLYSDDSISEREYLIRKQQITDRLQEINESIGMMSQEPWMRTMNDEEFIRQASSFILTQKLADKQYIYYENLAESLDPEILKNFFVSILDSIILRDGRPGTVVFRNGLSHTFTYKDS

SEQ ID NO: 1002 - protein, 576 aa, Unknown
  Description of Unknown: Integrase B1003 sequence
  PTHR30461:SF3,SM00857,G3DSA:1.10.10.2600,IPR036162,PF13408, IPR025827,PS51737,G3DSA:3.40.50.1390,IPR006119,IPR038109, PF07508,IPR011109,SSF53041,PTHR30461,Coil, PS51736,cd00338,PF00239
MKKRVRILLRVSSNQQLEADGDLSVQREIVLDYISKQNDWKLDNKEYFEGSNSGYKNAVKDRDVLQEALFDAKNNEYDILVVYKDDRIGRRMWEIGSYVMQLKSYGVDIYTTKDGCISPENNDVMGQMMLALRYGNAQKSSSDTGQRVKDTAQKLVKRGKFMGGKAPYGYELILSGELSKHGRALHKLKKIPEKVEVVKKIYDLSINKEFGSSKIARILNEDTYYHSLAPKDDWKSGTITSILTNPIYCGITAYKRREKIDGKYHSLDSQDWIYAEEINEEIAIIDKDIWNDIQEKRSNRSIKYRKDVLKEKGVNVLLRNDGELALIDVAYCGYCGGKLTNGSKYNYWTLKGTGEKRASKIPAYKCQTAWAGVPHDKTRMFRADKIEDIVFKYVAQYISVLQDNSEVYEKIQTNNKKEKESFNQRIKKEKQELKKITDGIEVMKSHIPDAMLGNYPLSVEVIADTIKQFEEKEKIQKQKIQELEQQYEEMEIEEQDWDEVCKIIPSWIEVFNDADKKTKRVLINKLVDKVIVKKDEITVKFKINLSKPRHRQSRMSEYNGVSKQRIRFYNYFIYSI

SEQ ID NO: 1003 - protein, 576 aa, Unknown
  Description of Unknown: Integrase B1004 sequence
  PTHR30461:SF3,IPR036162,PS51737,IPR011109,PTHR30461, PS00397,PF00239,G3DSA:1.10.10.2600,IPR006119,SSF53041, SM00857,IPR025827,IPR038109,PS51736,cd03768, IPR006118,PF13408,G3DSA:3.40.50.1390,PF07508,Coil
MKKNFKMPGSGSETPIRVAIYVRVSTVYQIDKDSLPMMKQDLTSYCKYILNTDDFVIFEDAGYSGKNTDRPAYQKMMSQIRQGLFTHLLVWKIDRISRNLLDFANMYAELKDLGVTFVSKNEQFDTSTAIGEAMLKIILVFAELERNMTSERVTATMINRASNGVWNGGRIPYGYSYDKPTQVFSIDPEENKVYNFLVETYEDTQSIVHTSRKLNEAGYRSRNGNMWSPVAVWTILRNPWYKGVYRYNYYKIPGRKAIKDESEWVIVENHHPASIDPDRFDRIQATLDKNARYRNTPGRKTAQKNVHVFSGLVWCAECGSAFTASPGKLHVSGYRPSKYGCPNVRKTKTCHAKYTSDVVLGEFLLNYILNILNAQKQFAYIHSTDDLQKRLLHGSTFSNVDHVDPDGLASLLNMLEKCSGSDPVLLKRPRSKPKMDPELKRMMADQKKQQRALDRLNDLYLYSDDSISEREYLVRKQQITDRLQEINEAIGMMSQEPWMRTMNDEEFIRQASSFILTQKLADKQYIYYENLAESLDPEILKNFFVSILDSIILRDGRPETLVFRNGLSHTFTYKDS

SEQ ID NO: 1004 - protein, 576 aa, Unknown
  Description of Unknown: Integrase B1005 sequence
  PTHR30461:SF3,IPR036162,PS51737,IPR011109,PTHR30461, PS00397,PF00239,G3DSA:1.10.10.2600,IPR006119,SSF53041, SM00857,IPR025827,IPR038109,PS51736,cd03768, IPR006118,PF13408,G3DSA:3.40.50.1390,PF07508,Coil
MIRENTENGSNQRIRVAIYVRVSTVYQIDKDSLPMMKQDLTAYCKYILNTEDYVIFEDAGYSGKNMDRPAYQKMMSQVRQGLFTHILVWKIDRISRNLLDFANMYAELKELGVTFVSKNEQFDTSTAIGEAMLKIILVFAELERNMTSERVTATMINRANNGIWNGGRVPFGYAYDKESQTFSFDETEQKIVQLIFDTYEKTGSIVHTSRKLNDSGFLTRGGNIWSATAVWIILRNPWYKGVYRYNYYKIPGRKAVKDKKEWVIVENHHKPSIDPERFDKIQITLTNNARYRRSPGRSNVQKNVHIFAGLLWCGECGAAFTSSPGKLHASGYRPSKYGCPNVRKTKTCHAKYTSDVVVGEFVINYILNIINAHKDIKLVRSPEDLQQHLLRGSTFSDICSIDSDGLSAMYDMLTCCSKSGMLFKRVKPKFKVDPELKHLQSEQKKQQRALDRLNELYLYSDESMSEREYIVRKQQITDKLDEINDAIGMMSQEPWMHTMGDSEFIQQASSFILNQKLHDRQYVYFTSLAESVDAEILKAFFGSIIDSIVITSGKIQRVTFRNGISHTFTYKNKPEN

SEQ ID NO: 1005 - protein, 576 aa, Unknown
  Description of Unknown: Integrase B1006 sequence
  PTHR30461:SF3,IPR036162,PS51737,IPR011109,PTHR30461, PS00397,PF00239,G3DSA:1.10.10.2600,IPR006119,SSF53041, SM00857,IPR025827,IPR038109,PS51736,cd03768, IPR006118,PF13408,G3DSA:3.40.50.1390,PF07508,Coil
MSINRNNTSETPKKAALYVRVSTNYQIDRDSLPMQRQELITYAQLMFGINDYVVFEDAGYSGKNTDRPEFQNMMRRIRAGEFTHLLCWKIDRISRNLLDFASMYQELKDLGVTFVSKNEQFDTSTAIGEAMLKIILVFAELERNMTSERVTATMLSRAQNGLWNGGRVPYGYDYDKDSKTFSINQEEAFLVRKMYDLYSEHRSLVMVSRTLNEDGYASRAGNDWSPVSIFIILTNPFYTGIYRYNHYKIPGLKIEKDPSEWIEVPDHHPRIISDEQFDNMNRILQSNSRSKRLPGQQHTSKGIHIFGGLLYCGTCGSQYVSTPSRLLASGYRPSKYACPNLRKKKTCNTKSISDPVIGEFVLNYVLNMMHARAASSSIHDTSELQDALLNGGTFQNVDHIGKDGLDSCFHMFSSTPLDGKRFRKPKKATTIDPELKRLRAEKRKTERALDRLMNLYLYADNPISEKDFVIRKQALDDYLKEINENLGMIDRGRGIETISDENFIKRASYFIMSKELAGKDYIYFKKLAMDMDAEILRDFFQEIIDSIVMEGSNVKEIVFRNGLAHTFFYGSIPKFV

SEQ ID NO: 1006 - protein, 576 aa, Unknown
  Description of Unknown: Integrase B1007 sequence
  PTHR30461:SF3,IPR036162,PS51737,IPR011109,PTHR30461, PS00397,PF00239,G3DSA:1.10.10.2600,IPR006119,SSF53041, SM00857,IPR025827,IPR038109,PS51736,cd03768, IPR006118,PF13408,G3DSA:3.40.50.1390,PF07508,Coil
MKKNFKMPGSGSETPIRVAIYVRVSTVYQIDKDSLPMMKQDLTSYCKYILNTDDFVIFEDAGYSGKNTDRPAYQKMMSQIRQGLFTHLLVWKIDRISRNLLDFANMYAELKDLGVTFVSKNEQFDTSTAIGEAMLKIILVFAELERNMTSERVTATMINRASNGVWNGGRIPFGYSYDKPTQVFSIDPEENKIYNFMVETYEDTQSIVHTSRRLNEAGYRSRNGNMWSPVAVWTILRNPWYKGVYRYNYYKIPGRKAIKDESEWVIVENHHPASIDPDRFDRIQATLDKNARYRNTPGRKTAQKNVHVFSGLVWCAECGSAFTASPGKLHVSGYRPSKYGCPNVRKTKTCHAKYTSDVVLGEFLLNYILNILNAQKQFAYIHSTDDLQKRLLHGSTFSNVDHVDPDGLASLLNMLEKCSGSDPVLLKRPRSKPKMDPELKRMMADQKKQQRALDRLNDLYLYSDDSISEREYLVRKQQITDRLQEINEAIGMMSQESWMRTMNDEEFIRQASSFILTQKLADKQYIYYENLAESLDPEILKNFFVSILDSIILRDGRPETVVFRNGLSHTFTYKDS

SEQ ID NO: 1007 - protein, 576 aa, Unknown
  Description of Unknown: Integrase B1008 sequence
  PTHR30461:SF3,IPR036162,PS51737,IPR011109,PTHR30461, PS00397,PF00239,G3DSA:1.10.10.2600,IPR006119,SSF53041, SM00857,IPR025827,IPR038109,PS51736,cd03768, IPR006118,PF13408,G3DSA:3.40.50.1390,PF07508,Coil
MKKNFKMPGSGSETPIRVAIYVRVSTVYQIDKDSLPMMKQDLTSYCKYILNTDDFVIFEDAGYSGKNTDRPAYQRMMSQIRQGLFTHLLVWKIDRISRNLLDFANMYAELKDLGVTFVSKNEQFDTSTAIGEAMLKIILVFAELERNMTSERVTATMINRASNGVWNGGRIPFGYSYDKPNQVFSIDPEENKIYNFMVETYEDTQSIVHTSRRLNEAGYRSRNGNMWSPVAVWTILRNPWYKGVYRYNYYKIPGRKAIKDESEWVIVENHHPASIDPDRFDRIQATLDKNARYRNTPGRKTAQKNVHVFSGLVWCAECGSAFTASPGKLHVSGYRPSKYGCPNVRKTKTCHAKYTSDVVLGEFLLNYILNILNAQKQFAYIHSTDDLQKRLLHGSTFSNVDHVDPDGLASLLNMLEKCSGSDPVLLKRPRSKPKMDPELKRMMADQKKQQRALDRLNDLYLYSDDSISEREYLVRKQQITDRLQEINEAIGMMSQEPWMRTMNDEEFIRQASSFILTQKLADKQYIYYENLAESLDPEILKNFFVSILDSIILRDGRPETVVFRNGLSHTFTYKDS

SEQ ID NO: 1008 - protein, 576 aa, Unknown
  Description of Unknown: Integrase B1009 sequence
  PTHR30461:SF3,cd00338,SM00857,G3DSA:1.10.10.2600,IPR036162, PF13408,IPR025827,G3DSA:3.40.50.1390,PS51737,IPR006119, IPR038109,PF07508,IPR011109,SSF53041,PTHR30461, PS51736,Coil,PF00239
MKKRVRILLRVSSNQQLEADGDLSVQREIVLDYISKQNDWKLDNKEYFEGSNSGYKNAVKDRDVLQEALIDAKNNEYDILVVYKDDRIGRRMWEIGSYVMQLKSYGVDIYTTKDGCISPENNDVMGQMMLALRYGNAQKSSSDTGQRVKDTAQKLVKRGKFMGGKAPYGYELILSGELSKHGRALHKLKKIPEKVEVVKKIYDLSINKEFGSSKIARILNEDTYYHSLAPKDDWKSGTITSILTNPIYCGITAYKRREKINGKYHSLDSQDWIYAEEINEEIAIIDKDIWNDIQEKRSNRSIKYRKDVLKEKGVNVLLRNDGELALIDVAYCGYCGGKLTNGSKYNYWTLKGTGEKRASKIPAYKCQTAWAGVPHDKTRMFRADKIEDIVFKYVAQYISVLQDNSEVYEKIQTNNKKEKESFNQRIKKEKQELKKISDGIEVMKSHIPDAMLGNYPLSVEVIADTIKQFEEKEKIQKQKIQELEQQYEEMEIEEQDWDEVCKIIPSWIEVFNDADKKTKRVLINKLVDKVIVKKDEITVKFKINLSKPRHRQSRMSGYNGVSKQRIRFYNYFIYSI

SEQ ID NO: 1009 - protein, 575 aa, Unknown
  Description of Unknown: Integrase B1010 sequence
  PTHR30461:SF3,IPR036162,PS51737,IPR011109,PTHR30461, PS00397,PF00239,G3DSA:1.10.10.2600,IPR006119,SSF53041, SM00857,IPR025827,IPR038109,PS51736,cd03768, IPR006118,PF13408,G3DSA:3.40.50.1390,PF07508,Coil
MNKIIDTLNTQKAAIYIRVSTHHQIDKDSLPLQREDLINYAKYALNIDNYELFEDAGYSAKNTERPSYQYMMSKLRTGEFSHLLVWKIDRISRNLLDFATMYEELKTLGVTFVSKNEQFDTSSAIGEAMLKIILVFAELERNMTSERVSAVMLSRATNGQWNGGRVPYGYNYDKSTKQFSIHPIEGNYIKKLYDLYFETQSMLAVAKYFNEHGIKTKTGNNWSPTTIGKILASRFYLGEYQYNLHKDGIGGAGVASLKPEDEWITVKDHHPAIIEIEQWDKCAEIRAYNHRRSNAPKRYKRKNTHIFAGLIICGKCGSTYQATIDRARTGGYRPSIYLCSRRKQYSDCQNKYMSDITLGPFILNYISNIIKANANMGKTTTPDMFKKKLLRGDVFKDVKDIAPSGLNEMYNMIVSKKFNSDPFTSTVHRDESQPDFASERELLISEKRKYLRALDRLKTLYLYNDNAMAEKDYIIENKNILDNLKRVDERLEEIEKNSSQNFTITDSEFIEKASYFIISQELSNQRYINFNSLIQHIDTNVLKNFIQSVIKKIVVLDGRITSIQFKNGIEHDFLY

SEQ ID NO: 1010 - protein, 575 aa, Unknown
  Description of Unknown: Integrase B1011 sequence
  PTHR30461:SF3,IPR036162,PS51737,IPR011109,PTHR30461, PF00239,G3DSA:1.10.10.2600,IPR006119,SSF53041,cd00338, SM00857,IPR025827,IPR038109,PS51736,mobidb-lite, PF13408,G3DSA:3.40.50.1390,PF07508,Coil
MGKKQKTNGGDAVIYARYSSHNQRDVSIEQQVEACRKHAAELGLTVTATYEDRAISGKTDKRPSFQRMMRDAEQHKFAYVLAWKSNRIGRNMMQALVNESRLVDCGVKVFYAEEDFDDNAAGRFALRSMMNVNQFYIENMAEDVKRGLYDNAKKGLVNGSLPLGYKRGADGKPEIDEPKAAIVREIYTRVAAGELFASIADDLNARGIKTARGREWNKGSFHVLCHNDRYRGIYMYGDIRIPGGMPRIISDELFYDAQEAYGMKKDNRYGRARHGAENYLLTGKLYCGHCGGYMVGISGTSKTGEMHYYYACQKHRLEHTCEKKAIRRDVIENAVARAIMMYCLDDETIDFIVDSTIAYFKQKDHELHIEAMENELAAVQQAISNLMKAIEAGIITPTTRTRLLDLEEQQSKLSAKINTAKAERVEINRDDLIAGLQLFRTGDIKNKKFLAKLFNTFLIAVYLYDDNRLKIVFSFTGNHNSVEIPLELDNDCPDSEIVSDETEVRMSHLECRKNLGSSPSSGEAEKDDDCSDGRFVRTAPLPPHSKCTVRTLGSNVTIQMVGSVFVLYCEIPTRQ

SEQ ID NO: 1011 - protein, 575 aa, Unknown
  Description of Unknown: Integrase B1012 sequence
  PTHR30461:SF3,IPR036162,PS51737,IPR011109,PTHR30461, PS00397,PF00239,G3DSA:1.10.10.2600,IPR006119,SSF53041, SM00857,IPR025827,IPR038109,PS51736,cd03768, IPR006118,PF13408,G3DSA:3.40.50.1390,PF07508,Coil
MAYNKLSLPGHIRVAIYVRVSTMHQIDRDSLPMQKQDLLAYAKIMLGTDDCIIFEDAGYSGKNTDRPKFQEMMSQIRAGGFTHLLVWKIDRISRNLLDFATMYNELKELGVVFVSKNEQFDTSTAMGEAMLKIVLIFAELERNMTSERVTATMISRASNGLWNGGRVPYGYEWDSKSKEFSYNTDEYNIARLIHDLYEEERSLIREARILNAKGYRTRSGNEWNPVSLHIILRNVFYCGDYRYNVLKEGDRQKVKAESEWITIENHHPAIVSREQKMRIISILDSNSRINKKKNNYKSGKYTHIFSGLIFCGSCGNPMGAAPVSLRADGWRYSKYSCPTRRKSSMACIGKSTSDPIVGEFVFNYILNMLNTQRDFSKITSIDEMQDKLLTGNTFNYIDHIQEEGVLDLYDVLAKGNVQGAIYGKGVSIPSKQEKSSEIASLRVEKQKTERALDRLRNLYLYSEDAMSEKEYILERTRLTEKLEEINEEIGMMQSDEWQQSVSDEMFIARASEFIIAQKLTDRNYVNYKRLAKSVDAEVLRSFVTSIIDSIIIQDGKVQRITFKNGLSHTFIFKKS

SEQ ID NO: 1012 - protein, 575 aa, Unknown
  Description of Unknown: Integrase B1013 sequence
  PTHR30461:SF3,IPR036162,PS51737,IPR011109,PTHR30461, PS00397,PF00239,G3DSA:1.10.10.2600,IPR006119,SSF53041, SM00857,IPR025827,IPR038109,PS51736,cd03768, IPR006118,PF13408,G3DSA:3.40.50.1390,PF07508,Coil
MNKIIDTLNTQKAAIYIRVSTHHQIDKDSLPLQREDLINYAKYALNIDNYEIFEDAGYSAKNTERPSYQYMMSKLRTGEFSHLLVWKIDRISRNLLDFATMYEELKTLGVTFVSKNEQFDTSSAIGEAMLKIILVFAELERNMTSERVSAVMLSRATNGQWNGGRVPYGYNYDKSTKQFSIHPIEGNHIKKLYDLYLETQSMLAVAKYFNEHGIKTKTGNNWSPTTIGKILASRFYLGEYQYNLHKDGIGGAGVASLKPEDEWITVKDHHPAIIEIEQWDKCAEIRAYNHRRSNAPKRYKRKNTHIFAGLIICGKCGSTYQATIDRARTGGYRPSIYLCSRRKQYSDCQNKYMSDITLGPFILNYISNIIKANANMGKTTTPDMFKKKLLRGDVFKDVKDIAPSGLNEMYNMIVSKKFNSDPFTSTVHRDESQPDFASERELLISEKRKYLRALDRLKTLYLYNDNAMAEKDYIIENKNILDNLKRVDERLEEIEKNSSQNFTITDSEFIEKASYFIISQELSNQRYINFNSLIQHIDTNVLKNFIQSVIKKIVVLDGRITSIQFKNGIEHDFLY

SEQ ID NO: 1013 - protein, 575 aa, Unknown
  Description of Unknown: Integrase B1014 sequence
  PTHR30461:SF3,IPR036162,PS51737,IPR011109,PTHR30461, PS00397,PF00239,G3DSA:1.10.10.2600,IPR006119,SSF53041, SM00857,IPR025827,IPR038109,PS51736,cd03768, IPR006118,PF13408,G3DSA:3.40.50.1390,PF07508,Coil
MAYNKLSLPGHIRVAIYVRVSTMHQIDRDSLPMQKQDLLAYAKIMLGTDDCIIFEDAGYSGKNTDRPKFQEMMSQIRAGGFTHLLVWKIDRISRNLLDFATMYNELKELGVVFVSKNEQFDTSTAMGEAMLKIVLIFAELERNMTSERVTATMISRASNGLWNGGRVPYGYEWDSKSKEFSYNTDEYNIARLIHDLYEEERSLIREARILNAKGYRTRSGNEWNPVSLHIILRNVFYCGDYRYNVLKEGDRQKVKAESEWITIENHHPAIVSREQKMRIISILDSNSRINKKKNNYKSGKYTHIFSGLIFCGSCGNPMGAAPVSLRADGWRYSKYSCPTRRKSSMACIGKSTSDPIVGEFVFNYILNMLNTQRDFSKITSIDEMQDKLLTGNTFNYIDHIQEEGVLDLYDVLAKGNVQGAIYGKGVSIPSKQEKSSEIASLRVEKQKTERALDRLRNLYLYSEDAMSEKEYILERTRLTEKLEEINEEIGMMQSDEWQQSVSDEMFIARASEFIIAQKLTDRNYVNYKRLAKSVDAEVLHSFVTSIIDSIIIQDGKVQRITFKNGLSHTFIFKKS

SEQ ID NO: 1014 - protein, 575 aa, Unknown
  Description of Unknown: Integrase B1015 sequence
  PTHR30461:SF3,IPR036162,PS51737,IPR011109,PTHR30461, PS00397,PF00239,G3DSA:1.10.10.2600,IPR006119,SSF53041, SM00857,IPR025827,IPR038109,PS51736,cd03768, IPR006118,PF13408,G3DSA:3.40.50.1390,PF07508,Coil
MNKIIDTLNTQKAAIYIRVSTHHQIDKDSLPLQREDLINYAKYALNIDNYEIFEDAGYSAKNTERPSYQYMMSKLRTGEFSHLLVWKIDRISRNLLDFATMYEELKTLGVTFVSKNEQFDTSSAIGEAMLKIILVFAELERNMTSERVSAVMLSRATNGQWNGGRVPYGYNYDKSTKQFSIHPIEGNHIKKLYDLYLETQSMLAVAKYFNEHGIKTKTGNNWSPTTIGKILASRFYLGEYQYNLHKDSIGGAGVASLKPEDEWITVKDHHPAIVSIEQWDKCAEIRAYNHRRSNAPKRYRRKNTHIFAGLIICGECGSTYQATIDRARTGGYRPSIYLCSRRKQYSDCQNKYMSDITLGPFILNYISNIIKANANMGKTTTPDMFKKKLLRGDVFKDVKDIAPSGLNEMYNMIVSKKFNSDPFTSAVNRDESQPDFASERELLISEKRKYLRALDRLKTLYLYNDNAMAEKDYIIENKNILDNLKRVDERLEEIEKNSSQNFTITDSEFIEKASYFIISQELSNQRYINFNSLIQHIDTNVLKNFIQSVIKKIVVLDGRIISIQFKNGIEHDFLY

SEQ ID NO: 1015 - protein, 575 aa, Unknown
  Description of Unknown: Integrase B1016 sequence
  cd03768,SM00857,G3DSA:1.10.10.2600,IPR036162,PF13408, IPR025827,G3DSA:3.40.50.1390,PS51737,IPR006119,IPR038109, PF07508,SSF53041,IPR011109,PTHR30461,PS51736, Coil,PF00239
MRGVIYSRVSTIDQDYSKQTNELKDFAKKNNIDIVHIFEEKESGFNNDRPEFKKVQQLTKDEVDILLVWELSRLSRRSIYIQQQVRNFADKGICIYTKKENLYTLNEDGTENKSAMLLIGFTSIIAEQEVATLKERTISSKRNRIIKEGYSYTYNAPYGYIYDKETKKLSINPIEAEVVKRIFELSANGYSAYRIPVLLNADGIPTKTGKKWTLPTIATILTNTVYKGEAHYKLKGEKPKEGKRYSRTTEYAVVETPAIVTSELFDLSRKMMKERLSRSKSSGVKYNPLLRGLIVCPYCNVKYIFNRRDNLYSCHERYEKATNKTTQCFSKSISITKIDEIIWNLVKILFSKELAAGKTDEQIEPINRELENYKLQVVNLEHKQNELTEKANIIANAAIDIKIQFPNLPDLYLNKLKEVESINKEAGRYLNEIKHLEKLMESCRNKIQAINTLSDESIVVESIVDETEKYDLVHKVIDNIVVYGEGHYTLVVVTFQTGQVAYIGYYSFKRYKYYTIFYPSQSVWFDTEKRLGYIMTMKDSKSLKLSLETVTKEYSITDFINMFDVPENRHYYENQ

SEQ ID NO: 1016 - protein, 575 aa, Unknown
  Description of Unknown: Integrase B1017 sequence
  cd03768,SM00857,G3DSA:1.10.10.2600,IPR036162,PF13408, PS51737,G3DSA:3.40.50.1390,IPR025827,IPR006119,IPR038109, PF07508,IPR011109,SSF53041,PTHR30461,PS51736, Coil,PF00239
MRGAIYSRVSTLDQDYNRQTNELKEYAQYMGIEITHVFEEKESGFNDDRPEFAKLKELTKDDIDIVLVWELSRLSRRSLYLQQQIEYFTKKGICVYAKKENLRTLDEKGEEDRNTKFIIGIIAMIAEQEVATLKSRSISSKRNKIINEGNSYTYKAPYGYDYNTETKKLSINEEEAKIVRRVIELSANGYSSARIALILNAENIPTRSKTKIWTMGTINSMLANPVYKGEAEYMLKGTEPKKGKRYKRPIEVAIVKTPAIVSAELYDLSREKMKGRAFRSKSTGVKHFQLLRGLIYCPYCKIKYTYEGGRDLYVCHDKHKKSKNKPDCFSKAIKATRIEKIVWELVKLLFAQELATGKAQEQEEPLRQEIEAHKKLLMGIEEKLNDLTTQANAIVNAAIDIKREMPNMPDLYINKIREAASLDKESKKYQYEKDRLNKLILSCEDKIKAINSLSNEKVLVDSITDDMERYELIHKVIDHMIIYGEDSAYSLVVVTFKTGQDVYIGYKSKGYQYYTIFYPSQSVWVDTEKRLGCIMTMKDPKSLELSLETITKEYSITDFIKMFDIPKNRRYYENQ

SEQ ID NO: 1017 - protein, 575 aa, Unknown
  Description of Unknown: Integrase B1018 sequence
  PTHR30461:SF3,IPR036162,PS51737,IPR011109,PTHR30461, PF00239,G3DSA:1.10.10.2600,PF14287,IPR006119,SSF53041, IPR025378,SM00857,IPR025827,cd03770,IPR038109, PF13408,G3DSA:3.40.50.1390,PF07508,Coil
MTATQKHDIIPICTTVLSADQPPKEDIMLDQQKITILYCRLSNEDAQEGESNSIANQREYLTRYARDHGYTNLKILVDDGYTGTNFNRPGVQEGFELVKQGLVGCWLVKDLSRFGRDYLTVGQYTDIIFPSYDVRFIAINDGVDSNRGDSEGFAAIRNLFNEWYPRDTSKKVRVSLRQRGTSGKHMGKPPYGYRCDPEDKDHWILDEEAAPVVKLIFDLCIDGKGPEQIARILEEKQIMTAKALYAKRKKKPMPERPYHWGNQSIAGILERQEYTGCTCNFKTYSKSYKLKKRIPNEPENMFYLPDTQEAIVSQAQFDRVQELRKNKRRPAKAERQGLFSGLLFCADCGGKLHFATSKSFEGKQDHYVCNNYKSNRGTCTAHYIREDVLREIVLERIRAVNEYIRSDVDGFQEEWLQCRRTDQERSIRDDKKKLEQAKKRLADLDVIIARLYEDYVLGNLNQDRYRKMSADYEAEQERLKLEIEVIEEWVEQREEMNDGLDAFIALTQKYVDVEELTQTIVNEYIKKIIVYAPDKSSGKRKQKVKIFFNFVDDVDIPVISEPIVTQTTYERRKTA

SEQ ID NO: 1018 - protein, 575 aa, Unknown
  Description of Unknown: Integrase B1019 sequence
  PTHR30461:SF3,IPR036162,PS51737,IPR011109,PTHR30461, PF00239,G3DSA:1.10.10.2600,IPR006119,PF14287,SSF53041, IPR025378,SM00857,IPR025827,cd03770,IPR038109, PF13408,G3DSA:3.40.50.1390,PF07508,Coil
MTATQKHDIIPVCTTVLSADQQPKEDIMLDQQKITILYCRLSNEDAQDGESNSIANQREYLTRYARDHGYTNLKILVDDGYTGTNFNRPGVQEGFELVKQGLVGCWLVKDLSRFGRDYLTVGQYTDIIFPSYDVRFIAVNDGVDSNRGDSEGFAAIRNLFNEWYPRDTSKKVRVSLRQRGTSGKHMGKPPYGYRCDPEDKDHWILDEEAAPVVKLIFDLCIDGKGPEQIARILEEKQILTAKALYAKRKKKPMPERPYHWSNQSIVGILERQEYTGCTCNFKTYSKSYKLKKRIPNEPENMFYLPDTQEAIVSQAQFDRVQELRKNKRRPAKAERQGLFSGLLFCADCGGKLHFATSKSFEGKQDHYVCNNYKSNRGTCTAHYIREDVLREIVLERIRAVNEYIRSDVDGFQEEWLQCRRTDQERSIRDDKKKLEQAKKRLADLDVIISRLYEDYVLGNLNQDRYRKMSADYEAEQERLKLEIEVIEEWVEQREEMNDGLDAFIALTQKYVDVEELTQTIVNEYIKKIVVYAPDKSSGKRKQKVKIFFNFVDDVDIPVISEPIVTQTTYERRKTA

SEQ ID NO: 1019 - protein, 575 aa, Unknown
  Description of Unknown: Integrase B1020 sequence
  cd03768,SM00857,G3DSA:1.10.10.2600,IPR036162,PF13408, IPR025827,G3DSA:3.40.50.1390,PS51737,IPR006119,IPR038109, PF07508,IPR011109,SSF53041,PTHR30461,PS51736, Coil,PF00239
MRGVIYSRVSTIDQDYSKQTNELKDFAKKNNIDIVHIFEEKESGFNNDRPEFKKVQQLTKDEVDILLVWELSRLSRRSIYIQQQVRNFADKGICIYTKKENLYTLNEDGTENKSAMLLIGFTSIIAEQEVATLKERTISSKRNRIIKEGYSYTYNAPYGYIYDKETKKLSINPIEAEVVKRIFELSANGYSAYRIPVLLNADGIPTKTGKKWTLSTIATILTNTVYKGEAHYKLKGEKPKEGKRYSRTTEYAVVETPAIVTSELFDLSRKMMKERLSRSKSSGVKYNPLLRGLIVCPYCNVKYIFNRRDNLYSCHERYEKATNKTTQCFSKSISINKIDEIIWNLVKILFSKELAAGKTDEQIEPINRELENYKLQVVNLEHKQNELTEKANIIANAAIDIKIQFPNLPDLYLNKLKEVESINKEAGRYLNEIKHLEKLMESCRNKIQAINTLSDESIVVESIVDETEKYDLVHKVIDNIVVYGEGHYTLVVVTFQTGQVAYIGYYSFKRYKYYTIFYPSQSVWFDTEKRLGYIMTMKDSKSLKLSLETVTKEYSITDFINMFDVPENRHYYENQ

SEQ ID NO: 1020 - protein, 575 aa, Unknown
  Description of Unknown: Integrase B1021 sequence
  PTHR30461:SF3,cd00338,SM00857,G3DSA:1.10.10.2600,IPR036162, PF13408,IPR025827,G3DSA:3.40.50.1390,PS51737,IPR006119, IPR038109,PF07508,SSF53041,IPR011109,PTHR30461, PS51736,Coil,PF00239
MKKKFSSVPEPDIQDAVIYARYSSHSQRDCSIEQQVADCELFAQQNGLRVVRIYADRHLSGTTDNRPQFQQMLKDAAHGHWPFVICWKIDRFARNRYDSATYKYKLKKAGVRVLYAKESIPDGPEGILLESVLEGSAEYYSASLAQNIRRGMRFNAENCKVNSGSIPFGYCKGPDGRFAIHETNAEIVREIFRKAAAGVPFVDIATELNNKGLKTSRGGRWNKNSFVLLKNESYIGVYHFSDIRIEGGMPAIIDPGTFLAANERMNANRRVRGRHHDGGDYLLTGKLKCAHCGSYMIGFSGTAKNGESHYYYGCQKRRRERACKKANVPREWIERVVVKAALDYVLRPDVMEWITDAVMEYQEREAASSQLAALTAELEENQNATDNLMRAIEAGIITATTKQRLLDLETKAKDLKRAIELEKLSHVRLEREQILYWLEQFQGGSLQSQEFRRKVIDTFVSVVYLSDDHLRIAFNYSGQNRSEADFNLIMDAETASADYPINSFSLPLSPPHKKNPNLFPSGKGSDFFVCRISYRVIFISSLSSAAFLSMPPAYPVRLPFAPTTRWQGMMIEITL

SEQ ID NO: 1021 - protein, 575 aa, Unknown
  Description of Unknown: Integrase B1022 sequence
  PTHR30461:SF3,SM00857,G3DSA:1.10.10.2600,IPR036162,PF13408, PS51737,G3DSA:3.40.50.1390,IPR025827,IPR006119,IPR038109, PF07508,IPR011109,SSF53041,PF00239,PTHR30461, PS51736,Coil,cd00338
MKKKFSSVPDPDIQDAVIYARYSSHSQRDCSIEQQVADCELFAQQNGLRVVKIYADRHLSGTTDNRPEFQQMLKDAAHGHWPFVICWKIDRFARNRYDSATYKYKLKKAGVRVLYAKESIPDGPEGILLESVLEGSAEYYSASLAQNIRRGMRFNAENCKVNSGSIPFGYCKGPDGRYAIHETNAEIVRDIFRKAAAGVPFVDIATELNNKGLKTSRGGRWNKNSFVLLKNESYIGVYHFSDIRIEGGMPAIIDPGTFLAANERMNANRRVRGRHHDGGDYLLTGKLKCAHCGSYMIGFSGTAKNGESHYYYGCQKRRRERACKKANVPREWIEKVVVKAALDYVLQPDVMEWITDAVMEYQEREAASSQLAALTAELEENQKATDNVMKAIEAGIITATTKQRLLDLETKAKDLKRAIELEKLSHVRLEREQILYWLEQFQGGSLQSQEFRRKVIDTFVSVVYLSDDHLRIAFNYSGQNRSEADFNLIMDAETASADYPMNSFSLPLCPPHKKNPNLFPSGKGSDFFVYRISYRVIFISSLSNAAFLSMPPAYPVRLPFVPTTRWQGMMIEITL

SEQ ID NO: 1022 - protein, 575 aa, Unknown
  Description of Unknown: Integrase B1023 sequence
  PTHR30461:SF3,IPR036162,PS51737,IPR011109,PTHR30461, PF00239,G3DSA:1.10.10.2600,IPR006119,PF14287,SSF53041, IPR025378,SM00857,IPR025827,cd03770,IPR038109, PF13408,G3DSA:3.40.50.1390,PF07508,Coil
MTATQKHDIIPICTTVLSADQPPKEDIMLDQQKITILYCRLSNEDAQEGESNSIANQREYLTRYARDHGYTNLKILVDDGYTGTNFNRPGVQEGFELVKQGLVGCWLVKDLSRFGRDYLTVGQYTDIIFPSYDVRFIAINDGVDSNRGDSEGFAAIRNLFNEWYPRDTSKKVRVSLRQRGTSGKHMGKPPYGYRCDPEDKDHWILDEEAAPVVKLIFDLCIDGKGPEQIARILEEKQILTAKALYAKRKKKPMPERPYHWGNQSIVGILERQEYTGCTCNFKTYSKSYKLKKRIPNEPENMFYLPDTQEAIVSQAQFDRVQELRKNKRRPAKAERQGLFSGLLFCADCGGKLHFATSKNFEGKQDHYVCNNYKSNRGTCTAHYIREDVLREIVLERIRAVNEYIRSDVDGFQEEWLQCRRTDQERSIRDDKKKLEQAKKRLADLDVIIARLYEDYVLGNLNQDRYRKMSADYEAEQERLKLEIEVIEEWVEQREEMNDGLDAFIALTQKYVDVEELTQTIVNEYIKKIIVYAPDKSSGKRKQKVKIFFNFVDDVDIPVISEPIITQTTYEHRKTA

SEQ ID NO: 1023 - protein, 575 aa, Unknown
  Description of Unknown: Integrase B1024 sequence
  PTHR30461:SF3,SM00857,G3DSA:1.10.10.2600,IPR036162,PS51737, G3DSA:3.40.50.1390,IPR006119,IPR038109,PF07508,IPR011109, SSF53041,PTHR30461,Coil,PS51736,cd00338, PF00239
MYDIYNQKPTSRKVVIYARVSTEHEAQLSALENQKDWYKPILQQHPEWDIVKMYVDEGITGTSAKKRPQFMQMIQDASSGNFDLILTREVSRFARNTVDTLQYTRELKSKGVEVFFLNDNIKTFDGDGELRLTIMATLAQDESRKTSVRVKSGQQTSMENGVFYGNGNILGYDRVGKDMVINPEQAKTVRMIFDWYLDGWGMRKIQFELEKAGRLTAMGKSNWHVSNISKILRNSFYCGIITYHKEFTPDFLEQKKIRNFGDMEFTQVRGNHKPIITEEEYDQAQKRINSRRKTLSVDTSGQRMYGEKPPSDVWVKLLECECGHKFNRKMWHNTTEGKQYGYQCYSSIRTGTVRTRLNKGLPIDGICQTPMIAGWKLQMMAKYIFKNYLSDTDQVLSLAESMLEKHIDDEEEVCDNTDIINQKKEELQKLLKRLDNLIEMRADGELARDIFILKKESTENSISQLKKELAELEPSEIESEIDEVTSKEKITILKYALDQYTNFDSDADIPESVIEAFVEKIIARKDGFDWYLRFNPEESPMGCLVDGKRKRGAKVSSFCSPQHRQLSLRRMHNYK

SEQ ID NO: 1024 - protein, 575 aa, Unknown
  Description of Unknown: Integrase B1025 sequence
  SM00857,G3DSA:1.10.10.2600,IPR036162,PF13408,IPR025827, G3DSA:3.40.50.1390,PS51737,IPR006119,IPR038109,PF07508, SSF53041,IPR011109,PTHR30461,Coil,PS51736, cd00338,PF00239
MAYRKITDIKDTIGMRAVFYARVSTAEEEQLNAIELQIEENRGCIKDHGWKLVGEYIDRSKSGTMIKGRDDYQRLYEDLYEDLFDIVVIKDQERLQRNTLDWYLFINRVVQTGKLLFMYMDGKFYSPDDALITGVRAIIAEEFSRNLSKKLHNYHDHRIEKARQGQEIALQGSGNVYGWDKKDGKYYINPEQAKVRRLMCEGIMARKGSTLIAKELNDAGYRNTVGKPWKPMDIPKFVYDCKNVGTMIINKERHDFESKQTIKLPKEEWVYVENALPPIVTQEEWDLICKIHEERVIATGSDRRGKKTSGYSFSGKLVCGICGAPYWRKQRVSKDEYWVCSTKQTKGRRTRKRDSTMGKAGEINPLGCDNENISYNSLMEIMGVVSERLQANTDTIKHDMINWLTKLRKQLLEANGGHTEADLQRELSRKSKLLDAYLDGILNKQEYQKKAEELDERIIQLKAETEKNKANSGDIAEIDKVLANIDEEVSRYVDGNEKLKVEYLLEHLEQVQIFPDKVIVIVPILSEGIVVEKAQYVSREKRRRKKHGYENDFESYPARCWRGSAFRRKSYQSQL

SEQ ID NO: 1025 - protein, 575 aa, Unknown
  Description of Unknown: Integrase B1026 sequence
  cd03768,SM00857,G3DSA:1.10.10.2600,IPR036162,PF13408, IPR025827,PS51737,G3DSA:3.40.50.1390,IPR006119,IPR038109, PF07508,SSF53041,IPR011109,PTHR30461,PS51736, Coil,PF00239
MRGVIYSRVSTIDQDYSKQTNELKDFAKKNNIDIVHIFEEKESGFNNDRPEFKKVQQLTKDDVDILLVWELSRLSRRSIYIQQQVKDFADKGICIYTKKENLYTLNEDGTENKSAMLLIGFTSIIAEQEVATLKERTISSKRNRIIKEGYSYTYNAPYGYIYDKETKKLSINPIEAEVIKRIFELSANGYSAYRIPVLLNADGIPTKTGKKWTLPTIATILTNTVYKGEAHYKLKGEKPKEGKRYSKTTEYAVVETPAIVTSELFDLSRKMMKERLSRSKSSGVKYNPLLRGLIVCPYCNVKYIFNRRDNLYSCHERYEKATNKTIQCFSKSISINKIDEIIWNLVKILFSKELAAGKTDEQIEPINRELESYRLQVVNLEHKQNELTQKANIIANAAIDIKIQFPNLPDLYLNKLKEVESINKEAGKYLNEIKHLEKLMESCRNKIQAINTLSDESIVVESIIDETEKYDLVHKVIDNIIIYGEGHYTLVVVTFQTGQVAYIGYYSFKRYKYYTIFYPSQSVWFDTEKRLGYITTMKDPKSLELSLETVTKEYSITDFINMFDTPENRHYYENQ

SEQ ID NO: 1026 - protein, 575 aa, Unknown
  Description of Unknown: Integrase B1027 sequence
  cd03768,PTHR30461:SF3,SM00857,G3DSA:1.10.10.2600,IPR036162, PF13408,IPR025827,G3DSA:3.40.50.1390,PS51737,IPR006119, IPR038109,PF07508,IPR011109,SSF53041,PTHR30461, PS51736,Coil,PF00239
MKTKDKPQAKQYVIYSRKSKFTGKGESIENQIELCRQYIAMHFGEEAAENVLVYEDEGFSGGNLERPQFKKMMKDSQKIAFAAIVVYRLDRISRNIGDFAKLIEDLGDRHIDFISIREQFDTSSPMGRAMMYIASVFSQLERETIAERIRDNMHELSKTGRWLGGTTPTGYASESLSSVTVDGKVKKACKLKPIPEEIQLVKTIFSVFMETGSLSKTDQYLLEHRCVTKRGKQFTRFAIRGILTNPVYMIADDTAYQYLKENNVDLFAERAEFDGEHGVMAYNRTLQRPGKANQIRPMEEWIVAVGKHPGIIAGSDWVQVQAMLDVNKSKSYRRPRSNVALLSGLLRCGECGDYMRPKLTNRRTADGELIYTYMCSTKERSHGTICSMKNCNGNTLDAKIIEEIRKLSADKETLAKLLAQTKKVISGSKEGYDAELALLREKHAETEDRIKRLVESLSVASDTSAKYVMEQIDALHRESETQQARLSELEALTEQSRMLHQEFAFHQEMIESFASAVDSATLEEKRRLLRTIVKKVVWDGKNAYVYLFAEDGEADLPPIDQPMYPLGEDSECSMD

SEQ ID NO: 1027 - protein, 575 aa, Unknown
  Description of Unknown: Integrase B1028 sequence
  SM00857,G3DSA:1.10.10.2600,IPR036162,PF13408,IPR025827, G3DSA:3.40.50.1390,PS51737,IPR006119,IPR038109,PF07508, IPR011109,SSF53041,PTHR30461,Coil,PS51736, cd00338,PF00239
MAYRRAQDTKGLRAVFYARVSTAEEEQLNAIELQIEENRNTITKHGWKKVDEYIDRSKSGTMVKGRDEYQRLYEDLLGDAFDVVVIKDQERLMRNTLDWYLFINRLVQTGKILYMYLEDKFYSPDDALITGIKAIIAEEFSRNLSKKLHNYHDGRIEKARKGLEIDLQGSGNVFGWDKVDGKYVINPEQAKVRRLMCEGIMARKGSTQIAKELNDAGYRNTVGKPWKPMDIPKFVYDCKNVGTMIINRERHDFESKQTVKLPESEWVYVKGALPPIVTEEEWALIEKIHEERVVATGCNRRGKKTSGYSFSGKLVCGVCGAPYWRKTKTSKEEYWVCSTKQQKGRKTRARDAVGGKAGEINPEGCDNENISYNALMEIMAIVSERLQADTGFIREFMLSRLDTYEKRITEANRGATEADLQREISRKDKLLDAYLDNLLTKEEYQRKAQALDEHILELKREVEANKANLADLAEIQRVRENIDAEVAQYLDENEQLKVEFVLEHLSQVIIYPDKVLVIFDVFGEGVMVEKSQYVSREKWRGQDYHDRVHFRYSEGRRRICFYFRVRPSKEPKRTL

SEQ ID NO: 1028 - protein, 575 aa, Unknown
  Description of Unknown: Integrase B1029 sequence
  PTHR30461:SF3,IPR036162,PS51737,IPR011109,PTHR30461, PS00397,PF00239,G3DSA:1.10.10.2600,IPR006119,SSF53041, SM00857,IPR025827,IPR038109,PS51736,cd03768, IPR006118,PF13408,G3DSA:3.40.50.1390,PF07508,Coil
MISNSSATHAKVAIYIRVSTLHQIDRDSLPMQRHDLIAYAKLILNTDDVTIFEDAGYSGKNTIRPEFQKMMSQLRTGTYTHLLVWKIDRISRNLLDFAEMYQELKDLGVTFVSKNEQFDTSTAMGEAMLKIILVFAELERNMTSERVTATMISRASNGQWNGGRIPYGYDYDPEEQGFSFNSDEYNIAHLIHDKYEELRSLVYLARYLNEHGYRTRAGNDWSPVSLDIILRSVFYCGDYQYNRLKEGDRQRPKDKSEWITVKDHHPAIVSREQKERILALLESNRRLKSFRKSGKSKYTHIFSGLLICGNCGQPMTSSISTIKKTTGRRYSLYFCPTHRKSKLWCTGKSTSDPIVGEFVFNYILNMLNAQKAFSPETSIQELEQQLLSGDTFSPVAAIAPDGLHDLFHTLRTGTIKGEVFGKDVKIKTGSEPPLQLSKLKKEKVRLERAIDRLNKLFLYSEKAMSESEYLTQKIQLSDSLEEVEDKLAFLASEGSLQQSITDDEFIAKASNFILSQKLTDRNYISFQSLSATVSPEVLDSFLSSIIDNIVFKDGAVNSITFRNGLSHTFIYRVGG

SEQ ID NO: 1029 - protein, 575 aa, Unknown
  Description of Unknown: Integrase B1030 sequence
  cd03768,SM00857,G3DSA:1.10.10.2600,IPR036162,PF13408, PS51737,IPR025827,G3DSA:3.40.50.1390,IPR006119,IPR038109, PF07508,SSF53041,IPR011109,PTHR30461,PS51736, Coil,PF00239
MRGAIYSRVSTLDQDYNRQTNELKEYAKYMGIEITHVFEEKESGFNDDRPEFAKLKELTKDDIDIVLVWELSRLSRRSLYLQQQIEYFTKKGICVYAKKENLRTLDEKGEEDRNTKFIIGIIAMIAEQEVATFKARSLSSKKNKILKEGNSYTYKAPYGYDYSTETKKLSINEEEAKTVRRVIELSANGYSSARIALILNAENIPTRSKTKIWTMGTINSMLTNPVYKGEAEYMLKGTEPKKGKRYKRPIEVAIVKTPAIVSAELYDLSKEKMKGRAIRSKSTGVKHFQLLRGLIYCPYCKIKYTYEGGRDLYVCHDKHMKSKNKPACFSKAIKAARIEKIVWELVKLLFSQELATGKAQEQEEPLRQEIEAHKKLLMGIEEKLNDLTAQANAIVNAAIDIKREMPNMPDLYINKIREAASLDKESKKYQYEKDRLNKLILSCENKIKAINSLSNEKVLVDSITDDMERYELIHKVIDHMIIYGEDSAYSLVVVTFKTGQEVYIGYKSKGYQYYTIFYPSQSVWVDTEKRLGCIMTMKAPKSLELSLETITKEYSITDFIKMFDIPKNRHYYENH

SEQ ID NO: 1030 - protein, 575 aa, Unknown
  Description of Unknown: Integrase B1031 sequence
  cd03768,SM00857,G3DSA:1.10.10.2600,IPR036162,PF13408, PS51737,G3DSA:3.40.50.1390,IPR025827,IPR006119,IPR038109, PF07508,IPR011109,SSF53041,PTHR30461,PS51736, Coil,PF00239
MRGAIYSRVSTLDQDYNRQTNELKEYAKYMGIEITHVFEEKESGFNDDRPEFAKLKELTKDDIDIVLVWELSRLSRRSLYLQQQIEHFTKKGICVYAKKENLRTLDENGEEDRNTKFIIGIIAMIAEQEVATLKSRSISSKRNKILKEGNSYTYKAPYGYDYSTETKRLSINEEEAKTVRRVIELSANGYSSARIALMLNAENIPTRSKTKIWTMGTINSMLTNPVYKGEAEYMLKGTEPKKGKRYKRPIEVAIIQTPAIVSTELYDLSREKMKGRAFRSKSTGVKHFQLLRGLIYCPYCKIKYTYEGGRDLYVCHDKHMKSKNKPACFSKAIKATRIEKIVWELVKGLFSQEFAIDKAQEQEEPLRQEIETHQKLLMGIEGKLADLTAQANAIVNAAIDIKREMPNMPDLYINKIREAASLDKESKKYQYEKDRLNKLIQSCESKIEAINSLSNEKVLVDSITDDMERYELIHKVIDHMIIYGEDSAYSLVVVTFKTGQKVYIGYKSKGYQYYTIFYPSQSVWIDTEKRLGCIMTMKDSKSLELSLETVTKEYSITAFVKMFDTPKNRRYYENQ

SEQ ID NO: 1031 - protein, 575 aa, Unknown
  Description of Unknown: Integrase B1032 sequence
  SM00857,G3DSA:1.10.10.2600,IPR036162,PF13408,IPR025827, G3DSA:3.40.50.1390,PS51737,IPR006119,IPR038109,PF07508, SSF53041,IPR011109,PTHR30461,Coil,cd00338, PF00239
MAYRKITDIKDTIGMRAVFYARVSTAEEEQLNAIELQIEENRGCIKDHGWKLVGEYIDRSKSGTMVKGRDDYQRLYEDLYEDLFDIVVIKDQERLQRNTLDWYLFINRVVQTGKLLFMYMDGKFYSPDDALITGVRAIIAEEFSRNLSKKLHNYHDHRIEKARQGQEIALQGSGNVYGWDKKDGKYYINPEQAKVRRLMCEGIMARKGSTLIAKELNDAGYRNTVGKPWKPMDIPKFVYDCKNVGTMIINKERHDFESKQTIKLPKEEWVYVENALPPIVTQEEWDLICKIHEERVIATGSDRRGKKTSGYSFSGKLVCGICGAPYWRKQRVSKDEYWVCSTKQTKGRRTRKRDSTMGKAGEINPLGCDNENISYNSLMEIMGVVSERLQANTDTIKHDMINWLTKLRKQLLEANGGHTEADLQRELSRKSKLLDAYLDGILNKQEYQKKAEELDERIIQLKAETEKNKANSGDIAEIDKVLANIDEEVSRYVDGNEKLKVEYLLEHLEQVQIFPDKVIVIVPILSEGIVVEKAQYVSREKRRRKKHGYENDFESYPARCWRGSAFRRKSYQSQL

SEQ ID NO: 1032 - protein, 574 aa, Unknown
  Description of Unknown: Integrase B1033 sequence
  PTHR30461:SF3,SM00857,G3DSA:1.10.10.2600,IPR036162,PF13408, PS51737,G3DSA:3.40.50.1390,IPR025827,IPR006119,IPR038109, PF07508,SSF53041,IPR011109,PTHR30461,Coil, PS51736,cd00338,PF00239
MNVYRTREILKTCSIFDLKLKVAFYARVSTESEDQQVSIHHQDEYYRNFIAKNKNWVFVGAYIDNGISGIRTEKRDEFQRMMADAKTGKIDMIVTKEITRFARNTLDSIRYTRELLMYGVCVWFQNDNINTIDEDSELRLTIMSGIAQDESRKLSNRIKFGHAQSIKNGVVLGARIYGYIKKDGKLTVDPKTAPMVKEIFEKYSTGEWSTSTIEKYLYKKGYRNYKGGKLSRDNIKKIIKNPKYKGYYCGGKVKVVDMFTKKQEFLPEDEWTMYKDDGNHVPQIVDESVWNKANVIMQTRSDAIKSHRTSFKQNNLFTGYIFCGNDGAPYWMKQHTIRGREDARWVCSYRIKNGAQSCNSFGIREKELRVMLADLINKSGDIQTAIEKYISLVEKNIDFSNDGAEISRLKNMVLQLEKKKEKLLDLNLDGIITNAEYIEKNEKFKNEIQDISNKLSEMESKEEADKDSHLKLKEIGKILNDLQGIGPEDITKTILGEFLDKIVINPKHPQECEILFFLKTGDVKKKSIIERDKQSCSEYFFLNKFSERHAVFYRKINYVDGCEKEFNYTYAFAI

SEQ ID NO: 1033 - protein, 574 aa, Unknown
  Description of Unknown: Integrase B1034 sequence
  PTHR30461:SF3,IPR036162,PS51737,IPR011109,PTHR30461, PF00239,G3DSA:1.10.10.2600,IPR006119,SSF53041,cd00338, SM00857,IPR025827,IPR038109,PS51736,mobidb-lite, PF13408,G3DSA:3.40.50.1390,PF07508,Coil
MGKKQKANGGDAVIYARYSSHNQRDVSIEQQVEACRKHAAELGLTVTATYEDRAISGKTDKRPSFQRMMRDAEQHKFAYVLAWKSNRIGRNMMQALVNESRLVDCGVKVFYAEEDFDDNAAGRFALRSMMNVNQFYIENMAEDVKRGLYDNAKKGLVNGSLPLGYKRGADGKPEIDESKAAIVREIYTRVAAGELFASIAADLNARGIRTARGREWNKGSFHVLCHNDRYRGIYMYGDIRIPGGMPRIISDELFYDAQEAYGMKKDNRYGRARHGAENYLLTGKLYCGHCGSYMVGISGTSKTGEMHYYYACQKHRLEHTCEKKAIRRDVIENAVARAIMMYCLDDETIDFIVDSTIAYFKQKDHELHIEAMENELAAVQQAISNLMKAIEAGIITPTTRTRLLDLEEQQAKLSAKINTAKAERVEIDRDDLIAGLQLFRTGDIKNKKFLAKLFNTFLLAVYLYDDNRLKIVFSFTGNHNNIEIPLELDNDCPDSESGSYETEVRMSHLECGGSGTVRTNLPPEQPSPFSAPPDEGGVPEFFRHSKCTVRTLGSNVTIQMVGSVFVLYCEIPTR

SEQ ID NO: 1034 - protein, 574 aa, Unknown
  Description of Unknown: Integrase B1035 sequence
  PTHR30461:SF3,IPR036162,PS51737,IPR011109,PTHR30461, PS00397,PF00239,G3DSA:1.10.10.2600,IPR006119,SSF53041, SM00857,IPR025827,IPR038109,PS51736,cd03768, IPR006118,PF13408,G3DSA:3.40.50.1390,PF07508,Coil
MAYNKLSLPGHIRVAIYVRVSTLHQIDRDSLPMQKQDLLAYAKIMLGTDDCVIFEDAGYSGKNTDRPKFQEMMSQIRAGRFTHLLVWKIDRISRNLLDFATMYNELKDLGVVFVSKNEQFDTSTAMGEAMLKIILVFAELERNMTSERVTATMISRANNGLWNGGRVPFGYDWDSEQQIFSINSEECNIVHMIHDLYEDERSLVREARILNAKGYRTRHGNEWSPVSLHIILRNVWYCGDYRYNVLKEGNRQKVKDESEWITVENHHPAIISREQKQRIMSILDSNSRINKKKNNYKSGKYTHIFSGLIFCGSCGSPMGAAPASLRADGWRYSKYSCPTRRKSSTSCVGKSTSDPIVGEFVFNYILNMLNVQRDFQEIASADEMQGRLLTGNTFNYIDRIQEDGLLDLYDVLAKGKVQGAVYGKGANIQPKQENGSEIASLRVEKQKTERALDRLRSLYLYSEDAMSEKEYILERTKLTDKLEELNEEIGIMQSDEWQQSVSDEMFIARASEFIIAQKLTDRNYINYKRLAQSVDAEVLRSFVTSIIDSIFIQDGKVQRITFKNGLSHAFIFKS

SEQ ID NO: 1035 - protein, 574 aa, Unknown
  Description of Unknown: Integrase B1036 sequence
  PTHR30461:SF3,IPR036162,PS51737,IPR011109,PTHR30461, PS00397,PF00239,G3DSA:1.10.10.2600,IPR006119,SSF53041, cd00338,SM00857,IPR025827,IPR038109,PS51736, IPR006118,PF13408,G3DSA:3.40.50.1390,PF07508,Coil
MRKKKIDAPKEKPQRAAIYLRVSTAYQVDRDSLPMQRKDLVGYCEYALNISDYTIFEDAGYSGKNTDRPAFQKMMMQIRNGMYSHLLVWKIDRISRNLLDFAQMYEELKTLGVTFISRNEQFDTSTAMGEAMLKMVLIFAELERKTTAERVTATMISRANDGTWNGGRVPFGYDHNKETQTFSVNGDESFIVLEMYDLYEKTDSLVHTARELNDRGYVSRQHNPFSPVSVWTILRNPWYIGTYRYNYYKIPGRKAIKDESEWVVIPDHHTPLVSKERFDRVQKMLDSNARYRNTPGRSATQKNVNIFSGLIWCACCGAAFTASPGKLHASGYRSAKYGCPNVRKTKTCNAKYTSDTVLGEFLLNFILNVINAQKRFDQIKSPADLEAQLLRGDTFKNVAGIDSASVDALYEMLAEYSPADSVLLKKPTVKKNLDPELRKLRADKRKTERALARLDHIYLYSNKQMSDKEYLIKKNDLMNDLKEQDKSIGLLTSESWAQSLSDDDFLEQASSFIMSQRLQEREYIYFQGLAECTEPSVLRSFFLSIVDSVRMRNGHVETLTFKNGISHKFTYLAI

SEQ ID NO: 1036 - protein, 574 aa, Unknown
  Description of Unknown: Integrase B1037 sequence
  PTHR30461:SF3,SM00857,G3DSA:1.10.10.2600,IPR036162,PF13408, IPR025827,G3DSA:3.40.50.1390,PS51737,IPR006119,IPR038109, PF07508,IPR011109,SSF53041,PTHR30461,Coil, PS51736,cd00338,PF00239
MNVYRTREILKTCSIFDLKLKVAFYARVSTESEDQQVSIHHQDEYYRNFIAQNKNWVFVGAYIDNGISGIRTEKRDEFQRMMADAKTGKIDMIVTKEITRFARNTLDSIRYTRELLMYGVCVWFQNDNINTIDEDSELRLTIMSGIAQDESRKLSNRIKFGHAQSIKNGVVLGSRIYGYIKKDGKLTIDPKTAPMVKEIFEKYSTGEWSTSTIERYLYKKGYRNYKGGKLSRDNIKKIIKNPKYKGYYCGGKVKVVDMFTKKQEFLPEDEWTMYKDDGNHVPQIVDESVWNKANVIMQTRSDAIKSHRTSFKQNNLFTGYIFCGNDGSPYWMKQHTIRGREDARWVCSYRIKNGAQSCNSFGIREKELRVMLADLINKSGDIQTAIEKYISLVEKNIDFSNDGAEINRLKNMILQLEKKKDKLLDLNLDGIITNSEYLEKNERFKDEIQNINNKLSELESKEEANKDSHLKLKEIGKILNDLQGTGPEDITKTVLGEFLDKIVINPKRPQECEILFFLKTGDVKKKSIIERGKQSCSEYFFLNKFSERHTVFYRKINYVDGCEKEFNYTYAFAI

SEQ ID NO: 1037 - protein, 574 aa, Unknown
  Description of Unknown: Integrase B1038 sequence
  PTHR30461:SF3,SM00857,G3DSA:1.10.10.2600,IPR036162,PF13408, PS51737,G3DSA:3.40.50.1390,IPR025827,IPR006119,IPR038109, PF07508,IPR011109,SSF53041,PTHR30461,Coil, PS51736,cd00338,PF00239
MNVYRTREILKTCSIFDLKLKVAFYARVSTESEDQQVSIHHQDEYYRNFIAQNKNWVFVGAYIDNGISGIRTEKRDEFQRMMADAKAGKIDMIVTKEITRFARNTLDSIKYTRELLMYGVCVWFQNDNINTIDEDSELRLTIMSGIAQDESRKLSNRIKFGHAQSIKNGVVLGARIYGYIKKDGKLTIDPKTAPMVKEIFEKYSTGEWSTSTIEKYLYKKGYRNYKGGKLSRDNIKKIIKNPKYKGYYCGGKVKVVDMFTKKQEFLPEDEWTMYKDDGNHVPQIVDESVWNKANVIMQTRSDAIKSHRTSFKQNNLFTGYIFCGNDGAPYWMKQHTIRGREDARWVCSYRIKNGAQSCNSFGIREKELRMMLADLINKSGDIQTAIEKYISLVEKNIDFSNDGAEISRLKNMILQIEKKKDKLLDLNLDGIITNSEYIEKSEKFKDEIESINNKLSELESKEEANKDSHLKLKEIGKILNDLQGVGPEDITKTVLGEFLDKIVINPKRPQECEILFFLKTGDVKKKSIIERDKQGCSEYFFLNKFSERHAVFYRKINYVDGCEKEFNYTYAFAI

SEQ ID NO: 1038 - protein, 574 aa, Unknown
  Description of Unknown: Integrase B1039 sequence
  PTHR30461:SF3,SM00857,G3DSA:1.10.10.2600,IPR036162,PF13408, IPR025827,G3DSA:3.40.50.1390,PS51737,IPR006119,IPR038109, PF07508,IPR011109,SSF53041,PF00239,PTHR30461, PS51736,Coil,cd00338
MNVYRTREILKTCSIFDLKLKVAFYARVSTESEDQQVSIHHQDEYYRNFIAQNKNWVFVGAYIDNGISGIRTEKRDEFQRMMADAKTGKIDMIVTKEITRFARNTLDSIKYTRELLMYGVCVWFQNDNINTIDEDSELRLTIMSGIAQDESRKLSNRIKFGHAQSIKNGVVLGSRIYGYIKKDGKLTVDPKTAPMIKEIFEKYSTGEWSTSTIEKYLYKKGYRNYKGGKLSRDNIKKIIKNPKYKGYYCGGKVKIVDMFTKKQEFLPEDEWTMYKDDGNHVPQIVDESVWEKANVIMQTRSNAIKSHRTSFKQNNLFTGYIFCGNDGAPYWMKQRTARGREDVRWVCSYRIKNGAQSCNSFGIHEKELRIMLADLINKSGDIQTAIERYIGLVEKNIDFSNDGAEINRLKNMIFQIEKKKDRLLDLNLDGIITNSEYLEKSEKFKGEIQNINNKIYELESKEEANKDSHLKLKEIGKTLNDLQGIGPEDITKAVLGEFLDKIIVNPKCPQECEILFFLKTGDVKKKSIIERDKQGCSEYFFLNKFSERHAVFYRKINYVDGCEKEFNYTYAFAI

SEQ ID NO: 1039 - protein, 574 aa, Unknown
  Description of Unknown: Integrase B1040 sequence
  PTHR30461:SF3,SM00857,G3DSA:1.10.10.2600,IPR036162,PF13408, PS51737,G3DSA:3.40.50.1390,IPR025827,IPR006119,IPR038109, PF07508,IPR011109,SSF53041,PTHR30461,Coil, PS51736,cd00338,PF00239
MNVYRTREILKTCSIFDLKLKVAFYARVSTESEDQQVSIHHQDEYYRNFIAQNKNWVFVGAYIDNGISGIRTEKRDEFQRMMADAKTGKIDMIVTKEITRFARNTLDSIKYTRELLMYGVCVWFQNDNINTIDEDSELRLTIMSGIAQDESRKLSNRIKFGHAQSIKNGVVLGSRIYGYIKKDGKLTIDPKTAPMVKEIFEKYSTGEWSTSAIEKYLYKKGYRNYKGGKLSRDNIKKIIKNPKYKGYYCGGKVKIVDMFTKKQEFLPEDEWTMYKDDGNHVPQIVDESVWNKANAIMQTRSDAIKSHRTSFKQNNLFTGYIFCGNDGAPYWMKQHTIRGREDARWVCSYRIKNGAQSCNSFGIREKELRVMLADLINKSGDIQTAIEKYISLVEKNIDFSNDGAEISRLKNMILQIEKKKDKLLDLNLDGIITNSEYIEKSEKFKDEIEIINNKLSELESKEEASKDFHLKLKEIGMILNDLQGVGPEDITKTVLGEFLDKIVINPKHPQECEILFFLKTGDVKKKSITERDKPGCSEYFFLNKFSERHAVFYRKINYVDGCEKEFNYTYAFAI

SEQ ID NO: 1040 - protein, 574 aa, Unknown
  Description of Unknown: Integrase B1041 sequence
  PTHR30461:SF3,SM00857,G3DSA:1.10.10.2600,IPR036162,PF13408, PS51737,G3DSA:3.40.50.1390,IPR025827,IPR006119,IPR038109, PF07508,IPR011109,SSF53041,PF00239,PTHR30461, PS51736,Coil,cd00338
MNVYRTREILKTCSIFDLKLKVAFYARVSTESEDQQVSIHHQDEYYRNFIAKNKNWAFVGAYIDNGISGIRTEKRDEFQRMMADAKTGKIDMIVTKEITRFARNTLDSIRYTRELLMYGVCVWFQNDNINTIDEDSELRLTIMSGIAQDESRKLSNRIKFGHAQSIKNGVVLGARIYGYIKKDGKLTVDPKTAPMVKEIFEKYSTGEWSTSTIEKYLYKKGYRNYKGGKLSRDNIKKIIKNPKYKGYYCGGKVKVVDMFTKKQEFLPEDEWTMYKDDGNHVPQIVDESVWNKANVIMQTRSDAIKSHRTSFKQNNLFTGYIFCGNDGAPYWMKQHTIRGREDARWVCSYRIKNGAQSCNSFGVREKELRVMLADLINKSGDIQAAIEKYISLVEKNIDFSDDWAEISRLKNMVLQLKKKKEKLLDLNLDGIITNSEYLDKSKKFKDEIQNINNKLSELESKEEANKDSHLKLKEIGKILNDLQGIGPEDITKTVLGEFLDKIVINPKHPQECEILFFLKTGDVKKKSIIERDKQSCSEYFFLNKFSERHAVFYRKINYVDGCEKEFNYTYAFAI

SEQ ID NO: 1041 - protein, 574 aa, Unknown
  Description of Unknown: Integrase B1042 sequence
  PTHR30461:SF3,SM00857,G3DSA:1.10.10.2600,IPR036162,PF13408, PS51737,G3DSA:3.40.50.1390,IPR025827,IPR006119,IPR038109, PF07508,IPR011109,SSF53041,PTHR30461,Coil, PS51736,cd00338,PF00239
MNVYHTREILKTCSIFDLKLKVAFYARVSTESEDQQVSIHHQDEYYRNFIAQNKNWVFVGAYIDNGISGIRTEKRDEFQRMMADAKTGKIDMIVTKEITRFARNTLDSIKYTRELLMYGVCVWFQNDNINTIDEDSELRLTIMSGIAQDESRKLSNRIKFGHAQSIKNGVVLGSRIYGYIKKDGKLTVDPKTAPMIKEIFEKYSTGEWSTSTIEKYLYKKGYRNYKGGKLSRDNIKKIIKNPKYKGYYCGGKVKVIDMFTKQQEFLPENEWTMYKDDGNHVPQIVDESVWDKANVIMQTRSNAIKSHRTSFKQNNLFTGYIFCGNDGAPYWMKQHTIRGREDARWVCSYRIKNGAQSCNSFGIREKELRVMLADLINKSGDIQTAIEKYISLVEKNMDFSNDGAEISRLKNMILQIEKKKDRLLDLNLDGIITNSEYLEKSEKFKDEIQNINNKLFELESKEEASKDSHLKLKEIGKTLNDLQGIGPEDITKAVLGEFLDKIIVNPKCPQECEILFFLKTGDVKKKSIIEQGKQGCSEYFFLNKFSERHAVFYRKINYVERYEKEFNYTYAFAI

SEQ ID NO: 1042 - protein, 574 aa, Unknown
  Description of Unknown: Integrase B1043 sequence
  PTHR30461:SF3,cd00338,SM00857,G3DSA:1.10.10.2600,IPR036162, PF13408,IPR025827,G3DSA:3.40.50.1390,PS51737,IPR006119, IPR038109,PF07508,SSF53041,IPR011109,PTHR30461, PS51736,Coil,PF00239
MARKKNIAAGLDAVIYARYSSHNQREVSIEQQIAECTKHAAALGLRIVGTYEDRAISGKTDNRPRFQQMMRDAEKGKFQAVVAWKSNRIGRNMLQAMVNEAKLDDYGVKVFYAEEDFDDTAAGRFALRNMMNVNQFYSENMAEDITRGLYDNANKCMANGRQPLGYKRGADGKVMLDEPAAAVVREIFTRVAAGDLFVDIARDLNAKGIKTSKGATWNKGSFQSICQNERYKGIYIYGNVRIVDGIPRIVSDELWYKVQEAMRMKKNPVGTRHRVGAEDYLLTGKLRCGHCGSYMTGVSGTSRNGELHYYYTCQKRRTEHACNKKNVRRDVIEPAIAQAIKMYCLTDDVIEWVANRTVEYWEKHDNDLHIEALEQQLEENKKATSNMLKAIEMGIITDATRSRMIELETEQSKLAVQLNAAKADVVKIDRDDLIDELQIFRDMDVNNRSVQAELFKDFLVAAYIYDDNRLKLVFSFMGKDNSVEIPLETGEDPPDGEDSPDAKMFVLTPDCSTKKALYFVGSMVLFFFSAAKNGGCTALSASFSDVLQAVQCSPRVIGASAGQRMPVQLTISSI

SEQ ID NO: 1043 - protein, 574 aa, Unknown
  Description of Unknown: Integrase B1044 sequence
  PTHR30461:SF3,cd00338,SM00857,G3DSA:1.10.10.2600,IPR036162, PF13408,PS51737,IPR025827,G3DSA:3.40.50.1390,IPR006119, IPR038109,PF07508,IPR011109,SSF53041,PTHR30461, PS51736,Coil,PF00239
MARKKNIAAGQNAVIYARYSSHNQREVSIEQQVRECMKHAAELGLHVVGTYEDRAISGKTDKRPNFQRMMRDAEKGKFQAVVAWKSNRIGRNMLQAMVNEAKLEDCGVKVFYAEEDFDDTAAGRFALRNMMNVNQFYSENMAEDITRGLYDNASKCMANGRQPLGYKRGEDGRVVLDEANAAVVREIFTRVAAGDLFVDIARDLNAQGIKTSKGANWNKGSFQSICQNERYRGIYIYGDVRVADGIPRIVSDDLWYRVQEAMRMKKNPVGTRHRVGAEDYLLTGKLRCGHCGSYMTGVSGTSRNGELHYYYTCQKRRTEHACDKKNIRRDVIEPAVAQAIKMYCLTDDVIAWIADRTVEYWEKHDNDLQIEALEQQLEENKKATSNMLKAIEMGIITEATRTRMVELETEQSRLSVQLNVAKEDVVKIDREQIISYLELLQQGDIHDRDFQMELFKNFLVAVYVYDDNRMKLVFSCMGDQNSVEIPLETGEDPPDGGLSPDAKMFVLTPDSSTKKALYFVGSMVLFFFSAAKNGGCTALSASFSDVLQAVQCSPRVIGASAGQKVPVQLTISSI

SEQ ID NO: 1044 - protein, 574 aa, Unknown
  Description of Unknown: Integrase B1045 sequence
  PTHR30461:SF3,IPR036162,PS51737,IPR011109,PTHR30461, PS00397,PF00239,G3DSA:1.10.10.2600,IPR006119,SSF53041, cd00338,SM00857,IPR025827,IPR038109,PS51736, IPR006118,PF13408,G3DSA:3.40.50.1390,PF07508,Coil
MRKKKIDAPKEKPQRAAIYLRVSTAYQVDRDSLPMQRKDLVGYCEYALNISDYTIFEDAGYSGKNTDRPAFQKMMMQIRNGMYSHLLVWKIDRISRNLLDFAQMYEELKTLGVTFISRNEQFDTSTAMGEAMLKMVLIFAELERKTTAERVTATMISRANDGTWNGGRVPFGYDYNKETQTFSVNGDESFIVLEMYDLYEKTDSLVHTARELNDRGYVSRQHNPFSPVSVWTILRNPWYIGTYRYNYYKIPGRKAIKDESEWVVIPDHHTPLVSKERFDRVQKMLDSNARYRNTPGRSATQKNVNIFSGLIWCACCGAAFTASPGKLHASGYRSAKYGCPNVRKTKTCNAKYTSDTVLGEFLLNFILNVINAQKSFDQIKSPADLEARLLRGDTFKNVAGIDSASVAALYEMLAEYSPADSVLLKKPTVKKNLDPELRKLRADKRKTERALARLDHIYLYSNKQMSDKEYLIKKNDLMNDLKEQDKSIGLLTSESWAQSLSDDDFLEQASSFIMSQRLQEREYIYFQGLAECTEPSVLRSFFLSIVDSVRMRNGHVETLTFKNGISHKFTYLAI

SEQ ID NO: 1045 - protein, 574 aa, Unknown
  Description of Unknown: Integrase B1046 sequence
  PTHR30461:SF3,cd00338,SM00857,G3DSA:1.10.10.2600,IPR036162, PF13408,PS51737,IPR025827,G3DSA:3.40.50.1390,IPR006119, IPR038109,PF07508,IPR011109,SSF53041,PTHR30461, PS51736,Coil,PF00239
MARKKNIAAGQNAVIYARYSSHNQREVSIEQQVSECMKHAAELGLHVVGTYEDRAISGKTDKRPNFQRMMRDAEKGKFQAVVAWKSNRIGRNMLQAMVNEAKLEDCGVKVFYAEEDFDDTAAGRFALRNMMNVNQFYSENMAEDITRGLYDNASKCMANGRQPLGYKRGEDGRVVLDEANAAVVREIFTRVAAGDLFVDIARDLNAQGIKTSKGANWNKGSFQSICQNERYRGIYIYGDVRVVDGIPRIVSDDLWYRVQEAMRMKKNPVGTRHRVGAEDYLLTGKLRCGHCGSYMTGVSGTSRNGELHYYYTCQKRRTEHACDKKNIRRDVIEPAVAQAIKMYCLTDDVIEWMADRTVEYWEKHDNDLQIEALERQLEENKKATSNMLKAIEMGIITEATRTRMVELETEQSRLSVQLNAAKEDVVKIDREQIISYLELLQQGDIHDRDFQMELFKNFLVAVYVYDDNRMKLVFSCMGDQNSVEIPLETGEDPPDGGLSPDAKMFVLTPDSSTKKALYFVESMVLFFFSAAKNGGCTALPASFSDVLQAVQCSPQVIGASAGQKVPVQLTISSI

SEQ ID NO: 1046 - protein, 574 aa, Unknown
  Description of Unknown: Integrase B1047 sequence
  SM00857,G3DSA:1.10.10.2600,IPR036162,PF13408,IPR025827, PS51737,G3DSA:3.40.50.1390,IPR006119,IPR038109,PF07508, IPR011109,SSF53041,PTHR30461,Coil,cd00338, PF00239
MAYRKITDIRDTIGMRAVFYARVSTAEEEQLNAIELQIEENRGCIKEHGWKLVGEYIDRSKSGTMVKGRDDYQRLYEDLYEDLFDIVVIKDQERLQRNTLDWYLFINRVVQTGKLLFMYMDGKFYSPDDALITGVRAIIAEEFSRNLSKKLHNYHDHRIEKARQGQEIALQGSGNVYGWDKKDGKYYINPEQAKVRRLMCEGIMARKGSTLIAKELNDAGYRNTVGKPWKPMDIPKFVYDCKNVGTMIINKERHDFESKQTIKLPKEEWVYVENALPPIVTQEEWDLICKIHEERVIATGSDRRGKKTSGYSFSGKLVCGICGAPYWRKQRVSKDEYWVCSTKQTKGRRTRKRDSTMGKAGEINPLGCDNENISYNSLMEIMGVVSERLQANTDTIKHDMINWLTKLRKQLLEANGGHTEADLQRELSRKSKLLDAYLDGILNKQEYQTKAEELDERIIQLKAETEKNKANSGDIAEIDKVLANIDEEVSRYVDGNEKLKVEYLLEHLEQVQIFPDKVIVIVPILSEGIVVEKTQYVSREKRCRKDDILPLYYGGKEALSRQLLSGRNRYRGRS

SEQ ID NO: 1047 - protein, 574 aa, Unknown
  Description of Unknown: Integrase B1048 sequence
  PTHR30461:SF3,cd00338,SM00857,G3DSA:1.10.10.2600,IPR036162, PF13408,PS51737,IPR025827,G3DSA:3.40.50.1390,IPR006119, IPR038109,PF07508,IPR011109,SSF53041,PTHR30461, PS51736,Coil,PF00239
MARKKNIAAGQNAVIYARYSSHNQREVSIEQQVRECMKHAAELGLHVVGTYEDRAISGKTDKRPNFQRMMRDAEKGKFQAVVAWKSNRIGRNMLQAMVNEAKLEDCGVKVFYAEEDFDDTAAGRFALRNMMNVNQFYSENMAEDITRGLYDNASKCMANGRQPLGYKRGEDGRVVLDEANAAVVREIFTRVAAGDLFVDIARDLNAQGIKTSKGANWNKGSFQSICQNERYRGIYIYGDVRVADGIPRIVSDDLWYRVQEAMRMKKNPVGTRHRVGAEDYLLTGKLRCGHCGSYMTGVSGTSRNGELHYYYTCQKRRTEHACDKKNIRRDVIEPAVAQAIKMYCLTDDVIAWIADRTVEYWEKHDNDLQIEALEQQLEENKKATSNMLKAIEMGIITEATRTRMVELETEQSRLSVQLNVAKEDVVKIDREQIISYLELLQQGDIHDRDFQMELFKNFLVAVYVYDDNRMKLVFSCMGDQNSVEIPLETGEDPPDGGLSPDAKMFVLTPDSSTKKALYFVGSMVLFFFSAAKNGGCTALPASFSDVLQAVQCSPRVIGASAGQKVPVQLTISSI

SEQ ID NO: 1048 - protein, 574 aa, Unknown
  Description of Unknown: Integrase B1049 sequence
  PTHR30461:SF3,IPR036162,PS51737,IPR011109,PTHR30461, PS00397,PF00239,G3DSA:1.10.10.2600,IPR006119,SSF53041, cd00338,SM00857,IPR025827,IPR038109,PS51736, IPR006118,PF13408,G3DSA:3.40.50.1390,PF07508
MRKKKIDAPKEKPQRAAIYLRVSTAYQVDRDSLPMQRKDLVGYCEYALNISDYTIFEDAGYSGKNTDRPAFQKMMMQIRNGMYSHLLVWKIDRISRNLLDFAQMYEELKMLGVTFISRNEQFDTSTAMGEAMLKMVLIFAELERKTTAERVTATMISRANDGTWNGGRVPFGYDYNKETQTFSVNGDESFIVLEMYDLYEKTDSLVHTARELNDRGYVSRQHNPFSPVSVWTILRNPWYIGTYRYNYYKIPGRKAIKDESEWVVIQDHHTPLVSKERFDRVQKMLDSNARYRNTPGRSATQKNVNIFSGLIWCACCGAAFTASPGKLHASGYRSAKYGCPNVRKTKTCNAKYTSDTVLGEFLLNFILNVINAQKSFDQIKSPADLEARLLRGDTFKNVAGIDSASVAALYEMLAEYSPADSVLLKKPTVKKNLDPELRKLRADKRKTERALTRLDHIYLYSNKQMSDKEYLIKKNDLMNDLKEQDKSIGLLTSESWAQSLSDDDFLEQASSFIMSQRLQEREYIYFQGLAECTEPSVLRSFFLSIVDSVRMRNGHVEMLTFKNGISHKFTYKAI

SEQ ID NO: 1049 - protein, 574 aa, Unknown
  Description of Unknown: Integrase B1050 sequence
  PTHR30461:SF3,SM00857,G3DSA:1.10.10.2600,IPR036162,PF13408, PS51737,G3DSA:3.40.50.1390,IPR025827,IPR006119,IPR038109, PF07508,IPR011109,SSF53041,PTHR30461,Coil, PS51736,cd00338,PF00239
MNVYRTREVLKTCSIFDLKLKVAFYARVSTESEDQQVSIHHQDEYYRNFIAKNKNWAFVGAYIDNGISGIRTEKRDEFQRMMADAKTGKIDMIVTKEITRFARNTLDSIRYTRELLMYGVCVWFQNDNINTIDEDSELRLTIMSGIAQDESRKLSNRIKFGHAQSIKNGVVLGARIYGYIKKDGKLTIDPKTAPMVKEIFEKYSTGEWSTSTIEKYLYKKGYRNYKGGKLSRDNIKKIIKNPKYKGYYCGGKVKVVDMFTKKQEFLPEDEWTMYKDDGNHVPQIVDESVWNKANVIMQTRSNAIKSHRTSFKQNNLFTGYIFCGNDGAPYWMKQHTIRGREDARWVCSYRIKNGAQSCSSFGVREKELRVMLADLINKSGDIQAAIEKYISLVEKNIDFSDDGAEISRLKNMVLQLEKKKEKLLDLNLDGIITNSEYLDKSEKFKDEIQNINNKLSELESKEEANKDSHLKLKEIGKILNDLQGIGPEDITKTVLGEFLDKIVINPKRPQECEILFFLKTGDVKKKSIIERDKQGCSEYFFLNKFSERHAVFYRKINYVDGCEKEFNYTYAFAI

SEQ ID NO: 1050 - protein, 574 aa, Unknown
  Description of Unknown: Integrase B1051 sequence
  PTHR30461:SF3,IPR036162,PS51737,IPR011109,PTHR30461, PS00397,PF00239,G3DSA:1.10.10.2600,IPR006119,SSF53041, cd00338,SM00857,IPR025827,IPR038109,PS51736, IPR006118,PF13408,G3DSA:3.40.50.1390,PF07508,Coil
MRKKKIDAPKEKPQRAAIYLRVSTAYQVDRDSLPMQRKDLVGYCEYALNISDYTIFEDAGYSGKNTDRPAFQKMMMQIRNGMYSHLLVWKIDRISRNLLDFAQMYEELKTLGVTFISRNEQFDTSTAMGEAMLKMVLIFAELERKTTAERVTATMISRANDGTWNGGRVPFGYDYNKETQTFSVNGDESFIVLEMYDLYEKTDSLVHTARELNDRGYVSRQHNPFSPVSVWTILRNPWYIGTYRYNYYKIPGRKAIKDESEWVVIPDHHTPLVSKERFDRVQKMLDSNARYRNTPGRSATQKNVNIFSGLIWCACCGAAFTASPGKLHASGYRSAKYGCPNVRKTKTCNAKYTSDTVLGEFLLNFILNVINAQKRFDQIKSPADLEAQLLRGDTFKNVAGIDSASVDALYEMLAEYSPADSVLLKKPTVKKNLDPELRKLRADKRKTERALARLDHIYLYSNKQMSDKEYLIKKNDLMNDLKEQDKSIGLLTSESWAQSLSDDDFLEQASSFIMSQRLQEREYIYFQGLAECTEPSVLRSFFLSIVDSVRMRNGHVETLTFKNGISHKFTYLAI

SEQ ID NO: 1051 - protein, 574 aa, Unknown
  Description of Unknown: Integrase B1052 sequence
  SM00857,G3DSA:1.10.10.2600,IPR036162,PF13408,IPR025827, G3DSA:3.40.50.1390,PS51737,IPR006119,IPR038109,PF07508, SSF53041,IPR011109,PF00239,PTHR30461,PS51736, Coil,cd00338
MNAVIYARYSSHNQTEQSIEGQLRDCYEYAKRNDLAIIGEYIDRAISGKTDERPDFQRMIKDASKRQFERILVWKLDRFARNRYDSATYKHKLKQYGVKVISAMENVGEGDESVLLEALLEASAEYYSLDLKKKIARGMRESALRGKFVGGTLPWWCRVDDEQKLTVIDERAAIVREAFMRYDSGEGSKSIVSDFAKRGLRSNRGVPVTLSWLLSILKNRKTIGEYTYNGIEIPGGLPAVVDKPLFDRVQDRIARNRRTGGGEARAKTEYLLQGKLFCGLCGSPITAECGQNHKGVVYNYYACSLKKKKHQCKKANERKDFLEWYVVEQTLDYVLTPARTEYIASAIVAEYEREFDKSGIRVLEQKIALTEGEIQKTMDLCIQATTDAMRDRFMKRCEELDAKKADMEIDLSKLRVAASIVYTKDEVCAWLRQFCTGDCFDPAFRRRIIDVFINTVYLYDEKLIIYYNLRDSRQVSYIEAIGASSEIENLLPVPDNKKSAAECSTADGDGGAWQAAYEPFSLFCAVNLVEGDGARLTGIVIGDLDASIVVNENGIDEGLHEALLTLPVLNVQIP

SEQ ID NO: 1052 - protein, 574 aa, Unknown
  Description of Unknown: Integrase B1053 sequence
  PTHR30461:SF3,SM00857,G3DSA:1.10.10.2600,IPR036162,PF13408, IPR025827,G3DSA:3.40.50.1390,PS51737,IPR006119,IPR038109, PF07508,SSF53041,IPR011109,PTHR30461,Coil, PS51736,cd00338,PF00239
MNVYRTREILKTCSIFDLKLKVAFYARVSTESEDQQVSIHHQDEYYRNFIAKNKNWVFVGAYIDNGISGIRTEKRDEFQRMMADAKTGKIDMIVTKEITRFARNTLDSIRYTRELLMYGVCVWFQNDNINTIDEDSELRLTIMSGIAQDESRKLSNRIKFGHAQSIKNGVVLGARIYGYIKKDGKLTVDPKTAPMVKEIFEKYSTGEWSTSTIEKYLYKKGYRNYKGGKLSRDNIKKIIKNPKYKGYYCGGKVKVVDMFTKKQEFLPEDEWTMYKDDGNHVPQIVDESVWNKANVIMQTRSDAIKSHRTSFKQNNLFTGYIFCGNDGAPYWMKQHTIRGREDARWVCSYRIKNGAQSCNSFGIREKELRAMLADLINKSGDIQIAIEKYISLAERNIDFSNDGAEISRLKNMVLQLEKKKDKLLDLNLDGIITNSEYLEKNEKFKNEIQDISNKLSELESKEEANKDSHLKLKEIGKILNDLQGIGPEDITKTVLGEFLDKIVINPKHPQECEILFFLKTGDVKKKSIIERDKQSCSEYFFLNKFSERHAVFYRKINYVDGCEKEFNYTYAFAI

SEQ ID NO: 1053 - protein, 574 aa, Unknown
  Description of Unknown: Integrase B1054 sequence
  PTHR30461:SF3,IPR036162,PS51737,IPR011109,PTHR30461, PS00397,PF00239,G3DSA:1.10.10.2600,IPR006119,SSF53041, cd00338,SM00857,IPR025827,IPR038109,PS51736, IPR006118,PF13408,G3DSA:3.40.50.1390,PF07508
MRKKKIDAPKEKPQRAAIYLRVSTAYQVDRDSLPMQRKDLVGYCEYALNISDYTIFEDAGYSGKNTDRPAFQKMMMQIRNGMYSHLLVWKIDRISRNLLDFAQMYEELKMLGVTFISRNEQFDTSTAMGEAMLKMVLIFAELERKTTAERVTATMISRANDGTWNGGRVPFGYDYNKETQTFSVNGDESFIVLEMYDLYEKTDSLVHTARELNDRGYVSRQHNPFSPVSVWTILRNPWYIGTYRYNYYKIPGRKAIKDESEWVVIQDHHTPLVSKERFGRVQKMLDSNARYRNTPGRSATQKNVNIFSGLIWCACCGAAFTASPGKLHASGYRSAKYGCPNVRKTKTCNAKYTSDTVLGEFLLNFILNVINAQKSFDQIKSPADLEARLLRGDTFKNVAGIDSASVAALYEMLAEYSPADSVLLKKPTVKKNLDPELRKLRADKRKTERALTRLDHIYLYSNKQMSDKEYLIKKNDLMNDLKEQDKSIGLLTSESWAQSLSDDDFLEQASSFIMSQRLQEREYIYFQGLAECTEPSVLRSFFLSIVDSVRMRNGHVEMLTFKNGISHKFTYKAI

SEQ ID NO: 1054 - protein, 574 aa, Unknown
  Description of Unknown: Integrase B1055 sequence
  PTHR30461:SF3,IPR036162,PS51737,IPR011109,PTHR30461, PS00397,PF00239,G3DSA:1.10.10.2600,IPR006119,SSF53041, cd00338,SM00857,IPR025827,IPR038109,PS51736, IPR006118,PF13408,G3DSA:3.40.50.1390,PF07508,Coil
MRKAKENLQKEKPQRAAIYLRVSTSYQADRDSLPMQRKDLVGYCEYALNISDYTVFEDAGYSGKNTDRPAFQKMMMQIRNGMYSHLLVWKIDRISRNLLDFAQMYEELKTLGVTFISRNEQFDTSTAMGEAMLKMVLIFAELERKTTAERVTATMISRANDGTWNGGRVPFGYDYNKETQTFSINGDESYIVLQMYDLYEKTDSLVRTARELNKLGYVSRQHNPFSPVSIWIILRNPWYVGTYRYNYYKIPGRRAVKEESEWVVIENHHSPLVSKERFDHVQKMLDSNARYRNTPGRSSKQKNVNIFSGLIWCSCCGAAFTASPGKLHASGYRPTKYGCPNVRKTKTCNAKYTSDPVIGEFLLNFILNVINAQKGFEKINSPADLESRLLRGDAFRDVAKIDSASVAALYEMLSSFSPADSVLLKKPTIKKNLDPELRKLRADKRKTERALARLDHIYLYSNKQMSDKEYLVKKNDLMTDLKELDKSIGLLTSESWAQSLSDDDFLEQASSFIISQRLQEREYIYFQGLAESTDPAVLRAFFVSIIDSVRMRNGLVEILTFKNGISHTFTYKAI

SEQ ID NO: 1055 - protein, 574 aa, Unknown
  Description of Unknown: Integrase B1056 sequence
  PTHR30461:SF3,SM00857,G3DSA:1.10.10.2600,IPR036162,PF13408, IPR025827,PS51737,G3DSA:3.40.50.1390,IPR006119,IPR038109, PF07508,IPR011109,SSF53041,PF00239,PTHR30461, PS51736,Coil,cd00338
MNVYRTREILKTCSIFDLKLKVAFYARVSTESEDQQVSIHHQDEYYRNFIAQNKNWVFVGAYIDNGISGIRTEKRDEFQRMMADAKAGKIDMIVTKEITRFARNTLDSIRYTRELLMYGVCVWFQNDNINTIDEDSELRLTIMSGIAQDESRKLSNRIKFGHAQSIKNGVVLGSRIYGYIKKDGKLTVDPKTAPMIKEIFEKYSTGEWSTSTIEKYLYKKGYRNYKGGKLSRDNIKKIIKNPKYKGYYCGGKVKVVDMFTKKQEFLPEDEWTMYKDDGNHVPQIVDESVWNKANVIMQTRSDAIKSHRTSFKQNNLFTGYIFCGNDGAPYWMKQRTARGREDVRWVCSYRIKNGAQSCNSFGIHEKELKIMLADLINKSGDIQAAIERYISLVEKNIDFSNDGAEINRLKNMILQLEKKKDKLLDLNLDGIITNSEYLEKNEKFKNEIQDISNKLSELESKEEANKDSHLKLKEIGKTLNGLQGIDPEDITKSVLGEFLDKIIVNPKRPQECEILFFLKTGDVKKKSIIERDKQSCSEYFFLNKFSERHAVFYRKINYVDGCEKEFNYTYAFAI

SEQ ID NO: 1056 - protein, 574 aa, Unknown
  Description of Unknown: Integrase B1057 sequence
  PTHR30461:SF3,SM00857,G3DSA:1.10.10.2600,IPR036162,PF13408, PS51737,G3DSA:3.40.50.1390,IPR025827,IPR006119,IPR038109, PF07508,SSF53041,IPR011109,PTHR30461,Coil, PS51736,cd00338,PF00239
MNVYRTREILKTCSIFDLKLKVAFYARVSTESEDQQVSIHHQDEYYRNFIAQNKNWVFVGAYIDNGISGIRTEKRDEFQRMMADAKTGKIDMIVTKEITRFARNTLDSIRYTRELLMYGVCVWFQNDNINTIDEDSELRLTIMSGIAQDESRKLSNRIKFGHAQSIKNGVVLGARIYGYIKKDGKLTIDPKTAPMVKEIFEKYSTGEWSTSTIEKYLYKKGYRNYKGGKLSRDNIKKIIKNPKYKGYYCGGKVKVVDMFTKKQEFLPEDEWTMYKDDGNHVPQIVDESVWNKANVIMQTRSDAIKSHRTSFKQNNLFTGYIFCGNDGAPYWMKQRTSRGREDVRWVCSYRIKNGAQSCNSFGIREKELRVMLADLINKSGDIQTAIEKYISLVEKNIDFSNDGAEINRLKNMILQIERKKDRLLDLNLDGIITNSEYLEKNEKFKNEIQDINNKLFELESKEEANKDSHLKLKEIGKILNDLQGVGPEDITKTVLGEFLDKIVINPKRPQECEILFFLKTGDVKKKSIIERDRQGCSEYFFLNKFSERHAVFYRKINYVDGCEKEFNYTYAFAI

SEQ ID NO: 1057 - protein, 574 aa, Unknown
  Description of Unknown: Integrase B1058 sequence
  PTHR30461:SF3,SM00857,G3DSA:1.10.10.2600,IPR036162,PF13408, IPR025827,G3DSA:3.40.50.1390,PS51737,IPR006119,IPR038109, PF07508,SSF53041,IPR011109,PTHR30461,Coil, PS51736,cd00338,PF00239
MNVYRTREILKTCSIFDLKLKVAFYARVSTESEDQQVSIHHQDEYYRNFIAQNKNWVFVGAYIDNGISGIRAEKRDEFQRMMADAKAGKIDMIVTKEITRFARNTLDSIRYTRELLMYGVCVWFQNDNINTIDEDSELRLTIMSGIAQDESRKLSNRIKFGHAQSIKNGVVLGSRIYGYIKKDGKLTIDPKTAPMVKEIFEKYSTGEWSTSTIEKYLYKKGYRNYKGGKLSRDNIKKIIKNPKYKGYYCGGKVKIVDMFTKKQEFLPEDEWTMYKDDGNHVPQIVDESVWNKANTIMQTRSDAIKSHRTSFKQNNLFTGYIFCGNDGAPYWMKQHTIRGREDARWVCSYRIKNGAQSCNSFGIREKELKVMLADLINKSGDIQTAIEKYISLVEKNIEFSNDGAEINRLKNMILQLEKKKDKLLDLNLDGIITNSEYIEKSEKFKDEIESINNKLSELESKEEASKDFHLKLKEIGMILNDLQGVGPEDITKTVLGEFLDKIVINPKRPQECEILFFLKTGDVKKKSIIERDKPGCSEYFFLNKFSERHAVFYRKINYVDGCEKEFNYTYAFAI

SEQ ID NO: 1058 - protein, 574 aa, Unknown
  Description of Unknown: Integrase B1059 sequence
  PTHR30461:SF3,IPR036162,PS51737,IPR011109,PTHR30461, PS00397,PF00239,G3DSA:1.10.10.2600,IPR006119,SSF53041, cd00338,SM00857,IPR025827,IPR038109,PS51736, IPR006118,PF13408,G3DSA:3.40.50.1390,PF07508,Coil
MRKKKIDAPKEKPQRAAIYLRVSTAYQVDRDSLPMQRKDLVGYCEYALNISDYTIFEDAGYSGKNTDRPAFQKMMMQIRNGMYSHLLVWKIDRISRNLLDFAQMYEELKMLGVTFISRNEQFDTSTAMGEAMLKMVLIFAELERKTTAERVTATMISRANDGTWNGGRVPFGYDYNKETQTFSVNGDESFIVLEMYDLYEKTDSLVHTARELNDRGYVSRQHNPFSPVSVWTILRNPWYIGTYRYNYYKIPGRKAIKDESEWVVIPDHHTPLVSKERFDRVQKMLDSNARYRNTPGRSATQKNVNIFSGLIWCACCGAAFTASPGKLHASGYRSAKYGCPNVRKTKTCNAKYTSDTVLGEFLLNFILNVINAQKSFDQIKSPADLEARLLRGDTFKNVAGIDSASVAALYEMLAEYSPADSVLLKKPTVKKNLDPELRKLRADKRKTERALARLDHIYLYSNKQMSDKEYLIKKNDLMNDLKEQDKSIGLLTSESWAQSLSDDDFLEQASSFIMSQRLQEREYIYFQGLAECTEPSVLRSFFLSIVDSVRMRNGHVETLTFKNGISHKFTYLAI

SEQ ID NO: 1059 - protein, 574 aa, Unknown
  Description of Unknown: Integrase B1060 sequence
  PTHR30461:SF3,SM00857,G3DSA:1.10.10.2600,IPR036162,PF13408, PS51737,G3DSA:3.40.50.1390,IPR025827,IPR006119,IPR038109, PF07508,IPR011109,SSF53041,PTHR30461,Coil, PS51736,cd00338,PF00239
MNVYRTREILKTCSIFDLKLKVAFYARVSTESEDQQVSIHHQDEYYRNFIAQNKNWVFVGAYIDNGISGIRTEKRDEFQRMMADAKTGKIDMIVTKEITRFARNTLDSIKYTRELLMYGVCVWFQNDNINTIDEDSELRLTIMSGIAQDESRKLSNRIKFGHAQSIKNGVVLGSRIYGYIKKDGKLTVDPKTAPMIKEIFEKYSTGEWSTSTIERYLYKKGYRNYKGGKLSRDNIKKIIKNPKYKGYYCGGKVKVVDMFTKKQEFLPEDEWTMYKDDGNHVPQIVDESVWNKANVIMQTRSDAIKSHRTSFKQNNLFTGYIFCGNDGAPYWMKQRTARGREDVRWVCSYRIKNGAQSCNSFGIHEKELKIMLADLINKSGDIQAAIEKYISLVEKNIDFSNDRAEINRLKNMILQLEKKKDKLLDLNLDGIITNSEYLEKNEKFKNEIQDISNKLSELESKEEANKDSHLKLKEIGKILNDLQGIGPEDITKAVLGEFLDKIIVNPKRPQECEILFFLKTGDVKKKSIIERDEQSCSEYFFLNKFSERHAVFYRKINYVDGCEKEFNYTYAFAI

SEQ ID NO: 1060 - protein, 574 aa, Unknown
  Description of Unknown: Integrase B1061 sequence
  PTHR30461:SF3,SM00857,G3DSA:1.10.10.2600,IPR036162,PF13408, IPR025827,PS51737,G3DSA:3.40.50.1390,IPR006119,IPR038109, PF07508,IPR011109,SSF53041,PTHR30461,Coil, PS51736,cd00338,PF00239
MARKKNIAAGLDAVIYARYSSHNQREVSIEQQIAECTKHAAALGLRIVGTYEDRAISGKTDNRPRFQQMMRDAEKGKFQAVVAWKSNRIGRNMLQAMVNEAKLDDYGVKVFYAEEDFDDTAAGRFALRNMMNVNQFYSENMAEDITRGLYDNANKCMANGRQPLGYKRGADGKVMLDEPAAVVVREIFTRVAAGDLFVDIARDLNAKGIKTSKGATWNKGSFQSICQNERYKGIYIYGNVRIVDGIPRIVSDELWYKVQEAMRMKKNPVGTRHRVGAEDYLLTGKLRCGHCGSYMTGVSGTSRNGELHYYYTCQKRRTEHACNKKNVRRDVIELAIAQAIKMYCLTDDVIEWVANRTVEYWEKHDNDLHIEALEQQLEENKKATSNMLKAIEMGIITDATRSRMIELETEQSKLAVQLNAAKADVVKIDRDDLIDELQIFRDMDVNNRSVQAELFKDFLVAAYIYDDNRLKLVFSFMGKDNSIEIPLETGEDPPDGEDSPDAKMFVLTPDCSTKKALYFVGSMVLFFFSAAKNGGCTALSASFSDVLQAVQCSPRVIGASAGQRMPVQLTISSI

SEQ ID NO: 1061 - protein, 574 aa, Unknown
  Description of Unknown: Integrase B1062 sequence
  PTHR30461:SF3,SM00857,G3DSA:1.10.10.2600,IPR036162,PF13408, PS51737,G3DSA:3.40.50.1390,IPR025827,IPR006119,IPR038109, PF07508,IPR011109,SSF53041,PTHR30461,Coil, PS51736,cd00338,PF00239
MNVYRTREVLRTCSIFDLKLKVAFYARVSTESEDQQVSIHHQDEYYRNFIAQNKNWVFVGAYIDNGISGIRTEKRDEFQRMMADAKTGKIDMIVTKEITRFARNTLDSIKYTRELLMYGVCVWFQNDNINTIDEDSELRLTIMSGIAQDESRKLSNRIKFGHAQSIKNGVVLGSRIYGYIKKDGKLTIDPKTAPMVKEIFEKYSTGEWSTSTIERYLYKKGYRNYKGGKLSRDNIKKIIKNPKYKGYYCGGKVKVVDMFTKKQEFLPEDEWTMYKDDGNHVPQIVDESVWNKANVIMQTRSDAIKSHRTSFKQNNLFTGYIFCGNDGAPYWMKQRTARGREDVRWVCSYRIKNGAQSCNSFGIHEKELKIMLADLINKSGDIQAAIERYISLVEKNIDFSNDGAEISRLKNMILQIEKKKDRLLDLNLDGIITNSEYLEKNERFKDEIQNINNKLSELELKEEANKDSHLKLKEIGKILNDLQGVGPEDITKTVLGEFLDKIVINPKHPQECEILFFLKTGDVKKKSIIERDKQGCSEYFFLNKFSERHAVFYRKINYVDGCEKEFNYTYAFAI

SEQ ID NO: 1062 - protein, 574 aa, Unknown
  Description of Unknown: Integrase B1063 sequence
  PTHR30461:SF3,SM00857,G3DSA:1.10.10.2600,IPR036162,PF13408, IPR025827,G3DSA:3.40.50.1390,PS51737,IPR006119,IPR038109, PF07508,IPR011109,SSF53041,PTHR30461,Coil, PS51736,cd00338,PF00239
MNVYRTREILKTCSIFDLKLKVAFYARVSTESEDQQVSIHHQDEYYRNFIAQNKNWVFVGAYIDNGISGIRTEKRDEFQRMMADAKAGKIDMIVTKEITRFARNTLDSIKYTRELLMYGVCVWFQNDNINTIDEDSELRLTIMSGIAQDESRKLSNRIKFGHAQSIKNGVVLGSRIYGYIKKDGKLTIDPKTAPMVKEIFEKYSTGEWSTSTIEKYLYKKGYRNYKGGKLSRDNIKKIIKNPKYKGYYCGGKVKVVDMFTKKQEFLPEDEWTMYKDDGNHVPQIVDESVWNKANVIMQTRSDAIKSHRTSFKQNNLFTGYIFCGNDGAPYWMKQRTSRGREDVRWVCSYRIKNGAQSCNSFGIHEKELRIMLADLINKSGDIQTAIEKYISLVEKNIDFSNDGAEINRLKNMILQLEKKKDKLLDLNLDGIITNSEYLEKNEIFKDEIQNINNKLSELESKEEANKDSHLKLKEIGKTLNGLQGIGPEDITKTVLGEFLDKIIVNPKRPQECEILFFLKTGDVKKKSIIERDEQSCSEYFFLNKFSERHAVFYRKINYVDGCEKEFNYTYAFAI

SEQ ID NO: 1063 - protein, 574 aa, Unknown
  Description of Unknown: Integrase B1064 sequence
  PTHR30461:SF3,SM00857,G3DSA:1.10.10.2600,IPR036162,PF13408, IPR025827,PS51737,G3DSA:3.40.50.1390,IPR006119,IPR038109, PF07508,SSF53041,IPR011109,PTHR30461,Coil, PS51736,cd00338,PF00239
MNVYRTREILKTCSIFDLKLKVAFYARVSTESEDQQVSIHHQDEYYRNFIAQNKNWVFVGAYIDNGISGIRTEKRDEFQRMMADAKTGKIDMIVTKEITRFARNTLDSIRYTRELLMYGVCVWFQNDNINTIDEDSELRLTIMSGIAQDESRKLSNRIKFGHAQSIKNGVVLGARIYGYIKKDGKLTIDPKTAPMVKEIFEKYSTGEWSTSTIEKYLYKKGYRNYKGGKLSRDNIKKIIKNPKYKGYYCGGKVKVVDMFTKKQEFLPEDEWTMYKDDGNHVPQIVDESVWNKANVIMQTRSDAIKSHRTSFKQNNLFTGYIFCGNDGAPYWMKQHTIRGREDARWVCSYRIKNGAQSCNSFGIRERELRVMLADLINKSGDIQTAIEKYISLVEKNIDFSNDGAEISRLKNMILQIEKKKDKLLDLNLDGIITNSEYIEKSEKFKDEIESINNKLSELESKEEANKDSHLKLKEIGKILNDLQGVGPEDITKTVLGEFLDKIVVNPKCPQECEILFFLKTGDVKKKSIIEQDKQGCSEYFFLNKFSERHAVFYRKINYVDGCEKEFNYTYAFAI

SEQ ID NO: 1064 - protein, 574 aa, Unknown
  Description of Unknown: Integrase B1065 sequence
  PTHR30461:SF3,SM00857,G3DSA:1.10.10.2600,IPR036162,PF13408, PS51737,IPR025827,G3DSA:3.40.50.1390,IPR006119,IPR038109, PF07508,IPR011109,SSF53041,PTHR30461,Coil, PS51736,cd00338,PF00239
MNVYRTREILKTCSIFDLKLKVAFYARVSTESEDQQVSIHHQDEYYRNFIAQNKNWVFVGAYIDNGISGIRTEKRDEFQRMMADAKTGKIDMIVTKEITRFARNTLDSIKYTRELLMYGVCVWFQNDNINTIDEDSELRLTIMSGIAQDESRKLSNRIKFGHAQSIKNGVVLGSRIYGYIKKDGKLTIDPKTAPMVKEIFEKYSTGEWSTSTIEKYLYKKGYRNYKGGKLSRDNIKKIIKNPKYKGYYCGGKVKIVDMFTKKQEFLPEDEWTMYKDDGNHVPQIVDESVWDKANVIMQTRSDAIKSHRTSFKQNNLFTGYIFCGNDGAPYWMKQHTIRGREDARWVCSYRIKNGAQSCNSFGIRERELRVMLADLINKSGDIQTAIEKYISLVEKNIDFSNDGAEISRLKNMILQIEKKKDKLLDLNLDGIITNSEYIEKSEKFKDEIESINNKLSELESKEEASKDFHLRLKEIGMILNDLQGVGPEDITKTVLGEFLDKIVINPKRPQECEILFFLKTGDVKKKSITERGKQSCSEYFFLNKFSERHAVFYRKINYVDGCEKEFNYTYAFAI

SEQ ID NO: 1065 - protein, 574 aa, Unknown
  Description of Unknown: Integrase B1066 sequence
  PTHR30461:SF3,SM00857,G3DSA:1.10.10.2600,IPR036162,PF13408, IPR025827,PS51737,G3DSA:3.40.50.1390,IPR006119,IPR038109, PF07508,IPR011109,SSF53041,PTHR30461,Coil, PS51736,cd00338,PF00239
MNVYRTREILKTCSIFDLKLKVAFYARVSTESEDQQVSIHHQDEYYRNFIAQNKNWVFVGAYIDNGISGIRTEKRDEFQRMMADAKTGKIDMIVTKEITRFARNTLDSIRYTRELLMYGVCVWFQNDNINTIDEDSELRLTIMSGIAQDESRKLSNRIKFGHAQSIKNGVVLGARIYGYIKKDGKLTIDPKTAPMVKEIFEKYSTGEWSTSTIEKYLYKKGYRNYKGGKLSRDNIKKIIKNPKYKGYYCGGKVKVVDMFTKKQEFLPDDEWTMYKDDGNHVPQIVDESVWNKANVIMQTRSDAIKSHRTSFKQNNLFTGYIFCGNDGAPYWMKQRTARGREDVRWVCSYRIKNGAQSCNSFGIHEKELRIMLADLINKSGDIQTAIEKYISLVEKNIDFSNDGAEINRLKNMILQLEKKKDKLLDLNLDGIITNSEYLEKNERFKDEIQNINNKLSELESKEEANKDSHLKLKEIGKTLNGLQGIGPEDITKAVLGEFLDKIIVNPKRPQECEILFFLKTGDVKKKSIIERGKQSCSEYFFLNKFSERHAVFYRKINYVDGCEKEFNYTYAFAI

SEQ ID NO: 1066 - protein, 574 aa, Unknown
  Description of Unknown: Integrase B1067 sequence
  SM00857,G3DSA:1.10.10.2600,IPR036162,PF13408,IPR025827, PS51737,G3DSA:3.40.50.1390,IPR006119,IPR038109,PF07508, SSF53041,IPR011109,PTHR30461,Coil,PS51736, cd00338,PF00239
MAYRKVISLLDTIGLRAVFYARVSTAEEEQLNAIELQIEENRNCISKNKWKKVDEYIDRSKSGTMVKGRDEYQRLYEDLLTDKFDIVVIKDQERLMRNTKDWYLFIDRLVQTGKLLYMYLDNRFYNPDDALITGIRAIIAEEFSRNLSKKLHNYHDGRIEKARQGKEIDLQGSGNVFGWDKKDGKYYINPEQAKVRRLMCEGIMARKGSTQIAKELNDAGYRNTVGKEWKPMDIPKFVYDCKNVGTMVINKERHDFESKQTIKLPEEEWVYVKNALPPIVTEEEWELICKIHDERVVATGSDKRGKGKKVSGYSFSGKLVCGVCGAPYWRKQRSTKEEYWVCSTKQQKGRKTRKRDSVNGKAGELNEAGCDNTNISYNSLMEIMSIISERLQANTELVKADMINKLNSWRKRIIEANRGATEEDLQKELSRKDKLLDALLDGILTKEEYTRKAESIENKIAELKQEIEANKTQFEDIAEIDRVLANIDEEVAIYLNENKQLKVEYILEHLEKVEIYPDKVIVIVPLFDVGFIVDKEQYVSREKRYKIGTEKVIHYLENYRYWNKDIGLYVQLVA

SEQ ID NO: 1067 - protein, 574 aa, Unknown
  Description of Unknown: Integrase B1068 sequence
  PTHR30461:SF3,IPR036162,PS51737,IPR011109,PTHR30461, PS00397,PF00239,G3DSA:1.10.10.2600,IPR006119,SSF53041, SM00857,IPR025827,IPR038109,PS51736,cd03768, IPR006118,PF13408,G3DSA:3.40.50.1390,PF07508,Coil
MAYNKLSLPGHIRVAIYVRVSTLHQIDRDSLPMQKQDLLAYAKIMLGTDDCVIFEDAGYSGKNTDRPKFQEMMSQIRAGGFTHLLVWKIDRISRNLLDFATMYNELKDLGVVFVSKNEQFDTSTAMGEAMLKIILVFAELERNMTSERVTATMISRANNGLWNGGRVPFGYDWDSEQQIFSINSEECNIVHMIHDLYEDERSLVREARILNAKGYRTRHGNEWSPVSLHIILRNVWYCGDYRYNVLKEGNRQKVKDESEWITVENHHPAIISREQKQRIVSILDSNSRINKKKNNYKSGKYTHIFSGLIFCGSCGSPMGAAPASLRADGWRYSKYSCPTRRKSSTSCVGKSTSDPIVGEFVFNYILNMLNVQRDFQEIASADEMQGRLLTGNTFNYIDRIQEDGLLDLYDVLAKGKVQGAVYGKGANIQPKQENGSEIASLRVEKQKTERALDRLRSLYLYSEDAMSEKEYILERTKLTDKLEELNEEIGIMQSDEWQQSVSDEMFIARASEFIIAQKLTDRNYINYKRLAQSVDAEVLRSFVTSIIDSIFIQDGKVQRITFKNGLSHAFIFKS

SEQ ID NO: 1068 - protein, 574 aa, Unknown
  Description of Unknown: Integrase B1069 sequence
  PTHR30461:SF3,SM00857,G3DSA:1.10.10.2600,IPR036162,PF13408, PS51737,G3DSA:3.40.50.1390,IPR025827,IPR006119,IPR038109, PF07508,SSF53041,IPR011109,PTHR30461,Coil, PS51736,cd00338,PF00239
MNVYRTREILKTCSIFDLKLKVAFYARVSTESEDQQVSIHHQDEYYRNFIAKNKNWVFVGAYIDNGISGIRTEKRDEFQRMMADAKTGKIDMIVTKEITRFARNTLDSIRYTRELLMYGVCVWFQNDNINTIDEDSELRLTIMSGIAQDESRKLSNRIKFGHAQSIKNGVVLGARIYGYIKKDGKLTVDPKTAPMVKEIFEKYSTGEWSTSTIEKYLYKKGYRNYKGGKLSRDNIKKIIKNPKYKGYYCGGKVKVVDMFTKKQEFLPEDEWTMYKDDGNHVPQIVDESVWNKANVIMQTRSNAIKSHRTSFKQNNLFTGYIFCGNDGAPYWMKQHTIRGREDARWVCSYRIKNGAQSCNSFGIREKELRVMLADLINKSGDIQAAIEKYISLVEKNIDFSNDGAEISRLKNMVLQLEKKKEKLLDLNLDGIITNAEYLDKSEKFKDEIQNINNKLSELESKEEADKDSHLKLKEIGKILNDLQGIGPEDITKTVLGEFLDKIVINPKRPQECEILFFLKTGDVKKKSIIERDKQGCSEYFFLNKFSERHAVFYRKINYVDGCEKEFNYTYAFAI

SEQ ID NO: 1069 - protein, 574 aa, Unknown
  Description of Unknown: Integrase B1070 sequence
  PTHR30461:SF3,cd00338,SM00857,G3DSA:1.10.10.2600,IPR036162, PF13408,IPR025827,G3DSA:3.40.50.1390,PS51737,IPR006119, IPR038109,PF07508,SSF53041,IPR011109,PTHR30461, PS51736,Coil,PF00239
MARKKNIAAGLDAVIYARYSSHNQREVSIEQQIAECTKHAAALGLRIVGTYEDRAISGKTDNRPRFQQMMRDAEKGKFQAVVAWKSNRIGRNMLQAMVNEAKLDDYGVKVFYAEEDFDDTAAGRFALRNMMNVNQFYSENMAEDITRGLYDNANKCMANGRQPLGYKRGADGKVMLDEPAAAVVREIFTRVAAGDLFVDIARDLNAKGIKTSKGATWNKGSFQSICQNERYKGIYIYGNVRIVDGIPRIVSDELWYKVQEAMRMKKNPVGTRHRVGAEDYLLTGKLRCGHCGSYMTGVSGTSRNGELHYYYTCQKRRTEHACNKKNVRRDVIEPAIAQAIKMYCLTDDVIEWVANRTVEYWEKHDNDLHIEALEQQLEENKKATSNMLKAIEMGIITDATRSRMIELETEQSKLAVQLNAAKADVVKIDRDDLIDELQIFRDMDVNNRSVQAELFKDFLVAAYIYDDNRLKLVFSFMGKDNSVEIPLETGEDPPDGGDSPDAKMFVLTPDCSTKKALYFVGSMVLFFLLKLVFGGLHCFACTVFRLLQAVELRPRDFARWSNLLFYGTAACKKS

SEQ ID NO: 1070 - protein, 574 aa, Unknown
  Description of Unknown: Integrase B1071 sequence
  PTHR30461:SF3,SM00857,G3DSA:1.10.10.2600,IPR036162,PF13408, PS51737,IPR025827,G3DSA:3.40.50.1390,IPR006119,IPR038109, PF07508,IPR011109,SSF53041,PTHR30461,PS51736, cd00338,PF00239
MSKRESKSGQKCLAAEQIGVIYARYSSHNQKEESIEQQIAECSDFAAKNGIRIVGIYADKAVSGRSDRRPNFQRMMRDAEKRHFQIVVAYKSNRIARNMLNALQYEARLDLFGIKTLYAKEEFGNTAAGRFALRTMMNVNQFYSENMGEDIKRGMVDNANECKVNGMLPLGYVKSKEGKYAVAPDEAAVVREIFDSFLKDVPVAEIARSLNQRGIRTKLGREWNKNSFHIMLKNDNYIGVYRHSGVVVEDGIPPILEREVFAAVQEKLANKKKTAGRRSANGEYLLTGKLFCGYCGAYMIGVSGTGENGTVHNYYQCQKRHAENRCEKKNVRRDFIEKLIARLTQDYILQDETIEWIADSTMSFQAVARRQSGITQLERDLADNRKIAKNIMAAIEQGIITETTKARLLEVEGTIRDLERSLSMAKAASQPIERERVVFSLEQMREGNVGSKEHQKKLIDTFVKSVTLWDDRIQIDYYHTPGKHKFSYSLEELTSKVENESNAADVRAESLEVHHCRRELHRFTTAFLLTAAPSRLYGTIKKTQESNSCVFFACIDGCVPQCPARLGIVWSSKR

SEQ ID NO: 1071 - protein, 574 aa, Unknown
  Description of Unknown: Integrase B1072 sequence
  PTHR30461:SF3,SM00857,G3DSA:1.10.10.2600,IPR036162,PF13408, IPR025827,G3DSA:3.40.50.1390,PS51737,IPR006119,IPR038109, PF07508,IPR011109,SSF53041,PTHR30461,Coil, PS51736,cd00338,PF00239
MNVYRTREILKTCSIFDLKLKVAFYARVSTESEDQQVSIHHQDEYYRNFIAQNKNWVFVGAYIDNGISGIRTEKRDEFQRMMADAKTGKIDMIVTKEITRFARNTLDSIKYTRELLMYGVCVWFQNDNINTIDEDSELRLTIMSGIAQDESRKLSNRIKFGHAQSIKNGVVLGARIYGYIKKDGKLTIDPKTAPMVKEIFEKYSTGEWSTSTIEKYLYKKGYRNYKGGKLSRDNIKKIIKNPKYKGYYCGGKVKVVDMFTKKQEFLPEDEWTMYKDDGNHVPQIVDESVWNKANVIMQTRSDAIKSHRTSFKQSNLFTGYIFCGNDGAPYWMKQRTARGREDVRWVCSYRIKNGAQSCNSFGIHEKELRIMLADLINKSGDIQTAIEKYISLVEKNIDFSNDGAEINRLKNMILQLEKKKDKLLDLNLDGIITNSEYLEKNERFKDEIQNINNKLSELESKEEANKDSHLKLKEIGKTLNDLQGIGPEDITKAVLGEFLDKIIVNPKRPQECEILFFLKTGDVKKKSIIERGKQSCSEYFFLNKFSERHAVFYRKINYVDGCEKEFNYTYAFAI

SEQ ID NO: 1072 - protein, 574 aa, Unknown
  Description of Unknown: Integrase B1073 sequence
  PTHR30461:SF3,SM00857,G3DSA:1.10.10.2600,IPR036162,PF13408, PS51737,G3DSA:3.40.50.1390,IPR025827,IPR006119,IPR038109, PF07508,SSF53041,IPR011109,PTHR30461,Coil, PS51736,cd00338,PF00239
MNVYRTREVLKTCSIFDLKLKVAFYARVSTESEDQQVSIHHQDEYYRNFIAKNKNWVFVGAYIDNGISGIRTEKRDEFQRMMADAKTGKIDMIVTKEITRFARNTLDSIRYTRELLMYGVCVWFQNDNINTIDEDSELRLTIMSGIAQDESRKLSNRIKFGHAQSIKNGVVLGARIYGYIKKDGKLTVDPKTAPMVKEIFEKYSTGEWSTSTIEEYLYKKGYRNYKGGKLSRDNIKKIIKNPKYKGYYCGGKVKVVDMFTKKQEFLPEDEWTMYKDDGNHVPQIVDESVWDKANVIMQTRSDAIKSHRTAFKQNNLFTGYIFCGNDGAPYWMKQHTIRGREDARWVCSYRIKNGAQSCNSFGIREKELRVMLADLINKSGDIQTAIEKYISLVEKNIDFSNDGAEINRLKNMILQLEKKKDKLLDLNLDGIITNSEYLEKNEKFKNEIQDISNKLSELESKEEANKDSHLKLKEIGKILNDLQGVGPEDITKTVLGEFLDKIVINPKRPQECEILFFLKTGDVKKKSIIERDKKSCSEYFFLNKFSERHAVFYRKINYVDGCEKEFNYTYAFAI

SEQ ID NO: 1073 - protein, 574 aa, Unknown
  Description of Unknown: Integrase B1074 sequence
  PTHR30461:SF3,SM00857,G3DSA:1.10.10.2600,IPR036162,PF13408, PS51737,G3DSA:3.40.50.1390,IPR025827,IPR006119,IPR038109, PF07508,IPR011109,SSF53041,PF00239,PTHR30461, PS51736,Coil,cd00338
MNVYRTREILKTCSIFDLKLKVAFYARVSTESEDQQVSIHHQDEYYRNFIAKNKNWAFVGAYIDNGISGIRTEKRDEFQRMMADAKTGKIDMIVTKEITRFARNTLDSIRYTRELLMYGVCVWFQNDNINTIDEDSELRLTIMSGIAQDESRKLSNRIKFGHAQSIKNGVVLGARIYGYIKKDGKLTVDPKTAPMVKEIFEKYSTGEWSTSTIEKYLYKKGYRNYKGGKLSRDNIKKIIKNPKYKGYYCGGKVKVVDMFTKKQEFLPEDEWTMYKDDGNHVPQIVDESVWNKANVIMQTRSDAIKSHRTSFKQNNLFTGYIFCGNDGAPYWMKQHTIRGREDARWVCSYRIKNGAQSCNSFGIREKELRVMLADLINKSGDIQTAIEKYISLVEKNIDFSSDGAEINRLKNMILQLEKKKDKLLDLNLDGIITNSEYLEKNEKFKNEIQDISNKLSELESKEEANKDSHLKLKEIGKILNDLQGVGPEDITKTVLGEFLDKIVINPKRPQECEILFFLKTGDVKKKSIIERDKKSCSEYFFLNKFSERHAVFYRKINYVDGCEKEFNYTYAFAI

SEQ ID NO: 1074 - protein, 574 aa, Unknown
  Description of Unknown: Integrase B1075 sequence
  PTHR30461:SF3,SM00857,G3DSA:1.10.10.2600,IPR036162,PF13408, IPR025827,PS51737,G3DSA:3.40.50.1390,IPR006119,IPR038109, PF07508,IPR011109,SSF53041,PTHR30461,Coil, PS51736,cd00338,PF00239
MNVYRTREILKTCSIFDLKLKVAFYARVSTESEDQQVSIHHQDEYYRNFIAQNKNWVFVGAYIDNGISGIRTEKRDEFQRMMADAKAGKIDMIVTKEITRFARNTLDSIKYTRELLMYGVCVWFQNDNINTIDEDSELRLTIMSGIAQDESRKLSNRIKFGHAQSIKNGVVLGSRIYGYIKKDGKLTVDPKTAPMIKEIFEKYSTGEWSTSTIEKYLYKKGYRNYKGGKLSRDNIKKIIKNPKYKGYYCGGKVKIVDMFTKKQEFLPEDEWTMYKDDGNHVPQIVDESVWEKANVIMQTRSNAIKSHRTSFKQNNLFTGYIFCGNDGAPYWMKQRTARGREDVRWVCSYRIKNGAQSCNSFGIHEKELRIMLADLINKSGDIQTAIERYIGLVEKNIDFSNDGAEINRLKNMIFQIEKKKDRLLDLNLDGIITNSEYLEKSEKFKGEIQNINNKIYELESKEEANKDSHLKLKEIGKTLNDLQGIGPEDITKAVLGEFLDKIIVNPKCPQECEILFFLKTGDVKKKSIIERDKQGCSEYFFLNKFSERHAVFYRKINYVDGCEKEFNYTYAFAI

SEQ ID NO: 1075 - protein, 574 aa, Unknown
  Description of Unknown: Integrase B1076 sequence
  PTHR30461:SF3,SM00857,G3DSA:1.10.10.2600,IPR036162,PF13408, IPR025827,G3DSA:3.40.50.1390,PS51737,IPR006119,IPR038109, PF07508,IPR011109,SSF53041,PTHR30461,Coil, PS51736,cd00338,PF00239
MNVYRTREVLKTCSIFDLKLKVAFYARVSTESEDQQVSIHHQDEYYRNFIAKNKNWAFVGAYIDNGISGIRTEKRDEFQRMMADAKTGKIDMIVTKEITRFARNTLDSIRYTRELLMYGVCVWFQNDNINTIDEDSELRLTIMSGIAQDESRKLSNRIKFGHAQSIKNGVVLGARIYGYIKKDGKLTIDPKTAPMVKEIFEKYSTGEWSTSTIEKYLYKKGYRNYKGGKLSRDNIKKIIKNPKYKGYYCGGKVKVVDMFTKKQEFLPEDEWTMYKDDGRHVPQIVDESVWNKANVIMQTRSDAIKSHRTSFKQNNLFTGYIFCGNDGAPYWMKQHTIRGREDARWVCSYRIKNGAQSCNSFGVREKELRVMLADLINKSGDIQAAIEKYISLVEKNIDFSDDGAEISRLKNMVLQLEKKKEKLLDLNLDGIITNSEYLDKSEKFKDEIQNINNKLSELESKEEANKDSHLKLKEIGKILNDLQGIGPEDITKTVLGEFLDKIVINPKRPQECEILFFLKTGDVKKKSIIERDKQGCSEYFFLNKFSERHAVFYRKINYVDGCEKEFNYTYAFAI

SEQ ID NO: 1076 - protein, 574 aa, Unknown
  Description of Unknown: Integrase B1077 sequence
  PTHR30461:SF3,SM00857,G3DSA:1.10.10.2600,IPR036162,PF13408, IPR025827,G3DSA:3.40.50.1390,PS51737,IPR006119,IPR038109, PF07508,SSF53041,IPR011109,PTHR30461,Coil, PS51736,cd00338,PF00239
MNVYRTREILKTCSIFDLKLKVAFYARVSTESEDQQVSIHHQDEYYRNFIAQNKNWVFVGAYIDNGISGIRTEKRDEFQRMMADAKTGKIDMIVTKEITRFARNTLDSIRYTRELLMYGVCVWFQNDNINTIDEDSELRLTIMSGIAQDESRKLSNRIKFGHAQSIKNGVVLGARIYGYIKKDGKLTIDPKTAPMIKEIFEKYSTGEWSTSTIEKYLYKKGYRNYKGGKLSRDNIKKIIKNPKYKGYYCGGKVKVVDMFTKKQEFLPEDEWTMYKDDGNHVPQIVDESVWNKANVIMQTRSDAIKSHRTSFKQNNLFTGYIFCGNDGAPYWMKQHTIRGREDARWVCSYRIKNGAQSCNSFGIREKELRIMLADLINESGDIQTAIEKYISLVEKNMDFSNDGVEISRLKNMILQIEKKKDRLLDLNLDGIITNSEYLEKNEKFKNEIQDISNKLSELESKEEANKDSHLKLKEIGKILNDLQGVGPEDITKTVLGEFLDKIVINPKHPQECEILFFLKTGDVKKKSIIERDKQSCSEYFFLNKFSERHAVFYRKINYVDGCEKEFNYTYAFAI

SEQ ID NO: 1077 - protein, 574 aa, Unknown
  Description of Unknown: Integrase B1078 sequence
  PTHR30461:SF3,cd00338,SM00857,G3DSA:1.10.10.2600,IPR036162, PS51737,G3DSA:3.40.50.1390,IPR006119,IPR038109,PF07508, SSF53041,IPR011109,PTHR30461,PS51736,Coil, PF00239
MKKKIAIYARVSTEHEAQISALENQIQYYDEILKKHPEWELYERYIDEGITGTSIGKRDSFLRMMSDAKDKCFDLIVTREVSRFARNIVDTLQQTRTLKQYGVEVYFTDDNIWTMNDEDGELRLSIMATLAQNESKKTSMRVKAGQMISFKNGVFYGNGNILGYDREGKNLVINPTQALTVKRIFELYLQGNGIRKIQFIMEQEKRKTSLGKTKWSASNIARILKNPFYCGRIEYRKQYVPDYLTQKKINNHGEIERVITKGTHDPIVSEEDFDKVQEIFKTKTTKKDNKKYGKPLADNVWVRKLKCKCGHGMNRKINYVSKITGVKTYSFQCHDQIHTGTIKTRLKKGLSIDGICDNKSFPEWKLEVQADFIFRKLLLNKQEIYETAIEMLESSIAVDTHIQDKKQKIENHIQSIDKLRARNDMLLDMCTDGDISRETFKKKTELNNQNIHELEEKIKLIRKQIKENDTQEDLNKRIECLSAFLKMKCFSKKEKIPESIIEKYVEKIIFYKDDFEWYLRPTIGNVNFLSIDAKNMKKGTHELEKTMCYVPSSTGSDCGKEEIGIDNHIFTSVR

SEQ ID NO: 1078 - protein, 574 aa, Unknown
  Description of Unknown: Integrase B1079 sequence
  PTHR30461:SF3,IPR036162,PS51737,IPR011109,PTHR30461, PS00397,PF00239,G3DSA:1.10.10.2600,IPR006119,SSF53041, cd00338,SM00857,IPR025827,IPR038109,PS51736, IPR006118,PF13408,G3DSA:3.40.50.1390,PF07508,Coil
MRKKKIDAPKEKPQRAAIYLRVSTAYQVDRDSLPMQRKDLVGDCEYALNISDYTIFEDAGYSGKNTDRPAFQKMMMQIRNGMYSHLLVWKIDRISRNLLDFAQMYEELKMLGVTFISRNEQFDTSTAMGEAMLKMVLIFAELERKTTAERVTATMISRANDGTWNGGRVPFGYDYNKETQTFSVNGDESFIVLEMYDLYEKTDSLVHTARELNDRGYVSRQHNPFSPVSVWTILRNPWYIGTYRYNYYKIPGRKAIKDESEWVVIPDHHTPLVSKERFDRVQKMLDSNARYRNTPGRSATQKNVNIFSGLIWCACCGAAFTASPGKLHASGYRSAKYGCPNVRKTKTCNAKYTSDTVLGEFLLNFILNVINAQKSFDQIKSPADLEARLLRGDTFKNVAGIDSASVAALYEMLAEYSPADSVLLKKPTVKKNLDPELRKLRADKRKTERALARLDHIYLYSNKQMSDKEYLIKKNDLMNDLKEQDKSIGLLTSESWAQSLSDDDFLEQASSFIMSQRLQEREYIYFQGLAECTEPSVLRSFFLSIVDSVRMRNGHVETLTFKNGISHKFTYLAI

SEQ ID NO: 1079 - protein, 574 aa, Unknown
  Description of Unknown: Integrase B1080 sequence
  PTHR30461:SF3,SM00857,G3DSA:1.10.10.2600,IPR036162,PF13408, IPR025827,G3DSA:3.40.50.1390,PS51737,IPR006119,IPR038109, PF07508,IPR011109,SSF53041,PF00239,PTHR30461, PS51736,Coil,cd00338
MNVYRTREILKTCSIFDLKLKVAFYARVSTESEDQQVSIHHQDEYYRNFIAKNKNWAFVGAYIDNGISGIRTEKRDEFQRMMADAKTGKIDMIVTKEITRFARNTLDSIRYTRELLMYGVCVWFQNDNINTIDEDSELRLTIMSGIAQDESRKLSNRIKFGHAQSIKNGVVLGSRIYGYIKKDGKLTVDPKTAPMIKEIFEKYSTGEWSTSTIEKYLYKKGYRNYKGGKLSRDNIKKIIKNPKYKGYYCGGKVKVIDMFTKQQEFLPENEWTMYKDDGNHVPQIVDESVWDKANVIMQTRSDAIKSHRTSFKQNNLFTGYIFCGNDGAPYWMKQHTIRGREDARWVCSYRIKNGAQSCNSFGIREKELRVMLADLINKSGDIQTAIEKYISLVEKNMDFSNDGAEISRLKNMILQIEKKKDRLLDLNLDGIITNSEYLEKNDKFKDEIQNINNKIYELESKEEANKDSHLKLKEIGKTLNGLQGIGPEDITKTVLGEFLDKIVINPKRPQECEILFFLKTGDVKKKSIIERDKQGCSEYFSLNKFSERHAVFYRKINYVEGYEKEFNYTYAFAI

SEQ ID NO: 1080 - protein, 574 aa, Unknown
  Description of Unknown: Integrase B1081 sequence
  PTHR30461:SF3,IPR036162,PS51737,IPR011109,PTHR30461, PS00397,PF00239,G3DSA:1.10.10.2600,IPR006119,SSF53041, cd00338,SM00857,IPR025827,IPR038109,PS51736, IPR006118,PF13408,G3DSA:3.40.50.1390,PF07508,Coil
MRKAKENPQKEKPQRAAIYLRVSTSYQADRDSLPMQRKDLVGYCEYALNISDYTVFEDAGYSGKNTDRPAFQKMMMQIRNGMYSHLLVWKIDRISRNLLDFAQMYEELKTLGVTFISRNEQFDTSTAMGEAMLKMVLIFAELERKTTAERVTATMISRANDGTWNGGRVPFGYDYNKETQTFSINGDESYIVLQMYDLYEKTDSLVRTARELNKLGYVSRQHNPFSPVSIWIILRNPWYVGTYRYNYYKIPGRRAVKEESEWVVIENHHSPLVSKERFDHVQKMLDSNARYRNTPGRSSKQKNVNIFSGLIWCSCCGAAFTASPGKLHASGYRPTKYGCPNVRKTKTCNAKYTSDPVIGEFLLNFILNVINAQKGFEKINSPADLESRLLRGDAFRDVAKIDSASVAALYEMLSSFSPADSVLLKKPTVKKDLDPELRKLRADKRKTERALARLDHIYLYSNKQMSDKEYLVKKNDLMTDLKELDKSIGLLTSESWAQSLSDDDFLEQASSFIISQRLQEREYIYFQGLAESTDPAVLRAFFVSIIDSVRMRNGVVEILTFKNGISHTFTYKAI

SEQ ID NO: 1081 - protein, 574 aa, Unknown
  Description of Unknown: Integrase B1082 sequence
  PTHR30461:SF3,IPR036162,PS51737,IPR011109,PTHR30461, PS00397,PF00239,G3DSA:1.10.10.2600,IPR006119,SSF53041, cd00338,SM00857,IPR025827,IPR038109,PS51736, IPR006118,PF13408,G3DSA:3.40.50.1390,PF07508,Coil
MRKKKIDAPKEKPQRAAIYLRVSTAYQIDRDSLPMQRKDLVGYCEYALNISDYTIFEDAGYSGKNTDRPAFQKMMMQIRNGMYSHLLVWKIDRISRNLLDFAQMYEELKMLGVTFISRNEQFDTSTAMGEAMLKMVLIFAELERKTTAERVTATMISRANDGTWNGGRVPFGYDYNKETQTFSVNGDESFIVLEMYDLYEKTDSLVHTARELNDRGYVSRQHNPFSPVSVWTILRNPWYIGTYRYNYYKIPGRKAIKDESEWVVIPDHHTPLVSKERFDRVQKMLDSNARYRNTPGRSATQKNVNIFSGLIWCACCGAAFTASPGKLHASGYRSAKYGCPNVRKTKTCNAKYTSDTVLGEFLLNFILNVINAQKSFDQIKSPADLEARLLRGDTFKNVAGIDSASVAALYEMLAEYSPADSVLLKKPTVKKNLDPELRKLRADKRKTERALARLDHIYLYSNKQMSDKEYLIKKNDLMNDLKEQDKSIGLLTSESWAQSLSDDDFLEQASSFIMSQRLQEREYIYFQGLAECTEPSVLRSFFLSIVDSVRMRNGHVEMLTFKNGISHKFTYKAI

SEQ ID NO: 1082 - protein, 574 aa, Unknown
  Description of Unknown: Integrase B1083 sequence
  PTHR30461:SF3,IPR036162,PS51737,IPR011109,PTHR30461, PS00397,PF00239,G3DSA:1.10.10.2600,IPR006119,SSF53041, cd00338,SM00857,IPR025827,IPR038109,PS51736, IPR006118,PF13408,G3DSA:3.40.50.1390,PF07508,Coil
MRKKKIDAPKEKPQRAAIYLRVSTAYQVDRDSLPMQRKDLVGYCEYALNISDYTIFEDAGYSGKNTDRPAFQKMMMQIRNGMYSHLLVWKIDRISRNLLDFAQMYEELKTLGVTFISRNEQFDTSTAMGEAMLKMVLIFAELERKTTAERVTATMISRANDGTWNGGRVPFGYDYNKETQTFSVNGDESFIVLEMYDLYEKTDSLVHTARELNDRGYVSRQHNPFSPVSVWTILRNPWYIGTYRYNYYKIPGRKAIKDESEWVVIPDHHTPLVSKERFDRVQKMLDSNARYRNTPGRSATQKNVNIFSGLIWCACCGAAFTASPGKLHASGYRSAKYGCPNVRKTKTCNAKYTSDTVLGEFLLNFILNVINAQKRFDQIKSPADLEAQLLRGDTFKNVAGIDSASVAALYEMLAEYSPADSVLLKKPTVKKNLDPELRKLRADKRKTERALARLDHIYLYSNKQMSDKEYLIKKNDLMNDLKEQDKSIGLLTSESWAQSLSDDDFLEQASSFIMSQRLQEREYIYFQGLAECTEPSVLRSFFLSIVDSVRMRNGHVETLTFKNGISHKFTYLAI

SEQ ID NO: 1083 - protein, 574 aa, Unknown
  Description of Unknown: Integrase B1084 sequence
  PTHR30461:SF3,SM00857,G3DSA:1.10.10.2600,IPR036162,PF13408, IPR025827,G3DSA:3.40.50.1390,PS51737,IPR006119,IPR038109, PF07508,IPR011109,SSF53041,PTHR30461,Coil, PS51736,cd00338,PF00239
MNVYRTREILKTCSIFDLKLKVAFYARVSTESEDQQVSIHHQDEYYRNFIAQNKNWVFVGAYIDNGISGIRTEKRDEFQRMMADAKTGKIDMIVTKEITRFARNTLDSIKYTRELLMYGVCVWFQNDNINTIDEDSELRLTIMSGIAQDESRKLSNRIKFGHAQSIKNGVVLGSRIYGYIKKDGKLTIDPKTAPMVKEIFEKYSTGEWSTSTIEKYLYKKGYRNYKGGKLSRDNIKKIIKNPKYKGYYCGGKVKVVDMFTKKQEFLPEDEWTMYKDDGNHVPQIVDESVWNKANVIMQTRSDAIKSHRTSFKQNNLFTGYIFCGNDGAPYWMKQRTARGREDVRWVCSYRIKNGAQSCNSFGIHEKELRIMLADLINKSGDIQTAIEKYISLVEKNIDFSNDGAEINRLKNMILQLEKKKDKLLDLNLDGIITNSEYLEKNERFKDEIQNINNKLSELESKEEANKDSHLKLKEIGKILNDLQGIGPEDITKTVLGEFLDKIVINPKRPQECEILFFLKTGDVKKKSIIERGKQSCSEYFFLNKFSERHAVFYRKINYVDGCEKEFNYTYAFAI

SEQ ID NO: 1084 - protein, 574 aa, Unknown
  Description of Unknown: Integrase B1085 sequence
  PTHR30461:SF3,IPR036162,PS51737,IPR011109,PTHR30461, PS00397,PF00239,G3DSA:1.10.10.2600,IPR006119,SSF53041, cd00338,SM00857,IPR025827,IPR038109,PS51736, IPR006118,PF13408,G3DSA:3.40.50.1390,PF07508,Coil
MRKKKIDAPKEKPQRAAIYLRVSTAYQVDRDSLPMQRKDLVGYCEYALNISDYTIFEDAGYSGKNTDRPAFQKMMMQIRNGMYSHLLVWKIDRISRNLLDFAQMYEELKTLGVTFISRNEQFDTSTAMGEAMLKMVLIFAELERKTTAERVTATMISRANDGTWNGGRVPFGYDYNKETQTFSVNGDESFIVLEMYDLYEKTDSLVHTARELNDRGYVSRQHNPFSPVSVWTILRNPWYIGTYRYNYYKIPGRKAIKDESEWVVIPDHHTPLVSKERFDRVQKMLDSNARYRNTPGRSATQKNVNIFSGLIWCACCGAAFTASPGKLHASGYRSAKYGCPNVRKTKTCNAKYTSDTVLGEFLLNFILNVINAQKRFDQIKSPADLEAQLLRGDTFKNVAGIDSASVDALYEMLAEYSPADSVLLKKPTVKKNLDPELRKLRADKRKTERALARLDHIYLYSNKQMSDKEYLIKKNDLMNDLKEQDKSIGLLTSESWAQSLSDDDFLEQASSFIMSQRLQEREYIYFQGLAECTEPSVLRSFFLSIVDSVRMRNGHVEMLTFKNGISHKFTYKAI

SEQ ID NO: 1085 - protein, 574 aa, Unknown
  Description of Unknown: Integrase B1086 sequence
  PTHR30461:SF3,SM00857,G3DSA:1.10.10.2600,IPR036162,PF13408, IPR025827,G3DSA:3.40.50.1390,PS51737,IPR006119,IPR038109, PF07508,IPR011109,SSF53041,PTHR30461,Coil, PS51736,cd00338,PF00239
MNVYRTREILKTCSIFDLKLKVAFYARVSTESEDQQVSIHHQDEYYRNFIAQNKNWVFVGAYIDNGISGIRTEKRDEFQRMMADAKAGKIDMIVTKEITRFARNTLDSIRYTRELLMYGVCVWFQNDNINTIDEDSELRLTIMSGIAQDESRKLSNRIKFGHAQSIKNGVVLGSRIYGYIKKDGKLTVDPKTAPMIKEIFEKYSTGEWSTSTIEKYLYKKGYRNYKGGKLSRDNIKKIIKNPKYKGYYCGGKVKVVDMFTKKQEFLPEDEWTMYKDDGNHVPQIVDESVWNKANVIMQTRSDAIKSHRTSFKQNNLFTGYIFCGNDGAPYWMKQHTIRGREDARWVCSYRIKNGAQSCNSFGIREKELRAMLADLINKSGDIQTAIEKYISLVEKNIDFSNDGAEINRLKNMVLQIEKKKDKLLDLNLDGIITNSEYLEKSEKFKDEIQDISNKLSELESKEEANKDSHLKLKEIGKILNDLQGVGPEDITKTVLGEFLDKIVINPKRPQECEILFFLKTGDVKKKSIIERDKQGCSEYFFLNKFSERHAVFYRKINYVDGCEKEFNYTYAFAI

SEQ ID NO: 1086 - protein, 574 aa, Unknown
  Description of Unknown: Integrase B1087 sequence
  PTHR30461:SF3,SM00857,G3DSA:1.10.10.2600,IPR036162,PF13408, IPR025827,G3DSA:3.40.50.1390,PS51737,IPR006119,IPR038109, PF07508,SSF53041,IPR011109,PTHR30461,Coil, PS51736,cd00338,PF00239
MNVYRTREILKTCSIFDLKLKVAFYARVSTESEDQQVSIHHQDEYYRNFIAKNKNWVFVGAYIDNGISGIRTEKRDEFQRMMADAKTGKIDMIVTKEITRFARNTLDSIRYTRELLMYGVCVWFQNDNINTIDEDSELRLTIMSGIAQDESRKLSNRIKFGHAQSIKNGVVLGARIYGYIKKDGKLTVDPKTAPMVKEIFEKYSTGEWSTSTIEKYLYKKGYRNYKGGKLSRDNIKKIIKNPKYKGYYCGGKVKVVDMFTKKQEFLPEDEWTMYKDDGNHVPQIVDESVWDKANVIMQTRSDAIKSHRTSFKQNNLFTGYIFCGNDGAPYWMKQHTIRGREDARWVCSYRIKNGAQSCNSFGIREKELRAMLADLINKSGDIQIAIEKYISLAERNIDFSNDGAEISRLKNMVLQLEKKKDKLLDLNLDGIITNSEYLDKSEKFKDEIQNINNKLSELESKEEANKDSHLKLKEIGKILNDLQGIGPEDITKTVLGEFLDKIVINPKRPQECEILFFLKTGDVKKKSIIERDKQGCSEYFFLNKFSERHAVFYRKINYVDGCEKEFNYTYAFAI

SEQ ID NO: 1087 - protein, 574 aa, Unknown
  Description of Unknown: Integrase B1088 sequence
  PTHR30461:SF3,SM00857,G3DSA:1.10.10.2600,IPR036162,PF13408, PS51737,G3DSA:3.40.50.1390,IPR025827,IPR006119,IPR038109, PF07508,SSF53041,IPR011109,PTHR30461,Coil, PS51736,cd00338,PF00239
MNVYRTREILKTCSIFDLKLKVAFYARVSTESEDQQVSIHHQDEYYRNFIAQNKNWVFVGAYIDNGISGIRTEKRDEFQRMMADAKTGKIDMIVTKEITRFARNTLDSIRYTRELLMYGVCVWFQNDNINTIDEDSELRLTIMSGIAQDESRKLSNRIKFGHAQSIKNGVVLGARIYGYIKKDGKLTIDPKTAPMIKEIFEKYSTGEWSTSTIEKYLYKKGYRNYKGGKLSRDNIKKIIKNPKYKGYYCGGKVKVVDMFTKKQEFLPEDEWTMYKDDGNHVPQIVDESVWNKANVIMQTRSDAIKSHRTSFKQNNLFTGYIFCGNDGAPYWMKQRTARGREDVRWVCSYRIKNGAQSCNSFGIHEKELKIMLADLINKSGDIQAAIERYISLVEKNIDFSNDGAEINRLKNMILQLEKKKDKLLDLNLDGIITNSEYLEKNEKFKNEIQDISNKLSELESKEEANKDSHLKLKEIGKTLNGLQGIDPEDITKSVLGEFLDKIIVNPKRPQECEILFFLKTGDVKKKSIIERDKQSCSEYFFLNKFSERHAVFYRKINYVDGCEKEFNYTYAFAI

SEQ ID NO: 1088 - protein, 574 aa, Unknown
  Description of Unknown: Integrase B1089 sequence
  PTHR30461:SF3,IPR036162,PS51737,IPR011109,PTHR30461, PS00397,PF00239,G3DSA:1.10.10.2600,IPR006119,SSF53041, cd00338,SM00857,IPR025827,IPR038109,PS51736, IPR006118,PF13408,G3DSA:3.40.50.1390,PF07508,Coil
MRKAKENLQKEKPQRAAIYLRVSTSYQADRDSLPMQRKDLVGYCEYALNISDYTVFEDAGYSGKNTDRPAFQKMMMQIRNGMYSHLLVWKIDRISRNLLDFAQMYEELKTLGVTFISRNEQFDTSTAMGEAMLKMVLIFAELERKTTAERVTATMISRANDGTWNGGRVPFGYDYNKETQTFSINGDESYIVLQMYDLYEKTDSLVRTARELNKLGYVSRQHNPFSPVSIWIILRNPWYVGTYRYNYYKIPGRRAVKEESEWVVIENHHSPLVSKERFDRVQKMLDSNARYRNTPGRSSKQKNVNIFSGLIWCSCCGAAFTASPGKLHASGYRPTKYGCPNVRKTKTCNAKYTSDPVIGEFLLNFILNVINAQKGFEKINSPADLESRLLRGDAFRDVAKIDSASVAALYEMLSSFSPADSVLLKKPTVKKDLDPELRKLRADKRKTERALARLDHIYLYSNKQMSDKEYLVKKNDLMTDLKELDKSIGLLTSESWAQSLSDDDFLEQASSFIISQRLQEREYIYFQGLAESTDPAVLRAFFVSIIDSVRMRNGLVETLTFKNGISHTFTYKAI

SEQ ID NO: 1089 - protein, 574 aa, Unknown
  Description of Unknown: Integrase B1090 sequence
  PTHR30461:SF3,IPR036162,PS51737,IPR011109,PTHR30461, PS00397,PF00239,G3DSA:1.10.10.2600,IPR006119,SSF53041, cd00338,SM00857,IPR025827,IPR038109,PS51736, IPR006118,PF13408,G3DSA:3.40.50.1390,PF07508,Coil
MRKAKENLQKEKPQRAAIYLRVSTSYQADRDSLPMQRKDLVGYCEYALNISDYTVFEDAGYSGKNTDRPAFQKMMMQIRNGMYSHLLVWKIDRISRNLLDFAQMYEELKTLGVTFISRNEQFDTSTAMGEAMLKMVLIFAELERKTTAERVTATMISRANDGTWNGGRVPFGYDYNKETQTFSINGDESYIVLQMYDLYEKTDSLVRTARELNKLGYVSRQHNPFSPVSIWIILRNPWYVGTYRYNYYKIPGRRAVKEESEWVVIENHHSPLVSKERFDHVQKMLDSNARYRNTPGRSSKQKNVNIFSGLIWCSCCGAAFTASPGKLHASGYRPTKYGCPNVRKTKTCNAKYTSDPVIGEFLLNFILNVINAQKGFEKINSPADLESRLLRGDAFRDVAKIDSASVAALYEMLSSFSPADSVLLKKPTVKKDLDPELRKLRADKRKTERALARLDHIYLYSNKQMSDKEYLVKKNDLMTDLKELDKSIGLLTSESWAQSLSDDDFLEQASSFIISQRLQEREYIYFQGLAESTDPAVLRAFFVSIIDSVRMRNGVVETLTFKNGISHTFTYKAI

SEQ ID NO: 1090 - protein, 574 aa, Unknown
  Description of Unknown: Integrase B1091 sequence
  PTHR30461:SF3,SM00857,G3DSA:1.10.10.2600,IPR036162,PF13408, PS51737,G3DSA:3.40.50.1390,IPR025827,IPR006119,IPR038109, PF07508,IPR011109,SSF53041,PTHR30461,Coil, PS51736,cd00338,PF00239
MNVYRTREILKTCSIFDLKLKVAFYARVSTESEDQQVSIHHQDEYYRNFIAQNKNWVFVGAYIDNGISGIRTEKRDEFQRMMADAKTGKIDMIVTKEITRFARNTLDSIRYTRELLMYGVCVWFQNDNINTIDEDSELRLTIMSGIAQDESRKLSNRIKFGHAQSIKNGVVLGSRIYGYIKKDGKLTIDPKTAPMVKEIFEKYSTGEWSTSTIERYLYKKGYRNYKGGKLSRDNIKKIIKNPKYKGYYCGGKVKVVDMFTKKQEFLPEDEWTMYKDDGNHVPQIVDESVWNKANVIMQTRSDAIKSHRTSFKQNNLFTGYIFCGDDGAPYWMKQRTARGREDARWVCSYRIKNGAQSCNSFGIREKELRVMLADLINKSGDIQTAIEKYISLAEKNIDFSNDGAEINRLKNMILQLEKKKDKLLDLNLDGIITNSEYLEKNEKFKNEIQNISNKLSELESKEEANKDSHLKLKEIGKILNDLQGVGPEDITKTVLGEFLDKIVINPKRPQECEILFFLKTGDVKKKSIIGRDKQGCSEYFFLNKFSERHAVFYRKINYVDGCEKEFNYTYAFAI

SEQ ID NO: 1091 - protein, 574 aa, Unknown
  Description of Unknown: Integrase B1092 sequence
  PTHR30461:SF3,SM00857,G3DSA:1.10.10.2600,IPR036162,PF13408, IPR025827,PS51737,G3DSA:3.40.50.1390,IPR006119,IPR038109, PF07508,IPR011109,SSF53041,PTHR30461,Coil, PS51736,cd00338,PF00239
MNVYRTREILKTCSIFDLKLKVAFYARVSTESEDQQVSIHHQDEYYRNFIAQNKNWVFVGAYIDNGISGIRTEKRDEFQRMMADAKTGKIDMIVTKEITRFARNTLDSIKYTRELLMYGVCVWFQNDNINTIDEDSELRLTIMSGIAQDESRKLSNRIKFGHAQSIKNGVVLGSRIYGYIKKDGKLTVDPKTAPMIKEIFEKYSTGEWSTSTIEKYLYKKGYRNYKGGKLSRDNIKKIIKNPKYKGYYCGGKVKVVDMFTKKQEFLPEDEWTMYKDDGNHVPQIVDESVWNKANVIMQTRSDAIKSHRTSFKQNNLFTGYIFCGDDGAPYWMKQRTARGREDVRWVCSYRIKNGAQSCNSFGIHEKELKIMLADLINKSGDIQAAIERYISLVEKNIDFSNDGAEINRLKNMILQLEKKKDKLLDLNLDGIITNSEYLEKNEKFKNEIQDISNKLSELESKEEANKDSHLKLKEIGKILNDLQGIGPEDITKAVLGEFLDKIIVNPKRPQECEILFFLKTGDVKKKSIIERDEQSCSEYFFLNKFSERHAVFYRKINYVDGCEKEFNYTYAFAI

SEQ ID NO: 1092 - protein, 574 aa, Unknown
  Description of Unknown: Integrase B1093 sequence
  PTHR30461:SF3,SM00857,G3DSA:1.10.10.2600,IPR036162,PF13408, IPR025827,G3DSA:3.40.50.1390,PS51737,IPR006119,IPR038109, PF07508,SSF53041,IPR011109,PTHR30461,Coil, PS51736,cd00338,PF00239
MNVYRTREVLKTCSIFDLKLKVAFYARVSTESEDQQVSIHHQDEYYRNFIAKNKNWVFVGAYIDNGISGIRTEKRDEFQRMMADAKTGKIDMIVTKEITRFARNTLDSIRYTRELLMYGVCVWFQNDNINTIDEDSELRLTIMSGIAQDESRKLSNRIKFGHAQSIKNGVVLGARIYGYIKKDGKLTIDPKTAPMVKEIFEKYSTGEWSTSTIEKYLYKKGYRNYKGGKLSRDNIKKIIKNPKYKGYYCGGKVKVVDMFTKKQEFLPEDEWTMYKDDGNHVPQIVDESVWDKANVIMQTRSDAIKSHRTSFKQNNLFTGYIFCGNDGAPYWMKQHTIRGREDARWVCSYRIKNGAQSCNSFGIREKELRAMLADLINKSGDIQIAIEKYISLAERNIDFSNDGAEISRLKNMVLQLEKKKDKLLDLNLDGIITNSEYLEKNEKFKNEIQDISNKLSELESKEEANKDSHLKLKKIGKILNDLQGVGPEDITKTVLGEFLDKIVINPKRPQECEILFFLKTGDVKKKSIIEQDKQGCSEYFFLNKFSERHAVFYRKINYVDGCEKEFNYTYAFAI

SEQ ID NO: 1093 - protein, 574 aa, Unknown
  Description of Unknown: Integrase B1094 sequence
  PTHR30461:SF3,IPR036162,PS51737,IPR011109,PTHR30461, PS00397,PF00239,G3DSA:1.10.10.2600,IPR006119,SSF53041, cd00338,SM00857,IPR025827,IPR038109,PS51736, IPR006118,PF13408,G3DSA:3.40.50.1390,PF07508
MRKKKIDAPKEKPQRAAIYLRVSTAYQVDRDSLPMQRKDLVGYCEYALNISDYTIFEDAGYSGKNTDRPAFQKMMMQIRNGMYSHLLVWKIDRISRNLLDFAQMYEELKMLGVTFISRNEQFDTSTAMGEAMLKMVLIFAELERKTTAERVTATMISRANDGTWNGGRVPFGYDYNKETQTFSVNGDESFIVLEMYDLYEKTDSLVHTARELNERGYVSRQHNPFSPVSVWTILRNPWYIGTYRYNYYKIPGRKAIKDESEWIVIPDHHTPLVSKERFDRVQKMLDSNARYRNTPGRSATQKNVNIFSGLIWCACCGAAFTASPGKLHASGYRSAKYGCPNVRKTKTCNAKYTSDTVLGEFLLNFILNVTNAQKSFDQIKSPADLESRLLRGDTFKNVAGIDSASVAALYEMLVEYSPADSVLLKKPTVKKNLDPELRKLRADKRKTERALTRLDHIYLYSNKQMSDKEYLIKKNDLMNDLKEQDKSIGLLTSESWAQSLSDDDFLEQASSFIMSQRLQEREYIYFQGLAECTEPSVLRSFFLSIVDSVRMRNGHVEMLTFKNGISHKFTYKAI

SEQ ID NO: 1094 - protein, 574 aa, Unknown
  Description of Unknown: Integrase B1095 sequence
  PTHR30461:SF3,cd00338,SM00857,G3DSA:1.10.10.2600,IPR036162, PF13408,IPR025827,G3DSA:3.40.50.1390,PS51737,IPR006119, IPR038109,PF07508,SSF53041,IPR011109,PTHR30461, PS51736,Coil,PF00239
MGKKQKTNGGDAVIYARYSSHNQRDVSIEQQVEACRKHAAELGLTVTATYEDRAISGKTDKRPSFQRMMRDAEQHKFAYVLAWKSNRIGRNMMQALVNESRLVDCGVKVFYAEEDFDDNAAGRFALRSMMNVNQFYIENMAEDVKRGLYDNAKKGLVNGSLPLGYKRGADGKPEIDEPKAAIVREIYTRVAAGELFASIAADLNARGIRTARGREWNKGSFHVLCHNDRYRGIYMYGDIRIPGGMPRIISDELFYDAQEAYGMKKDNRYGRARHGAENYLLTGKLYCGHCGSYMVGISGTSKTGEMHYYYACQKHRLEHTCEKKAIRRDVIENAVARVIMMYCLDDETIDFIVDSTIAYFKQKDHELHIEAMENELAAVHQAISNLMKAIEAGIITPTTRTRLLDLEEQQAKLSAKINTAKAERVEIDRDDLIAGLQLFRTGDIKNKKFLAKLFNTFLLAVYLYDDNRLKIVFSFTGNHNNIEIPLELDNDCPDSESGPYETEVRMSHLECRKNSGTPPSSGGAEKGDGCSGGRFVRTAPLPPHSKCTVRTLGSNVTIQMVGSVFVLYCEIPTR

SEQ ID NO: 1095 - protein, 574 aa, Unknown
  Description of Unknown: Integrase B1096 sequence
  PTHR30461:SF3,SM00857,G3DSA:1.10.10.2600,IPR036162,PF13408, IPR025827,PS51737,G3DSA:3.40.50.1390,IPR006119,IPR038109, PF07508,IPR011109,SSF53041,PTHR30461,Coil, PS51736,cd00338,PF00239
MNVYRTREILKTCSIFDLKLKVAFYARVSTESEDQQVSIHHQDEYYRNFIAQNKNWVFVGAYIDNGISGIRTEKRDEFQRMMADAKTGKIDMIVTKEITRFARNTLDSIKYTRELLMYGVCVWFQNDNINTIDEDSELRLTIMSGIAQDESRKLSNRIKFGHAQSIKNGVVLGARIYGYIKKDGKLTIDPKTAPMVKEIFEKYSTGEWSTSTIEKYLYKKGYRNYKGGKLSRDNIKKIIKNPKYKGYYCGGKVKVVDMFTKKQEFLPEDEWTMYKDDGNHVPQIVDESVWNKANVIMQTRSDAIKSHRTSFKQNNLFTGYIFCGNDGAPYWMKQRTSRGREDVRWVCSYRIKNGAQSCNSFGIHEKELRIMLADLINKSGDIQTAIEKYISLVEKNIDFSNDGAEINRLKNMILQLEKKKDKLLDLNLDGIITNSEYIEKSEKFKDEIESINNKLSELESKEEANKDSHLKLKEIGKILNDLQGVGPEDITKTVLGEFLDKIVINPKRPQECEILFFLKTGDVKKKSIIERDKQGCSEYFFLNKFSERHAVFYRKINYVDGCEKEFNYTYAFAI

SEQ ID NO: 1096 - protein, 574 aa, Unknown
  Description of Unknown: Integrase B1097 sequence
  PTHR30461:SF3,IPR036162,PS51737,IPR011109,PTHR30461, PF00239,G3DSA:1.10.10.2600,IPR006119,SSF53041,cd00338, SM00857,IPR025827,IPR038109,PS51736,mobidb-lite, PF13408,G3DSA:3.40.50.1390,PF07508,Coil
MGKKQKTNGGDAVIYARYSSHNQRDVSIEQQVEACRKHAAELGLTVTATYEDRAISGKTDKRPSFQRMMRDAEQHKFAYVLAWKSNRIGRNMMQALVNESRLVDCGVKVFYAEEDFDDNAAGRFALRSMMNVNQFYIENMAEDVKRGLYDNAKKGLVNGSLPLGYKRGADGKPEIDEPKAAIVREIYTRVAAGELFASIADDLNARGIKTARGREWNKGSFHVLCHNDRYRGIYMYGDIRIPGGMPRIISDELFYDAQEAYSMKKDNRYGRARHGAENYLLTGKLYCGHCGGYMVGISGTSKTGEMHYYYACQKHRLEHTCEKKAIRRDVIENAVARAIMMYCLDDETIDFIVDSTIAYFKQKDHELHIEAMENELAAVQQAISNLMKAIEAGIITPTTRTRLLDLEEQQAKLSAKINTAKAERVEIDRDDLIAGLQLFRTGDIKNKKFLAKLFNTFLIAVYLYDDNRLKIVFSFTGNHNSVEIPLELDNDCPDSEIVSDETEVRMSHLECGGSGAVRTNLPPEQPSPFSAPPDEGGVPESFRHSKCTVRTLGSNVTIQMVGSVFVLYCEIPTR

SEQ ID NO: 1097 - protein, 574 aa, Unknown
  Description of Unknown: Integrase B1098 sequence
  PTHR30461:SF3,SM00857,G3DSA:1.10.10.2600,IPR036162,PF13408, IPR025827,PS51737,G3DSA:3.40.50.1390,IPR006119,IPR038109, PF07508,SSF53041,IPR011109,PF00239,PTHR30461, PS51736,Coil,cd00338
MNVYRTREILKTCSIFDLKLKVAFYARVSTESEDQQVSIHHQDEYYRNFIAKNKNWVFVGAYIDNGISGIRTEKRDEFQRMMADAKTGKIDMIVTKEITRFARNTLDSIRYTRELLMYGVCVWFQNDNINTIDEDSELRLTIMSGIAQDESRKLSNRIKFGHAQSIKNGVVLGSRIYGYIKKDGKLTVDPKTAPMIKEIFEKYSTGEWSTSTIEKYLYKKGYRNYKGGKLSRDNIKKIIKNPKYKGYYCGGKVKIVDMFTKKQEFLPEDEWTMYKDDGNHVPQIVDESVWEKANVIMQTRSNAIKSHRTSFKQNNLFTGYIFCGNDGAPYWMKQRTARGREDVRWVCSYRIKNGAQSCNSFGIHEKELRIMLADLINKSGDIQTAIERYIGLVEKNIDFSNDGAEINRLKNMIFQIEKKKDRLLDLNLDGIITNSEYLEKSEKFKGEIQNINNKIYELESKEEANKDSNLKLKEIGKTLNDLQGIGPEDITKAVLGEFLDKIIVNPKCPQECEILFFLKTGDVKKKSIIERDKQGCSEYFFLNKFSERHAVFYRKINYVDGCEKEFNYTYAFAI

SEQ ID NO: 1098 - protein, 573 aa, Unknown
  Description of Unknown: Integrase B1099 sequence
  PTHR30461:SF3,IPR036162,PS51737,IPR011109,PTHR30461, PS00397,PF00239,G3DSA:1.10.10.2600,IPR006119,SSF53041, SM00857,IPR025827,IPR038109,PS51736,cd03768, IPR006118,PF13408,G3DSA:3.40.50.1390,PF07508,Coil
MAYNAQNKTGAKVAIYVRVSTLHQIDRDSLPMQKQDLLAYAKLMLNTDDCVIFEDAGYSGKNTDRPKFQEMMSQMRARAFTHLLVWKIDRISRNLLDFATMYNELKALGVTFVSKNEQFDTSTAMGEAMLKIILVFAELERNMTSERVTATMISRANNGLWNGGRIPYGYNYDYETHEFSINEEESKVVILMHDMYEQERSLVRVVRELNERGYRSRAGNLWSPVSLLIILRNVFYCGDYRYNMLKEGDRQKVKDESEWVTVPNHHVGIVPREQKERIMATLDSNSKLCKQRNLYKSAKHTHVFGGLIYCGSCGKPLGSTPGNLTRDGWHYSKYTCPTRRKSVTLCTGKSTSDPIIGEFVFNYILNMLNAQNDFDKISSPEELEKLLLIGDTFAYIDHIEPNGLNDLFNVLSSGAVKGAVFGKGASLPTKKATVEPEVARLRNEKQKTERALDRLRSLYLYADEAMSEAEYMIQKNKLEETLEDINDQIGMMNTDSWQQSVSDEEFIQRASEFIIAQKLSGRKYVNYKRLAMSVDSEVLKNFVVSIIDSITIQDGLVSNIVFKNGLCHTFIFR

SEQ ID NO: 1099 - protein, 573 aa, Unknown
  Description of Unknown: Integrase B1100 sequence
  PTHR30461:SF3,SM00857,G3DSA:1.10.10.2600,IPR036162,PF13408, IPR025827,G3DSA:3.40.50.1390,PS51737,IPR006119,IPR038109, PF07508,SSF53041,IPR011109,PF00239,PTHR30461, PS51736,Coil,cd00338
MAKVKLPDKPRVAIYTRVSTLHQIDKDSLPMQRQDLINYARLILNTEDYVVYEDAGYSGKNTDRPKFQEMMQQVRLGMFTHILVWKIDRISRNLLDFATMYSELKQLGVVFVSKNEQFDTSSAMGEAMLKIILIFAELERNMTSERVTAAMLSRAANGQWNGGRVPLGYDYDPETKTFTINESEAAVVKIIHDKYEQERSLVSLARYLNGHGYRTRTGCTYSPSTLLIILRNVFYCGDYRYNVLKDGDRQKRKKESEWITVKDHHPAIISREQKEEIARILKENRRLECERRGIYSKKKNVHVFGGLVICGNCGHAMTSTIRPADQDGIRWSVYVCPTKRRSEYLCKGRATSEVVLGEFVFNYILNMLNVQKNFDSINSVEDMEKMLLSGSTFRDVDGIERAGLDDLYNMLASGLTEKAPFDSSVEVRKKPVVSDIELENLNTEKTRIERAAERLQNLYLYSDDSISQKDYIIQREKLMSQLAEVNEQIGMVMSNADEKDVSDEEFVHAASKFILTQKLEGRTYIYYKRLATTVSREVLRSFVMSIIENITIYDGQVQTIVFKNGLSHTFILK

SEQ ID NO: 1100 - protein, 573 aa, Unknown
  Description of Unknown: Integrase B1101 sequence
  PTHR30461:SF3,IPR036162,PS51737,IPR011109,PTHR30461, PS00397,PF00239,G3DSA:1.10.10.2600,IPR006119,SSF53041, SM00857,IPR025827,IPR038109,PS51736,cd03768, IPR006118,PF13408,G3DSA:3.40.50.1390,PF07508,Coil
MVLNNIKPAMKIRVAIYIRVSTLHQIDKDSLPMQRKDLIAYSKLILNTDDYVIFEDAGYSGKNTIRPRYQDMMDQIRTGAFTHLLVWKIDRISRNLLDFAQMYQELKELNVTFVSKSEQFDTSTAMGEAMLKIILVFAELERNMTSERVTATMISRANTGKWNGGRVPYGYKYDQEEEDFLIIASESNVVKLIHDKYEELQSLVYLARYMNEHGYRTRSGNEWSPPSLAIILKSWWYCGCYEYNKRKAGNRQKLKDESEWIMIEDHHIAIISYEQKERVLAILKGNKRFATEHNLYVKGIHVHVFGGLCWCKNCGKKMTSTSSNKNRSWQYSKYLCSTRRRSLTKCRGRSTSDPVLGEFIFNYILNMLNAQKGFDSIHSPADLQDALLTGDAFSDIKSIDQEELNDLYNILSSSVVGNIYGRSFNVNKAKKNDEVQSSLTILKAEKKKLDRALDRLTNLYLYDDMAISEKDYMTKKTEIETKIAEIDEKIGIVNKNSVDNSITDEEFVDKASTFIITQKLTNRNYISYKRLATSVDPKILYMFTHDVIDYIDIYNGKVQRIVFRNGLSQTFIR

SEQ ID NO: 1101 - protein, 573 aa, Unknown
  Description of Unknown: Integrase B1102 sequence
  PTHR30461:SF3,SM00857,G3DSA:1.10.10.2600,IPR036162,PF13408, PS51737,IPR025827,G3DSA:3.40.50.1390,IPR006119,IPR038109, PF07508,SSF53041,IPR011109,PTHR30461,PS51736, cd00338,PF00239
MAKRSAKKNEYQSAEQIGVIYARYSSHNQKEESIEQQIAECSDFAAKNGIRIVGIYADKAVSGRSDRRPNFQRMMRDAEKRQFQIVVAYKSNRIARNMLNALQYEARLDLLGIKTLYAKEEFGNTAAGRFALRTMMNVNQFYSENMGEDIKRGMVDNANECKVNGMLPLGYVKSKEGKYAIAPDEAAVVREIFDSVLKDVPVAEIARSLNQRGIHTKLGREWNKNSFHIMLKNDNYIGVYRHSGVVVEDGIPPILEKEVFTAVQEKLANKKKTAGRRSANGEYLLTGKLFCGYCGSYMIGVSGTGENGTVHNYYQCQKRHAEGRCEKKNVRRDFIEKLIARLTQDYILQDDTIEWIADSTMSFQAMARRESGVAQLERDLADNRKVAKNIMAAIEQGIITETTKARLLEVEGTIRDLERSLSVAKAAMQPIERERVVFSLEQMREGNVGSKEHQKKLIDTFVKSVTLWDDRIQIDYYHTPGKHKFSYSLEELTSKAENESNASDVRTDSLELHHCRRELHRFTTAFLLAAAPSRLHGTIKKTQESNSCVFFACIDGCVPQCPARLGIVWSSKR

SEQ ID NO: 1102 - protein, 573 aa, Unknown
  Description of Unknown: Integrase B1103 sequence
  PTHR30461:SF3,cd00338,SM00857,G3DSA:1.10.10.2600,IPR036162, PF13408,PS51737,G3DSA:3.40.50.1390,IPR025827,IPR006119, IPR038109,PF07508,SSF53041,IPR011109,PTHR30461, PS51736,Coil,PF00239
MSSVDKIAVVYARYSSHGQTEQSIEGQIAAAQKYAEQHGYTIIHVYADRAMTGRNDDREQFQKMLSDTAMHQFGVILLWKIDRFGRNREEIAFNRYRCKKNGVRVERVAEDVPDGPEGVILDSVLEGMAEYYSLQLAQNVRRGQRESAKKSMSIGGNKMLGYIVNPETKRYESDPKTASYVTEIFKRYANGETISEIVAWLNAQGIRTTRGSEFTVNSLHRLLKNEKYTGVYIFHDIRNEGGMPALTDRTTFDKVQEMLKVNRRAPARVWSKTEYLLTDKLFCGHCGAMMVGESGHGRNGIKHSYYTCLNRKKKKSCDKKPVRQDVIESLVLRAIGKLLENPATLENIADQVWAAYERSDTSGDAIKALDKQIADVDRALSNVMKAIEMGIINEMTKTRMDELTNQKQALSTARAEAGLAEGFKLTRDMILFFLQEISALDMADRDSQKRLIKTFVNAIYLYDDHFDIAFNYTDNGNVVVRMREINDAARGEMFGRCAQCPTKKDPQLRLRVLFCAGAGRIRTGRPSADGKKQSCGLFFRPRLANPPAPTKKLWQRYCRSFFLCCIAQNRQRR

SEQ ID NO: 1103 - protein, 573 aa, Unknown
  Description of Unknown: Integrase B1104 sequence
  PTHR30461:SF3,SM00857,G3DSA:1.10.10.2600,IPR036162,PF13408, IPR025827,PS51737,G3DSA:3.40.50.1390,IPR006119,IPR038109, PF07508,SSF53041,IPR011109,PF00239,PTHR30461, PS51736,Coil,cd00338
MDLYTVRNNIMKGVPLQELNLRVCFYARVSTDKDEQLHSLSNQISFFNDYISKVPNWEFIGSYIDEGISGTQVKKREEFLRMIEDAKRHKFDLILTKEISRFSRSTLDSIMYTQELLSNGVGVYFLNDNINTILPDSELRLTMMSSIAQDEVRKLSERVSFGMKRSIDNGVVLGCSNIYGYVKDKGKLVIDDEQAKMIKIIFDRYANTTDGLSKVSRYLYSLGYKSKTGKRIDTTILTRIIENPKYKGYYCGHKSKVLDYRTKQKKRLNESDWIIYKDYDNVPPIVSEELWERANIKLKQRQDSFTNRAVNKKVFQNRYTYSGKIYCGCHNLTYHRSSAGKRKNNPVWECQVYRKESLKGCSNPRVFEIELEEVFKDVFNKLLKKRNTIFDEIINECKNYLETNNSESDIKSLESKILVLNNKKDKLLELVMEEYLSKEDYKKQIDLINEDLNTYHNKINELKNNKKDKNYIENKINEIKNALEKCLEDNECYSDIFNELIDKIIVHKQNDKQIKLDIFIKTGESINTLSDSLGKKFHLLDSYTTSNSGIRCCQWGKTISTIHIKKYLRKRNG

SEQ ID NO: 1104 - protein, 573 aa, Unknown
  Description of Unknown: Integrase B1105 sequence
  PTHR30461:SF3,IPR036162,PS51737,IPR011109,PTHR30461, PS00397,PF00239,G3DSA:1.10.10.2600,IPR006119,SSF53041, SM00857,IPR025827,IPR038109,PS51736,cd03768, IPR006118,PF13408,G3DSA:3.40.50.1390,PF07508,Coil
MAYNAQNKTGARVAIYVRVSTLHQIDRDSLPMQKQDLLAYAKLMLNTDDCVIFEDAGYSGKNTDRPKFQEMMSQMRAGAFTHLLVWKIDRISRNLLDFATMYNELKALGVTFVSKNEQFDTSTAMGEAMLKIILVFAELERNMTSERVTATMISRANNGLWNGGRIPFGYDYDYETHEFSVNEEESKVVILMHDMYEQERSLVRVVRELNERGYRSRAGNLWSPVSLLIILRNVFYCGDYRYNMLKEGDRQKVKDESEWVTVENHHVAIIPKDQKERIMATLDSNSKLCKQRNIYKSSKHTHVFGGLIYCGSCGKPLGSTPGNLTRDGWHYSKYTCPTRRKSVTLCTGKSTSDPIIGEFVFNYILNMLNAQNDFEKISSPEELEKLLLIGDTFAYIDHIEPNGLNDLFNVLSSGAVKGAVFGKGASLPTKKATVEPEVARLRNEKQKTERALDRLRSLYLYADEAMSEAEYMIQKNKLEETLEDINDQIGMMNTDSWQQSVSDEEFIQRASEFIIAQKLSGRKYVNYKRLAMSVDSEVLKNFVVSIIDSITIQDGLVSNIVFKNGLCHTFIFR

SEQ ID NO: 1105 - protein, 573 aa, Unknown
  Description of Unknown: Integrase B1106 sequence
  PTHR30461:SF3,SM00857,G3DSA:1.10.10.2600,IPR036162,PS51737, G3DSA:3.40.50.1390,IPR006119,IPR038109,PF07508,IPR011109, SSF53041,PTHR30461,Coil,PS51736,cd00338, PF00239
MYDIYNQKPTSRKVVIYARVSTEHEAQLSALENQKDWYKPILQQHPEWDIVKMYVDEGITGTSAKKRPQFMQMIQDASSGNFDLILTREVSRFARNTVDTLQYTRELKSKGVEVFFLNDNIKTFDGDGELRLTIMATLAQDESRKTSVRVKSGQQTSMENGVFYGNGNILGYDRVGKDMVINPEQAKTVRMIFDWYLDGWGMRKIQFELEKAGRLTAMGKSNWHVSNISKILRNSFYCGIITYHKEFTPDFLEQKKIRNFGDMEFTQVRGNHKPIITEEEYDQAQKRINSRRKTLSVDTSGQRMYGEKPPSDVWVKLLECECGHKFNRKMWHNTTKGKQYGYQCYSSIRTGTVRTRLNKGLPIDGICQTPMIAGWKLQMMAKYIFKNYLSDTDQVLSLAESMLEKHIDDEEEVCDNTDIINQKKEELQKLSKRLDNLIEMRADGELTRDIFILKKESTENSISQLKKELAELEPSEIESEIDEVTSKEKITILKYALDQYTNFDSDADIPESVIEAFVEKIIARKDGFDWYLRFNPEESPMGCLVDGKRKRGAKVSSFCSPQHRQLSLRRMHN

SEQ ID NO: 1106 - protein, 573 aa, Unknown
  Description of Unknown: Integrase B1107 sequence
  PTHR30461:SF3,cd00338,SM00857,G3DSA:1.10.10.2600,IPR036162, PF13408,PS51737,G3DSA:3.40.50.1390,IPR025827,IPR006119, IPR038109,PF07508,SSF53041,IPR011109,PTHR30461, PS51736,Coil,PF00239
MAKVKLPDKPRVAIYTRVSTLHQIDKDSLPMQRQDLINYARLILNTEDYVVYEDAGYSGKNTDRPKFQEMMQQVRLGMFTHILVWKIDRISRNLLDFATMYSELKQLGVVFVSKNEQFDTSSAMGEAMLKIILIFAELERNMTSERVTAAMLSRAANGQWNGGRVPLGYDYDPETKTFTINESEAAVVKIIHDKYEQERSLVSLARYLNGHGYRTRTGCTYSPSTLLIILRNVFYCGDYRYNVLKDGDRQKRKKESEWITVKDHHPAIISREQKDEIERILKENRRLECERRGIYSKKKNVHVFGGLVICGNCGHAMTSTIRPADQDGIRWSVYVCPTKRRSEYLCKGRATSEVVLGEFVFNYILNMLNVQKNFDSINSVEDMEKMLLSGSTFRDVDGIERSGLDDLYNMLASGLTEKAPFDSSVEVRKKPVVSDIELENLNMEKSKIERAAERLQNLYLYSDDSISQKDYIVQREKLMSQLAEVNEQIGMVMSNADEKDVSDEEFVHAASKFILTQKLEGRTYIYYKRLATTVSREVLRSFVMSIIENITIYDGRVQTIVFKNGLSHTFILK

SEQ ID NO: 1107 - protein, 573 aa, Unknown
  Description of Unknown: Integrase B1108 sequence
  PTHR30461:SF3,IPR036162,PS51737,IPR011109,PTHR30461, PS00397,PF00239,G3DSA:1.10.10.2600,IPR006119,SSF53041, SM00857,IPR025827,IPR038109,PS51736,cd03768, IPR006118,PF13408,G3DSA:3.40.50.1390,PF07508,Coil
MAYNTQNKTGARVAIYVRVSTLHQIDRDSLPMQKQDLLAYAKLMLNTDDCVIFEDAGYSGKNTDRPKFQEMMSQMRAGAFTHLLVWKIDRISRNLLDFATMYNELKALGVTFVSKNEQFDTSTAMGEAMLKIILVFAELERNMTSERVTATMISRANNGLWNGGRIPYGYDYDYETHEFSVNEEESKVVILMHDMYEQERSLVRVVRELNERGYRSRAGNLWSPVSLLIILRNVFYCGDYRYNMLKEGDRQKVKDESEWVTVENHHVAIIPKDQKERIMATLDSNSKLCKQRNIYKSSKHTHVFGGLIYCGSCGKPLGSTPGNLTRDGWHYSKYTCPTRRKSVTLCTGKSTSDPIIGEFVFNYILNMLNAQNDFDKISSPEELEKLLLIGDTFAYIDHIESNGLNDLFNVLSSGTVKGAVFGKGASLPTKKATVEPEVARLRNEKQKTERALDRLRSLYLYADEAMSEAEYMIQKNKLEETLEDINDQIGMMNTDSWQQSVSDEEFIQRASEFIIAQKLSGRKYVNYKRLAMSVDSEVLKNFVVSIIDSITIQDGLVSNIVFKNGLCHTFIFR

SEQ ID NO: 1108 - protein, 573 aa, Unknown
  Description of Unknown: Integrase B1109 sequence
  PTHR30461:SF3,IPR036162,PS51737,IPR011109,PTHR30461, PS00397,PF00239,G3DSA:1.10.10.2600,IPR006119,SSF53041, SM00857,IPR025827,IPR038109,PS51736,cd03768, IPR006118,PF13408,G3DSA:3.40.50.1390,PF07508,Coil
MAYNAQNKTGARVAIYVRVSTLHQIDRDSLPMQKQDLLAYAKLMLNTDDCVIFEDAGYSGKNTDRPKFQEMMSQMRAGAFTHLLVWKIDRISRNLLDFATMYNELKALGVTFVSKNEQFDTSTAMGEAMLKIILVFAELERNMTSERVTATMISRANNGLWNGGRIPYGYDYDYETHEFSVNEEESKVVILMHDMYEQERSLVRVVRELNERGYRSRAGNLWSPVSLLIILRNVFYCGDYRYNMLKEGDRQKVKDESEWVTVENHHVAIIPKDQKERIMATLDSNSKLCKQRNIYKSSKHTHVFGGLIYCGSCGKPLGSTPGNLTRDGWHYSKYTCPTRRKSVTLCTGKSTSDPIIGEFVFNYILNMLNAQNDFDKISSPEELEKLLLIGDTFAYIDHIESNGLNDLFNVLSSGTVKGAVFGKGASLPTKKATVEPEVARLRNEKQKTERALDRLRSLYLYADEAMSEAEYMIQKNKLEETLEDINDQIGMMNTDSWQQSVSDEEFIQRASEFIIAQKLSGRKYVNYKRLAMSVDSEVLKNFVVSIIDSITIQDGLVSNIVFKNGLCHTFIFR

SEQ ID NO: 1109 - protein, 573 aa, Unknown
  Description of Unknown: Integrase B1110 sequence
  PTHR30461:SF3,cd00338,SM00857,G3DSA:1.10.10.2600,IPR036162, PF13408,IPR025827,PS51737,G3DSA:3.40.50.1390,IPR006119, IPR038109,PF07508,SSF53041,IPR011109,PTHR30461, PS51736,Coil,PF00239
MPHPAVALDKKPVCGYYSRKRVFCEVVLMHGAYILARYSTDRQNEDSIEVQVSACRKWCDERSLPVLDVFADEATSGMKDTRPQYARMMRQLDRGGADTVVIYDQSRMFRKMSAWFDFRDRLARQGVRVVSVTQPMIGGDLRDPANFVAEGSMALFNQMWVLQTRQKVVAKMRYMAEQGLHTGGTPPLGYKVVDGRLAIDTAEAETVRLIFGLYASGMTYREIIRRLNAEGRHTKRGGNFGVNSLHDLLKNPKYVGDLIYGKVAKRPDGSRNSHTAAEDAIVVKDVLPAIVDRETWEKVQLKMQENKRSAAGRPASAREYPLKGKVFCRECKSAMLVTASNRGAKRYYYYACAAKHRKGLCDNTPISAGTLETLVADAVRQRLGQPGNVEGLIRILREQRSKLSGSAVQRLRELQKRDKEISKQLDAAVAAVLAGLHSPTLTAKVNALEAERAKIAHDMQQLRAQVSGAEIDEPHLRELLALAMQDDAAVLSIVVRVEVGKDEIAVWTLLDADPNGDFDFAEDGVPITPSEVAPSYNNSGCPATGTTNYYNIVTPAGLLLFYIARPRQRDRRS

SEQ ID NO: 1110 - protein, 573 aa, Unknown
  Description of Unknown: Integrase B1111 sequence
  PTHR30461:SF3,IPR036162,PS51737,IPR011109,PTHR30461, PS00397,PF00239,G3DSA:1.10.10.2600,IPR006119,SSF53041, SM00857,IPR025827,IPR038109,PS51736,cd03768, IPR006118,PF13408,G3DSA:3.40.50.1390,PF07508,Coil
MAYNAQNKTGARVAIYVRVSTLHQIDRDSLPMQKQDLLAYAKLMLNTDDCVIFEDAGYSGKNTDRPKFQEMMSQMRAGAFTHLLVWKIDRISRNLLDFATMYNELKALGVTFVSKNEQFDTSTAMGEAMLKIILVFAELERNMTSERVTATMISRANNGLWNGGRIPYGYDYDYETHEFSVNEEESKVVILMHDMYEQERSLVRVVRELNERGYRSRAGNLWSPVSLLIILRNVFYCGDYRYNMLKEGDRQKVKDESEWVTVENHHVAIIPKDQKERIMATLDSNSKLCKQRNIYKSSKHTHVFGGLIYCGSCGKPLGSTPGNLTRDGWHYSKYTCPTRRKSVTLCTGKSTSDPIIGEFVFNYILNMLNAQNDFDKINSPEELEKLLLIGDTFAYIDHIESNGLNDLFNVLSSGTVKGAVFGKGASLPTKKATVEPEVARLRNEKQKTERALDRLRSLYLYADEAMSEAEYMIQKNKLEETLEDINDQIGMMNTDSWQQSVSDEEFIQRASEFIIAQKLSGRKYVNYKRLAMSVDSEVLKNFVVSIIDSITIQDGLVSNIVFKNGLCHTFIFR

SEQ ID NO: 1111 - protein, 573 aa, Unknown
  Description of Unknown: Integrase B1112 sequence
  PTHR30461:SF3,IPR036162,PS51737,IPR011109,PTHR30461, PS00397,PF00239,G3DSA:1.10.10.2600,IPR006119,SSF53041, SM00857,IPR025827,IPR038109,PS51736,cd03768, IPR006118,PF13408,G3DSA:3.40.50.1390,PF07508,Coil
MAYNAQNKTGARVAIYVRVSTLHQIDRDSLPMQKQDLLAYAKLMLNTDDCVIFEDAGYSGKNTDRPKFQEMMSQMRAGAFTHLLVWKIDRISRNLLDFATMYNELKALGVTFVSKNEQFDTSTAMGEAMLKIILVFAELERNMTSERVTATMISRANNGLWNGGRIPYGYDYDYETHEFSVNEEESKVVILMHDMYEQERSLVRVVRELNERGYRSRAGNLWSPVSLLIILRNVFYCGDYRYNMLKEGDRQKVKDESEWVTVENHHVAIIPKDQKERIMATLDSNSKLCKQRNIYKSSKHTHVFGGLIYCGSCGKPLGSTPGNLTRDGWHYSKYTCPTRRKSVTLCTGKSTSDPIIGEFVFNYILNMLNAQNDFDKISSPEELEKLLLIGDTFAYIDHIEPNGLNDLFNVLSSGTVKGAVFGKGASLPTKKATVEPEVARLRNEKQKTERALDRLRNLYLYADEAMSEAEYMIQKNKLEETLEDINDQIGMMNTDSWQQSVSDEEFIQRASEFIIAQKLSGRKYVNYKRLAMSVDSEVLKNFVVSIIDSITIQDGLVSNIVFKNGLCHTFIFR

SEQ ID NO: 1112 - protein, 573 aa, Unknown
  Description of Unknown: Integrase B1113 sequence
  PTHR30461:SF3,IPR036162,PS51737,IPR011109,PTHR30461, PS00397,PF00239,G3DSA:1.10.10.2600,IPR006119,SSF53041, SM00857,IPR025827,IPR038109,PS51736,cd03768, IPR006118,PF13408,G3DSA:3.40.50.1390,PF07508,Coil
MAYNAQSKTGARVAIYVRVSTLHQIDRDSLPMQKQDLLAYAKLMLNTDDCVIFEDAGYSGKNTDRPKFQEMMSQMRAGAFTHLLVWKIDRISRNLLDFATMYNELKALGVTFVSKNEQFDTSTAMGEAMLKIILVFAELERNMTSERVTATMISRANNGLWNGGRIPFGYDYDYETHEFSVNEEESKVVILMHDMYEQERSLVRVVRELNERGYRSRAGNLWSPVSLLIILRNVFYCGDYRYNMLKEGDRQKVKDESEWVTVENHHVAIIPKDQKERIVATLDSNSKLCKQRNIYKSSKHTHVFGGLIYCGSCGKPLGSTPGNLTRDGWHYSKYTCPTRRKSVTLCTGKSTSDPIIGEFVFNYILNMLNAQNDFEKISSPEELEKLLLIGDTFAYIDHIEPNGLNDLFNVLSSGAVKGAVFGKGASLPTKKATVEPEVARLRNEKQKTERALDRLRSLYLYADEAMSEAEYMIQKNKLEETLEDINDQIGMMNTDSWQQSVSDEEFIQRASEFIIAQKLSGRKYVNYKRLAMSVDSEVLKNFVVSIIDSITIQDGLVSNIVFKNGLCHTFIFR

SEQ ID NO: 1113 - protein, 573 aa, Unknown
  Description of Unknown: Integrase B1114 sequence
  PTHR30461:SF3,SM00857,G3DSA:1.10.10.2600,IPR036162,PF13408, IPR025827,PS51737,G3DSA:3.40.50.1390,IPR006119,IPR038109, PF07508,IPR011109,SSF53041,PF00239,PTHR30461, PS51736,Coil,cd00338
MAKVKLPDKPRVAIYTRVSTLHQIDKDSLPMQRQDLINYARLILNTEDYVVYEDAGYSGKNTDRPKFQEMMQQVRLGMFTHILVWKIDRISRNLLDFATMYSELKQLGVVFVSKNEQFDTSSAMGEAMLKIILIFAELERNMTSERVTAAMLSRAANGQWNGGRVPLGYDYDPETKTFTINESEAAVVKIIHDKYEQERSLVSLARYLNGHGYRTRTGCTYSPSTLLIILRNIFYCGDYRYNVLKDGDRQKRKKESEWITVKDHHPAIISREQKEEIARILKENRRLECERRGIYSKKKNVHVFGGLVICGNCGHAMTSTIRPADQDGIRWSVYVCPTKRRSEYLCKGRATSEVVLGEFVFNYILNMLNVQKNFDSINSVEDMEKMLLSGSTFRDVDGIERAGLDDLYNMLASGLTEKAPFDSSVEVRKKPVVSDIELENLNTEKTRIERAAERLQNLYLYSDDSISQKDYIIQREKLMSQLAEVNEQIGMVMSNADEKDVSDEEFVHAASKFILTQKLEGRTYIYYKRLATTVSREVLRSFVMSIIENITIYDGRVQTIVFKNGLSHTFILK

SEQ ID NO: 1114 - protein, 573 aa, Unknown
  Description of Unknown: Integrase B1115 sequence
  PTHR30461:SF3,cd00338,SM00857,G3DSA:1.10.10.2600,IPR036162, PF13408,PS51737,IPR025827,G3DSA:3.40.50.1390,IPR006119, IPR038109,PF07508,IPR011109,SSF53041,PTHR30461, PS51736,Coil,PF00239
MAKVKLPDKPRVAIYTRVSTLHQIDKDSLPMQRQDLINYARLILNTEDYVVYEDAGYSGKNTDRPKFQEMMQQVRLGMFTHILVWKIDRISRNLLDFATMYSELKQLGVVFVSKNEQFDTSSAMGEAMLKIILIFAELERNMTSERVTAAMLSRAANGQWNGGRVPLGYDYDPETKTFTVNESEAAVVKIIHDKYEQERSLVSLARYLNGHGYRTRTGCTYSPSTLLIILRNVFYCGDYRYNVLKDGDRQKRKKESEWITVKDHHPAIISREQKDEIARILKENRRLECERRGIYSKKKNVHVFGGLVICGNCGHAMTSTIRPADQDGIRWSVYVCPTKRRSEYLCKGRATSEVVLGEFVFNYILNMLNVQKNFDSINSVEDMEKMLLSGSTFRDVDGIERAGLDDLYNMLASGLTEKAPFDSSVEVRKKPVVSDIELENLNTEKTKIERAAERLQSLYLYSDDSISQKDYIIQREKLMSQLAEVNEQIGMVMSNADEKDVSDEEFVHAASKFILTQKLEGRTYIYYKRLATTVSREVLRSFVMSIIENITIYDGRVQTIVFKNGLSHTFILK

SEQ ID NO: 1115 - protein, 573 aa, Unknown
  Description of Unknown: Integrase B1116 sequence
  PTHR30461:SF3,SM00857,G3DSA:1.10.10.2600,IPR036162,PF13408, PS51737,G3DSA:3.40.50.1390,IPR025827,IPR006119,IPR038109, PF07508,IPR011109,SSF53041,PTHR30461,PS51736, cd00338,PF00239
MAKRSAKKNEYQSAEQVGVIYARYSSHNQKEESIEQQISECSDFAAKNGIRIVGIYADKAVSGRSDRRPNFQRMMRDAEKRQFQIVIAYKSNRIARNMLNALQYEARLDLLGIKTLYAKEEFGNTAAGRFALRTMMNVNQFYSENMGEDIKRGMVDNANECKVNGMLPLGYVKSKEGKYAIAPDEAAVVREIFDSVLKDVPVAEIARSLNQRGIHTKLGREWNKNSFHIMLTNDNYIGVYRHSGVVVEDGIPPILEKEVFAAVQEKLANKKKTAGRRSANGEYLLTGKLFCGYCGSYMIGVSGTGENGTVHNYYQCQKRHAEGRCEKKNVRRDFIEKLIARLTQDYILQDDTIEWIADSTMSFQAMARRESGVAQLERDLADNRKVAKNIMAAIEQGIITETTKARLLEVEGTIHDLERSLSIAKAASQPIERERVVFSLEQMREGNVGSKEHQKKLIDTFVKSVTLWDDRIQIDYYHTPGKHKFSYSLEELTSKAENESNASDVRTDSLELHHCRRELHRFTTAFLLTAAPSRLYGTIKKTQESNSCVFFACIDGCVPQCPARLGIVWSSKR

SEQ ID NO: 1116 - protein, 573 aa, Unknown
  Description of Unknown: Integrase B1117 sequence
  PTHR30461:SF3,IPR036162,PS51737,IPR011109,PTHR30461, PF00239,G3DSA:1.10.10.2600,IPR006119,SSF53041,SM00857, IPR025827,IPR038109,PS51736,mobidb-lite,cd03768, PF13408,G3DSA:3.40.50.1390,PF07508,Coil
MKAVIYSRKSKFKEEGESIENQINMCKEYAERVLGIEEFDIYQDEGFSGGNTNRPQYKIMMKKIKEKKYTHLICYRLDRISRNVADFATTLEVLNKYNVSFISIKEQFDTSNAMGRAMMNISATFAQLERETIAERIKDNLRELSKTGRWLGGPAPLGYKSIEVENNDKAGKSRKKHILEINKDEEHIVKTVFSLFEEYKSFQKVSRMLEARKIYSRSNKVFSRELVKQMIINPTYAIADKNILNYLKQQGAEVYGYENINNFNGIMAYNRRKENGSFAPVDNWIISVGAHEGIIKSSSWIKCNELVKSIRINSSNRKGTGEKALLSGLVVCGKCNCGMAPRTNSSGKYMYRYYSCNLRNKASGRCKNDALNAYDAEEFVVNALKNLTKEEMIENYSYIKNKNLIKINNKISINNYKKEIENNKKIIKGLVVKMALLENDIEILDIFKNNIKAITEKNKELEQKILKLKQENDEIIDINETVDEMLLRLDNFKKFFDYTEDFEEKKNMIKNLIKFIIWNSDTRKLELVLIGSDKERPLPYYLPLSKVNRGNGTCRNNSHNGTSAYGKRFNKRT

SEQ ID NO: 1117 - protein, 573 aa, Unknown
  Description of Unknown: Integrase B1118 sequence
  PTHR30461:SF3,SM00857,G3DSA:1.10.10.2600,IPR036162,PS51737, G3DSA:3.40.50.1390,IPR006119,IPR038109,PF07508,IPR011109, SSF53041,PTHR30461,Coil,PS51736,cd00338, PF00239
MYDIYNQKPTSRKVVIYARVSTEHEAQLSALENQKDWYKPILQQHPEWDIVKMYVDEGITGTSAKKRPQFMQMIQDASSGNFDLILTREVSRFARNTVDTLQYTRELKSKGVEVFFLNDNIKTFDGDGELRLTIMATLAQDESRKTSVRVKSGQQTSMENGVFYGNGNILGYDRVGKDMVINPEQAKTVRMIFDWYLDGWGMRKIQFELEKAGRLTAMGKSNWHVSNISKILRNSFYCGIITYHKEFTPDFLEQKKIRNFGDMEFTQVRGNHKPIITEEEYDQAQKRINSRRKTLSVDTSGQRMYGEKPPSDVWVKLLECECGHKFNRKMWHNTTEGKQYGYQCYSSIRTGTVRTRLNKGLPIDGICQTPMIAGWKLQMMAKYIFKNYLSDTDQVLSLAESMLEKHIDDEEEVCDNTDIINQKKEELQKLLKRLDNLIEMRADGELARDIFILKKESTENSISQLKKELAELEPSEIESEIDEVTSKEKITILKYALDQYTNFDSDADIPESVIEAFVEKIIARKDGFDWYLRFNPEESPMGCLVDGKRKRGAKVSAFCSPQHRQLSLRRMHN

SEQ ID NO: 1118 - protein, 573 aa, Unknown
  Description of Unknown: Integrase B1119 sequence
  PTHR30461:SF3,SM00857,G3DSA:1.10.10.2600,IPR036162,PF13408, IPR025827,PS51737,G3DSA:3.40.50.1390,IPR006119,IPR038109, PF07508,SSF53041,IPR011109,PF00239,PTHR30461, PS51736,Coil,cd00338
MAKVKLPDKPRVAIYTRVSTLHQIDKDSLPMQRQDLINYARLILNTEDYVVYEDAGYSGKNTDRPKFQEMMQQVRLGMFTHILVWKIDRISRNLLDFATMYSELKQLGVVFVSKNEQFDTSSAMGEAMLKIILIFAELERNMTSERVTAAMLSRAANGQWNGGRVPLGYDYDPETKTFTVNESEAAVVKIIHDKYEQERSLVSLARYLNGHGYRTRTGCTYSPSTLLIILRNVFYCGDYRYNVLKDGDRQKRKKESEWITVKDHHPAIISREQKDEIARILKENRRLECERRGIYSKKKNVHVFGGLVICGNCGHAMTSTIRPADQDGIRWSVYVCPTKRRSEYLCKGRATSEVVLGEFVFNYILNMLNVQKNFDSINSVEDMEKMLLSGSTFRDVDGIERAGLDDLYNMLASGLTEKAPFDSSVEVRKKPVVSDIELENLNTEKTRIERAAERLQNLYLYSDDSISQKDYIIQREKLMSQLAEVNEQIGMVMSNADEKDVSDEEFVHAASKFILTQKLEGRTYIYYKRLATTVSREVLRSFVMSIIENITIYDGRVQTIVFKNGLSHTFILK

SEQ ID NO: 1119 - protein, 573 aa, Unknown
  Description of Unknown: Integrase B1120 sequence
  PTHR30461:SF3,SM00857,G3DSA:1.10.10.2600,IPR036162,PF13408, PS51737,G3DSA:3.40.50.1390,IPR025827,IPR006119,IPR038109, PF07508,IPR011109,SSF53041,PF00239,PTHR30461, PS51736,Coil,cd00338
MKKKTRCYIYTRVSTAIQVDGYSLDAQKDKLRKYAEFQDMEIVGEYSDEGHSGKNIKGRQEFMRMLNDIEDGKDGVDFVLVFKLSRFGRNAADVLSSLQLMQDYGVNLICVEDGIDSSKEAGKLLISIIAAVAEMKRENIRVQTMAGREQKAREGKWNGGFAPYGYKLENGELVIAEDEMEIIQMIFDRYIHTNDGINGVANYLNNHGYTKKLRQNGTIPGFSSSFLKKIIDNPVYMGKIAYGRRRTEKKTGTRNETHVVKQLEFPVYEGIHEAIISEEDWNLAQEKRSKNNYRREKIHDPEHAHILSGILKCPCCGKGMYGNIAKAGRKDKKTRYYYYCKNTVNATGHKCTFRCNIEQSQIDDVLAKLITAMTREGKFKDAIQDRIGATVDTSDLEKQLSVLNANLHQAETIKTRLEQQMDNLDVTDIHYDKKNSDLQRRLDTQYDKIDEVEEAIADLKSQVYELKKNQIDADSIYGFLNAFNELYAECTDAEKKQFMQVFIERIDIFPERREDGNWIRNIKFQFPVPVLRDGKEVVRVDSISLDKEQSGEHTVTLEKFPTLETVVLLSQLK

SEQ ID NO: 1120 - protein, 573 aa, Unknown
  Description of Unknown: Integrase B1121 sequence
  PTHR30461:SF3,IPR036162,PS51737,IPR011109,PTHR30461, PS00397,PF00239,G3DSA:1.10.10.2600,IPR006119,SSF53041, SM00857,IPR025827,IPR038109,PS51736,cd03768, IPR006118,PF13408,G3DSA:3.40.50.1390,PF07508,Coil
MAYNAQNKTGARVAIYVRVSTLHQIDRDSLPMQKQDLLAYAKLMLNTDDCVIFEDAGYSGKNTDRPKFQEMMSQMRAGAFTHLLVWKIDRISRNLLDFATMYNELKALGVTFVSKNEQFDTSTAMGEAMLKIILVFAELERNMTSERVTATMISRANNGLWNGGRIPYGYDYDYETHEFSVNEEESKVVILMHDMYEQERSLVRVVRELNERGYRSRAGNLWSPVSLLIILRNVFYCGDYRYNMLKEGDRQKVKDESEWVTVENHHVAIIPKDQKERIMATLDSNSKLCKQRNIYKSSKHTHVFGGLIYCGSCGKPLGSTPGNLTRDGWYYSKYTCPTRRKSVTLCTGKSTSDPIIGEFVFNYILNMLNAQNDFDKISSPEELEKLLLIGDTFAYIDHIESNGLNDLFNVLSSGTVKGAVFGKGASLPTKKATVEPEVARLRNEKQKTERALDRLCSLYLYADEAMSEAEYMIQKNKLEETLEDINDQIGMMNTDSWQQSVSDEEFIQRASEFIIAQKLSGRKYVNYKRLAMSVDSEVLKNFVVSIIDSITIQDGLVSNIVFKNGLCHTFIFR

SEQ ID NO: 1121 - protein, 573 aa, Unknown
  Description of Unknown: Integrase B1122 sequence
  PTHR30461:SF3,SM00857,G3DSA:1.10.10.2600,IPR036162,PS51737, G3DSA:3.40.50.1390,IPR006119,IPR038109,PF07508,SSF53041, IPR011109,PF00239,PTHR30461,PS51736,Coil, cd00338
MYDIYNQKPTSRKVVIYARVSTEHEAQLSALENQKDWYKPILQQHPEWDIVKMYVDEGITGTSAKKRPQFMQMIQDASSGNFDLILTREVSRFARNTVDTLQYTRELKSKGVEVFFLNDNIKTFDGDGELRLTIMATLAQDESRKTSVRVKSGQQTSMENGVFYGNGNILGYDRVGKDMVINPEQAKTVRMIFDWYLDGWGMRKIQFELEKAGRLTAMGKSNWHVSNISKILRNSFYCGIITYHKEFTPDFLEQKKIRNFGDMEFTQVRGNHKPIITEEEYDQAQKRINSRRKTLSVDTSGQRMYGEKPPSDVWVKLLECECGHKFNRKMWHNTTEGKQYGYQCYSSIRTGTVRTRLNKGLPIDGICQTPMIAGWKLQMMAKYIFKNYLSDTDQVLSLAESMLEKHIDDEEEVCDNTDIINQKKEELQKLLKRLDNLIEMRADGELARDIFILKKESTENSISQLKKELAELEPSEIESEIDEVTSKEKITILKYALDQYTNFDSDADIPESVIEAFVEKIIARKDGFDWYLRFNPEESPMGCLVDGKRKRGAKVSSFCSPQHRQLSQRRMHN

SEQ ID NO: 1122 - protein, 573 aa, Unknown
  Description of Unknown: Integrase B1123 sequence
  PTHR30461:SF3,IPR036162,PS51737,IPR011109,PTHR30461, PS00397,PF00239,G3DSA:1.10.10.2600,IPR006119,SSF53041, cd00338,SM00857,IPR025827,IPR038109,PS51736, IPR006118,PF13408,G3DSA:3.40.50.1390,PF07508,Coil
MQKNQTKKAALYIRVSTHYQIDKDSLPFQRNELINYAKYALGIDDYAIFEDAGYSGKNTDRPAYQDMMRRIRAKEFSHLCVWKIDRISRNLLDFAAMYEELKKFNCTFVSKNEQFDTSSAIGEAMLRIILVFAELERKLTAERVTSIMYSRANKGLWNGAPIPLGYKWDAKGKYPVIDEDTAVVVRYIYDQYERIHSTMKLSDKLNRENIKSARGGEWTGTTVKGILRNPFYKGTYRYNYKTQTGRIKPVEEQIVHEDNHPGIIDKEQWDRVNKILDENSTRSVAQLRSNVKYTHIFSKLLRCGQCGHTMGGGLDRARSDGYRPSRYYCTSHTRKAGCTNGVYSDVYLGPFVFNYIANLVRAQRALTDSQKPRDLERMLLRGKFFDSVAGIEQQGLLDTYNTILYGSGEDVMLQPSPEIAAQSASELELLDRDQKKYERALERIEQLYLYSEESMPEKDYVLKRNELKAMLDNIAERRAEVNSRLGLAPASSDFLEKATYFYLTNSLNQKRSLDFRKMVDTFEPKMLQDFLCSVIDHITVVDGHVASISFKNGLTNKFIYKATKPPKNASTKP

SEQ ID NO: 1123 - protein, 573 aa, Unknown
  Description of Unknown: Integrase B1124 sequence
  PTHR30461:SF3,IPR036162,PS51737,IPR011109,PTHR30461, PS00397,PF00239,G3DSA:1.10.10.2600,IPR006119,SSF53041, SM00857,IPR025827,IPR038109,PS51736,cd03768, IPR006118,PF13408,G3DSA:3.40.50.1390,PF07508,Coil
MAEQNEKIVALYVRVSTGYQVDKDSLPFQKKELKAYCEHVLHIDKNRIEIFEDAGKSGKNTKRPAFERMMGKVKSGQISHVIVYKIDRISRNLVDFSLMYDDFKYNNVTFISLNEQFDTSSAIGEAILKIILVFAELERKLTSERVTDVMIGRAQNGQWNGARVPYGWDWDEEKQCPVHSKKEAQYAIAMYEMYLKAKSTGKIRDYNNSHNIPTKRGGEWTSKTVTDFLRNPINKGAYRYNYRESARGRKKPNEEVVFIENAFPPLVAPEIWEKVNKILDINRDKRNMGGLHPIEKNCNVFAGLIQCGICGTGYIVDKKDRRRKNGFTPSMYHCGAKTKAIHCQNPNVSDVKIGPFIINYIAAMVRVSKSKRKIKTPEALEEMLLTDKVVFGDIAGLSTDSLNYTFEMITGKYTTDNAVWRANPVSTSNKESNPEEIEKLKNEIKKYSRAKERLEDAYYFSDDGMSEKEYLEKKNKFDSMRVSAENKIKELTEASISSGIDEDSFIKSATSFLLAHKIYNESHIVYSDLAGAIEEETLKEFFNLILDYIVVVDRRIVEIVFSNGLSHQFIYRK

SEQ ID NO: 1124 - protein, 573 aa, Unknown
  Description of Unknown: Integrase B1125 sequence
  PTHR30461:SF3,IPR036162,PS51737,IPR011109,PTHR30461, PS00397,PF00239,G3DSA:1.10.10.2600,IPR006119,SSF53041, SM00857,IPR025827,IPR038109,PS51736,cd03768, IPR006118,PF13408,G3DSA:3.40.50.1390,PF07508,Coil
MPISISEKLAAKKAAIYIRVSTHWQIDKDSLKVQRRELIAYVEIVLGIKDYVIFTDPGYSAKNTDRPDYQAMMDRIRTGEFTHLVVWKIDRISRNLLDFASMYDELKRLGVTFVSKNEQFDTSSAIGEAMLKIILVFAELERNMTSERVTAVMLSRANNGQWNGGRVPYGYSWDKESRTFSVVEQEAKVIRRMAELYEQYQSLLYVAKYMNEAGITTKTGKQWTPTTVRTMLTNPWYIGNYVYNVHSDGKGTEKRSEDEWITVEDHHPAILDERLFYRIKFLLTRNKRGGVPASQTYVRKNIHIFGGLLRCAKCGSNMIANQDRRRANGIRPSIYACGSRRRKQTSCTNKYISDMVLGPFVLNYIANIIRAAKSYDGSSSTDALSKKLLRGEAFSMVESINQDALASLMDAFASAGDADEYRPQLALSGSDGTITEFDTLRSKKQRIENAISRLNTLYLYDENAMPEKDFVMQRSDLSNQLEQVNARLDEIRSRDEQGQDLSDKFILKASYYIMAEKLIEDSYIDYEKYIRSIDHAVPKSFLSSVIDHIDADDGRVAAITFKNGIEHRFTYKA

SEQ ID NO: 1125 - protein, 573 aa, Unknown
  Description of Unknown: Integrase B1126 sequence
  PTHR30461:SF3,SM00857,G3DSA:1.10.10.2600,IPR036162,PF13408, IPR025827,PS51737,G3DSA:3.40.50.1390,IPR006119,IPR038109, PF07508,IPR011109,SSF53041,PF00239,PTHR30461, PS51736,Coil,cd00338
MAKVKLPDKPRVAIYTRVSTLHQIDKDSLPMQRQDLINYARLILNTEDYVVYEDAGYSGKNTDRPKFQEMMQQVRLGMFTHILVWKIDRISRNLLDFATMYSELKQLGVVFVSKNEQFDTSSAMGEAMLKIILIFAELERNMTSERVTAAMLSRAANGQWNGGRVPLGYDYDPETKTFTINESEAAVVKIIHDKYEQERSLVSLARYLNGHGYRTRTGCTYSPSTLLIILRNVFYCGDYRYNVLKDGDRQKRKKESEWITVKDHHPAIISREQKDEIARILKENRRLECERRGIYSKKKNVHVFGGLVICGNCGHAMTSTIRPADQDGIRWSVYVCPTKRRSEYLCKGRATSEVVLGEFVFNYILNMLNVQKNFDSINSVEDMEKMLLSGSTFRDVDGIERAGLDDLYNMLASGLTEKAPFDSSVEVRKKPVVSDIELENLNTEKTRIERAAERLQNLYLYSDDSISQKDYIIQREKLMSQLAEVNEQIGMVMSNADEKDVSDEEFVHAASKFILTQKLEGRTYIYYKRLATTVSREVLRSFVMSIIENITIYDGRVQTIVFKNGLSHTFILK

SEQ ID NO: 1126 - protein, 573 aa, Unknown
  Description of Unknown: Integrase B1127 sequence
  PTHR30461:SF3,IPR036162,PS51737,IPR011109,PTHR30461, PS00397,PF00239,G3DSA:1.10.10.2600,IPR006119,SSF53041, cd00338,SM00857,IPR025827,IPR038109,PS51736, IPR006118,PF13408,G3DSA:3.40.50.1390,PF07508,Coil
MSERLKRAALYVRVSTAYQIDKESLPVQREELQNYCQYALGINSFEIFEDAGYSAKNTSRPSYQQMMSRIRSGEFTHLVVWKIDRISRNLMDFTAMYSELKDLHVTFISKNEQFDTSSAIGEAMLKIILVFAELERKMTGERVSAVALSRANDGKWNGGRCPYGYTHAKGTSVFTVNPEEAKIVAWIFQTYSESGTVLSITKELNRQGLKTHYGAWNTNSVWTILTNPFYYGAMRYNYRNESKGLSSWSFRPPEDVIIVPGHHEAIITKEMFDICQSKLDRNNLKKRGTFKTYKRKNVHVFAGLITCGLCGSQYSATVDRKRSDGWRPSVYLCSKRRKSDSCTNKFVSEITLGPFVLNYIANIVRAQASFGKSTSSAVLQKKLLRGPEFADIDHIEQPGLDAMREFFMSEKYGVSEFEPSEVQISTEATERDLLDKEKRRIERAITRLSQLYLYEDDPMPQTEYFIERKKLNDQLDQIDQRIQELDDQATADRNMSDADFIAKASYYALTQEILNSRHVDYIRMIKSTDPQITKEFVNSVCSNFCILDGKVTSIRFRNGIEHRFVYKQIEPAE

SEQ ID NO: 1127 - protein, 573 aa, Unknown
  Description of Unknown: Integrase B1128 sequence
  PTHR30461:SF3,IPR036162,PS51737,IPR011109,PTHR30461, PS00397,PF00239,G3DSA:1.10.10.2600,IPR006119,SSF53041, SM00857,IPR025827,IPR038109,PS51736,cd03768, IPR006118,PF13408,G3DSA:3.40.50.1390,PF07508,Coil
MVLNNIKPAMKIRVAIYIRVSTLHQVDKDSLPMQRKDLIAYSKLILNTDDYVIFEDAGYSGKNTIRPRYQDMMEQIRTGAFTHLLVWKIDRISRNLLDFAQMYQELKELNVTFVSKNEQFNTSTAMGEAMLKIILVFAELERNMTSERVTATMISRANTGKWNGGRVPYGYKYDPEEEDFLIVANESNTVKLIHDKYEELQSLVYLARYMNEHGYRTRSGNEWSPPSLAIILKSWWYCGCYEYNKRKAGNRQKLKNESEWIMIEDHHIAIISYDQKERVLAILKGNKRFATEHNLYVKGIHVHVFGGLCWCKNCGKKMTSTSSNKNRSWQYSKYLCSTRRRSLTKCRGRSTSDPVLGEFIFNYILNMLNAQKGFDSIHSPADLQDALLTGDAFSDIKSIDQEELNDLYNILSSSVVGNIYGRSFNVNKAKKNDEVQSSLTILKAEKKKLDRALDRLINLYLYDDMAISEKDYMTKKTEIETKIAEIDEKIGIVNKNSVDNSITDEEFVDKASTFIITQKLTNRNYISYKRLATSVDPKILYMFTHDVIDYIDIYNGKVQRIVFRNGLSQTFIR

SEQ ID NO: 1128 - protein, 573 aa, Unknown
  Description of Unknown: Integrase B1129 sequence
  SM00857,G3DSA:1.10.10.2600,IPR036162,PF13408,IPR025827, G3DSA:3.40.50.1390,PS51737,IPR006119,IPR038109,PF07508, SSF53041,IPR011109,PTHR30461,Coil,cd00338, PF00239
MAYRKITDIRDTIGMRAVFYARVSTAEEEQLNAIELQIEENRGCIKDHGWKLVGEYIDRSKSGTMVKGRDDYQRLYEDLYEDLFDIVVIKDQERLQRNTLDWYLFINRVVQTGKLLFMYMDGKFYSPDDALITGVRAIIAEEFSRNLSKKLHNYHDHRIEKARQGQEIALQGSGNVYGWDKKDGKYYINPEQAKVRRLMCEGIMARKGSTLIAKELNDAGYRNTVGKPWKPMDIPKFVYDCKNVGTMIINKERHDFESKQTIKLPKEEWVYVENALPPIVTQEEWDLICKIHEERVIATGSDRRGKKTSGYSFSGKLVCGICGAPYWRKQRVSKDEYWVCSTKQTKGRRTRKRDSTMGKAGEINPLGCDNENISYNSLMEIMGVVSERLQANTDTIKQDMINWLTKLRKQLLEANGGHTEADLQRELSRKSKLLDAYLDGILNKQEYQKKAEELDERIIQLKAETEKNKANSGDIAEIDKVLANIDEEVSRYVDGNEKLKVEYLLEHLEQVQIFPDKVIVIVPILSEGIVVEKAQYVSREKWSRKIDIAETAVKSNGTNQRKHWNEWPCGIYA

SEQ ID NO: 1129 - protein, 573 aa, Unknown
  Description of Unknown: Integrase B1130 sequence
  PTHR30461:SF3,IPR036162,PS51737,IPR011109,PTHR30461, PS00397,PF00239,G3DSA:1.10.10.2600,IPR006119,SSF53041, cd00338,SM00857,IPR025827,IPR038109,PS51736, IPR006118,PF13408,G3DSA:3.40.50.1390,PF07508,Coil
MQKNQTKKAALYIRVSTHYQIDKDSLPFQRNELINYAKYALGIDDYAIFEDAGYSGKNTDRPAYQDMMRRIRAKEFSHLCVWKIDRISRNLLDFAAMYEELKKFNCTFVSKNEQFDTSSAIGEAMLRIILVFAELERKLTAERVTSIMYSRANKGLWNGAPIPLGYKWDAKGKYPVIDEDTAVVVRYIYDQYEKIHSTMKLSDKLNRENIKSARGGEWTGTTVKGILRNPFYKGTYRYNYKTQTGRIKPVEEQIIHEDNHPGIIDKEQWDRVNKILDENSTRSVAQLRSNVKYTHIFSKLLRCGQCGHTMGGGLDRARSDGYRPSRYYCTSHTSKSGCTNGVYSDVYLGPFVFNYIANLVRAQRALTDSQKPRDLERMLLRGKFFDNVAGIEQQGLLDTYNTILYGSGEDVMLQPSPEIAAQSASELELLDRDQKKYERALERIEQLYLYSEESMPEKDYVLKRNELKAMLDNIAERRAEVNSRLGLAPASSDFLEKATYFYLTNSLNQKRSLDFRKMVDTFEPKMLQDFLCSVIDHITVVDGHVASISFKNGLTNKFIYKATKPPKNASTKP

SEQ ID NO: 1130 - protein, 573 aa, Unknown
  Description of Unknown: Integrase B1131 sequence
  PTHR30461:SF3,SM00857,G3DSA:1.10.10.2600,IPR036162,PF13408, IPR025827,G3DSA:3.40.50.1390,PS51737,IPR006119,IPR038109, PF07508,SSF53041,IPR011109,PF00239,PTHR30461, PS51736,Coil,cd00338
MAKVKLPDKPRVAIYTRVSTLHQIDKDSLPMQRQDLINYARLILNTEDYVVYEDAGYSGKNTDRPKFQEMMQQVRLGMFTHILVWKIDRISRNLLDFATMYSELKQLGVVFVSKNEQFDTSSAMGEAMLKIILIFAELERNMTSERVTAAMLSRAANGQWNGGRVPLGYDYDPETKTFTVNESEAAVVKIIHDKYEQERSLVSLARYLNGHGYRTRTGCTYSPSTLLIILRNVFYCGDYRYNVLKDGDRQKRKKESEWITVKDHHPAIISREQKDEIARILKENRRLECERRGIYSKKKNVHVFGGLVICGNCGHAMTSTIRPADQDGIRWSVYVCPTKRRSEYLCKGRATSEVVLGEFVFNYILNMLNVQKNFDSISSLEDMEKMLLSGSTFRDVDGIERAGLDDLYNMLASGLTEKAPFDSSVEVRKKPVVSDIELENLNMEKTKIERAAERLQNLYLYSDDSISQKDYIIQREKLMSQLAEVNEQIGMVMSNADEKDVSDEEFVHAASKFILTQKLEGRTYIYYKRLATTVSREVLRSFVMSIIENITIYDGRVQTIVFKNGLSHTFILK

SEQ ID NO: 1131 - protein, 573 aa, Unknown
  Description of Unknown: Integrase B1132 sequence
  SM00857,G3DSA:1.10.10.2600,IPR036162,PF13408,PS51737, G3DSA:3.40.50.1390,IPR025827,IPR006119,IPR038109,PF07508, SSF53041,IPR011109,PTHR30461,Coil,cd00338, PF00239
MAYRRITDIRDTIGMRAVFYARVSTAEEEQLNAIELQIEENRGCIKDHGWKLVGEYIDRSKSGTMVKGRDDYQRLYEDLYEDLFDIVVIKDQERLQRNTLDWYLFINRVVQTGKLLFMYMDGKFYSPDDALITGVRAIIAEEFSRNLSKKLHNYHDHRIEKARQGQEIALQGSGNVYGWDKKDGKYYINPEQAKVRRLMCEGIMARKGSTLIAKELNDAGYRNTVGKPWKPMDIPKFVYDCKNVGTMIINKERHDFESKQTIKLPKEEWVYVENALPPIVTQEEWDLICKIHEERVIATGSDRRGKKTSGYSFSGKLVCGICGAPYWRKQRVSKDEYWVCSTKQTKGRRTRKRDSTMGKAGEINPLGCDNENISYNSLMEIMGVVSERLQANTDTIKHDMINWLTKLRKQLLEANGGHTEADLQRELSRKSKLLDAYLDGILNKQEYQKKAEELDERIIQLKAETEKNKANSGDIAEIDKVLANIDEEVARYVDGNEKLKVEYLLEHLEQVQIFPDKVIVIVPILSEGIVVEKTQYVSREKRSRKNYYHENAVGLNKSDFRGGQNLGKTLAGE

SEQ ID NO: 1132 - protein, 573 aa, Unknown
  Description of Unknown: Integrase B1133 sequence
  PTHR30461:SF3,IPR036162,PS51737,IPR011109,PTHR30461, PS00397,PF00239,G3DSA:1.10.10.2600,IPR006119,SSF53041, SM00857,IPR025827,IPR038109,PS51736,cd03768, IPR006118,PF13408,G3DSA:3.40.50.1390,PF07508,Coil
MAEQNEKIVALYVRVSTGYQVDKDSLPFQKKELKAYCEHVLHIDKNRIEIFEDAGKSGKNTKRPAFERMMGKVKSGQVSHVIVYKIDRISRNLVDFSLMYDDFKYNNVTFISLNEQFDTSSAIGEAILKIILVFAELERKLTSERVTDVMIGRAQNGQWNGARVPYGWDWDEEKQCPVHSKKEAQYAIAMYEMYLKVKSTGKIRDYNNSHNIPTKRGGEWTSKTVTDFLRNPINKGAYRYNYRESARGRKKPNEEVVFIENAFPPLVEPETWEKVNKILDINRDKRNMGGLHPIEKNCNVFAGLIQCGICGTGYIVDKKDRRRKNGFTPSMYHCGAKTKAIHCQNPNVSDVKIGPFIINYIAAMVRVSKSKRKIKTPEALEEMLLADKVVFGDIAGLSTDSLNYTFEMITGKYTTDNAVWRTNPVNQSNKESNPEEIEKLKNEIKKYSRAKERLEDAYYFSDDGMSEKEYLEKKNKFDSMRVSAENKIKELTEASISSGIDEDSFIKSATSFLLAHKIYNESHIVYSDLAGVIEEETLKEFFNLILDYIVVVDRRIVEIVFSNGLSHQFIYRK

SEQ ID NO: 1133 - protein, 573 aa, Unknown
  Description of Unknown: Integrase B1134 sequence
  PTHR30461:SF3,IPR036162,PS51737,IPR011109,PTHR30461, PS00397,PF00239,G3DSA:1.10.10.2600,IPR006119,SSF53041, cd00338,SM00857,IPR025827,IPR038109,PS51736, IPR006118,PF13408,G3DSA:3.40.50.1390,PF07508,Coil
MQKNQTKKAALYIRVSTHYQIDKDSLPFQRNELINYAKYALGIDDYAIFEDAGYSGKNTDRPAYQDMMRRIRAKEFSHLCVWKIDRISRNLLDFAAMYEELKKFNCTFVSKNEQFDTSSAIGEAMLRIILVFAELERKLTAERVTSIMYSRANKGLWNGAPIPLGYKWDAKGKYPVIDEDTAVVVRYIYDQYEKIHSTMKLSDKLNRENIKSARGGEWTGTTVKGILRNPFYKGTYRYNYKTQTGRIKPVEEQIIHEDNHPGIIDKEQWDRVNKILDENSTRSVAQLRSNVKYTHIFSKLLRCGQCGHTMGGGLDRARSDGYRPSRYYCTSHTSKSGCTNGVYSDVYLGPFVFNYIANLVRAQRALTDSQKPRDLERMLLRGKFFDNVAGIEQQGLLDTYNTILYGSGEDVMLQPSPEIAAQSASELELLDRDQKKYERALERIEQLYLYSEESMPEKDYVLKRNELKTMLDNIAERRAEVNSRLGLAPASSDFLEKATYFYLTNSLNQKRSLDFRKMVDTFEPKMLQDFLCSVIDHIVVVDGHVASISFKNGLTNKFIYKATKPPKSASTKP

SEQ ID NO: 1134 - protein, 573 aa, Unknown
  Description of Unknown: Integrase B1135 sequence
  PTHR30461:SF3,cd00338,SM00857,G3DSA:1.10.10.2600,IPR036162, PF13408,IPR025827,PS51737,G3DSA:3.40.50.1390,IPR006119, IPR038109,PF07508,SSF53041,IPR011109,PTHR30461, PS51736,Coil,PF00239
MAKVKLPDKPRVAIYTRVSTLHQIDKDSLPMQRQDLINYARLILNTEDYVVYEDAGYSGKNTDRPKFQEMMQQVRLGMFTHILVWKIDRISRNLLDFATMYSELKQLGVVFVSKNEQFDTSSAMGEAMLKIILIFAELERNMTSERVTAAMLSRAANGQWNGGRVPLGYDYDPETKTFTINESEAAVVKIIHDKYEQERSLVSLARYLNGHGYRTRTGCTYSPSTLLIILRNVFYCGDYRYNVLKDGDRQKRKKESEWITVKDHHPAIISREQKEEIARILKENRRLECERRGIYSKKKNVHVFGGLVICGNCGHAMTSTIRPADQDGIRWSVYVCPTKRRSEYLCKGRATSEVVLGEFVFNYILNMLNVQKNFDSISSLEDMEKMLLSGSTFRDVDGIERAGLDDLYNMLASGLTEKAPFDSSVEVRKKPVVSDIELENLNMEKTKIERAAERLQNLYLYSDDSISQKDYIVQREKLMSQLAEVNEQIGMVMSNADEKDVSDEEFVHAASKFILTQKLEGRTYIYYKRLATTVSREVLRSFVMSIIENITIYDGRVQTIVFKNGLSHTFILK

SEQ ID NO: 1135 - protein, 573 aa, Unknown
  Description of Unknown: Integrase B1136 sequence
  SM00857,G3DSA:1.10.10.2600,PS51737,IPR006119,IPR038109, PF07508,IPR011109,PF00239,PTHR30461,Coil, cd00338
MPTMNTKTFCVIYARQSFGLEQDSTSISVQQEACRKWAVAHGMQIVGEYSDANCSSELYPLCDEGIEASRIDRGFQRWLKEQRTQGRKQYKQGLGEAFRRIAQGGVTHLLVYTRNRLGRTADGSYLEKFLTNYLLEHKVSLVTVQDGTVMDFSDDFMSLVMSIKDTLSYRELREKAKASLASIDKRINSFTKWSNANGVIMKDGQVTFYPEYAEVIRYIYNALVEGATYGTILHKLNTDYRHLVRGKQWYITNVRSILRNPVYCGYMRNREGVLGKAVNIPEPVVSYSIWQRAQEVMEYKRVNGQKYNGKNHHFLPLSGYLMCPCGRRMTLFVDRGKIAYHCLNGGEHKTAIYVNEDALLTIQNVLMIGLTTSHKRLQSLKTASNMVDDLRAEILRLKASQAAKMRLVETEEDVAVYKPVIDSIKATIRGKQEELTRLEGELSADSSEAQRRLEDDFHSIMEGELLPEDTYMRLMQDCISTITVHADHIDIVTKTGVTIPVPRLEGRHHSKRLMRCSLICDTADGTLEGLVHYQLHLYDKEVAIVGGESIYQDDTMSVSVHWPEQYLMRRIPA

SEQ ID NO: 1136 - protein, 573 aa, Unknown
  Description of Unknown: Integrase B1137 sequence
  PTHR30461:SF3,SM00857,G3DSA:1.10.10.2600,IPR036162,PS51737,G3DSA: 3.40.50.1390,IPR006119,IPR038109,PF07508,IPR011109,SSF53041, PTHR30461,Coil,PS51736,cd00338,PF00239
MYDIYNQKPTSRKVVIYARVSTEHEAQLSALENQKDWYKPILQQHPEWDIVKMYVDEGITGTSAKKRPQFMQMIQDASSGNFDLILTREVSRFARNTVDTLQYTRELKSKGVEVFFLNDNIKTFDGDGELRLTIMATLAQDESRKTSVRVKSGQQTSMENGVFYGNGNILGYDRVGKDMVINPEQAKTVRMIFDWYLDGWGMRKIQFELEKTGRLTAMGKSNWHVSNISKILRNSFYCGIITYHKEFTPDFLEQKKIRNFGDMEFTQVRGNHKPIITEEEYDQAQKRINSRRKTLSVDTSGQRMYGEKPPSDVWVKLLECECGHKFNRKMWHNTTEGKQYGYQCYSSIRTGTVRTRLNKGLPIDGICQTPMIAGWKLQMMAKYIFKNYLSDTDQVLSLAESMLEKHIDDEEEVCDNTDIINQKKEELQKLLKRLDNLIEMRADGELTRDIFILKKESTENSISQLKKELAELEPSEIESEIDEVTSKEKITILKYALDQYTNFDSDADIPESVIEAFVEKIIARKDGFDWYLRFNPEESPMGCLVDGKRKRGAKVSSFCSPQHRQLSLRRMHN

SEQ ID NO: 1137 - protein, 573 aa, Unknown
  Description of Unknown: Integrase B1138 sequence
  PTHR30461:SF3,cd00338,SM00857,G3DSA:1.10.10.2600,IPR036162, PF13408,PS51737,G3DSA:3.40.50.1390,IPR025827,IPR006119, IPR038109,PF07508,SSF53041,IPR011109,PTHR30461, PS51736,Coil,PF00239
MYEDIKTACLYVRFSSHNQTEQSIEGQTRVCRDFCKRHNIRIVEIYADRATSASKDIEKRVQFLKMIKDSEKGLFDAVIVYKLDRFARSRYDSATYKYRLKRNGVQLISATENISNDPEGIILESVLEGMAEFYSAELSQKINRGMRESAYKHNSIGGAVPLGYKIEDKKLVIDPKTAPIVKEAFEKYADGETVAEICRQFNARGYKTSKGTAFGKSSFTKIFRNERYIGVYTFHDYRAEDAIPAIIDKDLWERVQLRVGKIKNAPARNKAKVVYLLSGKIFCGHCGSKMNGNCNAGNYCYYQCYGKKNGNVDCKKKNIRKEFIERLVAQDALSLLTDEYIEQIATIACEKNQHEIELDSALPTIRDRIHQVDLSLNHLLKAIESGSAPDMLVKRMGELEKEKKDLQAQAKKESEDIVELDKAQVIYWLEQFRGGSIEDEEFCRMLINLFVNSVTVWDEDDNTYKVTVAYNLTSLPTKTYRLNKGGTLSDFTSNAPCRQRRSLRSSCVRRSPAVSSWTPRPSFTATRSGKGMFSGRRTSPNWWHCWRSCASRRRNCMTSGTSYRRKQPRRHNG

SEQ ID NO: 1138 - protein, 573 aa, Unknown
  Description of Unknown: Integrase B1139 sequence
  PTHR30461:SF3,IPR036162,PS51737,IPR011109,PTHR30461, PS00397,PF00239,G3DSA:1.10.10.2600,IPR006119,SSF53041, SM00857,IPR025827,IPR038109,PS51736,cd03768, IPR006118,PF13408,G3DSA:3.40.50.1390,PF07508,Coil
MAYNAQNKTGARVAIYVRVSTLHQIDRDSLPMQKQDLLAYAKLMLNTDDCVIFEDAGYSGKNTDRPKFQEMMSQMRAGAFTHLLVWKIDRISRNLLDFATMYNELKALGVTFVSKNEQFDTSTAMGEAMLKIILVFAELERNMTSERVTATMISRANNGLWNGGRIPFGYNYDYETHEFSVNEEESKVVILMHDMYEQERSLVRVVRELNERGYRSRAGNLWSPVSLLIILRNVFYCGDYRYNMLKEGDRQKVKDESEWVTVENHHVAIIPKDQKERIMATLDSNSKLCKQRNIYKSSKHTHVFGGLIYCGSCGKPLGSTPGNLTRDGWHYSKYTCPTRRKSVTLCTGKSTSDPIIGEFVFNYILNMLNAQNDFEKISSPEELEKLLLIGDTFAYIDHIEPNGLNDLFNVLSSGAVKGAVFGKGASLPTKKATVEPEVARLRNEKQKTERALDRLRSLYLYADEAMSEAEYMIQKNKLEETLEDINDQIGMMNTDSWQQSVSDEEFIQRASEFIIAQKLSGRKYVNYKRLAMSVDSEVLKNFVVSIIDSITIQDGLVSNIVFKNGLCHTFIFR

SEQ ID NO: 1139 - protein, 573 aa, Unknown
  Description of Unknown: Integrase B1140 sequence
  PTHR30461:SF3,IPR036162,PS51737,IPR011109,PTHR30461, PS00397,PF00239,G3DSA:1.10.10.2600,IPR006119,SSF53041, SM00857,IPR025827,IPR038109,PS51736,cd03768, IPR006118,PF13408,G3DSA:3.40.50.1390,PF07508,Coil
MPINISEKLAAKKAAIYIRVSTHWQIDKDSLKVQRRELIAYVELVLGITDYEVFEDPGYSAKNTDRPDYQAMMERIRTGEFTHLVVWKIDRISRNLLDFAYMYDELKRLGVTFVSKNEQFDTSTAIGEAMLKIILVFAELERNMTSERVTAVMLSRANNGQWNGGRVPYGYSWDKESGTFAVVEQEAKVANRMAELYEQYQSLLYVVKYMNDAGITTRNGKAWTPTAVRKILTNPWNIGHYVYNVHSGGKGTEKRSEDEWITVEDHHPAILDERLFYRIKFLLTRNKRGGVPASKTYVRKNIHIFGGLLRCAKCGSNMIANQDRRRANGIRPSIYACGSRRRKQTSCTNKYISDMVLGPFVLNYVANIIRAAKSYDGSSDTELLSKKLLAGEAFSDVDSINEDALVELISAFNAADGAEEYRPQLALSGADGTITEADTLKSRKNRIENALSRLNALYLYDENAMPQKDFVMQRADLSKQLEQVNSRLSEIQGRGEDAEVTSDSFIMKASYYIMANKLIEGGYIDYEKYIRAIDPAVPKSFLASVIDHIDADDGRVTAITFKNGIEHRFTYKT

SEQ ID NO: 1140 - protein, 573 aa, Unknown
  Description of Unknown: Integrase B1141 sequence
  PTHR30461:SF3,SM00857,G3DSA:1.10.10.2600,IPR036162,PF13408, IPR025827,G3DSA:3.40.50.1390,PS51737,IPR006119,IPR038109, PF07508,SSF53041,IPR011109,PF00239,PTHR30461, PS51736,Coil,cd00338
MAKVKLPDKPRVAIYTRVSTLHQIDKDSLPMQRQDLINYARLILNTEDYVVYEDAGYSGKNTDRPKFQEMMQQVRLGMFTHILVWKIDRISRNLLDFATMYSELKQLGVVFVSKNEQFDTSSAMGEAMLKIILIFAELERNMTSERVTAAMLSRAANGQWNGGRVPLGYDYDPETKTFTVNESEAAVVKIIHDKYEQERSLVSLARYLNGHGYRTRTGCTYSPSTLLIILRNVFYCGDYRYNVLKDGDRQKRKKESEWITVKDHHPAIISREQKDEIARILKENRRLECERRGIYSKKKNVHVFGGLVICGNCGHAMTSTIRPADQDGIRWSVYVCPTKRRSEYLCKGRATSEVVLGEFVFNYVLNMLNVQKNFDSINSVEDMEKMLLSGGTFRDVDGIERAGLDDLYNMLASGLTEKAPFDSSVEVRKKPVVSDIELENLNTEKTKIERAAERLQSLYLYSDDSISQKDYIIQREKLMSQLAEVNEQIGMVMSNADEKDVSDEEFVHAASKFILTQKLEGRTYIYYKRLATTVSREVLRSFVMSIIENITIYDGRVQTIVFKNGLSHTFILK

SEQ ID NO: 1141 - protein, 573 aa, Unknown
  Description of Unknown: Integrase B1142 sequence
  PTHR30461:SF3,IPR036162,PS51737,IPR011109,PTHR30461, PS00397,PF00239,G3DSA:1.10.10.2600,IPR006119,SSF53041, SM00857,IPR025827,IPR038109,PS51736,cd03768, IPR006118,PF13408,G3DSA:3.40.50.1390,PF07508,Coil
MAYNAQNKTGARVAIYVRVSTLHQIDRDSLPMQKQDLLAYAKLMLNTDDCVVFEDAGYSGKNTDRPKFQEMMSQMRAGAFTHLLVWKIDRISRNLLDFATMYNELKALGVTFVSKNEQFDTSTAMGEAMLKIILVFAELERNMTSERVTATMISRANNGLWNGGRIPYGYDYDYETHEFSVNEEESKVVILMHDMYEQERSLVRVVRELNERGYRSRAGNLWSPVSLLIILRNVFYCGDYRYNMLKEGDRQKVKDESEWVTVENHHVAIIPKDQKERIMATLDSNSKLCKQRNIYKSSKHTHVFGGLIYCGSCGKPLGSTPGNLTRDGWHYSKYTCPTRRKSVTLCTGKSTSDPIIGEFVFNYILNMLNAQNGFDKISSPEELEKLLLIGDTFTYIDHIEPNGLNDLFNVLSSGAVKGAVFGKGASLPTKKATVEPEVARLRNEKQKTERALDRLRSLYLYADEAMSEAEYMIQKNKLEETLEDINDQIGMMNTDSWQQSVSDEEFIQRASEFIIAQKLSGRKYVNYKRLAMSVDSEVLKNFVVSIIDSITIQDGLVSNIVFKNGLCHTFIFR

SEQ ID NO: 1142 - protein, 573 aa, Unknown
  Description of Unknown: Integrase B1143 sequence
  PTHR30461:SF3,IPR036162,PS51737,IPR011109,PTHR30461, PS00397,PF00239,G3DSA:1.10.10.2600,IPR006119,SSF53041, SM00857,IPR025827,IPR038109,PS51736,cd03768, IPR006118,PF13408,G3DSA:3.40.50.1390,PF07508
MAIIEQIRKQKAAIYVRVSTQWQVDKDSLLVQKRELIAYCQLVFGIQDYEVFEDPGYSAKNTDRPAYQEMLSRIRTGEFSHLMVWKIDRISRNLLDFTQMYTELKNLGIIFVSKNEQFDTSTAIGEAMLKIILVFAELERKMTAERVTAVMLSRANNGQWNGGRIPYGYNYDKGTKEFTVNPKEAKVYNLVCDLYEEKQSLIYVARYLNETGYRSRQGSLWTPATIRKLLTNVFYTGAYRYNVHKEGSGYKRREEDEWITIENHHPALIDDVRYDRFCFLLSRNVRGGVRPGDTYIRKNVHIFGGLLRCGICGANMSATLDRIRANGWRPSIYGCSTRRKSSNGCSNKYITDVYLGPFVFNFLANILRTSNSVTEGTTPDSLEKRLLSGPAFADVSHIHPDDLNSLLAQLRSGMTGMEYKSAATKAADVDTQANERQILEDRRRHDENALNRLKSLYLFGEDTISEKDYIIERQKIIDDMNRIDAKLFKFVEASADALKSDLAFLEQASYLVMVDQLLSNRTIDFEKYIRSIDPTIPRAFLHSVISKIEVADGRVTSIQFTNELIVRFIYDRR

SEQ ID NO: 1143 - protein, 573 aa, Unknown
  Description of Unknown: Integrase B1144 sequence
  PTHR30461:SF3,IPR036162,PS51737,IPR011109,PTHR30461, PS00397,PF00239,G3DSA:1.10.10.2600,IPR006119,SSF53041, SM00857,IPR025827,IPR038109,PS51736,cd03768, IPR006118,PF13408,G3DSA:3.40.50.1390,PF07508,Coil
MAYNAQNKTGARVAIYVRVSTLHQIDRDSLPMQKQDLLAYAKLMLNTDDCVIFEDAGYSGKNTDRPKFQEMMSQMRAGAFTHLLVWKIDRISRNLLDFATMYNELKALGVTFVSKNEQFDTSTAMGEAMLKIILVFAELERNMTSERVTATMISRANNGLWNGGRIPFGYDYDYETHEFSVNEEESKVVILMHDMYEQERSLVRVVRELNERGYRSRAGNLWSPVSLLIILRNVFYCGDYRYNMLKEGDRQKVKDESEWVTVENHHVAIIPKDQKERIMATLDSNSKLCKQRNIYKSSKHTHVFGGLIYCGSCGKPLGSTPGNLTRDGWHYSKYTCPTRRKSVTLCTGKSTSDPIIGEFVFNYILNMLNAQNDFEKISSPEELEKLLLIGDTFAYIDHIEPNGLNDLFNVLSSGAAKGAVFGKGASLPTKKATVEPEVARLRNEKQKTERALDRLRSLYLYADEAMSEAEYMIQKNKLEETLEDINDQIGMMNTDSWQQSVSDEEFIQRASEFIIAQKLSGRKYVNYKRLAMSVDSEVLKNFVVSIIDSITIQDGLVSNIVFKNGLCHTFIFR

SEQ ID NO: 1144 - protein, 573 aa, Unknown
  Description of Unknown: Integrase B1145 sequence
  PTHR30461:SF3,SM00857,G3DSA:1.10.10.2600,IPR036162,PF13408, IPR025827,G3DSA:3.40.50.1390,PS51737,IPR006119,IPR038109, PF07508,IPR011109,SSF53041,PF00239,PTHR30461, PS51736,Coil,cd00338
MAKVKLPDKPSVAIYTRVSTLHQIDKDSLPMQRQDLINYARLILNTEDYVVYEDAGYSGKNTDRPKFQEMMQQVRLGMFTHILVWKIDRISRNLLDFATMYSELKQLGVVFVSKNEQFDTSSAMGEAMLKIILIFAELERNMTSERVTAAMLSRAANGQWNGGRVPLGYDYDPETKTFTVNESEAAVVKIIHDKYEQERSLVSLARYLNGHGYRTRTGCTYSPSTLLIILRNVFYCGDYRYNVLKDGDRQKRKKESEWITVKDHHPAIISREQKEEIARILKENRRLECERRGIYSKKKNVHVFGGLVICGNCGHAMTSTIRPADQDGIRWSVYVCPTKRRSEYLCKGRATSEVVLGEFVFNYILNMLNVQKNFDSINSVEDMEKMLLSGSTFRDVDGIERAGLDDLYNMLASGLTEKAPFDSSVEVRKKPVVSDIELENLNTEKTKIERAAERLQSLYLYSDDSISQKDYIIQREKLMSQLAEVNEQIGMVMSNADEKDVSDEEFVHAASKFILTQKLEGRTYIYYKRLATTVSREVLRSFVMSIIENITIYDGRVQTIVFKNGLSHTFILK

SEQ ID NO: 1145 - protein, 573 aa, Unknown
  Description of Unknown: Integrase B1146 sequence
  PTHR30461:SF3,cd00338,SM00857,G3DSA:1.10.10.2600,IPR036162, PF13408,IPR025827,G3DSA:3.40.50.1390,PS51737,IPR006119, IPR038109,PF07508,SSF53041,IPR011109,PTHR30461, PS51736,Coil,PF00239
MAKVKLPDKPRVAIYTRVSTLHQIDKDSLPMQRQDLINYARLILNTEDYVVYEDAGYSGKNTDRPKFQEMMQQVRLGMFTHILVWKIDRISRNLLDFATMYSELKQLGVIFVSKNEQFDTSSAMGEAMLKIILIFAELERNMTSERVTAAMLSRAANGQWNGGRVPLGYDYDPETKTFTVNESEAAVVKIIHDKYEQERSLVSLARYLNGHGYRTRTGCTYSPSTLLIILRNIFYCGDYRYNVLKDGDRQKRKKESEWITVKDHHPAIISREQKEEIARILKENRRLECERRGIYSKKKNVHVFGGLVICGNCGHAMTSTIRPADQDGIRWSVYVCPTKRRSEYLCKGRATSEVVLGEFVFNYILNMLNVQKNFDSINSVEDMEKMLLSGSTFRDVDGIERAGLDDLYNMLASGLTEKAPFDSSVEVRKKPVVSDIELENLNTEKTRIERAAERLQNLYLYSDDSISQKDYIIQREKLMSQLAEVNEQIGMVMSNADEKDVSDEEFVHAASKFILTQKLEGRTYIYYKRLATTVSREVLRSFVMSIIENITIYDGRVQTIVFKNGLSHTFILK

SEQ ID NO: 1146 - protein, 573 aa, Unknown
  Description of Unknown: Integrase B1147 sequence
  PTHR30461:SF3,IPR036162,PS51737,IPR011109,PTHR30461, PS00397,PF00239,G3DSA:1.10.10.2600,IPR006119,SSF53041, SM00857,IPR025827,IPR038109,PS51736,cd03768, IPR006118,PF13408,G3DSA:3.40.50.1390,PF07508,Coil
MVLNNIKPAMKIRVAIYIRVSTLHQVDKDSLPMQRKDLIAYSKLILNTDDYVIFEDAGYSGKNTIRPRYQDMMEQIRTGAFTHLLVWKIDRISRNLLDFAQMYQELKELNVTFVSKNEQFNTSTAMGEAMLKIILVFAELERNMTSERVTATMISRANTGKWNGGRVPYGYKYDPEEEDFLIVANESNTVKLIHDKYEELQSLVYLARYMNEHGYRTRSGNEWSPPSLAIILKSWWYCGCYEYNKRKAGNRQKLKNESEWIMIEDHHIAIISYDQKERVLAILKGNKRFATEHNLYVKGIHVHVFGGLCWCKNCGKKMTSTSSNKNRSWQYSKYLCSTRRRSLTKCRGRSTSDPVLGEFIFNYILNMLNAQKGFDSIHSPADLQDALLTGDAFSDIKSIDQEELNDLYNILSSSVVGNIYGRSFNVNKAKKNDEVQSSLTILKAEKKKLDRALDRLTNLYLYDDMAISEKDYMTKKTEIETKIAEIDEKIGIVNKNSVDNSITDEEFVDKASTFIITQKLTNRNYISYKRLATSVDPKILYMFTHDVIDYIDIYNGKVQRIVFRNGLSQTFIR

SEQ ID NO: 1147 - protein, 573 aa, Unknown
  Description of Unknown: Integrase B1148 sequence
  PTHR30461:SF3,IPR036162,PS51737,IPR011109,PTHR30461, PS00397,PF00239,G3DSA:1.10.10.2600,IPR006119,SSF53041, SM00857,IPR025827,IPR038109,PS51736,cd03768, IPR006118,PF13408,G3DSA:3.40.50.1390,PF07508,Coil
MAYNAQNKTGARVAIYVRVSTLHQIDRDSLPMQKQDLLAYAKLMLNTDDCVIFEDAGYSGKNTDRPKFQEMMSQMRAGAFTHLLVWKIDRISRNLLDFATMYNELKALGVTFVSKNEQFDTSTAMGEAMLKIILVFAELERNMTSERVTATMISRANNGLWNGGRIPFGYDYDYETHEFSVNEKESKVVILMHDMYEQERSLVRVVRELNERGYRSRAGNLWSPVSLLIILRNVFYCGDYRYNMLKEGDRQKVKDESEWVTVENHHVAIIPKDQKERIMATLDSNSKLCKQRNIYKSSKHTHVFGGLIYCGSCGKPLGSTPGNLTRDGWHYSKYTCPTRRKSVTLCTGKSTSDPIIGEFVFNYILNMLNAQNGFDKISSPEELEKLLLIGDTFAYIDHIEPNGLNDLFNVLSSGAVKGAVFGKGASLPTKKATVEPEVARLRNEKQKTERALDRLRSLYLYADEAMSEAEYMIQKNKLEETLEDINDQIGMMNTDSWQQSVSDEEFIQRASEFIIAQKLSGRKYVNYKRLAMSVDSEVLKNFVVSIIDSITIQDGLVSNIVFKNGLCHTFIFR

SEQ ID NO: 1148 - protein, 573 aa, Unknown
  Description of Unknown: Integrase B1149 sequence
  PTHR30461:SF3,IPR036162,PS51737,IPR011109,PTHR30461, PS00397,PF00239,G3DSA:1.10.10.2600,IPR006119,SSF53041, SM00857,IPR025827,IPR038109,PS51736,cd03768, IPR006118,PF13408,G3DSA:3.40.50.1390,PF07508,Coil
MAYNAQNKTGARVAIYVRVSTLHQIDRDSLPMQKQDLLAYAKLMLNTDDCVIFEDAGYSGKNTDRPKFQEMMSQMRAGAFTHLLVWKIDRISRNLLDFATMYNELKALGVTFVSKNEQFDTSTAMGEAMLKIILVFAELERNMTSERVTATMISRANNGLWNGGRIPYGYNYDYETHEFSVNEEESKVVILMHDMYEQERSLVRVVRELNERGYRSRAGNLWSPVSLLIILRNVFYCGDYRYNMLKEGDRQKVKDESEWVTVQNHHVGIIPREQKERIMATLDSNSKLCKQRNLYKSAKHTHVFGGLIYCGSCGKPLGSTPGNLTRDGWHYSKYTCPTRRKSVTLCTGKSTSDPIIGEFVFNYILNMLNAQSGFDKISSPEELERLLLIGDTFAYIDHIEPNGLNDLFNVLSSGAVKGAVFGKGASLPTKKATVEPEVARLRNEKQKTERALDRLRSLYLYADEAMSEAEYMIQKNKLEETLEDINDQIGMMNTDSWQQSVSDEEFIQRASEFIIAQKLSGRKYVNYKRLAMSVDSEVLKNFVVSIIDSITIQDGLVSNIVFKNGLCHTFIFR

SEQ ID NO: 1149 - protein, 573 aa, Unknown
  Description of Unknown: Integrase B1150 sequence
  PTHR30461:SF3,IPR036162,PS51737,IPR011109,PTHR30461, PS00397,PF00239,G3DSA:1.10.10.2600,IPR006119,SSF53041, SM00857,IPR025827,IPR038109,PS51736,cd03768, IPR006118,PF13408,G3DSA:3.40.50.1390,PF07508,Coil
MAYNAQNKTGARVAIYVRVSTLHQIDRDSLPMQKQDLLAYAKLMLNTDDCVIFEDAGYSGKNTDRPKFQEMMSQMRAGAFTHLLVWKIDRISRNLLDFATMYNELKTLGVTFVSKNEQFDTSTAMGEAMLKIILVFAELERNMTSERVTATMISRANNGLWNGGRIPYGYDYDYETHEFSVNEEESKVVILMHDMYEQERSLVRVVRELNERGYRSRAGNLWSPVSLLTILRNVFYCGDYRYNMLKEGDRQKVKDESEWVTVENHHVAIIPKDQKERIMATLDSNSKLCKQRNIYKSSKHTHVFGGLIYCGSCGKPLGSTPGNLTRDGWHYSKYTCPTRRKSVTLCTGKSTSDPIIGEFVFNYILNMLNAQNDFDKISSPEELEKLLLIGDTFAYIDHIESNGLNDLFNVLSSGTVKGAVFGKGASLPTKKATVEPEVARLRNEKQKTERALDRLRSLYLYADEAMSEAEYMIQKNKLEETLEDINDQIGMMNTDSWQQSVSDEEFIQRASEFIIAQKLSGRKYVNYKRLAMSVDSEVLKNFVVSIIDSITIQDGLVSNIVFKNGLCHTFIFR

SEQ ID NO: 1150 - protein, 573 aa, Unknown
  Description of Unknown: Integrase B1151 sequence
  PTHR30461:SF3,IPR036162,PS51737,IPR011109,PTHR30461, PS00397,PF00239,G3DSA:1.10.10.2600,IPR006119,SSF53041, SM00857,IPR025827,IPR038109,PS51736,cd03768, IPR006118,PF13408,G3DSA:3.40.50.1390,PF07508,Coil
MAYNAQNKTGARVAIYVRVSTLHQIDRDSLPMQKQDLLAYAKLMLNTDDCVIFEDAGYSGKNTDRPKFQEMMSQMRAGAFTHLLVWKIDRISRNLLDFATMYNELKALGVTFVSKNEQFDTSTAMGEAMLKIILVFAELERNMASERVTATMISRANNGLWNGGRIPFGYNYDYETHEFSVNEEESKVVILMHDMYEQERSLVRVVRELNERGYRSRAGNLWSPVSLLIILRNVFYCGDYRYNMLKEGDRQKVKDESEWVTVENHHVAIIPKDQKERIMATLDSNSKLCKQRNIYKSSKHTHVFGGLIYCGSCGKPLGSTPGNLTRDGWHYSKYTCPTRRKSVTLCTGKSTSDPIIGEFVFNYILNMLNAQNDFEKISSPEELEKLLLIGDTFAYIDHIEPNGLNDLFNVLSSGAVKGAVFGKGASLPTKKATVEPEVARLRNEKQKTERALDRLRSLYLYADEAMSEAEYMIQKNKLEETLEDINDQIGMMNTDSWQQSVSDEEFIQRASEFIIAQKLSGRKYVNYKRLAMSVDSEVLKNFVVSIIDSITIQDGLVSNIVFKNGLCHTFIFR

SEQ ID NO: 1151 - protein, 573 aa, Unknown
  Description of Unknown: Integrase B1152 sequence
  PTHR30461:SF3,SM00857,G3DSA:1.10.10.2600,IPR036162,PF13408, IPR025827,PS51737,G3DSA:3.40.50.1390,IPR006119,IPR038109, PF07508,IPR011109,SSF53041,PF00239,PTHR30461, PS51736,Coil,cd00338
MAKVKLPDKPRVAIYTRVSTLHQIDKDSLPMQRQDLINYARLILNTEDYVVYEDAGYSGKNTDRPKFQEMMQQVRLGMFTHILVWKIDRISRNLLDFATMYSELKQLGVVFVSKNEQFDTSSAMGEAMLKIILIFAELERNMTSERVTAAMLSRAANGQWNGGRVPLGYDYDPETKTFTINESEAAVVKIIHDKYEQERSLVSLARYLNGHGYRTRTGCTYSPSTLLIILRNIFYCGDYRYNVLKDGDRQKRKKESEWITVKDHHPAIISREQKEEIARILKENRRLECERRGIYSKKKNVHVFGGLVICGNCGHAMTSTIRPADQDGIRWSVYVCPTKRRSEYLCKGRATSEVVLGEFVFNYILNMLNVQKNFDSINSVEDMEKMLLSGSTFRDVDGIERAGLDDLYNMLASGLTEKAPFDSSVEVRKKPVVSDIELENLNTEKTRIERAAERLQNLYLYSDDSISQKDYIIQREKLMSQLAEVNEQIGMVMSNADEKDVSDEEFVHAASKFILTQKLEGRTYIYYKRLATTVSREVLRSFVMSIIENITIYDGRVQTIVFKNGLSHTFIMK

SEQ ID NO: 1152 - protein, 573 aa, Unknown
  Description of Unknown: Integrase B1153 sequence
  PTHR30461:SF3,SM00857,G3DSA:1.10.10.2600,IPR036162,PF13408, PS51737,IPR025827,G3DSA:3.40.50.1390,IPR006119,IPR038109, PF07508,IPR011109,SSF53041,PF00239,PTHR30461, PS51736,Coil,cd00338
MAKIKLPDKPRVAIYTRVSTLHQIDKDSLPMQRQDLINYARLILNTEDYVVYEDAGYSGKNTDRPKFQEMMQQVRLGMFTHILVWKIDRISRNLLDFATMYSELKQLGVVFVSKNEQFDTSSAMGEAMLKIILIFAELERNMTSERVTAAMLSRAANGQWNGGRVPLGYDYDPETKTFTVNESEAAVVKIIHDKYEQERSLVSLARYLNGHGYRTRTGCTYSPSTLLIILRNVFYCGDYRYNVLKDGDRQKRKKESEWITITDHHPAIISREQKEEIARILKENRRLECERRGIYSKKKNVHVFGGLVICGNCGHAMTSTIRPADQDGIRWSVYVCPTKRRSEYLCKGRATSEVVLGEFVFNYILNMLNVQKNFDSISSLEDMEKMLLSGSTFRDVDSIERAGLDDLYNMLASGLTEKAPFDSSFEVRKKPVVSDIELENLNTEKTRIERAAERLQNLYLYSDDSISQKDYIIQREKLMSQLAEVNEQIGMVMSNADEKDVSDEEFVHAASKFILTQKLEGRTYIYYKRLATTVSREVLRSFVMSIIENITIYDGRVQTIVFKNGLSHTFILK

SEQ ID NO: 1153 - protein, 573 aa, Unknown
  Description of Unknown: Integrase B1154 sequence
  PTHR30461:SF3,IPR036162,PS51737,IPR011109,PTHR30461, PS00397,PF00239,G3DSA:1.10.10.2600,IPR006119,SSF53041, SM00857,IPR025827,IPR038109,PS51736,cd03768, IPR006118,PF13408,G3DSA:3.40.50.1390,PF07508,Coil
MTEQNEKIVALYVRVSTGYQVDKDSLPFQKKELKAYCEHVLHIDKNRIEIFEDAGKSGKNTKRPAFERMMGKVKSGQVSHVIVYKIDRISRNLVDFSLMYDDFKYNNVTFISLNEQFDTSSAIGEAILKIILVFAELERKLTSERVTDVMIGRAQNGQWNGARVPYGWDWDEEKQCPVHSEKEAQYAIAMYEMYLKVKSTGKIRDYNNSHNIPTKRGGEWTSKTVGDFLRNPMNKGAYRYNYRESARGRKKPNEEVVFIENVFPPLVEPETWEKVNKILDINRDKRNMGGLHPIEKNCNVFAGLIQCGICGTGYIVDKKDRRRKNGFTPSMYHCGAKTKAIHCQNPNVSDVKIGPFIINYIAAMVRVSKSKRKIKTPEALEEMLLADKVVFGDIAGLSTDSLNYTFEMIIGKYTTDNAVWHTNPVNQSNKESNPDEIEKLKNEIKKYSRAKERLEDAYYFSDDGMSEKEYLEKKNKFDSMRVSAENKIKELTEASISSGIDEDSFIKSATSFLLAHKIYNESHIVYSDLAGVIEEETLKEFFNLILDYIVVVDRRIVEIVFSNGLSHQFIYRK

SEQ ID NO: 1154 - protein, 573 aa, Unknown
  Description of Unknown: Integrase B1155 sequence
  PTHR30461:SF3,IPR036162,PS51737,IPR011109,PTHR30461, PS00397,PF00239,G3DSA:1.10.10.2600,IPR006119,SSF53041, cd00338,SM00857,IPR025827,IPR038109,PS51736, IPR006118,PF13408,G3DSA:3.40.50.1390,PF07508,Coil
MNKNQERPKKAALYVRVSTNYQIDKDSLPMQRQDLVNYAKLMFGIDDYVIFEDAGYSGKNTDRPEFQNMMKRIRNGEFTHLLCWKIDRISRNLLDFAAMYQELKDLNVTFVSKNEQFDTSTAIGEAMLKIILIFAELERNMTSERVTATMLSRAQNGLWNGGKVPYGYSYDKEQKEFSANPEEAEIVKKIFDAYSNHHSIVTVARALNEDGYSSRAGNDWSPVSIFIILTNPFYKGTYRYNHYKIPGLKVEKDPSEWIEVPDHHPRIISDEQFEYVNSILKENSRSKRLPGKQHATNNTHIFGGLLYCSSCGSIYVSSPARMQACGYRPSKYACPNLRKRKACTSKSISDPVIGEFLMNYVLNMMRAKDSFSSIHNSDDLEHALLRGSTFDSVDHIGKDGVESYFYMLTTVPINGKRMRKPKKVVTIDPELKRLRAEKRKTERALERLMNLYLYSEDSISKKDYTIRKSALEDYLKEITENLNMIDRSNNHEIISDENFIKRASYFILNKELADKNYIYFKKLAMDMDPEILKNFFHEIIDSVVMEQNRIMEIVFRNGLTHTFYYKDVEKPEA

SEQ ID NO: 1155 - protein, 573 aa, Unknown
  Description of Unknown: Integrase B1156 sequence
  PTHR30461:SF3,SM00857,G3DSA:1.10.10.2600,IPR036162,PF13408, IPR025827,PS51737,G3DSA:3.40.50.1390,IPR006119,IPR038109, PF07508,SSF53041,IPR011109,PTHR30461,PS51736, cd00338,PF00239
MAKRSAKKNEYSSAEQIGVIYARYSSHNQKEESIEQQIAECSDFAAKNGIRIVGIYADKAVSGRSDRRPNFQRMMRDAEKRQFQIVVAYKSNRIARNMLNALQYEARLDLLGIKTLYAKEEFGNTAAGRFALRTMMNVNQFYSENMGEDIKRGMVDNANECKVNGMLPLGYVKSKEGKYAIAPDEAAVVREIFDSVLKDVPVAEIARSLNQRGIHTKLGREWNKNSFHIMLKNDNYIGVYRHSGVVVEDGIPPILEKEVFTAVQEKLANKKKTAGRRSANGEYLLTGKLFCGYCGSYMIGVSGTGENGTVHNYYQCQKRHAEGRCEKKNVRRDFIEKLIARLTQDYILQDDTIEWIADSTMSFQAMARRESGVAQLERDLADNRKVAKNIMAAIEQGIITETTKARLLEVEGTIHDLERSLSIAKAASQPIERERVVFSLEQMREGNVGSKEHQKKLIDTFVKSVTLWDDRIQIDYYHTPGKHKFSYSLEELTSKAENESNASDVRTDSLELHHCRRELHRFTTAFLLAAAPSRLHGTIKKTQESNSCVFFACIDGCVPQCPARLGIVWSSKR

SEQ ID NO: 1156 - protein, 573 aa, Unknown
  Description of Unknown: Integrase B1157 sequence
  PTHR30461:SF3,SM00857,G3DSA:1.10.10.2600,IPR036162,PF13408, IPR025827,PS51737,G3DSA:3.40.50.1390,IPR006119,IPR038109, PF07508,IPR011109,SSF53041,PF00239,PTHR30461, PS51736,Coil,cd00338
MAKVKLPDKPRVAIYTRVSTLHQIDKDSLPMQRQDLINYARLILNTEDYVVYEDAGYSGKNTDRPKFQEMMQQVRLGMFTHILVWKIDRISRNLLDFATMYSELKQLGVVFVSKNEQFDTSSAMGEAMLKIILIFAELERNMTSERVTAAMLSRAANGQWNGGRVPLGYDYDPETKTFTINESEAAVVKIIHDKYEQERSLVSLARYLNGHGYRTRTGCTYSPSTLLIILRNIFYCGDYRYNVLKDGDRQKRKKESEWITVKDHHPAIISREQKEEIARILKENRRLECERRGIYSKKKNVHVFGGLVICGNCGHAMTSTIRPADQDGIRWSVYVCPTKRRSEYLCKGRATSEVVLGEFVFNYILNMLNVQKNFDSINSVEDMEKMLLSGSTFRDVDGIERAGLDDLYNMLASGLTEKAPFDSSVEVRKKPIVSDIELENLNTEKTRIERAAERLQNLYLYSDDSISQKDYIIQREKLMSQLAEVNEQIGMVMSNADEKDVSDEEFVHAASKFILTQKLEGRTYIYYKRLATTVSREVLRSFVMSIIENITIYDGRVQTIVFKNGLSHTFILK

SEQ ID NO: 1157 - protein, 573 aa, Unknown
  Description of Unknown: Integrase B1158 sequence
  PTHR30461:SF3,IPR036162,PS51737,IPR011109,PTHR30461, PS00397,PF00239,G3DSA:1.10.10.2600,IPR006119,SSF53041, SM00857,IPR025827,IPR038109,PS51736,cd03768, IPR006118,PF13408,G3DSA:3.40.50.1390,PF07508,Coil
MVLNNIKPAMKIRVAIYIRVSTLHQIDKDSLPMQRKDLIAYSKLILNTDDYVIFEDAGYSGKNTIRPRYQDMMDQIRTGAFTHLLVWKIDRISRNLLDFAQMYQELKELNVTFVSKSEQFDTSTAMGEAMLKIILVFAELERNMTSERVTATMISRANTGKWNGGRVPYGYKYDQEEEDFLIIANESNTVKLIHDKYEELQSLVYLARYMNEHGYRTRSGNEWSPPSLAIILKSWWYCGCYEYNKRKAGNRQKLKNESEWIMIEDHHIAIISYDQKERVLAILKGNKRFATEHNLYVKGIHVHVFGGLCWCKNCGKKMTSTSSNKNRSWQYSKYLCSTRRRSLTKCRGRSTSDPVLGEFIFNYILNMLNAQKGFDSIHSPADLQDALLTGDAFSDIKSIDQEELNDLYNILSSSVVGNIYGRSFNVNKAKKNDEVQSSLTILKAEKKKLDRALDRLTNLYLYDDMAISEKDYMTKKTEIETKIAEIDEKIGIVNKNSVDNSITDEEFVDKASTFIITQKLTNRNYISYKRLATSVDPKILYMFTHDVIDYIDIYNGKVQRIVFRNGLSQTFIR

SEQ ID NO: 1158 - protein, 573 aa, Unknown
  Description of Unknown: Integrase B1159 sequence
  cd00338,SM00857,G3DSA:1.10.10.2600,IPR036162,PF13408, IPR025827,G3DSA:3.40.50.1390,IPR006119,IPR038109,PF07508, SSF53041,IPR011109,PTHR30461,PS51736,Coil, PF00239
MAYRKVKDLFETIGLRAVFYARVSTAEEEQLNAIELQIEENRNIILKNKWKKVDEYIDRSKTGTMVKGRDEYQRLYEDMLEDKFDIIVIKDQDRLQRNTKDWYLFIDRLVQTGKLLYMYLDGKFYSPDDALITGIRAIIAEEFSRNLSKKLHNYHANRIEKARQGLEIDLQGSGNVFGWDKKDGKYYINPDQAKVRRLMCEGIMARKGSTQIADELNKAGYRNTVGNLWKPMDIPKFVYDCKNVGTMIINKEKHDFESKQIIKLPEEEWVYVKGALPPIVTEEEWDLICKIHDERVLSVGADHRGRGKKVSGYSFSGKIVCGICGAPYWRKQKTSKEEYWVCSTKQTKGRKTRKRDSVLGKAGEINELGCDNENISYNALMKVMSIISERLQANTEVIKADMVNWLTSLKKQLQRANGGSTEADLKREELRKDRLLDALLDGVLTKEEYSKKALTIDLKITEIKKEMLANRNSIEDIAEIDRVLANIDAEVATYLDENNQLKIDFILEHLESVEIYPDKVVVMIPLFSEGMVVYKTQYVSGEKWCKIHTENIHYLSSYKYWNKKIDLYVRLVA

SEQ ID NO: 1159 - protein, 573 aa, Unknown
  Description of Unknown: Integrase B1160 sequence
  PTHR30461:SF3,IPR036162,PS51737,IPR011109,PTHR30461, PS00397,PF00239,G3DSA:1.10.10.2600,IPR006119,SSF53041, SM00857,IPR025827,IPR038109,PS51736,cd03768, IPR006118,PF13408,G3DSA:3.40.50.1390,PF07508,Coil
MAYNAQNKTGARVAIYVRVSTLHQIDRDSLPMQKQDLLAYAKLMLNTDDCVIFEDAGYSGKNTDRPKFQEMMSQMRAGAFTHLLVWKIDRISRNLLDFATMYNELKALGVTFVSKNEQFDTSTAMGEAMLKIILVFAELERNMTSERVTATMISRANNGLWNGGRIPYGYDYDYETHEFSVNEEESKVVILMHDMYEQERSLVRVVRELNERGYRSRAGNLWSPVSLLIILRNVFYCGDYRYNMLKEGDRQKVKDESEWVTVENHHVAIIPKDQKERIMATLDSNSKLCKQRNIYKSSKHTHVFGGLIYCGSCGKPLGSTPGNLTRDGWYYSKYTCPTRRKSVTLCTGKSTSDPIIGEFVFNYILNMLNAQNDFDKISSPEELEKLLLIGDTFAYIDHIEPNGLNDLFNVLSSGTVKGAVFGKGASLPTKKATVEPEVARLRNEKQKTERALDRLRNLYLYADEAMSEAEYMIQKNKLEETLEDINDQIGMMNTDSWQQSVSDEEFIQRASEFIIAQKLSGRKYVNYKRLAMSVDSEVLKNFVVSIIDSITIQDGLVSNIVFKNGLCHTFIFR

SEQ ID NO: 1160 - protein, 573 aa, Unknown
  Description of Unknown: Integrase B1161 sequence
  PTHR30461:SF3,SM00857,G3DSA:1.10.10.2600,IPR036162,PS51737, G3DSA:3.40.50.1390,IPR006119,IPR038109,PF07508,IPR011109, SSF53041,PTHR30461,Coil,PS51736,cd00338, PF00239
MYDIYNQKPTSRKVVIYARVSTEHEAQLSALENQKDWYKPILQQHPEWDIVKMYVDEGITGTSAKKRPQFMQMIQDASSGNFDLILTREVSRFARNTVDTLQYTRELKSKGVEVFFLNDNIKTFDGDGELRLTIMATLAQDESRKTSVRVKSGQQTSMENGVFYGNGNILGYDRVGKDMVINPEQAKTVRMIFDWYLDGWGMRKIQFELEKAGRLTAMGKSNWHVSNISKILRNSFYCGIITYHKEFTPDFLEQKKIRNFGDMEFTQVRGNHKPIITEEEYDQAQKRINSRRKTLSVDTSGQRMYGEKPPSDVWVKLLECECGHKFNRKMWHNTTEGKQYGYQCYSSIRTGTVRTRLNKGLPIDGICQTPMIAGWKLQMMAKYIFKNYLSDTDQVLSLAESMLEKHIDDEEEVCDNTDIINQKKEELQKLLKRLDNLIEMRADGELARDIFILKKESTENSISQLKKELAELEPSEIESEIDEVTSKEKITILKYALDQYTNFDSDADIPESVIEAFVEKIIARKDGFDWYLRFNPEESPMGCLVDGKRKRGAKVSAFCSPQHRQLSQRRMHN

SEQ ID NO: 1161 - protein, 573 aa, Unknown
  Description of Unknown: Integrase B1162 sequence
  PTHR30461:SF3,IPR036162,PS51737,IPR011109,PTHR30461, PS00397,PF00239,G3DSA:1.10.10.2600,IPR006119,SSF53041, SM00857,IPR025827,IPR038109,PS51736,cd03768, IPR006118,PF13408,G3DSA:3.40.50.1390,PF07508,Coil
MAYNAQNKTGARVAIYVRVSTLHQIDRDSLPMQKQDLLAYAKLMLNTDDCVIFEDAGYSGKNTDRPKFQEMMSQMRAGAFTHLLVWKIDRISRNLLDFATMYNELKALGVTFVSKNEQFDTSTAMGEAMLKIILVFAELERNMTSERVTATMISRANNGLWNGGRIPFGYDYDYETHEFSVNEEESKVVILMHDMYEQEHSLVRVVRELNERGYRSRAGNLWSPVSLLIILRNVFYCGDYRYNMLKEGDRQKVKDESEWVTVENHHVAIIPKDQKERIMAALDSNSKLCKQRNIYKSSKHTHVFGGLIYCGSCGKPLGSTPGNLTRDGWHYSKYTCPTRRKSVTLCTGKSTSDPIIGEFVFNYILNMLNAQNDFEKISSPEELEKLLLIGDTFAYIDHIEPNGLNDLFNVLSSGAVKGAVFGKGASLPTKKATVEPEVARLRNEKQKTERALDRLRSLYLYADEAMSEAEYMIQKNKLEETLEDINDQIGMMNTDSWQQSVSDEEFIQRASEFIIAQKLSGRKYVNYKRLAMSVDSEVLKNFVVSIIDSITIQDGLVSNIVFKNGLCHTFIFR

SEQ ID NO: 1162 - protein, 573 aa, Unknown
  Description of Unknown: Integrase B1163 sequence
  PTHR30461:SF3,SM00857,G3DSA:1.10.10.2600,IPR036162,PF13408, IPR025827,G3DSA:3.40.50.1390,PS51737,IPR006119,IPR038109, PF07508,IPR011109,SSF53041,PF00239,PTHR30461, PS51736,Coil,cd00338
MPHPAVALDKKPVCGYYSRKRVFCEVVLMHGAYILARYSTDRQNEDSIEVQVSACRKWCDERSLPVLDVFADEATSGMKDTRPEYARMMWQLEHGGADTVVIYDQSRMFRKLTAWFDFRDQLARLGVDVVSVTQPMIGGDLRDPANFLTEGSMALFNQMWVLQTRQKVVAKMRYMAEQGLHTGGTPPLGYKVVDGRLVIDAAEAETVRLIFGLYASGMTYREIIRRLNAEERRTKSGGNFGVNSLHDLLKNPKYVGDLVYGKVAKRPDGSRNSHAVAEDAIVVKDVLPAIVDRETWEKVQLKMQENKRSAAGRPASAREYPLKGKVFCRECKSAMLVTGTNRGQRRHYYYICGAKQRKGLCDNSPIPVGGLEALVADAVRQRLGQPDSVEGLIRILREERSKLSGSAVQRLRELQKRDCEIAKQLDAAVNAVLGGLHSPTLTAKVNALEAERAKIAHDMQQLRAQVSGAEIDEPHLRELLALAMQDDTAVLSIVVRVEVGKDEIAVWTLLDADPNGDFDFAEDGVPITPSEVSPSYNNSGCPVTGTTNYYNIVTPAGLLLFYIARPRQRDRRS

SEQ ID NO: 1163 - protein, 573 aa, Unknown
  Description of Unknown: Integrase B1164 sequence
  PTHR30461:SF3,IPR036162,PS51737,IPR011109,PTHR30461, PS00397,PF00239,G3DSA:1.10.10.2600,IPR006119,SSF53041, cd00338,SM00857,IPR025827,IPR038109,PS51736, IPR006118,PF13408,G3DSA:3.40.50.1390,PF07508,Coil
MNKNQERPKKAALYVRVSTNYQIDKDSLPMQRQDLVNYAKLMFGIDDYVIFEDAGYSGKNTDRPEFQNMMKRIRNGEFTHLLCWKIDRISRNLLDFAAMYQELKDLNVTFVSKNEQFDTSTAIGEAMLKIILIFAELERNMTSERVTATMLSRAQNGLWNGGKVPYGYSYDKEQKEFSVNPEEAEIVKKIFDAYSNHHSIVTVARALNEDGYSSRAGNDWSPVSIFIILTNPFYKGTYRYNHYKIPGLKVEKDPSEWIEVPDHHPRIISDEQFEYVNSILKENSRSKRLPGKQHATNNTHIFGGLLYCSSCGSIYVSSPARMQACGYRPSKYACPNLRKRKACTSKSISDPVIGEFLMNYVLNMMRAKDSFSSIHNSDDLEHALLRGSTFDSVDHIGKDGVESYFYMLTTVPINGKRMRKPKKVVTIDPELKRLRAEKRKTERALERLMNLYLYSEDSISEKDYTIRKSALEDYLKEINENLNMIDRSNNHEIISDENFIKRASYFILNKELADKNYIYFKKLAMDMDPEILKNFFHEIIDSVVMEQNRIMEIVFRNGLTHTFYYKDAEKPEA

SEQ ID NO: 1164 - protein, 573 aa, Unknown
  Description of Unknown: Integrase B1165 sequence
  PTHR30461:SF3,IPR036162,PS51737,IPR011109,PTHR30461, PS00397,PF00239,G3DSA:1.10.10.2600,IPR006119,SSF53041, SM00857,IPR025827,IPR038109,PS51736,cd03768, IPR006118,PF13408,G3DSA:3.40.50.1390,PF07508,Coil
MAYNAQNKTGARVAIYVRVSTLHQIDRDSLPMQKQDLLAYAKLMLNTDDCVIFEDAGYSGKNTDRPKFQEMMSQMRAGAFTHLLVWKIDRISRNLLDFATMYNELKALGVTFVSKNEQFDTSTAMGEAMLKIILVFAELERNMTSERVTATMISRANNGLWNGGRIPFGYNYDYETHEFSVNEEESKVVILMHDMYEQERSLVRVVRELNERGYRSRAGNLWSPVSLLIILRNVFYCGDYRYNMLKEGDRQKVKDESEWVTVENHHVAIIPKDQKERIMATLDSNSKLCKQRNIYKSSKHTHVFGGLIYCGSCGKPLGSTPGNLTRDGWHYSKYTCPTRRKSVTLCTGKSTSDPIIGEFVFNYILNMLNAQNDFEKISSPEELEKLLLIGDTFAYIDHIEPNGLNDLFNVLSSGAVNGAVFGKGASLPTKKATVEPEVARLRNEKQKTERALDRLRSLYLYADEAMSEAEYMIQKNKLEETLEDINDQIGMMNTDSWQQSVSDEEFIQRASEFIIAQKLSGRKYVNYKRLAMSVDSEVLKNFVVSIIDSITIQDGLVSNIVFKNGLCHTFIFR

SEQ ID NO: 1165 - protein, 573 aa, Unknown
  Description of Unknown: Integrase B1166 sequence
  PTHR30461:SF3,IPR036162,PS51737,IPR011109,PTHR30461, PS00397,PF00239,G3DSA:1.10.10.2600,IPR006119,SSF53041, SM00857,IPR025827,IPR038109,PS51736,cd03768, IPR006118,PF13408,G3DSA:3.40.50.1390,PF07508,Coil
MAVTPSISKKITAPKAAIYIRVSTHWQVDKDSLQVQRRELIAYCQLVLGINDYVIFEDAGYSAKNTDRPDFQKMMTQIRSGDFSHVLVWKIDRVSRNLLDFASMYAELQNLGVTFISKNEQFDTSTAIGEAMLKIILVFAELERNMTSERVTAVMLSRANNGQWNGGRVPYGYAHQKGSGSFSIDDTEGEVVKRIFQLYEERQSVLYIANTLNDEKILTRAGGTWNPASIHRILTNPFYYGAYRYNIRKGTNGPKRSDSEWVVVEDHHPSLISKERFDVMQYRLKRNKRGGNQRGISVEKKNVHIFSGLLVCGHCSEIMTATPGNRRADGWTPSNYACMNRRKGSSLCEGRYVSDVIVAPFVLTLISNILTAKDKVGARTEPATLEKRLLSGAVFCDVKHIKPDGLNQLLSILKSGISGLEYSPEFKNSQPNDMASEVESLKDQRRKKEIALRRLKSLFLYGSEEIPETEFILEQRKLIDDLNAIDAKLLKLDVDNAGLQSLDDAFVEKASYFIMVERIMNGDRDDPASFIRNVDLSVVKSFLNTIIRKIVILSGKVSSIEFKNGITLEFSYE

SEQ ID NO: 1166 - protein, 573 aa, Unknown
  Description of Unknown: Integrase B1167 sequence
  PTHR30461:SF3,cd00338,SM00857,G3DSA:1.10.10.2600,IPR036162, PF13408,IPR025827,PS51737,G3DSA:3.40.50.1390,IPR006119, IPR038109,PF07508,IPR011109,SSF53041,PTHR30461, PS51736,Coil,PF00239
MAKVKLPDKPRVAIYTRVSTLHQIDKDSLPMQRQDLINYARLILNTEDYVIYEDAGYSGKNTDRPKFQEMMQQVRLGMFTHILVWKIDRISRNLLDFATMYSELKQLGVVFVSKNEQFDTSSAMGEAMLKIILIFAELERNMTSERVTAAMLSRAANGQWNGGRVPLGYDYDPETKTFTINESEAAVVKIIHDKYEQERSLVSLARYLNGHGYRTRTGCTYSPSTLLIILRNIFYCGDYRYNVLKDGDRQKRKKESEWITVKDHHPAIISREQKEEIARILKENRRLECERRGIYSKKKNVHVFGGLVICGNCGHAMTSTIRPADQDGIRWSVYVCPTKRRSEYLCKGRATSEVVLGEFVFNYILNMLNVQKNFDSINSVEDMEKMLLSGSTFRDVDGIERAGLDDLYNMLASGLTEKAPFDSSVEVRKKPVVSDIELENLNTEKTKIERAAERLQNLYLYSDDSISQKDYIIQREKLMSQLAEVNEQIGMVMSNADEKDVSDEEFVHAASKFILTQKLEGRTYIYYKRLATTVSREVLRSFVMSIIENITIYDGRVQTIVFKNGLSHTFILK

SEQ ID NO: 1167 - protein, 573 aa, Unknown
  Description of Unknown: Integrase B1168 sequence
  PTHR30461:SF3,IPR036162,PS51737,IPR011109,PTHR30461, PS00397,PF00239,G3DSA:1.10.10.2600,IPR006119,SSF53041, cd00338,SM00857,IPR025827,IPR038109,PS51736, IPR006118,PF13408,G3DSA:3.40.50.1390,PF07508,Coil
MQKNQTKKAALYIRVSTHYQIDKDSLPFQRNELINYAKYALGIDDYAIFEDAGYSGKNTDRPAYQDMMRRIRAKEFSHLCVWKIDRISRNLLDFAAMYEELKKFNCTFVSKNEQFDTSSAIGEAMLRIILVFAELERKLTAERVTSIMYSRANKGLWNGAPIPLGYKWDAKGKYPVIDEDTAVVVRYIYDQYEKIHSTMKLSDKLNRENIKSARGGEWTGTTVKGILRNPFYKGTYRYNYKTQTGRIKPVEEQIVHEDNHPGIIDKEQWDRVNKILDENSTRSVAQLRSNVKYTHIFSKLLRCGQCGHTMGGGLDRARSDGYRPSRYYCTSHTRKAGCTNGVYSDVYLGPFVFNYIANLVRAQRALTDSQKPRDLERMLLRGKFFDNVAGIEQQGLLDTYNTILYGSGEDVMLQPSPEIAAQSASELELLDRDQKKYERALERIEQLYLYSEESMPEKDYVLKRNELKTMLDNIAERRAEVNSRLGLAPASSDFLEKATYFYLTNSLNQKRSLDFRKMVDTFEPKMLQDFLCSVIDHITVVDGHVASISFKNGLTNKFIYKATKPPKNASTKP

SEQ ID NO: 1168 - protein, 573 aa, Unknown
  Description of Unknown: Integrase B1169 sequence
  PTHR30461:SF3,IPR036162,PS51737,IPR011109,PTHR30461, PS00397,PF00239,G3DSA:1.10.10.2600,IPR006119,SSF53041, cd00338,SM00857,IPR025827,IPR038109,PS51736, IPR006118,PF13408,G3DSA:3.40.50.1390,PF07508,Coil
MQKNQTKKAALYIRVSTHYQIDKDSLPFQRNELINYAKYALGIDDYAIFEDAGYSGKNTDRPAYQDMMRRIRAKEFSHLCVWKIDRISRNLLDFAAMYEELKKFNCTFVSKNEQFDTSSAIGEAMLRIILVFAELERKLTAERVTSIMYSRANKGLWNGAPIPLGYKWDAKGKYPVIDEDTAVVVRYIYDQYERIHSTMKLSDKLNRENIKSARGGEWTGTTVKGILRNPFYKGTYRYNYKTQTGRIKPVEEQIVHEDNHPGIIDKEQWDRVNKILDENSTRSVAQLRSNVKYTHIFSKLLRCGQCGHTMGGGLDRARSDGYRPSRYYCTSHTRKAGCTNGVYSDVYLGPFVFNYIANLVRAQRALTDSQKPRDLERMLLRGKFFDSVAGIEQQGLLDTYNTILYGSGEDVMLQPSPEIAAQSASELELLDRDQKKYERALERIEQLYLYSEESMPEKDYVLKRNELKAMLDNIAERRAEVNSRLGLAPASSDFLEKATYFYLTNSLNQKRSLDFRKMVDTFEPKMLQDFLCSVIDHIVVVDGHVASISFKNGLTNKFIYKATKPPKSASTKP

SEQ ID NO: 1169 - protein, 573 aa, Unknown
  Description of Unknown: Integrase B1170 sequence
  PTHR30461:SF3,IPR036162,PS51737,IPR011109,PTHR30461, PS00397,PF00239,G3DSA:1.10.10.2600,IPR006119,SSF53041, SM00857,IPR025827,IPR038109,PS51736,cd03768, IPR006118,PF13408,G3DSA:3.40.50.1390,PF07508,Coil
MTEQNEKIVALYVRVSTGYQVDKDSLPFQKKELKAYCEHVLHIDKNRIEIFEDAGKSGKNTKRPAFERMMGKVKSGQVSHVIVYKIDRISRNLVDFSLMYDDFKYNNVTFISLNEQFDTSSAIGEAILKIILVFAELERKLTSERVTDVMIGRAQNGQWNGARVPYGWDWDEEKQCPVHSKKEAQYAIAMYEMYLKVKSTGKIRDYNNSHNIPTKRGGEWTSKTVTDFLRNPINKGAYRYNYRESARGRKKPNEEVVFIENAFPPLVEPETWEKVNKILDINRDKRNMGGLHPIEKNCNVFAGLIQCGICGTGYIVDKKDRRRKNGFTPSMYHCGAKTKAIHCQNPNVSDVKIGPFIINYIAAMVRVSKSKRKIKTPEALEEMLLADKVVFGDIAGLSTDSLNYTFEMITGKYTTDNAVWRTNPVNQSNKESNPEEIEKLKNEIKKYSRAKERLEDAYYFSDDGMSEKEYLEKKNKFDSMRVSAENKIKELTEASISSGIDEDSFIKSATSFLLAHKIYNESHIVYSDLAGVIEEETLKEFFNLILDYIVVVDRRIVEIVFSNGLSHQFIYRK

SEQ ID NO: 1170 - protein, 573 aa, Unknown
  Description of Unknown: Integrase B1171 sequence
  PTHR30461:SF3,SM00857,G3DSA:1.10.10.2600,IPR036162,PS51737, G3DSA:3.40.50.1390,IPR006119,IPR038109,PF07508,IPR011109, SSF53041,PTHR30461,Coil,PS51736,cd00338, PF00239
MYDIYNQKPTSRKVVIYARVSTEHEAQLSALENQKDWYKPILQQHPEWDIVKMYVDEGITGTSAKKRPQFMQMIQDASSGNFDLILTREVSRFARNTVDTLQYTRELKSKGVEVFFLNDNIKTFDGDGELRLTIMATLAQDESRKTSVRVKSGQQTSMENGVFYGNGNILGYDRVGKDMVINPEQAKTVRMIFDWYLDGWGMRKIQFELEKAGRLTAMGKSNWHVSNISKILRNSFYCGIITYHKEFTPDFLEQKKIRNFGDMEFTQVRGNHKPIITEEEYDQAQKRINSRRKTLSVDTSGQRMYGEKPPSDVWVKLLECECGHKFNRKMWHNTTEGKQYGYQCYSSIRTGTVRTRLNKGLPIDGICQTPMIAGWKLQMMAKYIFKNYLSDTDQVLSLAESMLEKHIDDEEEVCDNTDIINQKKEELQKLSKRLDNLIEMRADGELTRDIFILKKESTENSISQLKKELAELEPSEIESEIDEVTSKEKITILKYALDQYTNFDSDADIPESVIEAFVEKIIARKDGFDWYLRFNPEESPMGCLVDGKRKRGAKVSSFCSPQHRQLSLRRMHN

SEQ ID NO: 1171 - protein, 573 aa, Unknown
  Description of Unknown: Integrase B1172 sequence
  cd03768,SM00857,IPR006118,G3DSA:1.10.10.2600,IPR036162, PS51737,G3DSA:3.40.50.1390,IPR006119,IPR038109,PF07508, IPR011109,SSF53041,PTHR30461,PS00397,PS51736, Coil,PF00239
MTKKAAIYLRVSSIDQNYERQEIELKALAKCLGYEVKYIFEEKRSAVLKMDTRDELTQMRKLTKNEIDRIFIWDITRLSRRAIDFITLINEFTDKGICLHFKDKNIITLDEDGKQDMFVSMYLYILGLFAQMDAENLKAKMRSGRERGLAIGHAYTGCAPYGYKLINKQLYIDEKEAETVRAIFNNYVDGKSIQHIIDILNSNKIPTRTGILWTRNSIYAIITNPVYKGKPELTSITKRDENKKPLEKITRVFKAPVIIESPIWDEAQVQRKKHKSFIDKSKEREALLRGILQCGNCGKAYCTAINGSGVPTYICSDNRANINQKLNCKNGGVACYFLDSICWQTIKDIYAYKNFQDTFTKEKAKNQQLLQENQTQINNFIDKQIELDKENERVNKGYRIGIYTDSEAIRAKGEINNNKARYEKMIEELKAQNSILTAKIKQDFSHYKIPTVELSYEEKKAVCKELIETAKIYSYPPNNRIVQLQLKMGLIFNIVLNPKRRLYYIIDNSTVTFNNPQSAPIFLREELKDKDFTVTCDNNDYFNEEIFGEYSFAQMWNIMDKYGYIQDHPKVKK

SEQ ID NO: 1172 - protein, 573 aa, Unknown
  Description of Unknown: Integrase B1173 sequence
  cd03768,SM00857,G3DSA:1.10.10.2600,IPR036162,PF13408, IPR025827,G3DSA:3.40.50.1390,PS51737,IPR006119,IPR038109, PF07508,SSF53041,IPR011109,PTHR30461,PS51736, Coil,PF00239
MKKAVIYSRVSTLEQDYTSQTAELKKEAERMGYEVTHIYEEKESGFVDDRPELAKVLALTNADTDAVFVWEISRLSRRTVMVLSTIEDIEKKGILIYAKNENYRSWNEKGVKDSTSKLVLTLYASIAEAEALKFKERVKRGKRYRVLVEKKSYCNTSVFGYMKDENGRLVINEEEAEIVRDIFNKALEGYSGRRLKLYLKSKWGLDWSANTLNYLLHNTAYMGQKKVGGKTYYKAEKKKLEEGTKIRFFNPETDVVETPAIINSELFNKVQTAITNRKTRSSAKEARNAKPKLLKGLVLCGRCGKVYTNTGRMYTCTSGTNEYSERCGSTSVATASLDSAVWNVTKEIFSEAMAKELAAQKSEPIAAEIARLKEEIEGYNEAISNLKKQVGNLLRIASKADDVADDIIEKINILKKEQQMAKAEIADREAKIALLQKRLDAPAEMTEITDEDEKFEYLHKVIEAVFVYGEHKHKILAIQYLNGITAYCIRLWKDWYWFLDKGELVITDAVALQKNSPVDLKLKDSILIEVTDSNNAYYSGEDTDKEIFGQYTTEGFYAAMMQNKQLKPVAVKK

SEQ ID NO: 1173 - protein, 573 aa, Unknown
  Description of Unknown: Integrase B1174 sequence
  PTHR30461:SF3,IPR036162,PS51737,IPR011109,PTHR30461, PS00397,PF00239,G3DSA:1.10.10.2600,IPR006119,SSF53041, cd00338,SM00857,IPR025827,IPR038109,PS51736, IPR006118,PF13408,G3DSA:3.40.50.1390,PF07508,Coil
MNKNQERPKKAALYVRVSTNYQIDKDSLPMQRQDLVNYAKLMFGIDDYVIFEDAGYSGKNTDRPEFQNMMKRIRNGEFTHLLCWKIDRISRNLLDFAAMYQELKDLNVTFVSKNEQFDTSTAIGEAMLKIILIFAELERNMTSERVTATMLSRAQNGLWNGGKVPYGYSYDKEQKEFSVNPEEAEIVKKIFDAYSNHHSIVTVARALNEDGYSSRAGNDWSPVSIFIILTNPFYKGTYRYNHYKIPGLKVEKDPSEWIEVPDHHPRIISDEKFEYVNSILKENSRSKRLPGKQHATNNTHIFGGLLYCSSCGSIYVSSPARMQSCGYRPSKYACPNLRKRKACTSKSISDPVIGEFLMNYVLNMMRAKDSFSSIHNSDDLEHALLRGSTFDSVDHIGKDGVESYFYMLTTVPINGKRMRKPKKVVTIDPELKRLRAEKRKTERALERLMNLYLYSEDSISKKDYTIRKSALEDYLKEITENLNMIDRSNNHEIISDENFIKRASYFILNKELADKNYIYFKKLAMDMDPEILKNFFHEIIDSVVMEQNRVMEIVFRNGLTHTFYYKDTEKPEA

SEQ ID NO: 1174 - protein, 573 aa, Unknown
  Description of Unknown: Integrase B1175 sequence
  PTHR30461:SF3,IPR036162,PS51737,IPR011109,PTHR30461, PF00239,G3DSA:1.10.10.2600,IPR006119,SSF53041,cd00338, SM00857,IPR025827,IPR038109,PS51736,mobidb-lite, PF13408,G3DSA:3.40.50.1390,PF07508,Coil
MAKKKKPAGGNAIIYARYSSHNQRDVSIEQQIEACRKHAAELGLTITDTYEDRAISGRTDNRPAFQRMMRDAEDGKFQYVLAWKSNRMGRNMMQAMVNESRLMDCGVKVFYAEEDFDDSAAGRFALRSMMNVNQFYSDNLAEDVRRGLMDNASKCMANGRQPLGYKRGEGGKVVVDEPAAAIVREIYTRIASGEMFMDIARDLNRRGIKTQSGSEWNKSSFNVLCRNERYRGIYIYGDTRIEGGIPPIVDDVLWYKVQEVLKVKKSKNRHHCPSDEDYLLTGKLRCGKCGGYMIGMSGRSKTGDVHHYYACQNRRVGHTCDKKNIRRDVVEPAVAQAIKQYCLTDDAIEWITDQTIAYWEDEDRKLQIDSIENDLSAVQSSISNVMKAIEMGVITETTRDRLIELERQQTDLKSKLALAKEEIVHVDRKDLISSLLAFRHGNVHDRAYQEKLFNAFLIAVYVYDDDHLKLVFNSFGKDDTVNIALDLGENDDNSGLSDVSKSSPILSNGQPEQSHLRKLRWLFCLHYSARRNHSECPPLCSGHFQRKDYFNISRLSHSAECSKRYFHRRGRNG

SEQ ID NO: 1175 - protein, 573 aa, Unknown
  Description of Unknown: Integrase B1176 sequence
  PTHR30461:SF3,SM00857,G3DSA:1.10.10.2600,IPR036162,PF13408, PS51737,G3DSA:3.40.50.1390,IPR025827,IPR006119,IPR038109, PF07508,IPR011109,SSF53041,PTHR30461,PS51736, cd00338,PF00239
MAKRSAKKNEYQSAEQIGVIYARYSSHNQKEESIEQQIAECSDFAAKNGIRIVGIYADKAVSGRSDRRPNFQRMMRDAEKRQFQIVIAYKSNRIARNMLNALQYEARLDLLGIKTLYAKEEFGNTAAGRFALRTMMNVNQFYSENMGEDIKRGMVDNANECKVNGMLPLGYVKSKEGKYAIAPDEAAVVREIFDSVLKDVPVAEIARSLNQRGIHTKLGREWNKNSFHIMLKNDNYIGVYRHSGVVVEDGIPPILEKEVFTAVQEKLANKKKTAGRRSANGEYLLTGKLFCGYCGSYMIGVSGTGENGTVHNYYQCQKRHAEGRCEKKNVRRDFIEKLIARLTQDYILQDDTIEWIADSTMSFQAMARRESGVAQLERDLADNRKVAKNIMAAIEQGIITETTKARLLEVEGTIHDLERSLSIAKAASQPIERERVVFSLEQMREGNVGSKDHQKKLIDTFVKSVTLWDDRIQIDYYHTPGKHKFSYSLEELTSKAENESNASDVRTDSLELHHCRRELHRFTTAFLLAAAPSRLYGTIKKTQESNSCVFFACIDGCVPQCSARLGIVWSSKR

SEQ ID NO: 1176 - protein, 573 aa, Unknown
  Description of Unknown: Integrase B1177 sequence
  PTHR30461:SF3,IPR036162,PS51737,IPR011109,PTHR30461, PS00397,PF00239,G3DSA:1.10.10.2600,IPR006119,SSF53041, cd00338,SM00857,IPR025827,IPR038109,PS51736, IPR006118,PF13408,G3DSA:3.40.50.1390,PF07508,Coil
MQKNQTKKAALYIRVSTHYQIDKDSLPFQRNELINYAKYALGIDDYAIFEDAGYSGKNTDRPAYQDMMRRIRAKEFSHLCVWKIDRISRNLLDFAAMYDELKKFNCTFVSKNEQFDTSSAIGEAMLRIILVFAELERKLTAERVTSIMYSRANKGLWNGAPIPLGYKWDAKGKYPVIDEDTAVVVRYIYDQYEKIHSTMKLSDKLNRENIKSARGGEWTGTTVKGILRNPFYKGTYRYNYKTQTGRIKPVEEQIIHEDNHPGIIDKEQWDRVNKILDENSTRSVAQLRSNVKYTHIFSKLLRCGQCGHTMGGGLDRARSDGYRPSRYYCTSHTRKAGCTNGVYSDVYLGPFVFNYIANLVRAQRALTDSQKPRDLERMLLRGKFFDNIAGIEQQGLLDTYNTILYGSGEDVMLQPSPEIAAQSASELELLDRDQKKYERALERIEQLYLYSEESMPEKDYVLKRNELKAMLDNIAERRAEVNSRLGLAPASSDFLEKATYFYLTNSLNQKRSLDFRKMVDTFEPKMLQDFLCSVIDHITVVDGHVASISFKNGLTNKFIYKATKPPKNASTKP

SEQ ID NO: 1177 - protein, 573 aa, Unknown
  Description of Unknown: Integrase B1178 sequence
  PTHR30461:SF3,IPR036162,PS51737,IPR011109,PTHR30461, PS00397,PF00239,G3DSA:1.10.10.2600,IPR006119,SSF53041, cd00338,SM00857,IPR025827,IPR038109,PS51736, IPR006118,PF13408,G3DSA:3.40.50.1390,PF07508,Coil
MQKNQTKKAALYIRVSTHYQIDKDSLPFQRNELINYAKYALGIDDYAIFEDAGYSGKNTDRPAYQDMMRRIRAKEFSHLCVWKIDRISRNLLDFAAMYEELKKFNCTFVSKNEQFDTSSAIGEAMLRIILVFAELERKLTAERVTSIMYSRANKGLWNGAPIPLGYKWDAKGKYPVIDEDTAVVVRYIYDQYERIHSTMKLSDKLNRENIKSARGGEWTGTTVKGILRNPFYKGTYRYNYKTQTGRIKPVEEQIVHEDNHPGIIDKEQWDRVNKILDENSTRSVAQLRSNVKYTHIFSKLLRCGQCGHTMGGGLDRARSDGYRPSRYYCTSHTRKAGCTNGVYSDVYLGPFVFNYIANLVRAQRALTDSQKPRDLERMLLRGKFFDSVAGIEQQGLLDTYNTILYGSGEDVMLQPSPEIAAQSASELELLDRDQKKYERALERIEQLYLYSEESMPEKDYVLKRNELKDMLDNIAERRAEVNSRLGLAPASSDFLEKATYFYLTNSLNQKHSLDFRKMVDTFEPKMLQDFLCSVIDHITVVDGHVASISFKNGLTNKFIYKATKPPKNASTKP

SEQ ID NO: 1178 - protein, 572 aa, Unknown
  Description of Unknown: Integrase B1179 sequence
  cd03768,PTHR30461:SF3,SM00857,IPR006118,G3DSA:1.10.10.2600, IPR036162,PS51737,G3DSA:3.40.50.1390,IPR006119,IPR038109, PF07508,IPR011109,SSF53041,PTHR30461,PS00397, PS51736,Coil,PF00239
MRKRIVGYARVSTEKQDLERQKILIREYCSNNNYDLVKIISEKVSGAKKDRESINELLAVTKDTADMVVVSELSRISREKECLTVLNTINDILENGLDVLFLDDTSKVYSAYTELNVIDIITLTVKAHSAAEERDKITARMRTGKITKLNINPYMYTGSLVPYGFKVIDNPDYKGQKCNIPARKLMVIDESKTKDVQFIYQLVLNGTTLRDAAEEVNKLGLRTQLNKPFCETSISKMIKNPIYNGRRRFKGLNLPLMDKIISDNDWNRAQICVSQNQLFKGKTTKNFNPLKGLVFCPCGYALMLHKMIRKDGSGYFVMTCCKKNDKEYRKKCRNSGIVSHVLLPTVWKCVKDTLLLSEYTTKTTSEVHRINGIIEGLEDRISGLIDEIDSHKKEMARLSKAITLVTVKGLITQYENEYVTEEAKVTEIEAKINNIRDEISNYKANITKINSITYNSQLTNLTDQEKASVYQKVLSKVVYYSIDYFRGFIVISYKNGLENIIAINKTTTGYISPLPSSFSFNAETRKIRVTIGKKQTSIKEFSLSDIENIEYSFKELEANFNPQQWDIQSQIL

SEQ ID NO: 1179 - protein, 572 aa, Unknown
  Description of Unknown: Integrase B1180 sequence
  SM00857,G3DSA:1.10.10.2600,IPR036162,PF13408,PS51737, IPR025827,G3DSA:3.40.50.1390,IPR006119,IPR038109,PF07508, SSF53041,IPR011109,PTHR30461,Coil,cd00338, PF00239
MAYRKITDIRDTIGMRAVFYARVSTAEEEQLNAIELQIEENRGCIKDHGWKLVGEYIDRSKSGTMVKGRDDYQRLYEDLYEDLFDIVVIKDQERLQRNTLDWYLFINRVVQTGKLLFMYMDGKFYSPDDALITGVRAIIAEEFSRNLSKKLHNYHDHRIEKARQGQEIALQGSGNVYGWDKKDGKYYINPEQAKVRRLMCEGIMARKGSTLIAKELNEAGYRNTVGKLWKPMDIPKFVYDCKNVGTMIINKERHDFESKQTIKLPKEEWVYVENALPPIVTQEEWDLICKIHEERVIATGSDRRGKKTSGYSFSGKLVCGICGAPYWRKQRVSKDEYWVCSTKQTKGRRTRKRDSTMGKAGEINPLGCDNENISYNSLMEIMGVVSERLQANTDTIKQDMINWLTKLRKQLLEANGGHTEADLQRELSRKSKLLDAYLDGILNKQEYQTKAEELDERIIQLKAETEKNKANSGDIAEIDKVLANIDEEVSRYVDGNEKLKVEYLLEHLEQVQIFPDKVIVIVPILSEGIVVEKTQYVSREKCSKIHTESMIHYLEDYMYCTRKLGLYVQLVA

SEQ ID NO: 1180 - protein, 572 aa, Unknown
  Description of Unknown: Integrase B1181 sequence
  PTHR30461:SF3,IPR036162,PS51737,IPR011109,PTHR30461, PS00397,PF00239,G3DSA:1.10.10.2600,IPR006119,SSF53041, cd00338,SM00857,IPR025827,IPR038109,PS51736, IPR006118,PF13408,G3DSA:3.40.50.1390,PF07508,Coil
MASRIAEKLAAKKAAIYIRVSTHWQVDKDSLKVQRRELIAYVTLVLGITDYVVFEDPGYSAKNTDRPEYQAMMDRIRTGEFTHLVVWKIDRISRNLIDFAAMHDELQSLGVTFVSKNEQFDTSSAIGEAMMRIILIFAELERKTTAERVTAVMLSRASDGQWNGGRVPFGYSWSKEAKTFSIVPEEAKAIRRMAELYEQYQSLLYVAKYLNDAGIVTKTGGQWTPTTVRTILTNPWYIGQYVYNVHSDGKGIEKRDSDEWITVENHHEPILNEDVFCRMKFLLTRNKRGGVPSHKTYVRKNIHVFAGLLRCGQCGSNMTANLDRRRANGFRPSQYACGSRRRKGTSCTNKYISDTTLGPFVLNYVANIIRASKNSSEATTPEVLERKLLRGEAFEDVASVSTDALGQLLDAFRSAGDAVEYRPQIAFSGDDNSIREIDTLRARRRKLDNALARLNALYLYDDEAMPEKDFVMQRGQITKQLEEVNARIEELQNQESSEELGDDFIGKASYYIMANKLIEDRYIDYEKYIRAIDPSIPHSFLQQIIDHIVVNDGRVISITFKNGSTHTFTYKT

SEQ ID NO: 1181 - protein, 572 aa, Unknown
  Description of Unknown: Integrase B1182 sequence
  PTHR30461:SF3,IPR036162,PS51737,IPR011109,PTHR30461, PS00397,PF00239,G3DSA:1.10.10.2600,IPR006119,SSF53041, cd00338,SM00857,IPR025827,IPR038109,PS51736, IPR006118,PF13408,G3DSA:3.40.50.1390,PF07508,Coil
MASRIAEKLAAKKAAIYIRVSTHWQVDKDSLKVQRRELIAYVTLVLGITDYVVFEDPGYSAKNTDRPEYQAMMDRIRTGEFTHLVVWKIDRISRNLIDFAAMHDELQSLGVTFVSKNEQFDTSSAIGEAMMRIILIFAELERKTTAERVTAVMLSRASDGQWNGGRVPFGYSWSKETKTFSIVPEEAKAIRRMAELYEQYQSLLYVAKYLNDAGIVTKTGGQWTPTTVRTILTNPWYIGQYVYNVHSDGKGIEKRDSDEWITVENHHEPILNEDVFCRMKFLLTRNKRGGVPSHKTYVRKNIHIFAGLLRCGQCGSNMTANLDRRRANGFRPSQYACGSRRRKGTSCTNKYISDTTLGPFVLNYVANIIRASKNSSEATTPEVLERKLLRGEAFEDVASVSTDALGQLLDAFRSAGDAVEYRPQIAFSGDDNSIREIDTLRARRRKLDNALARLNALYLYDDEAMPEKDFVMQRGQITKQLEEVNARIEELQNQESSEELGDDFIGKASYYIMANKLIEDRYIDYEKYIRAIDPSIPRSFLQQIIDHIVVNDGRVTSITFKNGATHTFTYKT

SEQ ID NO: 1182 - protein, 572 aa, Unknown
  Description of Unknown: Integrase B1183 sequence
  PTHR30461:SF3,IPR036162,PS51737,IPR011109,PTHR30461, PS00397,PF00239,G3DSA:1.10.10.2600,IPR006119,SSF53041, cd00338,SM00857,IPR025827,IPR038109,PS51736, IPR006118,PF13408,G3DSA:3.40.50.1390,PF07508,Coil
MASRIAEKLAAKKAAIYIRVSTHWQVDKDSLKVQRRELIAYVTLVLGITDYVVFEDPGYSAKNTDRPEYQAMMDRIRTGEFTHLVVWKIDRISRNLIDFAAMHDELQSLGVTFVSKNEQFDTSSAIGEAMMRIILIFAELERKTTAERVTAVMLSRASDGQWNGGRVPFGYSWSKETKTFSIVPEEAKAIRRMAELYEQYQSLLYVAKYLNDAGIVTKTGGQWTPTTVRTILTNPWYIGQYVYNVHSDGKGIEKRDSDEWITVENHHEPILNEDVFCRMKFLLTRNKRGGVPSHKTYVRKNIHVFAGLLRCGQCGSNMTANLDRRRANGFRPSQYACGSRRRKGTSCTNKYISDTTLGPFVLNYVANIIRASKNSSEATTPEVLERKLLRGEAFEDVASVSTDALGQLLDAFRSAGDAVEYRPQIAFSGDDNSIREIDTLRARRRKLDNALARLNALYLYDDEAMPEKDFVMQRGQITKQLEEVNARIEELQNQESSEGLGDDFIGKASYYIMANKLIEDRYIDYEKYIRAIDPSIPRSFLQQIIDHIVVNDGRVISITFKNGSTHTFTYKT

SEQ ID NO: 1183 - protein, 572 aa, Unknown
  Description of Unknown: Integrase B1184 sequence
  PTHR30461:SF3,IPR036162,PS51737,IPR011109,PTHR30461, PS00397,PF00239,G3DSA:1.10.10.2600,IPR006119,SSF53041, cd00338,SM00857,IPR025827,IPR038109,PS51736, IPR006118,PF13408,G3DSA:3.40.50.1390,PF07508,Coil
MASRIAEKLAAKKAAIYIRVSTHWQVDKDSLKVQRRELIAYVTLVLGITDYVVFEDPGYSAKNTDRPEYQAMMDRIRTGEFTHLVVWKIDRISRNLIDFAAMHDELQSLGVTFVSKNEQFDTSSAIGEAMMRIILIFAELERKTTAERVTAVMLSRASDGQWNGGRVPFGYSWSKETKTFSIVPEEAKAIRRMAELYEQYQSLLYVAKYLNDAGIVTKTGGQWTPTTVRTILTNPWYIGQYVYNVHSDGKGIEKRDSDEWITVENHHEPILNEDVFCRMKFLLTRNKRGGVPSHKTYVRKNIHVFAGLLRCGQCGSNMTANLDRRRANGFRPSQYACGSRRRKGTSCTNKYISDTTLGPFVLNYVANIIRASKNSSEATTPEVLERKLLRGEAFEDVASVSTDALGQLLDAFRSAGDAVEYRPQIAFSGDDNSIREIDTLRARRRKLDNALARLNALYLYDDEAMPEKDFVMQRGQITKQLEEVNARIEELQNQESSEELGDDFIGKASYYIMANKLIEDRYIDYEKYIRAIDPSIPRSFLQQIIDHIVVNDGRVISITFKNGSTHTFTYKT

SEQ ID NO: 1184 - protein, 572 aa, Unknown
  Description of Unknown: Integrase B1185 sequence
  SM00857,G3DSA:1.10.10.2600,IPR036162,PF13408,IPR025827, G3DSA:3.40.50.1390,PS51737,IPR006119,IPR038109,PF07508, SSF53041,IPR011109,PTHR30461,Coil,PS51736, cd00338,PF00239
MAYRKITDIKDTIGMRAVFYARVSTAEEEQLNAIELQIEENRNCIHKNKWKKVDEYIDRSKSGTMVKGRDEYQRLYEDLYEDLFDIVVIKDQERLQRNTLDWYLFINRVVQTGKLLFMYMDGKFYSPDDALITGVRAIIAEEFSRNLSKKLHNYHDHRIEKARQGQEIALQGSGNVYGWDKKDGKYYINPEQAKVRRLMCEGIMARKGSTLIAKELNDAGYRNTVGKPWKPMDIPKFVYDCKNVGTMIINKERHDFESKQTIKLPKEEWVYVENALPPIVTQEEWDLICKIHEERVIATGSDRRGKKTSGYSFSGKLVCGICGAPYWRKQRVSKDEYWVCSTKQTKGRRTRKRDSTMGKAGEINPLGCDNENISYNSLMEIMGVVSERLQANTDTIKHDMINWLTKLRKQLLEANGGHAEADLQRELSRKSKLLDAYLDGILNKQEYQKKAEELDERIIQLKAETEKNKANSGDIAEIDKVLANIDEEVSRYVDGNEKLKVEYLLEHLEQVQIFPDKVIVIVPILSEGIVVEKAQYVSREKCSKIHTESMIHYLEDYMYCTRKLGLYVQLVA

SEQ ID NO: 1185 - protein, 572 aa, Unknown
  Description of Unknown: Integrase B1186 sequence
  SM00857,G3DSA:1.10.10.2600,IPR036162,PF13408,IPR025827, G3DSA:3.40.50.1390,PS51737,IPR006119,IPR038109,PF07508, SSF53041,IPR011109,PTHR30461,Coil,cd00338, PF00239
MAYRKITDIRDTIGMRAVFYARVSTAEEEQLNAIELQIEENRGCIKDHGWKLVGEYIDRSKSGTMVKGRDDYQRLYEDLYEDLFDIVVIKDQERLQRNTLDWYLFINRVVQTGKLLFMYMDGKFYSPDDALITGVRAIIAEEFSRNLSKKLHNYHDHRIEKARQGQEIALQGSGNVYGWDKKDGKYYINPEQAKVRRIMCEGIMARKGSTLIAKELNDAGYRNTVGKPWKPMDIPKFVYDCKNVGTMIINKERHDFESKQTIKLPKEEWVYVENALPPIVTQEEWDLICKIHEERVIATGSDRRGKKTSGYSFSGKLVCGICGAPYWRKQRVSKDEYWVCSTKQTKGRRTRKRDSTMGKAGEINPLGCDNENISYNSLMEIMGVVSERLQANTDTIKHDMINWLAKLRKQLLEANGGHTEADLQRELSRKSKLLDAYLDGILNKQEYQKKAEELDERIIQLKAETEKNKANSGDIAEIDKVLANIDEEVSRYVDGNEKLKVEYLLEHLEQVQIFPDKVIVIVPILSDGIVVEKTQYLSREKCSEIHTESMIHYLEDYMYCTRKLGLYVQLVA

SEQ ID NO: 1186 - protein, 572 aa, Unknown
  Description of Unknown: Integrase B1187 sequence
  SM00857,G3DSA:1.10.10.2600,IPR036162,PF13408,IPR025827, G3DSA:3.40.50.1390,PS51737,IPR006119,IPR038109,PF07508, SSF53041,IPR011109,PTHR30461,Coil,cd00338, PF00239
MAYRKITDIKDTIGMRAVFYARVSTAEEEQLNAIELQIEENRGCIKDHGWKLVGEYIDRSKSGTMVKGRDDYQRLYEDLYEDLFDIVVIKDQERLQRNTLDWYLFINRVVQTGKLLFMYMDGKFYSPDDALITGVRAIIAEEFSRNLSKKLHNYHDHRIEKARQGQEIALQGSGNVYGWDKKDGKYYINPEQAKVRRLMCEGIMARKGSTLIAKELNDAGYRNTVGKPWKPMDIPKFVYDCKNVGTMIINKERHDFESKQTIKLPKEEWVYVENALPPIVTQEEWDLICKIHEERVIATGSDRRGKKTSGYSFSGKLVCGICGAPYWRKQRVSKDEYWVCSTKQTKGRRTRKRDSTMGKAGEINPLGCDNENISYNSLMEIMGVVSERLQANTDTIKQDMINWLTKLRKQLLEANGGHTEADLQREISRKSKLLDAYLDGILNKQEYQKKAEELDERIIQLKAETEKNKANSGDIAEIDKVLANIDEEVARYIDGNEKLKVEYLLEHLEQVQIFPDKVIVIVPILSEGIVVEKTQYVSREKCSKIHTESMIHYLEDYMYCTRKLGLYVQLVA

SEQ ID NO: 1187 - protein, 572 aa, Unknown
  Description of Unknown: Integrase B1188 sequence
  SM00857,G3DSA:1.10.10.2600,IPR036162,PF13408,PS51737, G3DSA:3.40.50.1390,IPR025827,IPR006119,IPR038109,PF07508, IPR011109,SSF53041,PF00239,PTHR30461,Coil, cd00338
MAYRKITDIRDTIGMRAVFYARVSTAEEEQLNAIELQIEENRGCIKDHGWKLVGEYIDRSKSGTMVKGRDDYQRLYEDLYEDLFDIVVIKDQERLQRNTLDWYLFINRVVQTGKLLFMYMDGKFYSPDDALITGVRAIIAEEFSRNLSKKLHNYHDHRIEKARQGQEIALQGSGNVYGWDKKDGKYYINPEQAKVRRLMCEGIMARKGSTLIAKELNDAGYRNTVGKPWKPMDIPKFVYDCKNVGTMIINKERHDFESKQTIKLPKEEWVYVENALPPIVTQEEWDLICKIHEERVIATGSDRRGKKTSGYSFSGKLVCGICGAPYWRKQRVSKDEYWVCSTKQTKGRRTRKRDSTMGKAGEINPLGCDNENISYNSLMEIMGVVSERLQANTDTIKQDMINWLTKLRKQLLEANGGHTEADLQRELSRKSKLLDAYLDGILNKQEYQKKAEELDDRIIQLKAETEKNKANSGDIAEIDKVLANIDEEVSRYVDGNEKLKVEYLLEHLEQVQIFPDKVIVIVPILSEGIVVEKAQYVSREKCSKIHTESMIHYLEDYMYCTRKLGLYVQLVA

SEQ ID NO: 1188 - protein, 572 aa, Unknown
  Description of Unknown: Integrase B1189 sequence
  cd03768,SM00857,G3DSA:1.10.10.2600,IPR036162,PS51737, G3DSA:3.40.50.1390,IPR006119,IPR038109,PF07508,IPR011109, SSF53041,PTHR30461,PS51736,Coil,PF00239
MNEQKIVALYTRVSTGYQIDKDSLPFQKKELSAYCKHILHAEKMELFEDAGKSGKNTDRPAFLRMMKKIRAGEISHVVVYKIDRISRNLVDFSVMYDEFKKYRVTFISLNEQFDTSSAIGEAVLKIILVFAELERKLTSERVIGVMLDRAMSGKWNGARMPFGWKWNPETEFPEHDPVELEKALTLYRVYDETHSTAKVRDYCYDNDIQTKRGGKWTTTTILNFLKNPMNKGDYRYNYRGSARGTKKPENEVVYLPGVFPPLVDPDLWDRVNAIIKDNAEKHDIHKNPHIKKHVHIFTGGILKCAYCGASFQVSRLDKKRLNGFQPSLYVCTSRRTYRACDASGASDVVIGAFFFNYVRNLVQATKSRAKIGTPADLEQILLSGDEFSRIRYIDPSDLDIIYQAIRGTIAPGSGVTYIPAPPDSDKKDAPELSGLRTEAARLSRALDRLKKAYLFDDDAMSEAEYLSTRSELTEQLTRINNKIADALTDESYSAAAELSFVNSASSFLLSYRLQGADHIVYSDFAASVDALVLKNFVNMIVDHITIKDGDPVEIVFKNGLRNRFVYQDDATV

SEQ ID NO: 1189 - protein, 572 aa, Unknown
  Description of Unknown: Integrase B1190 sequence
  PTHR30461:SF3,IPR036162,PS51737,IPR011109,PTHR30461, PS00397,PF00239,G3DSA:1.10.10.2600,IPR006119,SSF53041, cd00338,SM00857,IPR025827,IPR038109, PS51736,IPR006118,PF13408,G3DSA:3.40.50.1390,PF07508,Coil
MASRIAEKLAAKKAAIYIRVSTHWQVDKDSLKVQRRELIAYVTLVLGITDYVVFEDPGYSAKNTDRPEYQAMMDRIRTGEFTHLVVWKIDRISRNLIDFAAMHDELQSLGVTFVSKNEQFDTSSAIGEAMMRIILIFAELERKTTAERVTAVMLSRASDGQWNGGRVPFGYSWSKETKTFSIVPEEAKAIRRMAELYEQYQSLLYVAKYLNDAGIVTKTGGQWTPTTVRTILTNPWYIGQYVYNVHSDGKGIEKRDSDEWITVENHHEPILNDDVFYRMKFLLTRNKRGGVPSHKTYVRKNIHVFAGLLRCGQCGSNMTANLDRRRANGFRPSQYACGSRRRKGTSCTNKYISDTTLGPFVLNYVANIIRASKNSSEATTPEVLERKLLRGEAFEDVASVSTDALGQLLDAFRSAGDAVEYRPQIAFSGDDNSIREIDTLRARRRKLDNALARLNALYLYDDEAMPEKDFVMQRGQITKQLEEVNARIEELQNQESSEELGDDFIGKASYYIMANKLIEDRYIDYEKYIRAIDPSIPRSFLQQIIDHIVVNDGRVISITFKNGSTHTFTYKT

SEQ ID NO: 1190 - protein, 572 aa, Unknown
  Description of Unknown: Integrase B1191 sequence
  cd03768,SM00857,IPR006118,G3DSA:1.10.10.2600,IPR036162, PS51737,G3DSA:3.40.50.1390,IPR006119,IPR038109,PF07508, IPR011109,SSF53041,PTHR30461,PS00397,PS51736, Coil,PF00239
MRKRIVGYARVSTEKQDLERQKILIREYCSNNNYDLVKIISEKVSGAKKDRESINELLAVTKDTADMVIVSELSRISREKECLTVLNTINDILENGLDVLFLDDTSKVYSAYTELNVIDIITLTVKAHSAAEERDKITARMRTGKITKLNINPYMYTGSLVPYGFKVIDNPDYKGQKCNIPARKLMVIDESKTKDVQFIYQLVLNGTTLRDAAEEVNKLGLRTQLNKPFCETSISKMIKNPIYNGRRRFKGLNLPLMDKIISDNDWNRAQICVSQNQLFKGKTTKNFNPLKGLVFCPCGYALMLHKMIRRDGSGYFVMTCCKKNDKEYRKKCRNSGIVSHVLLPTVWKCVKDTLLLSEYTTKTTSEVHRINGIIEGLEDRISGLIDEIDSHKKEMARLSKAITLVTVKGLITQYENEYVTEEAKVTEIEAKINNIRDEISNYKANITKINSITYNSQLINLTDQEKASVYQKVLSKVVYYSIDYFRGFIVISYKNGLENIIAINKTTTGYISPLPSSFSFNAETRKIRVTIAKKQTSIKEFSLSDIENIEYSFKELEANFNPQQWDIQSQIL

SEQ ID NO: 1191 - protein, 572 aa, Unknown
  Description of Unknown: Integrase B1192 sequence
  SM00857,G3DSA:1.10.10.2600,IPR036162,PF13408,IPR025827, G3DSA:3.40.50.1390,PS51737,IPR006119,IPR038109,PF07508, SSF53041,IPR011109,PTHR30461,Coil,cd00338, PF00239
MAYRKITDIRDTIGMRAVFYARVSTAEEEQLNAIELQIEENRGCIKDHGWKLVGEYIDRSKSGTMVKGRDDYQRLYEDLYEDLFDIVVIKDQERLQRNTLDWYLFINRVVQTGKLLFMYMDGKFYSPDDALITGVRAIIAEEFSRNLSKKLHNYHDHRIEKARQGQEIALQGSGNVYGWDKKDGKYYINPEQAKVRRLMCEGIMARKGSTLIAKELNDAGYRNTVGKPWKPMDIPKFVYDCKNVGTMIINKERHDFESKQTIKLPKEEWVYVENALPPIVTQEEWDLICKIHEERVIATGSDRRGKKTSGYSFSGKLVCGICGAPYWRKQRVSKDEYWVCSTKQTKGRRTRKRDSTMGKAGEINPLGCDNENISYNSLMEIMGVVSERLQANTDTIKQDMINWLTKLRKQLIEANGGHTEADLQRELSRKSKLLDAYLDGILNKQEYQTKAEELDERIIQLKAETEKNKANSGDIAEIDKVLANIDEEVSRYVDGNEKLKVEYLLEHLEQVQIFPDKVIVIVPILSEGIVVEKTQYVSREKCSKIHTESMIHYLEDYMYCTRKLGLYVQLVA

SEQ ID NO: 1192 - protein, 572 aa, Unknown
  Description of Unknown: Integrase B1193 sequence
  SM00857,G3DSA:1.10.10.2600,IPR036162,PF13408,IPR025827, G3DSA:3.40.50.1390,PS51737,IPR006119,IPR038109,PF07508, SSF53041,IPR011109,PTHR30461,Coil,cd00338, PF00239
MAYRKITDIKDTIGMRAVFYARVSTAEEEQLNAIELQIEENRGCIKDHGWKLVGEYIDRSKSGTMVKGRDDYQRLYEDLYEDLFDIVVIKDQERLQRNTLDWYLFINRVVQTGKLLFMYMDGKFYSPDDALITGVRAIIAEEFSRNLSKKLHNYHDHRIEKARQGQEIALQGSGNVYGWDKKDGKYYINPEQAKVRRLMCEGIMARKGSTLIAKELNDAGYRNTVGKPWKPMDIPKFVYDCKNVGTMIINKERHDFESKQTIKLPKEEWVYVENALPPIVTQEEWDLICKIHEERVIATGSDRRGKKTSGYSFSGKLVCGICGAPYWRKQRVSKDEYWVCSTKQTKGRRTRKRDSTMGKAGEINPLGCDNENISYNSLMEIMGVVSERLQANTDTIKQDMINWLTKLRKQLLEANGGHTEADLQRELSRKSKLLDAYLDGILNKQEYQKKAEELDDRIIQLKAETEKNKANSGDIEEIDKVLANIDEEVSRYVDGNEKLKVEYLLEHLEQVQIFPDKVIVIVPILSEGIVVEKAQYVSREKCSKIHTESMIHYLEDYMYCTRKLGLYVQLVA

SEQ ID NO: 1193 - protein, 572 aa, Unknown
  Description of Unknown: Integrase B1194 sequence
  PTHR30461:SF3,IPR036162,PS51737,IPR011109,PTHR30461, PS00397,PF00239,G3DSA:1.10.10.2600,IPR006119,SSF53041, cd00338,SM00857,IPR025827,IPR038109,PS51736, IPR006118,PF13408,G3DSA:3.40.50.1390,PF07508,Coil
MASRIAEKLAAKKAAIYIRVSTHWQVDKDSLKVQRRELIAYVTLVLGITDYVVFEDPGYSAKNTDRPEYQAMMDRIRTGEFTHLVVWKIDRISRNLIDFAAMHNELQSLGVTFVSKNEQFDTSSAIGEAMMRIILIFAELERKTTAERVTAVMLSRASDGQWNGGRVPFGYSWSKEAKTFSIVPEEAKAIRRMAELYEQYQSLLYVAKYLNDAGIVTKTGGQWTPTTVRTILTNPWYIGQYVYNVHSDGKGIEKRDSDEWITVENHHEPILNEDVFCRMKFLLTRNKRGGVPSHKTYVRKNIHVFAGLLRCGQCGSNMTANLDRRRANGFRPSQYACGSRRRKGTSCTNKYISDTTLGPFVLNYVANIIRASKNSSEATTPEVLERKLLRGEAFEGVASVSADALSQLLDAFRSAGDAVEYRPQIAFSGDDNSIREIDALRARRRKLDNALARLNSLYLYDDEAMPEKDFVMQRGQITKQLEEVNARIEELQNQESSEELGDDFIGKASYYIMANKLIEDRYIDYEKYIRAIDPSIPRSFLQQIIDHIVVNDGRVISITFKNGSTHTFAYKT

SEQ ID NO: 1194 - protein, 572 aa, Unknown
  Description of Unknown: Integrase B1195 sequence
  SM00857,G3DSA:1.10.10.2600,IPR036162,PF13408,IPR025827, G3DSA:3.40.50.1390,PS51737,IPR006119,IPR038109,PF07508, SSF53041,IPR011109,PTHR30461,Coil,cd00338, PF00239
MAYRKITDIRDTIGMRAVFYARVSTAEEEQLNAIELQIEENRGCIKEHGWKLVGEYIDRSKSGTMVKGRDDYQRLYEDLYEDLFDIVVIKDQERLQRNTLDWYLFINRVVQTGKLLFMYMDGKFYSPDDALITGVRAIIAEEFSRNLSKKLHNYHDHRIEKARQGQEIALQGSGNVYGWDKKDGKYYINPEQAKVRRLMCEGIMARKGSTLIAKELNDAGYRNTVGKPWKPMDIPKFVYDCKNVGTMIINKERHDFESKQTIKLPKEEWVYVENALPPIVTQEEWDLICKIHEERVIATGSDRRGKKTSGYSFSGKLVCGICGAPYWRKQRVSKDEYWVCSTKQTKGRRTRKRDSTMGKAGEINPLGCDNENISYNSLMEIMGVVSERLQANTDTIKQDMINWLTKLRKQLLEANGGHTEADLQRELSRKSKLLDAYLDGILNKQEYQKKAEELDERIIQLKAETEKNKANSGDIAEIDKVLANIDEEVARYVDGNEKLKVEYLLEHLEQVQIFPDKVIVIVPILSEGIVVEKAQYVSREKCSKIHTESMIHYLEDYMYCTRKLGLYVQLVA

SEQ ID NO: 1195 - protein, 572 aa, Unknown
  Description of Unknown: Integrase B1196 sequence
  SM00857,G3DSA:1.10.10.2600,IPR036162,PF13408,IPR025827, G3DSA:3.40.50.1390,PS51737,IPR006119,IPR038109,PF07508, SSF53041,IPR011109,PTHR30461,Coil,cd00338, PF00239
MAYRKITDIRDTIGMRAVFYARVSTAEEEQLNAIELQIEENRGCIKDHGWKLVGEYIDRSKSGTMVKGRDDYQRLYEDLYEDLFDIVVIKDQERLQRNTLDWYLFINRVVQTGKLLFMYMDGKFYSPDDALITGVRAIIAEEFSRNLSKKLHNYHDHRIEKARQGQEIALQGSGNVYGWDKKDGKYYINPEQAKVRRLMCEGIMARKGSTLIAKELNDAGYRNTVGKPWKPMDIPKFVYDCKNVGTMIINKERHDFESKQTIKLPKEEWVYVENALPPIVTQEEWDLICKIHEERVIATGSDRRGKKTSGYSFSGKLVCGICGAHYWRKQRVSKDEYWVCSTKQTKGRRTRKRDSTMGKAGEINPLGCDNENISYNSLMEIMGIVSERLQANTDTIKQDMINWLTKLRKQLLEANGGHTEADLQRELSRKSKLLDAYLDGILNKQEYQKKAEELDERIIQLKAETEKNKDNSGDIAEIDKVLANIDEEVSRYVDGNEKLKVEYLLEHLEQVQIFPDKVIVIVPILSEGIVVEKTQYVSREKCSEIHTESMIHYLEDYMYCTRKLGLYVQLVA

SEQ ID NO: 1196 - protein, 572 aa, Unknown
  Description of Unknown: Integrase B1197 sequence
  PTHR30461:SF3,IPR036162,PS51737,IPR011109,PTHR30461, PS00397,PF00239,G3DSA:1.10.10.2600,IPR006119,SSF53041, cd00338,SM00857,IPR025827,IPR038109,PS51736, IPR006118,PF13408,G3DSA:3.40.50.1390,PF07508,Coil
MASRIAEKLAAKKAAIYIRVSTHWQVDKDSLKVQRRELIAYVTLVLGITDYVVFEDPGYSAKNTDRPEYQAMMDRIRTGEFTHLVVWKIDRISRNLIDFAAMHDELQSLGVTFVSKNEQFDTSSAIGEAMMRIILIFAELERKTTAERVTAVMLSRASDGQWNGGRVPFGYSWSKETKTFSIVPEEAKAIRRMAELYEQYQSLLYVAKYLNDVGIVTKTGGQWTPTTVRTILTNPWYIGQYVYNVHSDGKGIEKRDSDEWITVENHHEPILNEDVFCRMKFLLTRNKRGGVPSHKTYVRKNIHIFAGLLRCGQCGSNMTANLDRRRANGFRPSQYACGSRRRKGTSCTNKYISDTTLGPFVLNYVANIIRASKNSSEATTPEVLERKLLRGEAFEDVASVSTDSLGQLLDAFRSAGDAVEYRPQIAFSGDDNSIREIDTLRARRRKLDNALARLNALYLYDDEAMPEKDFVMQRGQITKQLEEVNARIEELQNQESSEELGDGFIGKASYYIMANKLIEDRYIDYEKYIRAIDPSIPRSFLQQIIDHIVVNDGRVISITFKNGSTHTFTYKA

SEQ ID NO: 1197 - protein, 572 aa, Unknown
  Description of Unknown: Integrase B1198 sequence
  PTHR30461:SF3,IPR036162,PS51737,IPR011109,PTHR30461, PS00397,PF00239,G3DSA:1.10.10.2600,IPR006119,SSF53041, cd00338,SM00857,IPR025827,IPR038109,PS51736, IPR006118,PF13408,G3DSA:3.40.50.1390,PF07508,Coil
MASRIAEKLAAKKAAIYIRVSTHWQVDKDSLKVQRRELIAYVTLVLGITDYVVFEDPGYSAKNTDRPEYQAMMDRIRTGEFTHLVVWKIDRISRNLIDFAAMHDELQSLGVTFVSKNEQFDTSSAIGEAMMRIILIFAELERKTTAERVTAVMLSRASDGQWNGGRVPFGYSWSKETKTFSIVPEEAKAIRRMAELYEQYQSLLYVAKYLNDAGIVTKTGGQWTPTTVRTILTNPWYIGQYVYNVHSDGKGIEKRDSDEWITVENHHEPILNEDVFCRMKFLLTRNKRGGVPSHKTYVRKNIHVFAGLLRCGQCGSNMTANLDRRRANGFRPSQYACGSRRRKGTSCTNKYISDTTLGPFVLNYVANIIRASKNSSEATTPEVLERKLLRGEAFEDVASVSTDSLSQLLDAFRSAGDAVEYRPQIAFSGDDNSIREIDTLRARRRKLDNALARLNALYLYDDEAMPEKDFVMQRGQITKQLEEVNARIEELQNQESSEELGDGFIGKASYYIMANKLIEDRYIDYEKYIRAIDPSIPHSFLQQIIDHIVVNDGRVTSITFKNGATHTFTYKT

SEQ ID NO: 1198 - protein, 572 aa, Unknown
  Description of Unknown: Integrase B1199 sequence
  PTHR30461:SF3,IPR036162,PS51737,IPR011109,PTHR30461, PS00397,PF00239,G3DSA:1.10.10.2600,IPR006119,SSF53041, cd00338,SM00857,IPR025827,IPR038109,PS51736, IPR006118,PF13408,G3DSA:3.40.50.1390,PF07508,Coil
MASRIAEKLAAKKAAIYIRVSTHWQVDKDSLKVQRRELIAYVTLVLGITDYVVFEDPGYSAKNTDRPEYQAMMDRIRTGEFTHLVVWKIDRISRNLIDFAAMHDELQSLGVTFVSKNEQFDTSSAIGEAMMRIILIFAELERKTTAERVTAVMLSRASDGQWNGGRVPFGYSWSKETKTFSIVPEEAKAIRRMAELYEQYQSLLYVAKYLNDAGIVTKTGGQWTPTTVRTILTNPWYIGQYVYNVHSDGKGIEKRDSDEWITVENHHEPILSEDVFYRMKFLLTRNKRGGVPSHKTYVRKNIHIFAGLLRCGQCGSNMTANLDRRRANGFRPSQYACGSRRRKGTSCTNKYISDTTLGPFVLNYVANIIRASKNSSEATTPEVLERKLLRGEAFEDVASVSTDALDQLLDAFRSAGDAVEYRPQIAFSGDDNSIREIDTLRARSRKLDNALARLNALYLYDDEAMPEKDFVMQRGQITKQLEEVNARIEELQNQESSEELGDDFIGKASYYIMANKLIEDRYIDYEKYIRAIDPSIPRSFLQQIIDHIVVNDGRVISITFKNGSTHTFTYKT

SEQ ID NO: 1199 - protein, 572 aa, Unknown
  Description of Unknown: Integrase B1200 sequence
  SM00857,G3DSA:1.10.10.2600,IPR036162,PF13408,IPR025827, G3DSA:3.40.50.1390,PS51737,IPR006119,IPR038109,PF07508, SSF53041,IPR011109,PTHR30461,Coil,cd00338, PF00239
MAYRKITDIKATIGMRAVFYARVSTAEEEQLNAIELQIEENRGCIKDHGWKLVGEYIDRSKSGTMVKGRDDYQRLYEDLYEDLFDIVVIKDQERLQRNTLDWYLFINRVVQTGKLLFMYMDGKFYSPDDALITGVRAIIAEEFSRNLSKKLHNYHDHRIEKARQGQEIALQGSGNVYGWDKKDGKYYINPEQAKVRRLMCEGIMARKGSTLIAKELNEAGYRNTVGKPWKPMDIPKFVYDCKNVGTMIINKERHDFESKQTIKLPKEEWVYVENALPPIVTQEEWDLICKIHEERVIATGSDKRGKKTSGYSFSGKLVCGICGAPYWRKQRVSKDEYWVCSTKQTKGRKTRKRDSTMGKAGEINPLGCDNENISYNSLMEIMEVVSERLQANTDTIKQDMINWLTKLKKQLLEANGGHTEADLQRELSRKSKLLDAYLDGILNKQEYQKKAEELDERIIQLKAETEKNKANSGDIAEIDKVLANIDEEVARYVDGNEKLKVEYLLEHLEQVQIFPDKVIVIVPILSEGIVVEKTQYVSREKCSEIHTESMIHYLEDYMYCTRKLGLYVQLVA

SEQ ID NO: 1200 - protein, 572 aa, Unknown
  Description of Unknown: Integrase B1201 sequence
  PTHR30461:SF3,IPR036162,PS51737,IPR011109,PTHR30461, PS00397,PF00239,G3DSA:1.10.10.2600,IPR006119,SSF53041, SM00857,IPR025827,IPR038109,PS51736,cd03768, IPR006118,PF13408,G3DSA:3.40.50.1390,PF07508,Coil
MTSISERLKKFRVAIYIRVSTRYQVDKDSLQVQRRELITYSEMVLGVSDYVIFEDAGYSAKNTDRPDYLRMMDRLRTGEFTHLLVWKIDRISRNLLDFASMYQELKTLGIAFVSKNEQFDTSNAVGEAMLKIILVFAELERQMTSERVTAVMLSRAGNGQWNGGRIPYGYSYDQTEKKFSLDPAENRVYNLICDTYEEFQSTLYVSRYLNNKGLRTRQGKEWSATAVHKILSNVFYVGDYLYNVHDDGRGSSTRGEDEWVRIEHHHVPSISRDRFDRIQFILKRNKRGGNARGETHIRKNIHIFSGLVRCGKCGSNMSATLDRRRANGWRPSIYACSKHRNNSSVCQNKYISDVTLGPFVINYIANIIRAKGNVSASTSLETLERKLLRGDTFLNVEHIEHDGLADMMDVLISGKTGMEYRPLVVSGEQTSQLSEREILEERRRKKETALSRLKSLYLYGDEETPEKDFIIERERIMGELTEIESRLAEIQQQESIRPVTSDEFIQKAAYFIMVEKLLDDRYVDYEKYIRKIDPSIPRNFLNNVIDQIEVNDGLITSISFKNGMTHRFIYKA

SEQ ID NO: 1201 - protein, 572 aa, Unknown
  Description of Unknown: Integrase B1202 sequence
  SM00857,G3DSA:1.10.10.2600,IPR036162,PF13408,IPR025827, PS51737,G3DSA:3.40.50.1390,IPR006119,IPR038109,PF07508, SSF53041,IPR011109,PTHR30461,Coil,cd00338, PF00239
MAYRKITDIRDTIGMRAVFYARVSTAEEEQLNAIELQIEENRGCIKDHGWKLVGEYIDRSKSGTMVKGRDDYQRLYEDLYEDLFDIVVIKDQERLQRNTLDWYLFINRVVQTGKLLFMYMDGKFYSPDDALITGVRAIIAEEFSRNLSKKLHNYHDHRIEKARQGQEIALQGSGNVYGWDKKDGKYYINPEQAKVRRLMCEGIMARKGSTLIAKELNEAGYRNTVGKLWKPMDIPKFVYDCKNVGTMIINKERHDFESKQTIKLPKEEWVYVENALPPIVTQEEWDLICKIHEERVIATGSDRRGKKTSGYSFSGKLVCGICGAPYWRKQRVSKDEYWVCSTKQTKGRRTRKRDSTMGKSGEINPLGCDNENISYNSLMEIMGVVSERLQANTDTIKHDMINWLTKLRKQLLEANGGHTEADLQRELSRKSKLLDAYLDGILNKQEYQKKAEELDERIIQLKAETEKNKANSGDIAEIDKVLANIDEEVSRYVDGNEKLKVEYLLEHLEQVQIFPDKVIVIVPILSEGIVVEKTQYVSREKCSEIHTESMIHYLEDYMYCTRKLGLYVQLVA

SEQ ID NO: 1202 - protein, 572 aa, Unknown
  Description of Unknown: Integrase B1203 sequence
  PTHR30461:SF3,IPR036162,PS51737,IPR011109,PTHR30461, PS00397,PF00239,G3DSA:1.10.10.2600,IPR006119,SSF53041, cd00338,SM00857,IPR025827,IPR038109,PS51736, IPR006118,PF13408,G3DSA:3.40.50.1390,PF07508,Coil
MASRIAEKLAAKKAAIYIRVSTHWQVDKDSLKVQRRELIAYVTLVLGITDYVVFEDPGYSAKNTDRPEYQAMMDRIRTGEFTHLVVWKIDRISRNLIDFAAMHDELQSLGVTFVSKNEQFDTSSAIGEAMMRIILIFAELERKTTAERVTAVMLSRASDGQWNGGRVPFGYSWSKETKTFSIVPEEAKAIRRMAELYEQYQSLLYVAKYLNDAGIVTKTGGQWTPTTVRTILTNPWYIGQYVYNVHSDGKGIEKRDSDEWITVENHHEPILNEDVFCRMRFLLTRNKRGGVPSHKTYVRKNIHIFAGLLRCGQCGSNMTANLDRRRANGFRPSQYACGSRRRKGTSCTNKYISDTTLGPFVLNYVANIIRASKNSSEATTPEVLERKLLRGEAFEDVASVSTDALGQLLDAFRSAGDAVEYRPQIAFSGDDNSIHEIDTLRARRRKLDNALARLNALYLYDDEAMPEKDFVMQRGQITKQLEEVNARIEELQNQESSEELGDDFIGKASYYIMANKLIEDRYIDYEKYIRAIDPSIPRSFLQQIIDHIVVNDGRVTSITFKNGATHTFTYKT

SEQ ID NO: 1203 - protein, 572 aa, Unknown
  Description of Unknown: Integrase B1204 sequence
  PTHR30461:SF3,IPR036162,PS51737,IPR011109,PTHR30461, PS00397,PF00239,G3DSA:1.10.10.2600,IPR006119,SSF53041, cd00338,SM00857,IPR025827,IPR038109,PS51736, IPR006118,PF13408,G3DSA:3.40.50.1390,PF07508,Coil
MASRIAEKLAAKKAAIYIRVSTHWQVDKDSLKVQRRELIAYVTLVLGITDYVVFEDPGYSAKNTDRPEYQAMMDRIRTGEFTHLVVWKIDRISRNLIDFATMHDELQSLGVTFVSKNEQFDTSSAIGEAMMRIILIFAELERKTTAERVTAVMLSRASDGQWNGGRVPFGYSWSKETKTFSIVPEEAKAIRRMAELYEQYQSLLYVAKYLNDAGIVTKTGGQWTPTTVRTILTNPWYIGQYVYNVHSDGKGIEKRDSDEWITVESHHEPILNDDVFYRMKFLLTRNKRGGVPSHKTYVRKNIHVFAGLLRCGQCGSNMTANLDRRRANGFRPSQYACGSRRRKGTSCTNKYISDTTLGPFVLNYVANIIRASKNSSEATTPDVLERKLLRGEAFEDVASVSTDALGQLLDAFRSAGDAVEYRPQIAFSGDDNSIREIDTLRARRRKLDNALARLNALYLYDDEAMPEKDFVMQRGQITKQLEEVNARIEELQNQESSEELGDGFIGKASYYIMANKLIEDRYIDYEKYIRAIDPSIPHSFLQQIIDHIVVNDGRVTSITFKNGATHTFTYKT

SEQ ID NO: 1204 - protein, 572 aa, Unknown
  Description of Unknown: Integrase B1205 sequence
  PTHR30461:SF3,IPR036162,PS51737,IPR011109,PTHR30461, PS00397,PF00239,G3DSA:1.10.10.2600,IPR006119,SSF53041, cd00338,SM00857,IPR025827,IPR038109,PS51736, IPR006118,PF13408,G3DSA:3.40.50.1390,PF07508,Coil
MASRIAEKLAAKKAAIYIRVSTHWQVDKDSLKVQRRELIAYVTLVLGITDYVVFEDPGYSAKNTDRPEYQAMMDRIRTGEFTHLVVWKIDRISRNLIDFAAMHDELQSLGVTFVSKNEQFDTSSAIGEAMMRIILIFAELERKTTAERVTAVMLSRASDGQWNGGRVPFGYSWSKEAKTFSIVPEEAKAIRRMAELYEQYQSLLYVAKYLNDAGIVTKTGGQWTPTTVRTILTNPWYIGQYVYNVHSDGKGIEKRDSDEWITVENHHEPILNEDVFCRMKFLLTRNKRGGVPSHKTYVRKNIHVFAGLLRCGQCSSNMTANLDRRRANGFRPSQYACGSRRRKGTSCTNKYISDTTLGPFVLNYVANIIRASKNSSEATTPEVLERKLLRGEAFEDVASVSTDALGQLLDAFRSAGDAVEYRPQIAFSGDDNSIREIDTLRARRRKLDNALARLNALYLYDDEAMPEKDFVMQRGQITKQLEEVNARIEELQNRESSEELGDDFIGKASYYIMANKLIEDRYIDYEKYIRAIDPSIPRSFLQQIIDHIVVNDGRVISITFKNGSTHTFTYKA

SEQ ID NO: 1205 - protein, 572 aa, Unknown
  Description of Unknown: Integrase B1206 sequence
  PTHR30461:SF3,IPR036162,PS51737,IPR011109,PTHR30461, PS00397,PF00239,G3DSA:1.10.10.2600,IPR006119,SSF53041, cd00338,SM00857,IPR025827,IPR038109,PS51736, IPR006118,PF13408,G3DSA:3.40.50.1390,PF07508,Coil
MASRIAEKLAAKKAAIYIRVSTHWQVDKDSLKVQRRELIAYVTLVLGITDYVVFEDPGYSAKNTDRPEYQAMMDRIRTGEFTHLVVWKIDRISRNLIDFAAMHDELQSLGVTFVSKNEQFDTSSAIGEAMMRIILIFAELERKTTAERVTAVMLSRASDGQWNGGRVPFGYSWSKETKTFSIVPEEAKAIRRMAELYEQYQSLLYVAKYLNDAGIVTKTGGQWTPTTVRTILTNPWYIGQYVYNVHSDGKGIEKRDSDEWITVENHHEPILNEDVFCRMKFLLTRNKRGGVPSHKTYVRKNIHVFAGLLRCGQCGSNMTANLDRRRANGFRPSQYACSSRRRKGTSCTNKYISDTTLGPFVLNYVANIIRASKNSSEATTPEVLERKLLRGEAFEDVASVSADALGQLLDAFRSAGDAVEYRPQIAFSGEDNAIREIDTLRARRRKLDNALARLNALYLYDDEAMPEKDFVMQRGQITKQLEEVNARIEELQNQESSEELGDDFIGKASYYIMANKLIEDRYIDYEKYIRAIDPSIPRSFLQQIIDHIVVNDGRVTSITFKNGATHTFTYKT

SEQ ID NO: 1206 - protein, 572 aa, Unknown
  Description of Unknown: Integrase B1207 sequence
  PTHR30461:SF3,IPR036162,PS51737,IPR011109,PTHR30461, PS00397,PF00239,G3DSA:1.10.10.2600,IPR006119,SSF53041, SM00857,IPR025827,IPR038109,PS51736,cd03768, IPR006118,PF13408,G3DSA:3.40.50.1390,PF07508,Coil
MANRKWRPACYCRVSTIHQIDKESIPTQVHLLSNYCAGVLGCKKEDIKFYIDAGYSGKNTKRPEYEKMIEDVKAGRRNVVVAYKLDRISRNLIDFAKFLESLKEHGAEFISLSESFDTSSVMGRGMLKLIALFAEMERGITRERVMAVSKDIISRGGHLGAPTPLGYDYDKATKKYSINEKEAETVRWIFKTAGDGESTTYISNYLNDHNITGKRSGYWTSTTVFHILHNPAYTGKYVWNRRSSGRYKLKDKSEWLTQEKVYPVIIPAAEWQSVQDKLAARRKGKNVKRAVQSHLFLGLLSCALCGHDFRARKDKARADGYRPSVYSCPAYTGHAGCTNGHYYSDMQIAPLVTQYIENVDKLANMQDLVNSRADLARVLLFNMPDVVQISNIDTLYGLYGRTNQEPVPENIAMVRAFADAEKLKADKELEKYYKALDRLKDLYLFGDANMSKEDYVTTRGKIESKIAAVISARDETTREVSPRLDVDAKKYGPILKLLRGNVGYKMIGDKVGFDLLAEFFHDVLSGIVVDKSGIVKIIFKNGVAHCLCNKETGAGVVMEYPRAGRRKSLTTR

SEQ ID NO: 1207 - protein, 572 aa, Unknown
  Description of Unknown: Integrase B1208 sequence
  cd03768,SM00857,G3DSA:1.10.10.2600,IPR036162,PS51737, G3DSA:3.40.50.1390,IPR006119,IPR038109,PF07508,IPR011109, SSF53041,PTHR30461,PS51736,Coil,PF00239
MNEQKIVALYTRVSTGYQIDKDSLPFQKKELSAYCKHILHAEKMELFEDAGKSGKNTDRPAFLRMMKKIRAGEISHVVVYKIDRISRNLVDFSVMYDEFKKYRVTFISLNEQFDTSSAIGEAVLKIILVFAELERKLTSERVIGVMLDRAMSGKWNGARMPFGWKWNPETEFPEHDPVELEKALTLYRVYDETHSTAKVRDYCYDNDIQTKRGGKWTTTTILNFLKNPMNKGDYRYNYRGSARGTKKPENEVVYLPGVFPPLVDPDLWDRVNAIIKDNAEKHDIHKNPHIKKHVHIFTGGILKCAYCGASFQVSRLDKKRLNGFQPSLYVCTSRRTYRACDASGASDVVIGAFFFNYVRNLVQATKSRAKIGTPADLEQILLSGDEFSRIRYIDPSDLDIIYQAIRGTIAPGSGVTYIPAPPDSDKKDAPELSGLRTEAARLSRALERLKKAYLFDDDAMSEAEYLSTRSELTEQLTRINNKIADALTDESYSAAAELSFVNSASSFLLSYRLQGADHIVYSDFAASVDALVLKNFVNMIVDHITVKDGDPVEIVFKNGLRNRFVYQDDATV

SEQ ID NO: 1208 - protein, 572 aa, Unknown
  Description of Unknown: Integrase B1209 sequence
  SM00857,G3DSA:1.10.10.2600,IPR036162,PF13408, IPR025827,PS51737,G3DSA:3.40.50.1390,IPR006119, IPR038109,PF07508,SSF53041,IPR011109, PTHR30461,Coil,cd00338,PF00239
MAYRKITDIKDTIGMRAVFYARVSTAEEEQLNAIELQIEENRGCIKDHGWKLVGEYIDRSKSGTMVKGRDDYQRLYEDLYEDLFDIVVIKDQERLQRNTLDWYLFINRVVQTGKLLFMYMDGKFYSPDDALITGVRAIIAEEFSRNLSKKLHNYHDHRIEKARQGQEIALQGSGNVYGWDKKDGKYYINPEQSKVRRLMCEGIMARKGSTLIAKELNEAGYRNTVGKPWKPMDIPKFVYDCKNVGTMIINKERHDFESKQTIKLPKEEWVYVENALPPIVTQEEWDLICKIHEERVIATGSDKRGKKTSGYSFSGKLVCGICGAPYWRKQRVSKDEYWVCSTKQTKGRRTRKRDSTMGKAGEINPLGCDNENISYNSLMEIMGVVSERLQANTDTIKQDMINWLTKLRKQLLEANGGHTEADLQREISRKSKLLDAYLDGILNKQEYQKKAEELDERIIQLKAETEKNKANSGDIAEIDKVLANIDEEVARYVDGNEKLKVEYLLEHLEQVQIFPDKVIVIVPILSEGIVVEKAQYVSREKCSKIHTESMIHYLEDYMYCTRKLGLYVQLVA

SEQ ID NO: 1209 - protein, 572 aa, Unknown
  Description of Unknown: Integrase B1210 sequence
  PTHR30461:SF3,IPR036162,PS51737,IPR011109,PTHR30461, PS00397,PF00239,G3DSA:1.10.10.2600,IPR006119,SSF53041, cd00338,SM00857,IPR025827,IPR038109,PS51736, IPR006118,PF13408,G3DSA:3.40.50.1390,PF07508,Coil
MASRIAEKLAAKKAAIYIRVSTHWQVDKDSLKVQRRELIAYVTLVLGITDYVVFEDPGYSAKNTDRPEYQAMMDRIRTGEFTHLVVWKIDRISRNLIDFAAMHDELQSLGVTFVSKNEQFDTSSAIGEAMMRIILIFAELERKTTAERVTAVMLSRASDGQWNGGRVPFGYSWSKETKTFSIVPEEAKAIRRMAELYEQYQSLLYVAKYLNDAGIVTKTGGQWTPTTVRTILTNPWYIGQYVYNVHSDGKGIEKRDSDEWITVENHHEPILNEDVFCRMKFLLTRNKRGGVPSHKTYVRKNIHIFAGLLRCGQCGSNMTANLDRRRANGFRPSQYACGSRRRKGTSCTNKYISDTTLGPFVLNYVANIIRASKNSSEATTPEVLERKLLRGEAFEDVASVSTDALGQLLDAFRSAGDAVEYRPQIAFSGDDNSIREIDTLRARRRKLDNALARLNALYLYDDEAMPEKDFVMQRGQITKQLEEVNARIEELQNQESSEELGDDFIGKASYYIMANKLIEDRYIDYEKYIRAIDPSIPRSFLQQIIDHIVVNDGRVISITFKNGSTHTFTYKT

SEQ ID NO: 1210 - protein, 572 aa, Unknown
  Description of Unknown: Integrase B1211 sequence
  PTHR30461:SF3,IPR036162,PS51737,IPR011109,PTHR30461, PS00397,PF00239,G3DSA:1.10.10.2600,IPR006119,SSF53041, cd00338,SM00857,IPR025827,IPR038109,PS51736, IPR006118,PF13408,G3DSA:3.40.50.1390,PF07508,Coil
MASRIAEKLAAKKAAIYIRVSTHWQVDKDSLKVQRRELIAYVTLVLGITDYVVFEDPGYSAKNTDRPEYQAMMDRIRTGEFTHLVVWKIDRISRNLIDFAAMHDELQSLGVTFVSKNEQFDTSSAIGEAMMRIILIFAELERKTTAERVTAVMLSRASDGQWNGGRVPFGYSWSKETKTFSIVPEEAKAIRRMAELYEQYQSLLYVAKYLNDAGIVTKTGGQWTPTTVRTILTNPWYIGQYVYNVHSDGKGIEKRDSDEWITVENHHEPVLNDDVFYRMKFLLTRNKRGGVPSHKTYVRKNIHVFAGLLRCGQCGSNMTANLDRRRANGFRPSQYACGSRRRKGTSCTNKYISDTTLGPFVLNYVANIIRASKNSSEATTPDVLERKLLRGEAFEDVASVSTDALGQLLDAFHSAGDAVEYRPQIAFSGDDNSIREIDTLRARRRKLDNALARLNALYLYDDEAMPEKDFVMQRGQITKQLEEVNTRIEELQNQESSEELGDDFIGKASYYIMANKLIEDRYIDYEKYIRAIDPSIPRSFLQQIIDHIVVNDGRVISITFKNGSTHTFTYKT

SEQ ID NO: 1211 - protein, 572 aa, Unknown
  Description of Unknown: Integrase B1212 sequence
  PTHR30461:SF3,IPR036162,PS51737,IPR011109,PTHR30461, PS00397,PF00239,G3DSA:1.10.10.2600,IPR006119,SSF53041, cd00338,SM00857,IPR025827,IPR038109,PS51736, IPR006118,PF13408,G3DSA:3.40.50.1390,PF07508,Coil
MASRIAEKLAAKKAAIYIRVSTHWQVDKDSLKVQRRELIAYVTLVLGITDYVVFEDPGYSAKNTDRPEYQAMMDRIRTGEFTHLVVWKIDRISRNLIDFAAMHDELQSLGVTFVSKNEQFDTSSAIGEAMMRIILIFAELERKTTAERVTAVMLSRASDGQWNGGRVPFGYSWSKETKTFSIVPAEAKAIRRMAELYEQYQSLLYVAKYLNDAGIVTKTGGQWTPTTVRTILTNPWYIGQYVYNVHSDGKGIEKRDSDEWITVENHHEPILNDDVFYRMKFLLTRNKRGGVPSHKTYVRKNIHVFAGLLRCGQCGSNMTANLDRRRANGFRPSQYACGSRRRKGTSCTNKYISDTTLGPFVLNYVANIIRASKNSSETTTSEVLERKLLRGEAFEDVASVSTDALGQLLDAFRSAGDAVEYRPQMAFSGDDNSIREIDTLRARRRKLDNALARLNALYLYDDEAMPEKDFVMQRGQITKQLEEVNARIEELQNQESSEELGDDFIGKASYYIMANKLIEDRYIDYEKYIRAIDPSIPRSFLQQIIDHIVVNDGRVISITFKNGSTHTFTYKT

SEQ ID NO: 1212 - protein, 572 aa, Unknown
  Description of Unknown: Integrase B1213 sequence
  SM00857,G3DSA:1.10.10.2600,IPR036162,PF13408,IPR025827, G3DSA:3.40.50.1390,PS51737,IPR006119,IPR038109,PF07508, IPR011109,SSF53041,PF00239,PTHR30461,PS51736, Coil,cd00338
MAYRRAQDTKGLRAVFYARVSTAEEEQLNAIELQIEENRNTITKHGWKKVDEYIDRSKSGTMVKGRDEYQRLYEDLLGDAFDVVVIKDQERLMRNTLDWYLFINRLVQTGKILYMYLEDKFYSPDDALITGIKAIIAEEFSRNLSKKLHNYHDGRIEKARKGLEIDLQGSGNVFGWDKVDGKYVINPEQAKVRRLMCEGIMARKGSTQIAKELNDAGYRNTVGKPWKPMDIPKFVYDCKNVGTMIINRERHDFESKQTVKLPESEWVYVKGALPPIVTEEEWALIEKIHEERVVATGCNRRGKKTSGYSFSGKLVCGVCGAPYWRKTKTSNEEYWVCSTKQQKGRKTRARDAVGGKAGEINPEGCDNENISYNALMEIMAIVSERLQADTGFIREFMLGRLDTYEKRITEANRGATEADLQREISRKDKLLDAYLDNLLTKEEYQRKALALDDHILELRREVEANKANLEDLVEIQRVRENIDAEVAQYLDENEQLKVEFVLEHLSQVIIYPDKVLVIFDVFGEGVMVEKSQYVSRQKWLKIQTENIYYLTSYEYGDNYTWRTMDLYVQLVA

SEQ ID NO: 1213 - protein, 572 aa, Unknown
  Description of Unknown: Integrase B1214 sequence
  SM00857,G3DSA:1.10.10.2600,IPR036162,PF13408,IPR025827, G3DSA:3.40.50.1390,PS51737,IPR006119,IPR038109,PF07508, SSF53041,IPR011109,PTHR30461,Coil,cd00338, PF00239
MAYRKITDIRDTIGMRAVFYARVSTAEEEQLNAIELQIEENRGCIKDHGWKLVGEYIDRSKSGTMVKGRDDYQRLYEDLYEDLFDIVVIKDQERLQRNTLDWYLFINRVVQTGKLLFMYMDGKFYSPDDALITGVRAIIAEEFSRNLSKKLHNYHDHRIEKARQGQEIALQGSGNVYGWDKKDGKYYINPEQAKVRRLMCEGIMARKGSTLIAKELNDAGYRNTVGKPWKPMDIPKFVYDCKNVGTMIINKERHDFESKQTIKLPKEEWVYVENALPPIVTQEEWDLICKIHEERVIATGSDRRGKKTSGYSFSGKLVCGICGAPYWRKQRVSKDEYWVCSTKQTKGRRTRKRDSTMGKAGEINPLGCDNENISYNSLMEIMGVVSERLQANTDTIKHDMINWLTKLRKQLLEANGGHTEADLQRELSRKSKLLDAYLDGILNKQEYQKKAEELDERIIQLKAETEKNKANSGDIAEIDKVLANIDEEVSRYVDGNEKLKVEYLLEHLEQVQIFPDKVIVIVPILSEGIVVEKTQYVSREKCSKIHTESMIHYLEDYMYCTRKLGLYVQLVA

SEQ ID NO: 1214 - protein, 572 aa, Unknown
  Description of Unknown: Integrase B1215 sequence
  PTHR30461:SF3,IPR036162,PS51737,IPR011109,PTHR30461, PS00397,PF00239,G3DSA:1.10.10.2600,IPR006119,SSF53041, cd00338,SM00857,IPR025827,IPR038109,PS51736, IPR006118,PF13408,G3DSA:3.40.50.1390,PF07508,Coil
MASRIAEKLAAKKAAIYIRVSTHWQVDKDSLKVQRRELIAYVTLVLGITDYVVFEDPGYSAKNTDRPEYQAMMDRIRTGEFTHLVVWKIDRISRNLIDFAAMHDELQSLGVTFVSKNEQFDTSSAIGEAMMRIILIFAELERKTTAERVTAVMLSRASDGQWNGGRVPFGYSWSKETKTFSIVPEEAKAIRRMAELYEQYQSLLYVAKYLNDAGIVTKTGGQWTPTTVRTILTNPWYIGQYVYNVHSDGKGIEKRDSDEWITVENHHEPILSEDVFYRMKFLLTRNKRGGVPSHKTYVRKNIHVFAGLLRCGQCGSNMTANLDRRRANGFRPSQYACGSRRRKGTSCANKYISDTTLGPFVLNYVANIIRASKNSSEATTPEVLERKLLRGEAFEDVASVSTDALGQLLDAFRSAGDAVEYRPQIAFSGDDNSIREIDTLRARRRKLDNALARLNALYLYDDEAMPEKDFVMQRGQITKQLEEVNTRIEELQSQESSEELGDDFIGKASYYIMANKLIEDRYIDYEKYIRAIDPSIPRSFLQQIIDHIVVNDGRVISITFKNGSTHTFTYKT

SEQ ID NO: 1215 - protein, 572 aa, Unknown
  Description of Unknown: Integrase B1216 sequence
  SM00857,G3DSA:1.10.10.2600,IPR036162,PF13408,IPR025827, G3DSA:3.40.50.1390,PS51737,IPR006119,IPR038109,PF07508, SSF53041,IPR011109,PTHR30461,Coil,cd00338, PF00239
MAYRRITDIRDTIGMRAVFYARVSTAEEEQLNAIELQIEENRGCIKEHGWKLVGEYIDRSKSGTMVKGRDDYQRLYEDLYEDLFDIVVIKDQERLQRNTLDWYLFINRVVQTGKLLFMYMDGKFYSPDDALITGVRAIIAEEFSRNLSKKLHNYHDHRIEKARQGQEIALQGSGNVYGWDKKDGKYYINPEQAKVRRLMCEGIMARKGSTLIAKELNDAGYRNTVGKPWKPMDIPKFVYDCKNVGTMIINKERHDFESKQTIKLPKEEWVYVENALPPIVTQEEWDLICKIHEERVIATGSDRRGKKTSGYSFSGKLVCGICGAPYWRKQRVSKDEYWVCSTKQTKGRKTRKRDSTMGKAGEINPLGCDNENISYNSLMEIMGVVSERLQANTDTIKQDMINWLTKLRKQLLEANGGHTEADLQRELSRKSKLLDAYLDGILNKQEYQKKAEELDERIIQLKAETEKNKANSGDIAEIDKVLANIDEEVARYVDGNEKLKVEYLLEHLEQVQIFPDKVIVIVPILSEGIVVEKTQYVSREKCSKIHTESMIHYLEDYMYCTRKLGLYVQLVA

SEQ ID NO: 1216 - protein, 572 aa, Unknown
  Description of Unknown: Integrase B1217 sequence
  SM00857,G3DSA:1.10.10.2600,IPR036162,PF13408,PS51737, G3DSA:3.40.50.1390,IPR025827,IPR006119,IPR038109,PF07508, SSF53041,IPR011109,PTHR30461,Coil,cd00338, PF00239
MAYRKITDIRDTIGMRAVFYARVSTAEEEQLNAIELQIEENRGCIKDHGWKLVGEYIDRSKSGTMVKGRDDYQRLYEDLYEDLFDIVVIKDQERLQRNTLDWYLFINRVVQTGKLLFMYMDGKFYSPDDALITGVRAIIAEEFSRNLSKKLHNYHDHRIEKARQGQEIALQGSGNVYGWDKKDGKYYINPEQAKVRRLMCEGIMARKGSTLIAKELNDAGYRNTVGKPWKPMDIPKFVYDCKNVGTMIINKERHDFESKQTIKLPKEEWVYVENALPPIVTQEEWDLICKIHEERVIATGSDRRGKKTSGYSFSGKLVCGICGAPYWRKQRVSKDEYWVCSTKQTKGRRTRKIDSTMGKAGEINPLGCDNENISYNSLMEIMGVVSERLQANTDTIKHDMINWLTKLRKQLLEANGGHTEADLQRELSRKSKLLDAYLDGILNKQEYQKKAEELDERIIQLKAETEKNKANSGDIAEIDKVLANIDEEVSRYVDGNEKLKVEYLLEHLEQVQIFPDKVIVIVPILSEGIVVEKAQYVSREKCSKIHTESMIHYLEDYMYCTRKLGLYVQLVA

SEQ ID NO: 1217 - protein, 572 aa, Unknown
  Description of Unknown: Integrase B1218 sequence
  PTHR30461:SF3,IPR036162,PS51737,IPR011109,PTHR30461, PS00397,PF00239,G3DSA:1.10.10.2600,IPR006119,SSF53041, cd00338,SM00857,IPR025827,IPR038109,PS51736, IPR006118,PF13408,G3DSA:3.40.50.1390,PF07508,Coil
MASRIAEKLAAKKAAIYIRVSTHWQVDKDSLKVQRRELIAYVTLVLGITDYVVFEDPGYSAKNTDRPEYQAMMDRIRTGEFTHLVVWKIDRISRNLIDFAAMHDELQSLGVTFVSKNEQFDTSSAIGEAMMRIILIFAELERKTTAERVTAVMLSRASDGQWNGGRVPFGYSWSKETKTFSIVPEEAKAIRRMAELYEQYQSLLYVAKYLNDAGIVTKTGGQWTPTTVRTILTNPWYIGQYVYNVHSDGKGIEKRDSDEWITVENHHEPILNEDVFCRMKFLLTRNKRGGVPSHKTYVRKNIHIFAGLLRCGQCGSNMTANLDRRRANGFRPSQYACGSRRRKGTSCTNKYISDTTLGPFVLNYVANIIRASKNSSEATTPEVLERKLLRGEAFEDVASVSTDSLGQLLDAFRSAGDAVEYRPQIAFSGEDNAIREIDTLRARRRKLDNALARLNALYLYDDEAMPEKDFVMQRGQITKQLEEVNARIEELQNQESSEELGDDFIGKASYYIMANKLIEDRYIDYEKYIRAIDPSIPRSFLQQIIDHIVVNDGRVTSITFKNGATHTFTYKT

SEQ ID NO: 1218 - protein, 572 aa, Unknown
  Description of Unknown: Integrase B1219 sequence
  SM00857,G3DSA:1.10.10.2600,IPR036162,PF13408,IPR025827, G3DSA:3.40.50.1390,PS51737,IPR006119,IPR038109,PF07508, SSF53041,IPR011109,PTHR30461,Coil,cd00338, PF00239
MAYRKITDIRDTIGMRAVFYARVSTAEEEQLNAIELQIEENRGCIKDHGWKLVGEYIDRSKSGTMVKGRDDYQRLYEDLYEDLFDIVVIKDQERLQRNTLDWYLFINRVVQTGKLLFMYMDGKFYSPDDALITGVRAIIAEEFSRNLSKKLHNYHDHRIEKARQGQEIALQGSGNVYGWDKKDGKYYINPEQAKVRRLMCEGIMARKGSTLIAKELNDAGYRNTVGKPWKPMDIPKFVYDCKNVGTMIINKERHDFESKQTIKLPKEEWVYVENALPPIVTQEEWDLICKIHEERVIATGSDRRGKKTSGYSFSGKLVCGICGAPYWRKQRVSKDEYWVCSTKQTKGRRTRKRDSTMGKAGEINPLGCDNENISYNSLMEIMGVVSERLQANTDTIKHDMINWLTKLRKQLLEANGGHTEADLQRELSRKSKLLDAYLDGILNKQEYQKKAEELDERIIQLKAETEKNKANSGDIAEIDKVLANIDEEVSRYVDGNEKLKVEYLLEHLEQVQIFPDKVIVIVPILSEGIVVEKAQYVSREKCSEIHTESMIHYLEDYMYCTRKLGLYVQLVA

SEQ ID NO: 1219 - protein, 572 aa, Unknown
  Description of Unknown: Integrase B1220 sequence
  SM00857,G3DSA:1.10.10.2600,IPR036162,PF13408,IPR025827, G3DSA:3.40.50.1390,PS51737,IPR006119,IPR038109,PF07508, SSF53041,IPR011109,PTHR30461,Coil,cd00338, PF00239
MAYRKITDIKDTIGMRAVFYARVSTAEEEQLNAIELQIEENRGCIKDHGWKLVGEYIDRSKSGTMVKGRDDYQRLYEDLYEDLFDIVVIKDQERLQRNTLDWYLFINRVVQTGKLLFMYMDGKFYSPDDALITGVRAIIAEEFSRNLSKKLHNYHDHRIEKARQGQEIALQGSGNVYGWDKKDGKYYINPEQAKVRRLMCEGIMARKGSTLIAKELNDAGYRNTVGKPWKPMDIPKFVYDCKNVGTMIINKERHDFESKQTIKLPKEEWVYVENALPPIVTQEEWDLICKIHEERVIATGSDRRGKKTSGYSFSGKLVCGICGAPYWRKQRVSKDEYWVCSTKQTKGRRTRKRDSTMGKAGEINPLGCDNENISYNSLMEIMGVVSERLQANTDTIKHDMINWLTKLRKQLLEANGGHTEADLQRELSRKSKLLDAYLDGILNKQEYQKKAEELDERIIQLKAETEKNKANSGDIAEIDKVLANIDEEVSRYVDGNEKLKVEYLLEHLEQVQIFQDKVIVIVPILSEGIVVEKAQYVSREKCSKIHTESMIHYLEDYMYCTRKLGLYVQLVA

SEQ ID NO: 1220 - protein, 572 aa, Unknown
  Description of Unknown: Integrase B1221 sequence
  PTHR30461:SF3,IPR036162,PS51737,IPR011109,PTHR30461, PS00397,PF00239,G3DSA:1.10.10.2600,IPR006119,SSF53041, cd00338,SM00857,IPR025827,IPR038109,PS51736, IPR006118,PF13408,G3DSA:3.40.50.1390,PF07508,Coil
MASRIAEKLAAKKAAIYIRVSTHWQVDKDSLKVQRRELIAYVTLVLGITDYVVFEDPGYSAKNTDRPEYQAMMDRIRTGEFTHLVVWKIDRISRNLIDFAAMHDELQSLGVTFVSKNEQFDTSSAIGEAMMRIILIFAELERKTTAERVTAVMLSRASDGQWNGGRVPFGYSWSKEAKTFSIVPEEAKAIRRMAELYEQYQSLLYVAKYLNDAGIVTKTGGQWTPTTVRTILTNPWYIGQYVYNVHSDGKGIEKRDSDEWITVENHHEPILNEDVFCRMKFLLTRNKRGGVPSHKTYVRKNIHVFAGLLRCGQCGSNMTANLDRRRANGFRPSQYACGSRRRKGTSCTNKYISDTTLGPFVLNYVANIIRASKNSSEATTPEVLERKLLRGEAFEDVASVSTDALGQLLDAFRSAGDAVEYRPQIAFSGDDNSIREIDTLRARRRKLDNALARLNALYLYDDEAMPEKDFVMQRGQITKQLEEVNARIEELQNQESSEELGDGFIGKASYYIMANKLIEDRYIDYEKYIRAIDPSIPHSFLQQIIDHIVVNDGRVTSITFKNGATHTFTYKT

SEQ ID NO: 1221 - protein, 572 aa, Unknown
  Description of Unknown: Integrase B1222 sequence
  PTHR30461:SF3,IPR036162,PS51737,IPR011109,PTHR30461, PS00397,PF00239,G3DSA:1.10.10.2600,IPR006119,SSF53041, cd00338,SM00857,IPR025827,IPR038109,PS51736, IPR006118,PF13408,G3DSA:3.40.50.1390,PF07508,Coil
MASRIAEKLAAKKAAIYIRVSTHWQVDKDSLKVQRRELIAYVTLVLGITDYVVFEDPGYSAKNTDRPEYQAMMDRIRTGEFTHLVVWKIDRISRNLIDFAAMHDELQSLGVTFVSKNEQFDTSSAIGEAMMRIILIFAELERKTTAERVTAVMLSRASDGQWNGGRVPFGYSWSKETKTFSIVPEEAKAIRRMAELYEQYQSLLYVAKYLNDAGIVTKTGGQWTPTTVRTILTNPWYIGQYVYNVHSDGKGIEKRDSDEWITVENHHEPILNEDVFCRMKFLLTRNKRGGVPSHKTYVRKNIHVFAGLLRCGQCGSNMTANLDRRRANGFRPSQYACGSRRRKGTSCTNKYISDTTLGPFVLNYVANIIRASKNSSEATTPEVLERKLLRGEAFEDVASVSTDSLGQLLDAFRSAGDAVEYRPQIAFSGDDNSIREIDTLRARRRKLDNALARLNALYLYDDEAMPEKDFVMQRGQITKQLEEVNARIEELQNQESSEELGDDFIGKASYYIMANKLIEDRYIDYEKYIRAIDPSIPRSFLQQIIDHIVVNDGRVISITFKNGSTHTFTYKA

SEQ ID NO: 1222 - protein, 572 aa, Unknown
  Description of Unknown: Integrase B1223 sequence
  PTHR30461:SF3,IPR036162,PS51737,IPR011109,PTHR30461, PS00397,PF00239,G3DSA:1.10.10.2600,IPR006119,SSF53041, cd00338,SM00857,IPR025827,IPR038109,PS51736, IPR006118,PF13408,G3DSA:3.40.50.1390,PF07508,Coil
MASRIAEKLAAKKAAIYIRVSTHWQVDKDSLKVQRRELIAYVTLVLGITDYVVFEDPGYSAKNTDRPEYQAMMDRIRTGEFTHLVVWKIDRISRNLIDFAAMHDELQSLGVTFVSKNEQFDTSSAIGEAMMRIILIFAELERKTTAERVTAVMLSRASDGQWNGGRVPFGYSWSKETKTFSIVPEEAKAIRRMAELYEQYQSLLYVAKYLNDAGIVTKTGGQWTPTTVRTILTNPWYIGQYVYNVHSDGKGIEKRDSDEWITVENHHEPILNEDVFCRMKFLLTRNKRGGVPSHKTYVRKNIHIFAGLLCCGQCGSNMTANLDRRRANGFRPSQYACGSRRRKGTSCTNKYISDTTLGPFVLNYVANIIRASKNSSEATTPEVLERKLLRGEAFEDVASVSTDALGQLLDAFRSAGDAVEYRPQIAFSGDDNSIHEIDTLRARRRKLDNALARLNALYLYDDEAMPEKDFVMQRGQITKQLEEVNARIEELQNQESSEELGDGFIGKASYYIMANKLIEDRYIDYEKYIRAIDPSIPHSFLQQIIDHIVVNDGRVTSITFKNGATHTFTYKT

SEQ ID NO: 1223 - protein, 572 aa, Unknown
  Description of Unknown: Integrase B1224 sequence
  PTHR30461:SF3,IPR036162,PS51737,IPR011109,PTHR30461, PS00397,PF00239,G3DSA:1.10.10.2600,IPR006119,SSF53041, cd00338,SM00857,IPR025827,IPR038109,PS51736, IPR006118,PF13408,G3DSA:3.40.50.1390,PF07508,Coil
MASRIAEKLAAKKAAIYIRVSTHWQVDKDSLKVQRRELIAYVTLVLGITDYVVFEDPGYSAKNTDRPEYQAMMDRIRTGEFTHLVVWKIDRISRNLIDFAAMHDELQSLGVTFVSKNEQFDTSSAIGEAMMRIILIFAELERKTTAERVTAVMLSRASDGQWNGGRVPFGYSWSKETKTFSIVPEEAKAIRRMAELYEQYQSLLYVAKYLNDAGIVTKTGGQWTPTTVRTILTNPWYIGQYVYNVHSDGKGIEKRDSDEWITVENHHEPILNEDVFCRMKFLLTRNKRGGVPSHKTYVRKNIHVFAGLLRCGQCGSNMTANLDRRRANGFRPSQYACGSRRRKGTSCTNKYISDTTLGPFVLNYVANIIRASKNSSEATTPEVLERKLLRGEAFEDVASVSTDSLGQLLDAFRSAGDAVEYRPQIAFSGEDNAIREIDTLRARRRKLDNALARLNALYLYDDEAMPEKDFVMQRGQITKQLEEVNARIEELQNQESSEELGDDFIGKASYYIMANKLIEDRYIDYEKYIRAIDPSIPHSFLQQIIDHIVVNDGRVTSITFKNGATHTFTYKT

SEQ ID NO: 1224 - protein, 572 aa, Unknown
  Description of Unknown: Integrase B1225 sequence
  SM00857,G3DSA:1.10.10.2600,IPR036162,PF13408,IPR025827, G3DSA:3.40.50.1390,PS51737,IPR006119,IPR038109,PF07508, SSF53041,IPR011109,PTHR30461,Coil,cd00338, PF00239
MAYRKITDIKDTIGMRAVFYARVSTAEEEQLNAIELQIEENRGCIKDHGWKLVGEYIDRSKSGTMVKGRDDYQRLYEDLYEDLFDIVVIKDQERLQRNTLDWYLFINRVVQTGKLLFMYMDGKFYSPDDALITGVRAIIAEEFSRNLSKKLHNYHDHRIEKARQGQEIALQGSGNVYGWDKKDGKYYINPEQAKVRRLMCEGIMARKGSTLIAKELNDAGYRNTVGKPWKPMDIPKFVYDCKNVGTMIINKERHDFESKQTIKLPKEEWVYVENALPPIVTQEEWDLICKIHEERVIATGSDRRGKKTSGYSFSGKLVCGICGAPYWRKQRVSKDEYWVCSTKQTKGRRTRKRDSTMGKAGEINPLGCDNENISYNSLMEIMRVVSERLQANTDTIKQDMINWLTKLRKQLLEANGGHTEADLQRELSRKSKLLDAYLDGILNKQEYQKKAEELDERIIQLKAETEKNKANSGDIAEIDKVLANIDEEVSRYVDGNEKLKVEYLLEHLEQVQIFPDKVIVIVPILSEGIVVEKTQYVSREKCSKIHTESIIHYLEDYMYCTRKLGLYVQLVA

SEQ ID NO: 1225 - protein, 572 aa, Unknown
  Description of Unknown: Integrase B1226 sequence
  PTHR30461:SF3,IPR036162,PS51737,IPR011109,PTHR30461, PS00397,PF00239,G3DSA:1.10.10.2600,IPR006119,SSF53041, cd00338,SM00857,IPR025827,IPR038109,PS51736, IPR006118,PF13408,G3DSA:3.40.50.1390,PF07508,Coil
MASRIAEKLAAKKAAIYIRVSTHWQVDKDSLKVQRRELIAYVTLVLGITDYVVFEDPGYSAKNTDRPEYQAMMDRIRTGEFTHLVVWKIDRISRNLIDFAAMHDELQSLGVTFVSKNEQFDTSSAIGEAMMRIILIFAELERKTTAERVTAVMLSRASDGQWNGGRVPFGYSWSKETKTFSIVPEEAKAIRRMAELYEQYQSLLYVAKYLNDAGIVTKTGGQWTPTTVRTILTNPWYIGQYVYNVHSDGKGIEKRDSDEWITVENHHEPILNEDVFCRMKFLLTRNKRGGVPSHKTYVRKNIHVFAGLLRCGQCGSNMTANLDRRRANGFRPSQYACGSRRRKGTSCTNKYISDTTLGPFVLNYVANIIRASKNSSETTTPEVLERKLLRGEAFEDVASVSTDALGQLLDAFRSAGDAVEYRPQIAFSGDDNSIHEIDTLRARRRKLDNALARLNALYLYDDEAMPEKDFVMQRGQITKQLEEVNARIEELQNQESSEELGDDFIGKASYYIMANKLIEDRYIDYEKYIRAIDPSIPRSFLQQIIDHIVVNDGRVTSITFKNGATHTFTYKT

SEQ ID NO: 1226 - protein, 572 aa, Unknown
  Description of Unknown: Integrase B1227 sequence
  PTHR30461:SF3,IPR036162,PS51737,IPR011109,PTHR30461, PS00397,PF00239,G3DSA:1.10.10.2600,IPR006119,SSF53041, cd00338,SM00857,IPR025827,IPR038109,PS51736, IPR006118,PF13408,G3DSA:3.40.50.1390,PF07508,Coil
MASRIAEKLAAKKAAIYIRVSTHWQVDKDSLKVQRRELIAYVTLVLGITDYVVFEDPGYSAKNTDRPEYQAMMDRIRTGEFTHLVVWKIDRISRNLIDFAAMHDELRSLGVTFVSKNEQFDTSSAIGEAMMRIILIFAELERKTTAERVTAVMLSRASDGQWNGGRVPFGYSWSKETKTFSIVPEEAKAIRRMAELYEQYQSLLYVAKYLNDAGIVTKTGGQWTPTTVRTILTNPWYIGQYVYNVHSDGKGIEKRDSDEWITVENHHEPILNDDVFYRMKFLLTRNKRGGVPSHKTYVRKNIHVFAGLLHCGQCGSNMTANLDRRRANGFRPSQYACGSRRRKGTSCTNKYISDTTLGPFVLNYVANIIRASKNSSETTTPEVLERKLLRGEAFEDVASVSTDALGQLLDAFRSAGDAVEYRPQIAFSGDDNSIREIDTLRARRRKLDNALARLNALYLYDDEAMPEKDFVMQRGQITKQLEEVNSRIEELQNQESSEELGDDFIGKASYYIMANKLIEDRYIDYEKYIRAIDPSIPRSFLQQIIDHIVVNDGRVVSITFKNGSTHTFTYKT

SEQ ID NO: 1227 - protein, 572 aa, Unknown
  Description of Unknown: Integrase B1228 sequence
  PTHR30461:SF3,IPR036162,PS51737,IPR011109,PTHR30461, PS00397,PF00239,G3DSA:1.10.10.2600,IPR006119,SSF53041, cd00338,SM00857,IPR025827,IPR038109,PS51736, IPR006118,PF13408,G3DSA:3.40.50.1390,PF07508,Coil
MASRIAEKLAAKKAAIYIRVSTHWQVDKDSLKVQRRELIAYVTLVLGITDYVVFEDPGYSAKNTDRPEYQAMMDRIRTGEFTHLVVWKIDRISRNLIDFAAMHDELQSLGVTFVSKNEQFDTSSAIGEAMMRIILIFAELERKTTAERVTAVMLSRASDGQWNGGRVPFGYSWSKETKTFSIVPEEAKAIRRMAELYEQYQSLLYVAKYLNDAGIVTKTGGQWTPTTVRTILTNPWYIGQYVYNVHSDGKGIEKRDSDEWITVENHHEPILNDDVFYRMKFLLTRNKRGGVPSHKTYVRKNIHVFAGLLRCGQCGSNMTANLDRRRANGFRPSQYACGSRRRKGTSCTNKYISDTTLGPFVLNYVANIIRASKNSSETTTSEVLERKLLRGEAFEDVASVSTDALGQLLDAFRSAGDAVEYRPQIAFSGDDNSIREIDTLRARRRKLDNALARLNALYLYDDEAMPEKDFVMQRGQITKQLEEVNTRIEELQSQESSEELGDDFIGKASYYIMANKLIEDRYIDYEKYIRAIDPSIPRSFLQQIIDHIVVNDGRVISITFKNGSTHTFTYKT

SEQ ID NO: 1228 - protein, 572 aa, Unknown
  Description of Unknown: Integrase B1229 sequence
  PTHR30461:SF3,IPR036162,PS51737,IPR011109,PTHR30461, PS00397,PF00239,G3DSA:1.10.10.2600,IPR006119,SSF53041, cd00338,SM00857,IPR025827,IPR038109,PS51736, IPR006118,PF13408,G3DSA:3.40.50.1390,PF07508,Coil
MASRIAEKLAAKKAAIYIRVSTHWQVDKDSLKVQRRELIAYVTLVLGITDYVVFEDPGYSAKNTDRPEYQAMMDRIRTGEFTHLVVWKIDRISRNLIDFAAMHDELQSLGVTFVSKNEQFDTSSAIGEAMMRIILIFAELERKTTAERVTAVMLSRASDGQWNGGRVPFGYSWSKETKTFSIVPEEAKAIRRMAELYEQYQSLLYVAKYLNDAGIVTKTGGQWTPTTVRTILTNPWYIGQYVYNVHSDGKGIEKRDSDEWITVENHHEPILNEDVFCRMKFLLTRNKRGGVPSHKTYVRKNIHIFAGLLRCGQCGSNMTANLDRRRANGFRPSQYACGSRRRKGTSCTNKYISDTTLGPFVLNYVANIIRASKNSSEATTPEVLERKLLRGEAFEDVASVSTDALGQLLDAFRSAGDAVEYRPQIAFSGDDNSIREIDTLRARRRKLDNALARLNALYLYDDEAMPEKDFVMQRGQITKQLEEVNARIEELQNQESSEGLGDDFIGKASYYIMANKLIEDRYIDYEKYIRAIDPSIPRSFLQQIIDHIVVNDGRVISITFKNGSTHTFTYKT

SEQ ID NO: 1229 - protein, 572 aa, Unknown
  Description of Unknown: Integrase B1230 sequence
  SM00857,G3DSA:1.10.10.2600,IPR036162,PF13408,IPR025827, G3DSA:3.40.50.1390,PS51737,IPR006119,IPR038109,PF07508, SSF53041,IPR011109,PTHR30461,Coil,cd00338, PF00239
MAYRKITDIKDTIGMRAVFYARVSTAEEEQLNAIELQIEENRGCIKDHGWKLVGEYIDRSKSGTMVKGRDDYQRLYEDLYEDLFDIVVIKDQERLQRNTLDWYLFINRVVQTGKLLFMYMDGKFYSPDDALITGVRAIIAEEFSRNLSKKLHNYHDHRIEKARQGQEIALQGSGNVYGWDKKDGKYYINPEQAKVRRLMCEGIMARKGSTLIAKELNDAGYRNTVGKPWKPMDIPKFVYDCKNVGTMIINKERHDFESKQTIKLPKEEWVYVENALPPIVTQEEWDLICKIHEERVIATGSDRRGKKTSGYSFSGKLVCGICGAPYWRKQRVSKDEYWVCSTKQTKGRRTRKRDSTMGKAGEINPLGCDNENISYNSLMEIMGVVSERLQANTDTIKHDMINWLTKLRKQLLEANGGHTEADLQRELSRKSKLLDAYLDGILNKQEYQKKAEELDERIIQLKAETEKNKANSGDIAEIDKVLANIDEEVSRYVEGNEKLKVEYLLEHLEQVQIFPDKVIVIVPILSEGIVVEKAQYVSREKCSKIHTESMIHYLEDYMYCTRKLGLYVQLVA

SEQ ID NO: 1230 - protein, 572 aa, Unknown
  Description of Unknown: Integrase B1231 sequence
  PTHR30461:SF3,IPR036162,PS51737,IPR011109,PTHR30461, PS00397,PF00239,G3DSA:1.10.10.2600,IPR006119,SSF53041, cd00338,SM00857,IPR025827,IPR038109,PS51736, IPR006118,PF13408,G3DSA:3.40.50.1390,PF07508,Coil
MASRIAEKLAAKKAAIYIRVSTHWQVDKDSLKVQRRELIAYVTLVLGITDYVVFEDPGYSAKNTDRPEYQAMMDRIRAGEFTHLVVWKIDRISRNLIDFAAMHDELQSLGVTFVSKNEQFDTSSAIGEAMMRIILIFAELERKTTAERVTAVMLSRASDGQWNGGRVPFGYSWSKETKTFSIVPEEAKAIRRMAELYEQYQSLLYVAKYLNDAGIVTKTGGQWTPTTVRTILTNPWYIGQYVYNVHSDGKGIEKRDSDEWITVENHHEPILNEDVFCRMKFLLTRNKRGGVPSHKTYVRKNIHVFAGLLRCGQCGSNMTANLDRRRANGFRPSQYACGSRRRKGTSCTNKYISDTTLGPFVLNYVANIIRASKNFSETTTPDVLERKLLRGEAFEDVASVSTDALGQLLDAFRSAGDAVEYRPQIAFSGDDNSIREIDTLRARRRKLDNALARLNALYLYDDEAMPEKDFVMQRGQITKQLEEVNARIEELQNQESSEELGDDFIGKASYYIMANKLIEDRYIDYEKYIRAIDPSIPRSFLQQIIDHIVVNDGRVTSITFKNGATHTFTYKT

SEQ ID NO: 1231 - protein, 572 aa, Unknown
  Description of Unknown: Integrase B1232 sequence
  PTHR30461:SF3,IPR036162,PS51737,IPR011109,PTHR30461, PS00397,PF00239,G3DSA:1.10.10.2600,IPR006119,SSF53041, cd00338,SM00857,IPR025827,IPR038109,PS51736, IPR006118,PF13408,G3DSA:3.40.50.1390,PF07508,Coil
MASRIAEKLAAKKAAIYIRVSTHWQVDKDSLKVQRRELIAYVTLVLGITDYVVFEDPGYSAKNTDRPEYQAMMDRIRTGEFTHLVVWKIDRISRNLIDFAAMHDELQSLGVTFVSKNEQFDTSSAIGEAMMRIILIFAELERKTTAERVTAVMLSRASDGQWNGGRVPFGYSWSKETKTFSIVPEEAKAIRRMAELYEQYQSLLYVAKYLNDAGIVTKTGGQWTPTTVRTILTNPWYIGQYVYNVHSDGKGIEKRDSDEWITVENHHEPILNEDVFCRMKFLLTRNKRGGVPSHKTYVRKNIHVFAGLLRCGQCGSNMTANLDRRRANGFRPSQYACGSRRRKGTSCTNKYISDTTLGPFVLNYVANIIRASKNSSEATTPEVLERKLLRGEAFEDVASVSTDALGQLLDAFRSAGDAVEYRPQIAFSGDDNSIREIDTLRARRRKLDNALARLNALYLYDDEAMPEKDFVMQRGQITKQLEEVNARIEELQNQESSEELGDGFIGKASYYIMANKLIEDRYIDYEKYIRAIDPSIPHSFLQQIIDHIVVNDGRVTSITFKNGATHTFTYKT

SEQ ID NO: 1232 - protein, 572 aa, Unknown
  Description of Unknown: Integrase B1233 sequence
  PTHR30461:SF3,SM00857,G3DSA:1.10.10.2600,IPR036162,PF13408, PS51737,IPR025827,G3DSA:3.40.50.1390,IPR006119,IPR038109, PF07508,IPR011109,SSF53041,PTHR30461,PS51736, cd00338,PF00239
MARSAKKIEYAPAEQIGVIYARYSSHNQKEESIEQQIAECTEFAEKNGIRIIGIYADKAVSGRSDRRPNFQRMMRDAEKRHFQIVVAYKSNRIARNMLNALQYEARLDLFGIKTLYAKEEFGNTAAGRFALRTMMNVNQFYSENMGEDIKRGMVDNANECKVNGMLPLGYVKSNEGKYAVAPDEAAVVREIFDSFLKDVPVAEIARSLNQRGIRTKLGREWNKNSFHIMLKNDNYIGVYRHSGVVVEDGIPPILEREVFAAVQEKLANKKKTAGRRSANGEYLLTGKLFCGYCGSYMIGVSGTGENGTVHHYYQCQKRHAESRCEKKNVRRDFIEKLIARLTQEYILQDDTIEWIADSTMSFQAMARRESGIAQLEHDLADKRKIAKNIMSAIEQGIITETTKARLLEVEAETRDLERSLSVAKAAAQPVERERVVFSLEQMREGNVGSKEHQKKLIDTFVKSVTLWDDRIQIDYYHTPGKHKFSYSLEELTSKVENESNAADVRAESLEVHHCRRELHRFTTAFYWQLHLRGYMARSKRRRNSNSCVFFACIDGCVPQCPARLGIVWSSKR

SEQ ID NO: 1233 - protein, 572 aa, Unknown
  Description of Unknown: Integrase B1234 sequence
  PTHR30461:SF3,IPR036162,PS51737,IPR011109,PTHR30461, PS00397,PF00239,G3DSA:1.10.10.2600,IPR006119,SSF53041, cd00338,SM00857,IPR025827,IPR038109,PS51736, IPR006118,PF13408,G3DSA:3.40.50.1390,PF07508,Coil
MASRIAEKLAAKKAAIYIRVSTHWQVDKDSLKVQRRELIAYVTLVLGITDYVVFEDPGYSAKNTDRPEYQAMMDRIRTGEFTHLVVWKIDRISRNLIDFAAMHDELQSLGVTFVSKNEQFDTSSAIGEAMMRIILIFAELERKTTAERVTAVMLSRASDGQWNGGRVPFGYSWSKEAKTFSIVPEEAKAIRRMAELYEQYQSLLYVAKYLNDAGIVTKTGGQWTPTTVRTILTNPWYIGQYVYNVHSDGKGIEKRDSDEWITVENHHEPILSEDVSYRMKFLLTRNKRGGVPSHKTYVRKNIHIFAGLLRCGQCGSNMTANLDRRRANGFRPSQYACGSRRRKGTSCTNKYISDTTLGPFVLNYVANIIRASKNSSETTTSEVLERKLLRGEAFEDVASVSTDALGQLLDAFRSAGDAVEYRPQIAFSGDDNSIREIDTLRARRRKLDNALARLNALYLYDDEAMPEKDFVMQRGQITKQLEEVNARIEELQNQESSEELGDDFIGKASYYIMANKLIEDRYIDYEKYIRAIDPSIPRSFLQQIIDHIVVNDGRVISITFKNGSTHTFTYKT

SEQ ID NO: 1234 - protein, 572 aa, Unknown
  Description of Unknown: Integrase B1235 sequence
  SM00857,G3DSA:1.10.10.2600,IPR036162,PF13408,IPR025827, G3DSA:3.40.50.1390,PS51737,IPR006119,IPR038109,PF07508, SSF53041,IPR011109,PTHR30461,Coil,cd00338, PF00239
MAYRKITDIKDTIGMRAVFYARVSTAEEEQLNAIELQIEENRGCIKDHGWKLVGEYIDRSKSGTMVKGRDDYQRLYEDLYEDLFDIVVIKDQERLQRNTLDWYLFINRVVQTGKLLFMYMDGKFYSPDDALITGVRAIIAEEFSRNLSKKLHNYHDHRIEKARQGQEIALQGSGNVYGWDKKDGKYYINPEQAKVRRLMCEGIMARKGSTLIAKELNDAGYRNTVGKPWKPMDIPKFVYDCKNVGTMIINKERHDFESKQTIKLPKEEWVYVENALPPIVTQEEWDLICKIHEERVIATGSDRRGKKTSGYSFSGKLVCGICGAPYWRKQRVSKDEYWVCSTKQTKGRRTRKRDSTMGKAGEINPLGCDNENISYNSLMEIMEVVSERLQANTDTIKQDMINWLTKLRKQLLEANGGHTEADLQRELSRKSKLLDAYLDGILNKQEYQTKAEELDERIIQLKAETEKNKANSGDIAEIDKVLANIDEEVSRYVDGNEKLKVEYLLEHLEQVQIFPDKVIVIVPILSEGIVVEKTQYVSREKCSEIHTESMIHYLEDYMYCTRKLGLYVQLVA

SEQ ID NO: 1235 - protein, 572 aa, Unknown
  Description of Unknown: Integrase B1236 sequence
  SM00857,G3DSA:1.10.10.2600,IPR036162,PF13408,PS51737, G3DSA:3.40.50.1390,IPR025827,IPR006119,IPR038109,PF07508, SSF53041,IPR011109,PTHR30461,Coil,cd00338, PF00239
MAYRKITDIKDTIGMRAVFYARVSTAEEEQLNAIELQIEENRGCIKDHGWKLVGEYIDRSKSGTMVKGRDDYQRLYEDLYEDLFDIVVIKDQERLQRNTLDWYLFINRVVQTGKLLFMYMDGKFYSPDDALITGVRAIIAEEFSRNLSKKLHNYHDHRIEKARQGQEIALQGSGNVYGWDKKDGKYYINPEQAKVRRLMCEGIMARKGSTLIAKELNEAGYRNTVGKPWKPMDIPKFVYDCKNVGTMIINKERHDFESKQTIKLPKEEWVYVENALPPIVTQEEWDLICKIHEERVIATGSDKRGKKTSGYSFSGKLVCGICGAPYWRKQRVSKDEYWVCSTKQTKGRKTRKRDSTMGKAGEINPLGCDNENISYNSLMEIMEVVSERLQANTDTIKQDMINWLTKLRKQLLEANGGHTEADLQRELSRKSKLLDAYLDGILNKQEYQKKAEELDERIIQLKAETEKNKANAGDLAEIDKVLANIDEEVARYVDGNEKLKVEYLLEHLEQVQIFPDKVIVIVPILSEGIVVEKTQYVSREKCSKIHTESMIHYLEDYMYCTRKLGLYVQLVA

SEQ ID NO: 1236 - protein, 572 aa, Unknown
  Description of Unknown: Integrase B1237 sequence
  SM00857,G3DSA:1.10.10.2600,IPR036162,PF13408,PS51737, G3DSA:3.40.50.1390,IPR025827,IPR006119,IPR038109,PF07508, SSF53041,IPR011109,PTHR30461,Coil,cd00338, PF00239
MAYRKITDIRDTIGMRAVFYARVSTAEEEQLNAIELQIEENRGCIKDHGWKLVGEYIDRSKSGTMVKGRDDYQRLYEDLYEDLFDIVVIKDQERLQRNTLDWYLFINRVVQTGKLLFMYMDGKFYSPDDALITGVRAIIAEEFSRNLSKKLHNYHDHRIEKARQGQEIALQGSGNVYGWDKKDGKYYINPEQAKVRRLMCEGIMARKGSTLIAKELNDAGYRNTVGKPWKPMDIPKFVYDCKNVGTMIINKERHDFESKQTIKLPKEEWVYVENALPPIVTQEEWDLICKIHEERVIATGSDRRGKKTSGYSFSGKLVCGICGAPYWRKQRVSKDEYWVCSTKQTKGRKTRKRDSTMGKAGEINPLGCDNENISYNSLMEIMGVVSERLQANTDTIKQDMINWLTKLRKQLLEANGGHTEADLQRELSRKSKLLDAYLDGILNKQEYQKKAEELDERIIQLKTETEKNKANSGDIAEIDKVLANIDEEVSRYVDGNEKLKVEYLLEHLEQVQIFPDKVIVIVPILSEGIVVEKTQYVSREKCSEIYTESMIHYLEDYMYCTRKLGLYVQLVA

SEQ ID NO: 1237 - protein, 572 aa, Unknown
  Description of Unknown: Integrase B1238 sequence
  SM00857,G3DSA:1.10.10.2600,IPR036162,PF13408,PS51737, G3DSA:3.40.50.1390,IPR025827,IPR006119,IPR038109,PF07508, SSF53041,IPR011109,PTHR30461,Coil,cd00338, PF00239
MAYRKITDIKDTIGMRAVFYARVSTAEEEQLNAIELQIEENRGCIKDHGWKLVGEYIDRSKSGTMVKGRDDYQRLYEDLYEDLFDIVVIKDQERLQRNTLDWYLFINRVVQTGKLLFMYMDGKFYSPDDALITGVRAIIAEEFSRNLSKKLHNYHDHRIEKARQGQEIALQGSGNVYGWDKKDGKYYINSEQAKVRRLMCEGIMARKGSTLIAKELNDAGYRNTVGKPWKPMDIPKFVYDCKNVGTMIINKERHDFESKQTIKLPKEEWVYVENALPPIVTQEEWDLICKIHEERVIATGSDRRGKKTSGYSFSGKLVCGICGAPYWRKQRVSKDEYWVCSTKQTKGRRTRKRDSTMGKAGEINPLGCDNENISYNSLMEIMGVVSERLQANTDTIKHDMINWLTKLRKQLLEANGGHTEADLQRELSRKSKLLDAYLDGILNKQEYQKKAEELDERIIQLKAETEKNKANSGDIAEIDKVLANIDEEVSRYVDGNEKLKVEYLLEHLEQVQIFPDKVIVIVPILSEGIVVEKTQYVSREKCSKIHTESMIHYLEDYMYCTRKLGLYVQLVA

SEQ ID NO: 1238 - protein, 572 aa, Unknown
  Description of Unknown: Integrase B1239 sequence
  PTHR30461:SF3,IPR036162,PS51737,IPR011109,PTHR30461, PS00397,PF00239,G3DSA:1.10.10.2600,IPR006119,SSF53041, cd00338,SM00857,IPR025827,IPR038109,PS51736, IPR006118,PF13408,G3DSA:3.40.50.1390,PF07508,Coil
MASRIAEKLAAKKAAIYIRVSTHWQVDKDSLKVQRRELIAYVTLVLGITDYVVFEDPGYSAKNTDRPEYQAMMDRIRTGEFTHLVVWKIDRISRNLIDFAAMHDELQSLGVTFVSKNEQFDTSSAIGEAMMRIILIFAELERKTTAERVTAVMLSRASDGQWNGGRVPFGYSWSKEAKTFSIVPEEAKAIRRMAELYEQYQSLLYVAKYLNDAGIVTKTGGQWTPTTVRTILTNPWYIGQYVYNVHSDGKGIEKRDSDEWITVENHHEPILNEDVFCRMKFLLTRNKRGGVPSHKTYVRKNIHVFAGLLRCGQCGSNMTANLDRRRANGFRPSQYACGSRRRKGTSCTNKYISDTTLGPFVLNYVANIIRASKNSSEATTPEVLERKLLRGEAFEDVASVSTDALGQLLDAFRSAGDAVEYRPQIAFSGDDNSIREIDTLRARRRKLDNALARLNALYLYDDEAMPEKDFVMQRGQITKQLEEVNARIEELQNQESSEELGDDFIGKASYYIMANKLIKDRYIDYEKYIRAIDPSIPRSFLQQIIDHIVVNDGRVISITFKNGSTHTFAYKT

SEQ ID NO: 1239 - protein, 572 aa, Unknown
  Description of Unknown: Integrase B1240 sequence
  PTHR30461:SF3,IPR036162,PS51737,IPR011109,PTHR30461, PS00397,PF00239,G3DSA:1.10.10.2600,IPR006119,SSF53041, cd00338,SM00857,IPR025827,IPR038109,PS51736, IPR006118,PF13408,G3DSA:3.40.50.1390,PF07508,Coil
MASRIAEKLAAKKAAIYIRVSTHWQVDKDSLKVQRRELIAYVTLVLGITDYVVFEDPGYSAKNTDRPEYQAMMDRIRTGEFTHLVVWKIDRISRNLIDFAAMHDELQSLGVTFVSKNEQFDTSSAIGEAMMRIILIFAELERKTTAERVTAVMLSRASDGQWNGGRVPFGYSWSKEAKTFSIVPEEAKAIRRMAELYEQYQSLLYVAKYLNDAGIVTKTGGQWTPTTVRTILTNPWYIGQYVYNVHSDGKGIEKRDSDEWITVENHHEPILNEDVFCRMKFLLTRNKRGGVPSHKTYVRKNIHIFAGLLRCGQCGSNMTANLDRRRANGFRPSQYACGSRRRKGTSCTNKYISDTTLGPFVLNYVANIIRASKNSSEATTPEVLERKLLRGEAFEDVASVSTDALGQLLDAFRSAGDAVEYRPQIAFSGDDNSIREIDTLRARRRKLDNALARLNALYLYDDEAMPEKDFVMQRGQITKQLEEVNARIEELQNQESSEGLGDDFIGKASYYIMANKLIEDRYIDYEKYIRAIDPSIPRSFLQQIIDHIVVNDGRVISITFKNGSTHTFTYKT

SEQ ID NO: 1240 - protein, 572 aa, Unknown
  Description of Unknown: Integrase B1241 sequence
  PTHR30461:SF3,IPR036162,PS51737,IPR011109,PTHR30461, PS00397,PF00239,G3DSA:1.10.10.2600,IPR006119,SSF53041, cd00338,SM00857,IPR025827,IPR038109,PS51736, IPR006118,PF13408,G3DSA:3.40.50.1390,PF07508,Coil
MASRIAEKLAAKKAAIYIRVSTHWQVDKDSLKVQRRELIAYVTLVLGITDYVVFEDPGYSAKNTDRPEYQAMMDRIRTGEFTHLVVWKIDRISRNLIDFATMHDELQSLGVTFVSKNEQFDTSSAIGEAMMRIILIFAELERKTTAERVTAVMLSRASDGQWNGGRVPFGYSWSKETKTFSIVPEEAKAIRRMAELYEQYQSLLYVAKYLNDAGIVTKTGGQWTPTTVRTILTNQWYIGQYVYNVHSDGKGIEKRDSDEWITVENHHEPILNEDVFCRMKFLLTRNKRGGVPSHKTYVRKNIHIFAGLLRCGQCGSNMTANLDRRRANGFRPSQYACGSRRRKGTSCTNKYISDTTLGPFVLNYVANIIRASKNSSEATTPEVLERKLLRGEAFEDVASVSTDALGQLLDAFRSAGDAVEYRPQIAFSGDDNSIREIDTLRARRRKLDNALARLNALYLYDDEAMPEKDFVMQRGQITKQLEEVNARIEELQNQESSEELGDDFIGKASYYIMANKLIEDRYIDYEKYIRAIDPSIPRSFLQQIIDHIVVNDGRVISITFKNGSTHTFTYKT

SEQ ID NO: 1241 - protein, 572 aa, Unknown
  Description of Unknown: Integrase B1242 sequence
  PTHR30461:SF3,IPR036162,PS51737,IPR011109,PTHR30461, PS00397,PF00239,G3DSA:1.10.10.2600,IPR006119,SSF53041, cd00338,SM00857,IPR025827,IPR038109,PS51736, IPR006118,PF13408,G3DSA:3.40.50.1390,PF07508,Coil
MASRIAEKLAAKKAAIYIRVSTHWQVDKDSLKVQRRELIAYVTLVLGITDYVVFEDPGYSAKNTDRPEYQAMMDRIRTGEFTHLVVWKIDRISRNLIDFAAMHDELQSLGVTFVSKNEQFDTSSAIGEAMMRIILIFAELERKTTAERVTAVMLSRASDGQWNGGRVPFGYSWSKETKTFSIVPEEAKAIRRMAELYEQYQSLLYVAKYLNDAGIVTKTGGQWTPTTVRTILTNPWYIGQYVYNVHSDGKGIEKRDSDEWITVENHHEPILNEDVFCRMKFLLTRNKRGGVPSHKTYVRKNIHIFAGLLRCGQCGSNMTANLDRRRANGFRPSQYACGSRRRKGTSCTNKYISDTTLGPFVLNYVANIIRASKNSSEATTPEVLERKLLRGEAFEDVASVSTDALGQLLDAFRSAGDAVEYRPQIAFSGDDNSIREIDTLRARRRKLDNALARLNALYLYDDEAMPEKDFVMQRGQITKQLEEVNARIEELQNQESSEELGDGFIGKASYYIMANKLIEDRYIDYEKYIRAIDPSIPRSFLQQIIDHIIVNDGRVTSITFKNGATHTFTYKT

SEQ ID NO: 1242 - protein, 572 aa, Unknown
  Description of Unknown: Integrase B1243 sequence
  SM00857,G3DSA:1.10.10.2600,IPR036162,PF13408,IPR025827, PS51737,G3DSA:3.40.50.1390,IPR006119,IPR038109,PF07508, SSF53041,IPR011109,PTHR30461,Coil,cd00338, PF00239
MAYRKITDIRDTIGMRAVFYARVSTAEEEQLNAIELQIEENRGCIKDHGWKLVGEYIDRSKSGTMVKGRDDYQRLYEDLYEDLFDIVVIKDQERLQRNTLDWYLFINRVVQTGKLLFMYMDGKFYSPDDALITGVRAIIAEEFSRNLSKKLHNYHDHRIEKARQGQEIALQGSGNVYGWDKKDGKYYINPEQAKVRRLMCEGIMARKGSTLIAKELNEAGYRNTVGKLWKPMDIPKFVYDCKNVGTMIINKERHDFESKQTIKLPKEEWVYVENALPPIVTQEEWDLICKIHEERVIATGSDRRGKKTSGYSFSGKLVCGICGAPYWRKQRVSKDEYWVCSTKQTKGRRTRKRDSTMGKAGEINPLGCDNENISYNSLMEIMGVVSERLQANTDTIKHDMINWLTKLRKQLLEANGGHTEADLQRELSRKSKLLDAYLDGILNKQEYQKKAEELDDRIIQLKAETEKNKANSGDIAEIDKVLANIDEEVSKYVDGNEKLKVEYLLEHLEQVQIFPDKVIVIVPILSEGIVVEKAQYVSREKCSEIHTESMIHYLEDYMYCTRKLGLYVQLVA

SEQ ID NO: 1243 - protein, 572 aa, Unknown
  Description of Unknown: Integrase B1244 sequence
  PTHR30461:SF3,SM00857,G3DSA:1.10.10.2600,IPR036162,PF13408, IPR025827,G3DSA:3.40.50.1390,PS51737,IPR006119,IPR038109, PF07508,IPR011109,SSF53041,PTHR30461,PS51736, cd00338,PF00239
MARSAKKIEYAPAEQIGVIYARYSSHNQKEESIEQQIAECTEFAEKNGIRIIGIYADKAVSGRSDRRPNFQRMMRDAEKRHFQIVVAYKSNRIARNMLNALQYEAKLDSFGIKTLYAKEEFGNTAAGRFALRTMMNVNQFYSENMGEDIKRGMVDNAIECKVNGMLPLGYVKGEDGKYAIAADEAAVVREIYDSVLKDIPLAEIARSLNQRGIRTKLGRDWNKNSFHILLKNDNYIGVYRHSGVVVEDGIPPILDKEVFEAVQEKLTNKKKTAGRRSANGEYLLTGKLFCGYCGSYMIGVSGTGENGTVHNYYQCQKRHAEGRCEKKNVRRDFIEKLIARLTQDYILQDDTIEWIADSTMSFQAMARRESGVAQLERDLADNRKVAKNIMAAIEQGIITETTKARLLEVEGTIHDLERSLSIAKAASQPIERERVVFSLEQMREGNVGSKEHQKKLIDTFVKSVTLWDDRIQIDYYHTPGKHKFSYSLEELTSKAENESNASDVRTDSLELHHCRRELHRFTTAFLLTAAPSRLYGTIKKTQESNSCVFFACIDGGVPQCPARLGIVWSSKR

SEQ ID NO: 1244 - protein, 572 aa, Unknown
  Description of Unknown: Integrase B1245 sequence
  PTHR30461:SF3,IPR036162,PS51737,IPR011109,PTHR30461, PS00397,PF00239,G3DSA:1.10.10.2600,IPR006119,SSF53041, cd00338,SM00857,IPR025827,IPR038109,PS51736, IPR006118,PF13408,G3DSA:3.40.50.1390,PF07508,Coil
MASRIAEKLAAKKAAIYIRVSTHWQVDKDSLKVQRRELIAYVTLVLGITDYVVFEDPGYSAKNTDRPEYQAMMDRIRTGEFTHLVVWKIDRISRNLIDFAAMHDELQSLGVTFVSKNEQFDTSSAIGEAMMRIILIFAELERKTTAERVTAVMLSRASDGQWNGGRVPFGYSWSKETKTFSIVPEEAKAIRRMAELYEQYQSLLYVAKYLNDAGIVTKTGGQWTPTTVRTILTNPWYIGQYVYNVHSDGKGIEKRDSDEWITVENHHEPILNDDVFYRMKFLLTRNKRGGVPSHKTYVRKNIHVFAGLLRCGQCGSNMTANLDRRRANGFRPSQYACGSRRRKGTSCTNKYISDTTLGPFVLNYVANIIRASKNSSEATTPEVLERKLLRGEAFEDVASVSTDALGQLLDAFRSAGDAVEYRPQIAFSGDDNSIRELDTLRARRRKLDNALARLNALYLYDDEAMPEKDFVMQRGQITKQLEEVNARIEELQNQESSEELGDDFIGKASYYIMANKLIEDRYIDYEKYIRAIDPSIPRSFLQQIIDHIVVNDGRVTSITFKNGSTHTFTYKT

SEQ ID NO: 1245 - protein, 572 aa, Unknown
  Description of Unknown: Integrase B1246 sequence
  PTHR30461:SF3,IPR036162,PS51737,IPR011109,PTHR30461, PS00397,PF00239,G3DSA:1.10.10.2600,IPR006119,SSF53041, cd00338,SM00857,IPR025827,IPR038109,PS51736, IPR006118,PF13408,G3DSA:3.40.50.1390,PF07508,Coil
MASRIAEKLAAKKAAIYIRVSTHWQVDKDSLKVQRRELIAYVTLVLGITDYVVFEDPGYSAKNTDRPEYQAMMDRIRTGEFTHLVVWKIDRISRNLIDFAAMHDELQSLGVTFVSKNEQFDTSSAIGEAMMRIILIFAELERKTTAERVTAVMLSRASDGQWNGGRVPFGYSWSKEAKTFSIVPEEAKAIRRMAELYEQYQSLLYVAKYLNDAGIVTKTGGQWTPTTVRTILTNPWYIGQYVYNVHSDGKGIEKRDSDEWITVENHHEPILNEDVFCRMKFLLTRNKRGGVPSHKTYVRKNIHVFAGLLRCGQCGSNMTANLDRRRANGFRPSQYACGSRRRKGTSCTNKYISDTTLGPFVLNYVANIIRASKNSSEATTPEVLERKLLRGEAFEDVASVSADSLGQLLDAFRSAGDAVEYRPQIAFSGEDNAIREIDTLRARRRKLDNALARLNALYLYDDEAMPEKDFVMQRGQITKQLEEVNARIEELQNQESSEELGDDFIGKASYYIMANKLIEDRYIDYEKYIRAIDPSIPHSFLQQIIDHIVVNDGRVTSITFKNGATHTFTYKT

SEQ ID NO: 1246 - protein, 572 aa, Unknown
  Description of Unknown: Integrase B1247 sequence
  PTHR30461:SF3,IPR036162,PS51737,IPR011109,PTHR30461, PS00397,PF00239,G3DSA:1.10.10.2600,IPR006119,SSF53041, cd00338,SM00857,IPR025827,IPR038109,PS51736, IPR006118,PF13408,G3DSA:3.40.50.1390,PF07508,Coil
MASRIAEKLAAKKAAIYIRVSTHWQVDKDSLKVQRRELIAYVTLVLGITDYVVFEDPGYSAKNTDRPEYQAMMDRIRTGEFTHLVVWKIDRISRNLIDFAAMHDELQSLGVTFVSKNEQFDTSSAIGEAMMRIILIFAELERKTTAERVTAVMLSRASDGQWNGGRVPFGYSWSKETKTFSIVPEEAKAIRRMAELYEQYQSLLYVAKYLNDAGIVTKTGGQWTPTTVRTILTNPWYIGQYVYNVHSDGKGIEKRDSDEWITVENHHEPILNDDVFYRMKFLLTRNKRGGVPSHKTYVRKNIHVFAGLLRCGQCGSNMTANLDRRRANGFRPSQYACGSRRRKGTSCTNKYISDTTLGPFVLNYVANIIRASKNSSETTTSEVLERKLLRGEAFEDVASVSTDALGQLLNAFRSAGDAVEYRPQIAFSGDDNSIREIDTLRARRRKLDNALARLNALYLYDDEAMPEKDFVMQRGQITKQLEEVNTRIEELQSQESSEELGDDFIGKASYYIMANKLIEDRYIDYEKYIRAIDPSIPRSFLQQIIDHIVVNDGRVISITFKNGSTHTFTYKI

SEQ ID NO: 1247 - protein, 572 aa, Unknown
  Description of Unknown: Integrase B1248 sequence
  SM00857,G3DSA:1.10.10.2600,IPR036162,PF13408,IPR025827, G3DSA:3.40.50.1390,PS51737,IPR006119,IPR038109,PF07508, SSF53041,IPR011109,PTHR30461,Coil,cd00338, PF00239
MAYRKITDIKDTIGMRAVFYARVSTAEEEQLNAIELQIEENRGCIKDHGWKLVGEYIDRSKSGTMVKGRDDYQRLYEDLYEDLFDIVVIKDQERLQRNTLDWYLFINRVVQTGKLLFMYMDGKFYSPDDALITGVRAIIAEEFSRNLSKKLHNYHDHRIEKARQGQEIALQGSGNVYGWDKKDGKYYINPEQAKVRRLMCEGIMARKGSTLIAKELNDAGYRNTVGKPWKPMDIPKFVYDCKNVGTMIINKERHDFESKQTIKLPKEEWVYVENALPPIVTQEEWDLICKIHEERVIATGSDRRGKKTSGYSFSGKLVCGICGAPYWRKQRVSKDEYWVCSTKQTKGRRTRKRDSTMGKAGEINPLGCDNENISYNSLMEIMGVVSERLQANTDTIKQDMINWLTKLRKQLLEANGGHTEADLQRELSRKSKLLDAYLDGILNKQEYQKKAEELDERIIQLKTETEKNKANSGDIAEIDKVLANIDEEVARYVDGNEKLKVEYLLEHLEQVQIFPDKVIVIVPILSEGIVVEKTQYVSREKCSKIHTESMIHYLEDYMYCTRKLGLYVQLVA

SEQ ID NO: 1248 - protein, 572 aa, Unknown
  Description of Unknown: Integrase B1249 sequence
  PTHR30461:SF3,IPR036162,PS51737,IPR011109,PTHR30461, PS00397,PF00239,G3DSA:1.10.10.2600,IPR006119,SSF53041, cd00338,SM00857,IPR025827,IPR038109,PS51736, IPR006118,PF13408,G3DSA:3.40.50.1390,PF07508,Coil
MASRIAEKLAAKKAAIYIRVSTHWQVDKDSLKVQRRELIAYVTLVLGITDYVVFEDPGYSAKNTDRPEYQAMMDRIRTGEFTHLVVWKIDRISRNLIDFAAMHDELQSLGVTFVSKNEQFDTSSAIGEAMMRIILIFAELERKTTAERVTAVMLSRASDGQWNGGRVPFGYSWSKETKTFSIVPEEAKAIRRMAELYEQYQSLLYVAKYLNDAGIVTKTGGQWTPTTVRTILTNPWYIGQYVYNVHSDGKGIEKRDSDEWITVENHHEPILNEDVFCRMRFLLTRNKRGGVPSHKTYVRKNIHIFAGLLRCGQCGSNMTANLDRRRANGFRPSQYACGSRRRKGTSCTNKYISDTTLGPFVLNYVANIIRASKNSSEATTPEVLERKLLRGEAFEDVASVSTDALGQLLDAFRSAGDAVEYRPQIAFSGDDNSIREIDTLRARRRKLDNALARLNALYLYDDEAMPEKDFVMQRGQITKQLEEVNARIEELQNQESSEELGDGFIGKASYYIMANKLIEDRYIDYEKYIRAIDPSIPHSFLQQIIDHIVVNDGRVTSITFKNGATHTFTYKT

SEQ ID NO: 1249 - protein, 572 aa, Unknown
  Description of Unknown: Integrase B1250 sequence
  SM00857,G3DSA:1.10.10.2600,IPR036162,PF13408,IPR025827, G3DSA:3.40.50.1390,PS51737,IPR006119,IPR038109,PF07508, SSF53041,IPR011109,PTHR30461,Coil,cd00338, PF00239
MAYRKITDIRDTIGMRAVFYARVSTAEEEQLNAIELQIEENRGCIKDHGWKLVGEYIDRSKSGTMVKGRDDYQRLYEDLYEDLFDIVVIKDQERLQRNTLDWYLFINRVVQTGKLLFMYMDGKFYSPDDALITGVRAIIAEEFSRNLSKKLHNYHDHRIEKARQGQEIALQGSGNVYGWDKKDGKYYINPEQAKVRRLMCEGIMARKGSTLIAKELNDAGYRNTVGKPWKPMDIPKFVYDCKNVGTMIINKERHDFESKQTIKLPKEEWVYVENALPPIVTQEEWDLICKIHEERVIATGSDRRGKKTSGYSFSGKLVCGICGAPYWRKQRVSKDEYWVCSTKQTKGRKTRKRDSTMGKAGEINPLGCDNENISYNSLMEIMGVVSERLQANTDTIKQDMINWLTKLRKQLLEANGGHTEADLQRELSRKSKLLDAYLDGILNKQEYQKKAEELDERIIQLKTETEKNKANSGDIAEIDKVLANIDEEVARYVDGNEKLKVEYLLEHLEQVQIFPDKVIVIVPILSEGIVVEKTQYVSREKCSKIHTESMIHYLEDYMYCTRKLGLYVQLVA

SEQ ID NO: 1250 - protein, 572 aa, Unknown
  Description of Unknown: Integrase B1251 sequence
  PTHR30461:SF3,SM00857,G3DSA:1.10.10.2600,IPR036162,PS51737, G3DSA:3.40.50.1390,IPR006119,IPR038109,PF07508,SSF53041, IPR011109,PF00239,PTHR30461,mobidb-lite,Coil, cd00338
MKAVILTRVSTKEQEEGHSLPAQSTRLSEYAKRKNLTVIQTFQIIESSTRGKRKEFMQMIDFCKSYPEKIAIIADAVDRVQRSFKESVMLDDLIRQEKIELHFYREGMIIGKNSSSSDIMRWDFSVMGAKSYVLQLSENVRRSIDYKIKNGEMSGAAPTGYENFIDENGKHSIRPKEPDATKIRLLFERYSLGGISIHELARYADSIGLKSRTGKKIVNTTLTTILDNPFYYGEMNSKGRLIRHIYEPIITKELFDQCQMWRGKTTSKPFKHGDIPFLYRGLITCMNSGKTCPNEIKKKKFYYLVCYKQDGTRLYIPEQDITDQIEYILGGIHIPEQALRDLKTHLINSKSAEIEFRNREIGRLNAEITRAQQRLDTLLNMRLDGELSKEQYENKRAELQLNIERTRDKLKVHGKADDDFNETLIGLFEIASASKELFHKSKDISQKRLLMRFIFESLQIKEGTIYYKLNFPFSKMEMNSNSGGNHSEPLSGNGYGEKTGNLKSPENSSIRTAKTQEKTKACDQKSQACTNWLPNSSNVRKNIIDLQIFLEHRSEITAMKDQLALIRQELAA

SEQ ID NO: 1251 - protein, 572 aa, Unknown
  Description of Unknown: Integrase B1252 sequence
  SM00857,G3DSA:1.10.10.2600,IPR036162,PF13408,PS51737, G3DSA:3.40.50.1390,IPR025827,IPR006119,IPR038109,PF07508, SSF53041,IPR011109,PTHR30461,Coil,PS51736, cd00338,PF00239
MAYRKITDIRDTIGMRAVFYARVSTAEEEQLNAIELQIEENRGCIKDHGWKLVGEYIDRSKSGTMIKGRDDYQRLYEDLYEDLFDIVVIKDQERLQRNTLDWYLFINRVVQTGKLLFMYMDGKFYSPDDALITGVRAIIAEEFSRNLSKKLHNYHDHRIEKARQGQEIALQGSGNVYGWDKKDGKYYINPEQAKVRRLMCEGIMARKGSTLIAKELNEAGYRNTVGKLWKPMDIPKFVYDCKNVGTMIINKERHDFESKQTIKLPKEEWVYVENALPPIVTQEEWDLICKIHEERVIATGSDRRGKKTSGYSFSGKLVCGICGAPYWRKQRVSKDEYWVCSTKQTKGRRTRKRDSTMGKAGEINPLGCDNENISYNSLMEIMGVVSERLQANTDTIKHDMINWLTKLRKQLLEANGGHTEADLQRELSRKSKLLDAYLDGILNKQEYQKKAEELDERIIQLKAETEKNKANSGDIAEIDKVLANIDEEVSRYVDGNEKLKVEYLLEHLEQVQIFPDKVIVIVPILSEGIVVEKAQYVSREKCSKIHTESMIHYLEDYMYCTRKLGLYVQLVA

SEQ ID NO: 1252 - protein, 572 aa, Unknown
  Description of Unknown: Integrase B1253 sequence
  PTHR30461:SF3,IPR036162,PS51737,IPR011109,PTHR30461, PS00397,PF00239,G3DSA:1.10.10.2600,IPR006119,SSF53041, cd00338,SM00857,IPR025827,IPR038109,PS51736, IPR006118,PF13408,G3DSA:3.40.50.1390,PF07508,Coil
MASRIAEKLAAKKAAIYIRVSTHWQVDKDSLKVQRRELIAYVTLVLGITDYVVFEDPGYSAKNTDRPEYQAMMDRIRTGEFTHLVVWKIDRISRNLIDFAAMHDELQSLGVTFVSKNEQFDTSSAIGEAMMRIILIFAELERKTTAERVTAVMLSRASDGQWNGGRVPFGYSWSKETKTFSIVPEEAKAIRRMAELYEQYQSLLYVAKYLNDAGIVTKTGGQWTPTTVRTILTNPWYIGQYVYNVHSDGKGIEKRDSDEWITVENHHEPILNDDVFYRMKFLLTRNKRGGVPSHKTYVRKNIHVFAGLLRCGQCGSNMTANLDRRRANGFRPSQYACGSRRRKGTSCTNKYISDTTLGPFVLNYVANIIRASKNSSETTTSEVLERKLLRGEAFEDVASVSTDALGQLLNAFRFAGDAVEYRPQIAFSGDDNSIREIDTLRARRRKLDNALARLNALYLYDDEAMPEKDFVMQRGQITKQLEEVNTRIEELQSQESSEELGDDFIGKASYYIMANKLIEDRYIDYEKYIRAIDPSIPRSFLQQIIDHIVVNDGRVISITFKNGSTHTFTYKT

SEQ ID NO: 1253 - protein, 572 aa, Unknown
  Description of Unknown: Integrase B1254 sequence
  PTHR30461:SF3,IPR036162,PS51737,IPR011109,PTHR30461, PS00397,PF00239,G3DSA:1.10.10.2600,IPR006119,SSF53041, cd00338,SM00857,IPR025827,IPR038109,PS51736, IPR006118,PF13408,G3DSA:3.40.50.1390,PF07508,Coil
MASRIAEKLAAKKAAIYIRVSTHWQVDKDSLKVQRRELIAYVTLVLGITDYVVFEDPGYSAKNTDRPEYQAMMDRIRTGEFTHLVVWKIDRISRNLIDFAAMHDELQSLGVTFVSKNEQFDTSSAIGEAMMRIILIFAELERKTTAERVTAVMLSRASDGQWNGGRVPFGYSWSKEAKTFSIVPEEAKAIRRMAELYEQYQSLLYVAKYLNDAGIVTKTGGQWTPTTVRTILTNPWYIGQYVYNVHSDGKGIEKRDSDEWITVENHHEPILSEDVFYRMKFLLTRNKRGGVPSHKTYVRKNIHVFAGLLRCGQCGSNMTANLDRRRANGFRPSQYACGSRRRKGTSCTNKYISDTTLGPFVLNYVANIIRASKNSSEATTPEVLERKLLRGEAFEDVASVSTDALGQLLDAFRSAGDAVEYRPQIAFSGDDNSIREIDTLRARRRKLDNALARLNALYLYDDEAMPEKDFVMQRGQITKQLEEVNARIEELQNQESSEELGDDFIGKASYYIMANKLIEDRYIDYEKYIRAIDPSIPRSFLQQIIDHIVVNDGRVTSITFKNGSTHTFTYKT

SEQ ID NO: 1254 - protein, 572 aa, Unknown
  Description of Unknown: Integrase B1255 sequence
  PTHR30461:SF3,IPR036162,PS51737,IPR011109,PTHR30461, PS00397,PF00239,G3DSA:1.10.10.2600,IPR006119,SSF53041, SM00857,IPR025827,IPR038109,PS51736,cd03768, IPR006118,PF13408,G3DSA:3.40.50.1390,PF07508,Coil
MTSISERLKKFRVAIYIRVSTRYQVDKDSLQVQRRELITYSEMVLGVSDYVIFEDAGYSAKNTDRPDYLRMMDRLRTGEFTHLLVWKIDRISRNLLDFASMYQELKTLGIAFVSKNEQFDTSNAVGEAMLKIILVFAELERQMTSERVTAVMLSRAGNGQWNGGRIPYGYSYDQTEKKFSLDPAENRVYNLICDTYEEFQSTLYVSRYLNNKGLRTRQGKEWSATAVHKILSNVFYVGDYLYNVHDDGRGSSTRGEDEWVRIEHHHVPSISRDRFDRIQFILKRNKRGGNARGETHIRKNIHIFSGLVRCGKCGSNMSATLDRRRANGWRPSIYACSKHRNNSSVCQNKYISDVTLGPFVINYIANIIRAKGNVSASTSLETLERKLLRGDTFLNVEHIEHDGLADMMDVLISGKTGMEYRPLVVSGEQTSQLSEREILEECRRKKETALSRLKSLYLYGDEETPEKDFIIERERIMGELTEIESRLAEIQQQESIRPVTSDEFIQKAAYFIMVEKLLDDRYVDYEKYIRKIDPSIPRNFLNNVIDQIEVNDGLITSISFKNGMTHRFIYKA

SEQ ID NO: 1255 - protein, 572 aa, Unknown
  Description of Unknown: Integrase B1256 sequence
  PTHR30461:SF3,IPR036162,PS51737,IPR011109,PTHR30461, PS00397,PF00239,G3DSA:1.10.10.2600,IPR006119,SSF53041, cd00338,SM00857,IPR025827,IPR038109,PS51736, IPR006118,PF13408,G3DSA:3.40.50.1390,PF07508,Coil
MASRIAEKLAAKKAAIYIRVSTHWQVDKDSLKVQRRELIAYVTLVLGITDYVVFEDPGYSAKNTDRPEYQAMMDRIRTGEFTHLVVWKIDRISRNLIDFAAMHDELQSLGVTFVSKNEQFDTSSAIGEAMMRIILIFAELERKTTAERVTAVMLSRASDGQWNGGRVPFGYSWSKEAKTFSIVPEEAKAIRRMAELYEQYQSLLYVAKYLNDAGIVTKTGGQWTPTTVRTILTNPWYIGQYVYNVHSDGKGIEKRDSDEWITVENHHEPILNEDVFCRMKFLLTRNKRGGVPSHKTYVRKNIHIFAGLLRCGQCGSNMTANLDRRRANGFRPSQYACGSRRRKGTSCTNKYISDTTLGPFVLNYVANIIRASKNSSEATTPEVLERKLLRGEAFEDVASVSTDALGQLLDAFRSAGDAVEYRPQIAFSGDDNSIREIDTLRARRRKLDNALARLNALYLYDDEAMPEKDFVMQRGQITKQLEEVNARIEELQNQESSEELGDDFIGKASYYIMANKLIEDRYIDYEKYIRAIDPSIPRSFLQQIIDHIVVNDGRVISITFKNGSTHTFTYKT

SEQ ID NO: 1256 - protein, 572 aa, Unknown
  Description of Unknown: Integrase B1257 sequence
  SM00857,G3DSA:1.10.10.2600,IPR036162,PF13408,IPR025827, G3DSA:3.40.50.1390,PS51737,IPR006119,IPR038109,PF07508, SSF53041,IPR011109,PTHR30461,Coil,cd00338, PF00239
MAYRKITDIKDTIGMRAVFYARVSTAEEEQLNAIELQIEENRGCIKDHGWKLVGEYIDRSKSGTMVKGRDDYQRLYEDLYEDLFDIVVIKDQERLQRNTLDWYLFINRVVQTGKLLFMYMDGKFYSPDDALITGVRAIIAEEFSRNLSKKLHNYHDHRIEKARQGQEIALQGSGNVYGWDKKDGKYYINPEQAKVRRLMCEGIMARKGSTLIAKELNEAGYRNTVGKPWKPMDIPKFVYDCKNVGTMIINKERHDFESKQTIKLPKEEWVYVENALPPIVTQEEWDLICKIHEERVIATGSDKRGKKTSGYSFSGKLVCGICGAPYWRKQRVSKDEYWVCSTKQTKGRKTRKRDSTMGKAGEINPLGCDNENISYNSLMEIMEVVSERLQANTDTIKQDMINWLTKLRKQLLEANGGHTEADLQRELSRKSKLLDAYLDGILNKQEYQKKAEELDERIIQLKAETEKNKANSGDIAEIDKVLANIDEEVSRYVDGNEKLKVEYLLEHLEQVQIFPDKVIVIVPILSEGIVVEKTQYVSRKKCSKIHTESMIHYLEDYMYCTRKLGLYVQLVA

SEQ ID NO: 1257 - protein, 572 aa, Unknown
  Description of Unknown: Integrase B1258 sequence
  PTHR30461:SF3,IPR036162,PS51737,IPR011109,PTHR30461, PF00239,G3DSA:1.10.10.2600,IPR006119,PF14287,SSF53041, IPR025378,SM00857,IPR025827,cd03770,IPR038109, PF13408,G3DSA:3.40.50.1390,PF07508,Coil
MAFRRIAIDGILRYNDNIACFICRKGRFNMTDKITALYCRLSQDDMLQGESNSITNQKAILKKYAEDSGFSNLVYYVDDGVSGTTFERDGFKAMMADVEAGKVGTVITKDLSRLGRDYLKTGEYIEIIFPDYDVRYIAINDNVDTLKSENELMAFKNIFNDWYARDTSKKIRAIFKAKGQSGKPLSLPIYGYKASEEDKHKWIIDDEPAAVVRKIYKLCISGYGPTQIARKLTEEGIPNPTAYAISQGRNPANKNSRLDRWCTETVIDILEHPEYIGHTVNFRTRRKSYKNKRKIENPKEDWLIFENTHEPIVTQQEFDLVQEMRKDKRRNQKQETVNPFSGICYCADCGKKLYLCRSKSFSEEQEHLKCSTHSADKNSCSSHYIRTVVLKKLVLNALNKLLDNVKDNEAEFVQTAMDNSASKHSSDVFKAKKALDQAEKRITELDRLFVRLYEDNISGKISDERFAVLSAGYEDEQKKLKAKASELTAFIETAEQKCADVISFIKVVQKYEHITELTPEIMHELIEKIVVYAPEKSDGHRTQQIEIHFRFDVAVATAIADSREYEKKKKAA

SEQ ID NO: 1258 - protein, 572 aa, Unknown
  Description of Unknown: Integrase B1259 sequence
  PTHR30461:SF3,IPR036162,PS51737,IPR011109,PTHR30461, PS00397,PF00239,G3DSA:1.10.10.2600,IPR006119,SSF53041, cd00338,SM00857,IPR025827,IPR038109,PS51736, IPR006118,PF13408,G3DSA:3.40.50.1390,PF07508,Coil
MASRIAEKLAAKKAAIYIRVSTHWQVDKDSLKVQRRELIAYVTLVLGITDYVVFEDPGYSAKNTDRPEYQAMMDRIRTGEFTHLVVWKIDRISRNLIDFATMHDELQSLGVTFVSKNEQFDTSSAIGEAMMRIILIFAELERKTTAERVTAVMLSRASDGQWNGGRVPFGYSWSKETKTFSIVPEEAKAIRRMAELYEQYQSLLYVAKYLNDAGIVTKTGGQWTPTTVRTILTNPWYIGQYVYNVHSDGKGIEKRDSDEWITVESHHEPILSEDVFYRMKFLLTRNKRGGVPSHKTYVRKNIHVFAGLLRCGQCGSNMTANLDRRRANGFRPSQYACGSRRRKGTSCTNKYISDTTLGPFVLNYVANIIRASKNSSETTTSEVLERKLLRGEAFEDVASVSTDALGQLLDAFRSAGDAVEYRPQIAFSGDDNSIREIDTLRVRRRKLDNALARLNALYLYDDEAMPEKDFVMQRGQITKQLEEVNARIEELQSQESSEELGDDFIGKASYYIMANKLIEDRYIDYEKYIRAIDPSIPRSFLQQIIDHIVVNDGRVISITFKNGSTHTFTYKT

SEQ ID NO: 1259 - protein, 572 aa, Unknown
  Description of Unknown: Integrase B1260 sequence
  PTHR30461:SF3,IPR036162,PS51737,IPR011109,PTHR30461, PS00397,PF00239,G3DSA:1.10.10.2600,IPR006119,SSF53041, cd00338,SM00857,IPR025827,IPR038109,PS51736, IPR006118,PF13408,G3DSA:3.40.50.1390,PF07508,Coil
MASRIAEKLAAKKAAIYIRVSTHWQVDKDSLKVQRRELIAYVTLVLGITDYVVFEDPGYSAKNTDRPEYQAMMDRIRTGEFTHLVVWKIDRISRNLIDFAAMHDELQSLGVTFVSKNEQFDTSSAIGEAMMRIILIFAELERKTTAERVTAVMLSRASDGQWNGGRVPFGYSWSKEAKTFSIVPEEAKAIRRMAELYEQYQSLLYVTKYLNDAGIVTKTGGQWTPTTVRTILTNPWYIGQYVYNVHSDGKGIEKRDSDEWITVENHHEPILNEDVFCRMKFLLTRNKRGGVPSHKTYVRKNIHVFAGLLRCGQCGSNMTANLDRRRANGFRPSQYACGSRRRKGTSCTNKYISDTTLGPFVLNYVANIIRASKNSSEATTPEVLERKLLRGEAFEDVASVSTDALGQLLDAFRSAGDAVEYRPQIAFSGDDNSIREIDTLRARRRKLDNALARLNALYLYDDEAMPEKDFVMQRGQITKQLEEVNARIEELQNQESSEELGDGFIGKASYYIMANKLIEDRYIDYEKYIRAIDPSIPHSFLQQIIDHIVVNDGRVISITFKNGSTHTFTYKA

SEQ ID NO: 1260 - protein, 572 aa, Unknown
  Description of Unknown: Integrase B1261 sequence
  cd03768,SM00857,G3DSA:1.10.10.2600,IPR036162,PS51737, G3DSA:3.40.50.1390,IPR006119,IPR038109,PF07508,IPR011109, SSF53041,PTHR30461,PS51736,Coil,PF00239
MNEQKIVALYTRVSTGYQIEKDSLPFQKKELTAYCKHILHADNMELFEDAGKSGKNTERPAFKRMMNKIRAGEVSHVVVYKIDRISRNLVDFSVMYDEFRKYRVTFISLNEQFDTSSAIGEAVLKIILVFAELERKLTSERVTGVMIDRAISGKWNGARMPFGWKWNPETQFPEHDPVESEQARTLYRVYDETHSTAKVRDFCYDNDIQTKRGGKWTTTTILNFLKNPMNKGDYRYNYRNSARGMKKPENEVVYLPGVFPPLVDPDLWERVNAVIKTNGEKSRTSENPHVKKHTHIFAGGILKCADCGASFQVSRLDKPRLNGFQPSLYVCTSRRTYRACNAPGASDVVIGAFLFNYVRNLVQATKSRSKISAPADLERILLSGDEFSGIRCIDSADLDIVYQAIRGTIAPGSGVTYVPAPLASEKTDAPEVAGLRAEAARLSRALERLKNAYLFDDNALPESEYLSTRSDLTEQLTRINNKIADALTDNSYKAAAELSFVNSASSFLLSYRLQGADHIVYSDFAASVDVSVLKNFVNLIVDHITIKGGSVAEIVFKNGLRNRFIYQDNGDA

SEQ ID NO: 1261 - protein, 572 aa, Unknown
  Description of Unknown: Integrase B1262 sequence
  PTHR30461:SF3,IPR036162,PS51737,IPR011109,PTHR30461, PS00397,PF00239,G3DSA:1.10.10.2600,IPR006119,SSF53041, cd00338,SM00857,IPR025827,IPR038109, PS51736,IPR006118,PF13408,G3DSA:3.40.50.1390,PF07508,Coil
MASRIAEKLAAKKAAIYIRVSTHWQVDKDSLKVQRRELIAYVTLVLGITDYVVFEDPGYSAKNTDRPEYQAMMDRIRTGEFTHLVVWKIDRISRNLIDFAAMHDELQSLGVTFVSKNEQFDTSSAIGEAMMRIILIFAELERKTTAERVTAVMLSRASDGQWNGGRVPFGYSWSKETKTFSIVPEEAKAIRRMAELYEQYQSLLYVAKYLNDAGIVTKTGGQWTPTTVRTILTNPWYIGQYVYNVHSDGKGIEKRDSDEWITVENHHEPILNEDVFCRMKFLLTRNKRGGVPSHKTYVRKNIHVFAGLLRCGQCGSNMTANLDRRRANGFRPSQYACGSRRRKGTSCTNKYISDTTLGPFVLNYVANIIRASKNSSEATTPEVLERKLLRGEAFEDVASVSTDALGQLLDAFRSADDAVEYRPQIAFSGDDNSIREIDTLRARRRKLDNALARLNALYLYDDEAMPEKDFVMQRGQITKQLEEVNARIEELQNQESSEELGDGFIGKASYYIMANKLIEDRYIDYEKYIRAIDPSIPHSFLQQIIDHIVVNDGRVTSITFKNGATHTFTYKT

SEQ ID NO: 1262 - protein, 572 aa, Unknown
  Description of Unknown: Integrase B1263 sequence
  PTHR30461:SF3,IPR036162,PS51737,IPR011109,PTHR30461, PS00397,PF00239,G3DSA:1.10.10.2600,IPR006119,SSF53041, cd00338,SM00857,IPR025827,IPR038109,PS51736, IPR006118,PF13408,G3DSA:3.40.50.1390,PF07508,Coil
MASRIAEKLAAKKAAIYIRVSTHWQVDKDSLKVQRRELIAYVTLVLGITDYVVFEDPGYSAKNTDRPEYQAMMDRIRTGEFTHLVVWKIDRISRNLIDFAAMHDELQSLGVTFVSKNEQFDTSSAIGEAMMRIILIFAELERKTTAERVTAVMLSRASDGQWNGGRVPFGYSWSKETKTFSIVPEEAKAIRRMAELYEQYQSLLYVAKYLNDAGIVTKTGGQWTPTTVRTILTNPWYIGQYVYNVHSDGKGIEKRDSDEWITVENHHEPILNEDVFCRMRFLLTRNKRGGVPSHKTYVRKNIHIFAGLLRCGQCGSNMTANLDRRRANGFRPSQYACGSRRRKGTSCTNKYISDTTLGPFVLNYVANIIRASKNSSEATTPEVLERKLLRGEAFEDVASVSTDSLGQLLDAFRSAGDAVEYRPQIAFSGEDNAIREIDTLRARRRKLDNALARLNALYLYDDEAMPEKDFVMQRGQITKQLEEVNARIEELQNQESSEELGDGFIGKASYYIMANKLIEDRYIDYEKYIRAIDPSIPHSFLQQIIDHIVVNDGRVTSITFKNGATHTFTYKT

SEQ ID NO: 1263 - protein, 572 aa, Unknown
  Description of Unknown: Integrase B1264 sequence
  cd03768,PTHR30461:SF3,SM00857,G3DSA:1.10.10.2600,IPR036162, PF13408,PS51737,IPR025827,G3DSA:3.40.50.1390,IPR006119, IPR038109,PF07508,IPR011109,SSF53041,PTHR30461, PS51736,Coil,PF00239
MNEQKTVALYTRVSTGYQIDKDSLPFQKKELTSYCKHILHAEKTELFEDAGKSGKNTDRPAFLRMMKKIRAGEISHVVVYKIDRISRNLVDFSVMYDEFKKYRVTFISLNEQFDTSSAIGEAVLKIILVFAELERKLTSERVTGVMIDRAMSGKWNGARMPFGWKWNCETEFPEHDPIEAEKAQTLYRVYDETHSTAKVRDFCYDNDIQTKRGGKWTTTTILNFLKNPMNKGDYRYNYRGSARGTKKPENEVVYLPGVFPPLVDPELWDRVNAVIKENGTRAQTSANPHIKKHIHVFAGGILKCADCGASFQVSRLDKKRQNGFQPSLYVCTSRRTYRACDAPGASDVIVGAFFFNYVRNLVQATKSRSKIGSPADLERILLSGDEFSRIRYIDPSDLDIVYQAIRGTIAPGSGVTYIPTPPESGKKDAPELSGLRTEAARLSRALDRLKKAYLFDDDAMSEAEYLSTRSDLTEQLTRINNKIADTLTDESYQAAAELSFVNSASSFLLSYRLQGAEHIVYSDFAASVDRSVLKNFVNMIVDHITIKGGDPVEIVFKNGLRNRFVYRDDADA

SEQ ID NO: 1264 - protein, 572 aa, Unknown
  Description of Unknown: Integrase B1265 sequence
  PTHR30461:SF3,IPR036162,PS51737,IPR011109,PTHR30461, PS00397,PF00239,G3DSA:1.10.10.2600,IPR006119,SSF53041, cd00338,SM00857,IPR025827,IPR038109,PS51736, IPR006118,PF13408,G3DSA:3.40.50.1390,PF07508,Coil
MASRIAEKLAAKKAAIYIRVSTHWQVDKDSLKVQRRELIAYVTLVLGITDYVVFEDPGYSAKNTDRPEYQAMMDRIRTGEFTHLVVWKIDRISRNLIDFAAMHDELQSLGVTFVSKNEQFDTSSAIGEAMMRIILIFAELERKTTAERVTAVMLSRASDGQWNGGRVPFGYSWSKETKTFSIVPEEAKAIRRMAELYEQYQSLLYVAKYLNDAGIVTKTGGQWTPTTVRTILTNPWYIGQYVYNVHSDGKGIEKRDSDEWITVENHHEPILNEDVFCRMKFLLTRNKRGGVPSHKTYVRKNIHVFAGLLRCGQCGSNMTANLDRRRANGFRPSQYACGSRRRKGTSCTNKYISDTTLGPFVLNYVANIIRASKNSSEATTPEVLERKLLRGEAFEDVASVSTDSLGQLLDAFRSAGDAVEYRPQIAFSGDDNSIREIDTLRARRRKLDNALARLNALYLYDDEAMPEKDFVMQRGQITKQLEEVNARIEELQSQESSEELGDDFIGKASYYIMANKLIEDRYIDYEKYIRAIDPSIPRSFLQQIIDHIVVNDGRVTSITFKNGATHTFTYKT

SEQ ID NO: 1265 - protein, 572 aa, Unknown
  Description of Unknown: Integrase B1266 sequence
  PTHR30461:SF3,IPR036162,PS51737,IPR011109,PTHR30461, PS00397,PF00239,G3DSA:1.10.10.2600,IPR006119,SSF53041, cd00338,SM00857,IPR025827,IPR038109,PS51736, IPR006118,PF13408,G3DSA:3.40.50.1390,PF07508,Coil
MASRIAEKLAAKKAAIYIRVSTHWQVDKDSLKVQRRELIAYVTLVLGITDYVVFEDPGYSAKNTDRPEYQAMMDRIRTGEFTHLVVWKIDRISRNLIDFAAMHDELQSLGVTFVSKNEQFDTSSAIGEAMMRIILIFAELERKTTAERVTAVMLSRASDGQWNGGRVPFGYSWSKEAKTFSIVPEEAKAIRRMAELYEQYQSLLYVAKYLNDTGIVTKTGGQWTPTTVRTILTNPWYIGQYVYNVHSDGKGIEKRDSDEWITVENHHEPILNEDVFCRMKFLLTRNKRGGVPSHKTYVRKNIHVFAGLLRCGQCGSNMTANLDRRRANGFRPSQYACGSRRRKGTSCTNKYISDTTLGPFVLNYVANIIRASKNSSEATTPEVLERKLLRGEAFEDVASVSTDALGQLLDAFRSAGDAVEYRPQIAFSGDDNSIREIDTLRARRRKLDNALARLNALYLYDDEAMPEKDFVMQRGQITKQLEEVNARIEELQNQESSEELGDGFIGKASYYIMANKLIEDRYIDYEKYIRAIDPSIPHSFLQQIIDHIVVNDGRVTSITFKNGATHTFTYKT

SEQ ID NO: 1266 - protein, 572 aa, Unknown
  Description of Unknown: Integrase B1267 sequence
  SM00857,G3DSA:1.10.10.2600,IPR036162,PF13408,IPR025827, G3DSA:3.40.50.1390,PS51737,IPR006119,IPR038109,PF07508, SSF53041,IPR011109,PTHR30461,Coil,cd00338, PF00239
MAYRKITDIKDTIGMRAVFYARVSTAEEEQLNAIELQIEENRGCIKDHGWKLVGEYIDRSKSGTMVKGRDDYQRLYEDLYEDLFDIVVIKDQERLQRNTLDWYLFINRVVQTGKLLFMYMDGKFYSPDDALITGVRAIIAEEFSRNLSKKLHNYHDHRIEKARQGQEIALQGSGNVYGWDKKDGKYYINPEQAKVRRLMCEGIMARKGSTLIAKELNEAGYRNTVGKLWKPMDIPKFVYDCKNVGTMIINKERHDFESKQTIKLPKEEWVYVENALPPIVTQEEWDLICKIHEERVIATGSDRRGKKTSGYSFSGKLVCGICGAPYWRKQRVSKDEYWVCSTKQTKGRRTRKRDSTMGKAGEINPLGCDNENISYNSLMEIMGVVSERLQANTDTIKQDMINWLTKLRKQLLEANGGYTEADLQREISRKSKLLDAYLDGILNKQEYQKKAEELDERIIQLKAETEKNKANSGDIAEIDKVLANIDEEVARYIDGNEKLKVEYLLEHLEQVQIFPDKVIVIVPILSEGIVVEKTQYVSREKCSEIHTESMIHYLEDYMYCTRKLGLYVQLVA

SEQ ID NO: 1267 - protein, 572 aa, Unknown
  Description of Unknown: Integrase B1268 sequence
  PTHR30461:SF3,IPR036162,PS51737,IPR011109,PTHR30461, PS00397,PF00239,G3DSA:1.10.10.2600,IPR006119,SSF53041, cd00338,SM00857,IPR025827,IPR038109,PS51736, IPR006118,PF13408,G3DSA:3.40.50.1390,PF07508,Coil
MASRIAEKLAAKKAAIYIRVSTHWQVDKDSLKVQRRELIAYVTLVLGITDYVVFEDPGYSAKNTDRPEYQAMMDRIRTGEFTHLVVWKIDRISRNLIDFAAMHDELQSLGVTFVSKNEQFDTSSAIGEAMMRIILIFAELERKTTAERVTAVMLSRASDGQWNGGRVPFGYSWSKETKTFSIVPEEAKAIRRMAELYEQYQSLLYVAKYLNDAGIVTKTGGQWTPTTVRTILTNPWYIGQYVYNVHSDGKGIEKRDSDEWITVENHHEPILNEDVFCRMKFLLTRNKRGGVPSHKTYVRKNIHVFAGLLRCGQCGSNMTANLDRRRANGFRPSQYACGSRRRKGTSCTNKYISDTTLGPFVLNYVANIIRASKNSSEATTPEVLERKLLRGEAFEDVASVSTDALGQLLDAFRSAGDAVEYRPQIAFSGDDNSIREIDTLRARRRKLDNALARLNALYLYDDEAMPEKDFVMQRGQITKQLEEVNARIEELQNQESSEELGDGFIGKASYYIMANKLIEDRYIDYEKYIRAIAPSIPHSFLQQIIDHIVVNDGRVTSITFKNGATHTFTYKT

SEQ ID NO: 1268 - protein, 572 aa, Unknown
  Description of Unknown: Integrase B1269 sequence
  PTHR30461:SF3,IPR036162,PS51737,IPR011109,PTHR30461, PS00397,PF00239,G3DSA:1.10.10.2600,IPR006119,SSF53041, cd00338,SM00857,IPR025827,IPR038109,PS51736, IPR006118,PF13408,G3DSA:3.40.50.1390,PF07508,Coil
MASRIAEKLAAKKAAIYIRVSTHWQVDKDSLKVQRRELIAYVTLVLGITDYVVFEDPGYSAKNTDRPEYQAMMDRIRTGEFTHLVVWKIDRISRNLIDFAAMHDELQSLGVTFVSKNEQFDTSSAIGEAMMRIILIFAELERKTTAERVTAVMLSRASDGQWNGGRVPFGYSWSKETKTFSIVPEEAKAIRRMAELYEQYQSLLYVAKYLNDAGIVTKTGGQWTPTTVRTILTNPWYIGQYVYNVHSDGKGIEKRDSDEWITVENHHEPILNEDVFCRMRFLLTRNKRGGVPSHKTYVRKNIHIFAGLLRCGQCGSNMTANLDRRRANGFRPSQYACGSRRRKGTSCTNKYISDTTLGPFVLNYVANIIRASKNSSEATTPEVLERKLLRGEAFEDVASVSTDALGQLLDAFRSAGDAVEYRPQIAFSGDDNSIHEIDTLRARRRKLDNALARLNALYLYDDEAMPEKDFVMQRGQITKQLEEVNDRIEELQNQESSEELGDDFIGKASYYIMANKLIEDRYIDYEKYIRAIDPSIPRSFLQQIIDHIVVNDGRVTSITFKNGATHTFTYKT

SEQ ID NO: 1269 - protein, 572 aa, Unknown
  Description of Unknown: Integrase B1270 sequence
  PTHR30461:SF3,IPR036162,PS51737,IPR011109,PTHR30461, PS00397,PF00239,G3DSA:1.10.10.2600,IPR006119,SSF53041, cd00338,SM00857,IPR025827,IPR038109,PS51736, IPR006118,PF13408,G3DSA:3.40.50.1390,PF07508,Coil
MASRIAEKLAAKKAAIYIRVSTHWQVDKDSLKVQRRELIAYVTLVLGITDYVVFEDPGYSAKNTDRPEYQAMMDRIRTGEFTHLVVWKIDRISRNLIDFAAMHDELQSLGVTFVSKNEQFDTSSAIGEAMMRIILIFAELERKTTAERVTAVMLSRASDGQWNGGRVPFGYSWSKETKTFSIVPEEAKAIRRMAELYEQYQSLLYVAKYLNDAGIVTKTGGQWTPTTVRTILTNPWYIGQYVYNVHSDGKGIEKRDSDEWITVENHHEPILNEDVFCRMKFLLTRNKRGGVPSHKTYVRKNIHIFAGLLRCGQCGSNMTANLDRRRANGFRPSQYACGSRRRKGTSCTNKYISDTTLGPFVLNYVANIIRASKNSSEATTPEVLERKLLRGEAFEDVASVSTDALGQLLDAFRSAGDAVEYRPQIAFSGDDNSIREIDTLRARRRKLDNALARLNALYLYDDEAMPEKDFVMQRGQITKQLEEVNARIEELQNQESSEELGDGFIGKASYYIMANKLIEDRYIDYEKYIRAIDPSIPHSFLQQIIDHIVVNDGRVTSITFKNGATHTFTYKT

SEQ ID NO: 1270 - protein, 572 aa, Unknown
  Description of Unknown: Integrase B1271 sequence
  PTHR30461:SF3,IPR036162,PS51737,IPR011109,PTHR30461, PS00397,PF00239,G3DSA:1.10.10.2600,IPR006119,SSF53041, cd00338,SM00857,IPR025827,IPR038109,PS51736, IPR006118,PF13408,G3DSA:3.40.50.1390,PF07508,Coil
MASRIAEKLAAKKAAIYIRVSTHWQVDKDSLKVQRRELIAYVTLVLGITDYVVFEDPGYSAKNTDRPEYQAMMDRIRTGEFTHLVVWKIDRISRNLIDFAAMHDELQSLGVTFVSKNEQFDTSSAIGEAMMRIILIFAELERKTTAERVTAVMLSRASDGQWNGGRVPFGYSWSKEAKTFSIVPEEAKAIRRMAELYEQYQSLLYVAKYLNDAGIVTKTGGQWTPTTVRTILTNPWYIGQYVYNVHSDGKGIEKRDSDEWITVENHHEPILNEDVFCRMKFLLTRNKRGGVPSHKTYVRKNIHIFAGLLRCGQCGSNMTANLDRRRANGFRPSQYACGSRRRKGTSCTNKYISDTTLGPFVLNYVANIIRASKNSSEATTPEVLERKLLRGEAFEDVASVSTDALGQLLDAFRSAGDAVEYRPQIAFSGDDNSIREIDTLRARRRKLDNALARLNALYLYDDEAMPEKDFVMQRGQITKQLEEVNARIEELQNQESSEELGDGFIGKASYYIMANKLIEDRYIDYEKYIRAIDPSIPHSFLQQIIDHIVVNDGRVISITFKNGSTHTFTYKT

SEQ ID NO: 1271 - protein, 572 aa, Unknown
  Description of Unknown: Integrase B1272 sequence
  PTHR30461:SF3,IPR036162,PS51737,IPR011109,PTHR30461, PS00397,PF00239,G3DSA:1.10.10.2600,IPR006119,SSF53041, cd00338,SM00857,IPR025827,IPR038109,PS51736, IPR006118,PF13408,G3DSA:3.40.50.1390,PF07508,Coil
MASRIAEKLAAKKAAIYIRVSTHWQVDKDSLKVQRRELIAYVTLVLGITDYVVFEDPGYSAKNTDRPEYQAMMDRIRTGEFTHLVVWKIDRISRNLIDFAAMHDELQSLGVTFVSKNEQFDTSSAIGEAMMRIILIFAELERKTTAERVTAVMLSRASDGQWNGGRVPFGYSWSKETKTFSIVPEEAKAIRRMAELYEQYQSLLYVAKYLNDAGIVTKTGGQWTPTTVRTILTNPWYIGQYVYNVHSDGKGIEKRDSDEWITVENHHEPILNEDVFCRMKFLLTRNKRGGVPSHKTYVRKNIHVFAGLLRCGQCGSNMTANLDRRRVNGFRPSQYACGSRRRKGTSCTNKYISDTTLGPFVLNYVANIIRASKNSSEATTPEVLERKLLRGEAFEDVASVSTDSLGQLLDAFRSAGDAVEYRPQIAFSGEDDAIREIDTLRARRRKLDNALARLNALYLYDDEAMPEKDFVMQRGQITKQLEEVNARIVELQNQESSEELGDDFIGKASYYIMANKLIEDRYIDYEKYIRAIDPSIPHSFLQQIIDHIVVNDGRVTSITFKNGATHTFTYKT

SEQ ID NO: 1272 - protein, 572 aa, Unknown
  Description of Unknown: Integrase B1273 sequence
  PTHR30461:SF3,IPR036162,PS51737,IPR011109,PTHR30461, PS00397,PF00239,G3DSA:1.10.10.2600,IPR006119,SSF53041, cd00338,SM00857,IPR025827,IPR038109,PS51736, IPR006118,PF13408,G3DSA:3.40.50.1390,PF07508,Coil
MASRIAEKLAAKKAAIYIRVSTHWQVDKDSLKVQRRELIAYVTLVLGITDYVVFEDPGYSAKNTDRPEYQAMMDRIRTGEFTHLVVWKIDRISRNLIDFATMHDELQSLGVTFVSKNEQFDTSSAIGEAMMRIILIFAELERKTTAERVTAVMLSRASDGQWNGGRVPFGYSWSKETKTFSIVPEEAKAIRRMAELYEQYQSLLYVAKYLNDAGIVTKTGGQWTPTTVRTILTNPWYIGQYVYNVHSDGKGIEKRDSDEWITVENHHEPILSEDVFYRMKFLLTRNKRGGVPSHKTYVRKNIHVFAGLLRCGQCGSNMTANLDRRRANGFRPSQYACGSRRRKGTSCTNKYISDTTLGPFVLNYVANIIRASKNSSETTTPEVLERKLLRGEAFEDVASVSTDALGQLLDAFRSAGDAVEYRPQIAFSGDDNSIREIDTLRARRRKLDNALARLNALYLYDDEAMPEKDFVMQRGQITKQLEEVNARIEELQNQESSEELGDDFIGKASYYIMANKLIEDRYIDYEKYIRAIDPSIPRSFLQQIIDHIVVNDGRVISITFKNGSTHTFTYKT

SEQ ID NO: 1273 - protein, 572 aa, Unknown
  Description of Unknown: Integrase B1274 sequence
  SM00857,G3DSA:1.10.10.2600,IPR036162,PF13408,IPR025827, G3DSA:3.40.50.1390,PS51737,IPR006119,IPR038109,PF07508, SSF53041,IPR011109,PTHR30461,Coil,cd00338, PF00239
MAYRKITDIRDTIGMRAVFYARVSTAEEEQLNAIELQIEENRGCIKDHGWKLVGEYIDRSKSGTMVKGRDDYQRLYEDLYEDLFDIVVIKDQERLQRNTLDWYLFINRVVQTGKLLFMYMDGKFYSPDDALITGVRAIIAEEFSRNLSKKLHNYHDHRIEKARQGQEIALQGSGNVYGWDKKDGKYYINPEQAKVRRLMCEGIMARKGSTLIAKELNDAGYRNTVGKPWKPMDIPKFVYDCKNVGTMIINKERHDFESKQTIKLPKEEWVYVENALPPIVTQEEWDLICKIHEERVIATGSDRRGKKTSGYSFSGKLVCGICGAPYWRKQRVSKDEYWVCSTKQTKGRRTRKRDSTMGKAGEINPLGCDNENISYNSLMEIMGVVSERLQANTDTIKHDMINWLTKLRKQLLEANGGHTEADLQRELSRKSKLLDAYLDGILNKQEYQKKAEELDERIIQLKAETEKTKANSGDIAEIDKVLANIDEEVSRYVDGNEKLKVEYLLEHLEQVQIFPDKVIVIVPILSEGIVVEKTQYVSREKCSKIHTESMIHYLEDYMYCTRKLGLYVQLVA

SEQ ID NO: 1274 - protein, 572 aa, Unknown
  Description of Unknown: Integrase B1275 sequence
  PTHR30461:SF3,IPR036162,PS51737,IPR011109,PTHR30461, PS00397,PF00239,G3DSA:1.10.10.2600,IPR006119,SSF53041, cd00338,SM00857,IPR025827,IPR038109,PS51736, IPR006118,PF13408,G3DSA:3.40.50.1390,PF07508,Coil
MASRIAEKLAAKKAAIYIRVSTHWQVDKDSLKVQRRELIAYVTLVLGITDYVVFEDPGYSAKNTDRPEYQAMMDRIRTGEFTHLVVWKIDRISRNLIDFAAMHDELQSLGVTFVSKNEQFDTSSAIGEAMMRIILIFAELERKTTAERVTAVMLSRASDGQWNGGRVPFGYSWSKETKTFSIVPEEAKAIRRMAELYEQYQSLLYVAKYLNDAGIVTKTGGQWTPTTVRTILTNPWYIGQYVYNVHSDGKGIEKRDSDEWITVENHHEPILNEDVFCRMKFLLTRNKRGGVPSHITYVRKNIHIFAGLLRCGQCGSNMTANLDRRRANGFRPSQYACGSRRRKGTSCTNKYISDTTLGPFVLNYVANIIRASKNSSEATTPEVLERKLLRGEAFEDVVSVSTDALGQLLDAFRSAGDAVEYRPQIAFSGEDNAIREIDTLRARRRKLDNALARLNALYLYDDEAMPEKDFVMQRGQITKQLEEVNARIEELQNQESSEELGDDFIGKASYYIMANKLIEDRYIDYEKYIRAIDPSIPRSFLQQIIDHIVVNDGRVTSITFKNGATHTFTYKT

SEQ ID NO: 1275 - protein, 572 aa, Unknown
  Description of Unknown: Integrase B1276 sequence
  PTHR30461:SF3,IPR036162,PS51737,IPR011109,PTHR30461, PS00397,PF00239,G3DSA:1.10.10.2600,IPR006119,SSF53041, cd00338,SM00857,IPR025827,IPR038109,PS51736, IPR006118,PF13408,G3DSA:3.40.50.1390,PF07508,Coil
MASRIAEKLAAKKAAIYIRVSTHWQVDKDSLKVQRRELIAYVTLVLGITDYVVFEDPGYSAKNTDRPEYQAMMDRIRTGEFTHLVVWKIDRISRNLIDFAAMHDELQSLGVTFVSKNEQFDTSSAIGEAMMRIILIFAELERKTTAERVTAVMLSRASDGQWNGGRVPFGYSWSKETKTFSIVPEEAKAIRRMAELYEQYQSLLYVAKYLNDAGIVTKTGGQWTPTTVRTILTNPWYIGQYVYNVHSDGKGIEKRDSDEWITVENHHEPILSEDVFYRMKFLLTRNKRGGVPSHKTYVRKNIHVFAGLLRCGQCGSNMTANLDRRRANGFRPSQYACGSRRRKGTSCTNKYISDTTLGPFVLNYVANIIRASKNSSEATTPDVLERKLLRGEAFEDVASVSTDALGQLLDAFRSAGDAVEYRPQIAFSGDDNSIREIDTLRARRRKLDNALARLNALYLYDDEAMPEKDFVMQRGQITKQLEEVNARIEELQNQESSEELGDDFIGKASYYIMANKLIEDRYIDYEKYIRAIDPSIPRSFLQQIIDHIVVNDGRVISITFKNGSTHTFTYKT

SEQ ID NO: 1276 - protein, 572 aa, Unknown
  Description of Unknown: Integrase B1277 sequence
  SM00857,G3DSA:1.10.10.2600,IPR036162,PF13408,IPR025827, PS51737,G3DSA:3.40.50.1390,IPR006119,IPR038109,PF07508, SSF53041,IPR011109,PTHR30461,Coil,cd00338, PF00239
MAYRKITDIRDTIGMRAVFYARVSTAEEEQLNAIELQIEENRGCIKDHGWKLVGEYIDRSKSGTMVKGRDDYQRLYEDLYEDLFDIVVIKDQERLQRNTLDWYLFINRVVQTGKLLFMYMDGKFYSPDDALITGVRAIIAEEFSRNLSKKLHNYHDHRIEKARQGQEIALQGSGNVYGWDKKDGKYYINPEQAKVRRLMCEGIMARKGSTLIAKELNDAGYRNTVGKPWKPMDIPKFVYDCKNVGTMIINKERHDFESKQTIKLPKEEWVYVENALPPIVTQEEWDLICKIHEERVIATGSDRRGKKTSGYSFSGKLVCGICGAPYWRKQRVSKDEYWVCSTKQTKGRRTRKRDSTMGKAGEINPLGCDNENISYNSLMEIMGVVSERLQANTDTIKQDMINWLTKLRKQLIEANGGHTEADLQRELSRKSKLLDAYLDGILNKQEYQKKAEELDDRIIQLKAETEKNKANSGDIAEIDKVLANIDEEVSRYVDGNEKLKVEYLLEHLEQVQIFPDKVIVIVPILSEGIVVEKTQYVSREKCSEIHTERMIHYLEDYMYCTRKLGLYVQLVA

SEQ ID NO: 1277 - protein, 572 aa, Unknown
  Description of Unknown: Integrase B1278 sequence
  PTHR30461:SF3,IPR036162,PS51737,IPR011109,PTHR30461, PS00397,PF00239,G3DSA:1.10.10.2600,IPR006119,SSF53041, cd00338,SM00857,IPR025827,IPR038109,PS51736, IPR006118,PF13408,G3DSA:3.40.50.1390,PF07508,Coil
MTSRIAEKLAAKKAAIYIRVSTHWQVDKDSLKVQRRELIAYVTLVLGITDYVVFEDPGYSAKNTDRPEYQAMMDRIRTGEFTHLVVWKIDRISRNLIDFAAMHDELQSLGVTFVSKNEQFDTSSAIGEAMMRIILIFAELERKTTAERVTAVMLSRASDGQWNGGRVPFGYSWSKETKTFSIVPEEAKAIHRMAELYEQYQSLLYVAKYLNDAGIVTKTGGQWTPTTVRTILTNPWYIGQYVYNVHSDGKGIEKRDSDEWITVENHHEPILNEDVFCRMKFLLTRNKRGGVPSHKTYVRKNIHVFAGLLRCGQCGSNMTANLDRRRANGFRPSQYACGSRRRKGTSCTNKYISDTTLGPFVLNYVANIIRASKNSSEATTPEVLERKLLRGKAFEDVASVSTDSLGQLLDAFRSAGDAVEYRPQIAFSGDDNSIREIDTLRARRRKLDNALARLNALYLYDDEAMPEKDFVMQRGQITKQLEEVNARIEELQNQESSEELGDGFIGKASYYIMANKLIEDRYIDYEKYIRAIDPSIPHSFLQQIIDHIVVNDGRVTSITFKNGATHTFTYKT

SEQ ID NO: 1278 - protein, 572 aa, Unknown
  Description of Unknown: Integrase B1279 sequence
  PTHR30461:SF3,IPR036162,PS51737,IPR011109,PTHR30461, PS00397,PF00239,G3DSA:1.10.10.2600,IPR006119,SSF53041, cd00338,SM00857,IPR025827,IPR038109,PS51736, IPR006118,PF13408,G3DSA:3.40.50.1390,PF07508,Coil
MASRIAEKLAAKKAAIYIRVSTHWQVDKDSLKVQRRELIAYVTLVLGITDYVVFEDPGYSAKNTDRPEYQAMMDRIRTGEFTHLVVWKIDRISRNLIDFAAMHDELQSLGVTFVSKNEQFDTSSAIGEAMMRIILIFAELERKTTAERVTAVMLSRASDGQWNGGRVPFGYSWSKETKTFSIVPEEAKAIRRMAELYEQYQSLLYVAKYLNDAGIVTKTGGQWTPTTVRTILTNPWYIGQYVYNVHSDGKGIEKRDSDEWITVENHHEPILNDDVFYRMKFLLTRNKRGGVPSHKTYVRKNIHVFAGLLRCGQCGSNMTANLDRRRANGFRPSQYACGSRRRKGTSCTNKYISDTTLGPFVLNYVANIIRASKNSSETTTSEVLERKLLRGEAFEDVASVSTDALGQLLNAFRSAGDAVEYRPQIAFSGDDNSIREIDTLRARRRKLDNALARLNALYLYDDEAMPEKDFVMQRGQITKQLEEVNTRIEELQSQESSEELGDDFIGKASYYIMANKLIEDRYIDYEKYIRAIDPSIPRSFLQQIIDHIVVNDGRVISITFKNGSTHTFTYKT

SEQ ID NO: 1279 - protein, 572 aa, Unknown
  Description of Unknown: Integrase B1280 sequence
  SM00857,G3DSA:1.10.10.2600,IPR036162,PF13408,IPR025827, G3DSA:3.40.50.1390,PS51737,IPR006119,IPR038109,PF07508, SSF53041,IPR011109,PTHR30461,Coil,PS51736, cd00338,PF00239
MAYRKITDIKDTIGMRAVFYARVSTAEEEQLNAIELQIEENRGCIKDHGWKLVGEYIDRSKSGTMIKGRDDYQRLYEDLYEDLFDIVVIKDQERLQRNTLDWYLFINRVVQTGKLLFMYMDGKFYSPDDALITGVRAIIAEEFSRNLSKKLHNYHDHRIEKARQGQEIALQGSGNVYGWDKKDGKYYINPEQAKVRRLMCEGIMARKGSTLIAKELNDAGYRNTVGKPWKPMDIPKFVYDCKNVGTMIINKERHDFESKQTIKLPKEEWVYVENALPPIVTQEEWDLICKIHEERVIATGSDRRGKKTSGYSFSGKLVCGICGAPYWRKQRVSKDEYWVCSTKQTKGRRTRKRDSTMGKAGEINPLGCDNENISYNSLMEIMGVVSERLQANTDTIKHDMINWLTKLRKQLLEANGGHTEADLQRELSRKSKLLDAYLDGILNKQEYQKKAEELDERIIQLKAETEKNKANSGDIAEIDKVLANIDEEVSRYVDGNEKLKVEYLLEHLEQVQIFPDKVIVIVPILSEGIVVEKAQYVSRKKCSKIHTESMIHYLEDYMYCTRKLGLYVQLVA

SEQ ID NO: 1280 - protein, 572 aa, Unknown
  Description of Unknown: Integrase B1281 sequence
  PTHR30461:SF3,IPR036162,PS51737,IPR011109,PTHR30461, PF00239,G3DSA:1.10.10.2600,IPR006119,SSF53041,cd00338, SM00857,IPR025827,IPR038109,mobidb-lite,PS51736, PF13408,G3DSA:3.40.50.1390,PF07508,Coil
MGKKQKATGGNAVIYARYSSHNQRDVSIEQQVEACRKHAAELGLTVTATYEDRAISGKTDKRPSFQRMMRDAEQHKFAYVLAWKSNRIGRNMMQALVNESRLVDCGVKVFYAEEDFDDNAAGRFALRSMMNVNQFYIENMAEDVKRGLYDNAKKGLVNGSLPLGYKRGADGKPEIDEPKAAIVREIYTRVAAGELFASIAADLNARGIRTARGREWNKGSFHVLCHNDRYRGIYMYGDIRIPGGMPRIISDELFYDAQEAYGMKKDNRYGRARHGAENYLLTGKLYCGHCGSYMVGISGTSKTGEMHYYYACQKHRLEHTCEKKAIRRDVIENAVARVIMMYCLDDETIDFIVDSTIAYFKQKDHELHIEAMENELAAVQQAISNLMKAIEAGIITPTTRTRLLDLEEQQAKLSAKINTAKAERVEIDRDDLIAGLQLFRTGDIKNKKFLAKLFNTFLLAVYLYDDNRLKIVFSFTGNHNNIEIPLDLDNDCPDSESGPYETEVRMSHLECRKNLGSPPSSGEAEKGDDCSDGRFVRTAPLPPHQLTSGPFRPEVLFIPTPSKGGSHGLHHR

SEQ ID NO: 1281 - protein, 572 aa, Unknown
  Description of Unknown: Integrase B1282 sequence
  PTHR30461:SF3,IPR036162,PS51737,IPR011109,PTHR30461, PS00397,PF00239,G3DSA:1.10.10.2600,IPR006119,SSF53041, cd00338,SM00857,IPR025827,IPR038109,PS51736, IPR006118,PF13408,G3DSA:3.40.50.1390,PF07508,Coil
MASRIAEKLAAKKAAIYIRVSTHWQVDKDSLKVQRRELIAYVTLVLGITDYVVFEDPGYSAKNTDRPEYQAMMDRIRTGEFTHLVVWKIDRISRNLIDFAAMHDELQSLGVTFVSKNEQFDTSSAIGEAMMRIILIFAELERKTTAERVTAVMLSRASDGQWNGGRVPFGYSWSKEAKTFSIVPEEAKAIRRMAELYEQYQSLLYVAKYLNDAGIVTKTGGQWTPTTVRIILTNPWYIGQYVYNVHSDGKGIEKRDSDEWITVENHHEPILNEDVFCRMKFLLARNKRGGVPSHKTYVRKNIHVFAGLLRCGQCGSNMTANLDRRRANGFRPSQYACGSRRRKGTSCTNKYISDTTLGPFVLNYVANIIRASKNSSEATTPEVLERKLLRGEAFEDVASVSTDSLGQLLDAFRSAGDAVEYRPQIAFSGEDNAIREIDTLRARRRKLDNALARLNALYLYDDEAMPEKDFVMQRGQITKQLEEVNARIEELQNQESSEELGDDFIGKASYYIMANKLIEDRYIDYEKYIRAIDPSIPRSFLQQIIDHIVVNDGRVTSITFKNGATHTFTYKT

SEQ ID NO: 1282 - protein, 571 aa, Unknown
  Description of Unknown: Integrase B1283 sequence
  PTHR30461:SF3,IPR036162,PS51737,IPR011109,PTHR30461, PS00397,PF00239,G3DSA:1.10.10.2600,IPR006119,SSF53041, cd00338,SM00857,IPR025827,IPR038109,PS51736, IPR006118,PF13408,G3DSA:3.40.50.1390,PF07508,Coil
MSIRDKLSALKVAIYIRVSTHWQVDKDSLKVQERELIAYCQMVLGINDYVVFTDPGYSAKNTDRPDYQAMMDRIRTGEFSHLLVWKIDRISRNIIDFATMSEELKHLGVAFVSKNEQFDTSTAMGEAMLQIIMVFAQFERKQTSERVTAVMLSRAGNGQWNGGRVPYGYLWDKETASFQLCATEAGYVRRMAQLYEEHQSLLHVVKWLNDAGVKTRRGFAWTPTSIHVILTNPWYIGQYVYNVHSDGKGVERRDESEWVCVEHHHEPILSEDQFYRIKFLLTRNRRGTPTPGKSYARKHTHIFSGLMRCGICGSNMSASADRRRANGFRPSQYACASRRRKGTTCTNKYISDLTVGSFVLNYAANIIRAARNSAADIQPDVLERKLLRGETFKDVEGINSEAIQQLLSSFAEAGEAVEYRPRYAFTSASGEGRDMDNLRARKRKLETAFSRLNALFLYDDEAMPEKDFIVERTNIERQLAEADKRIAELAATGLSSSEDSSDFLKKASYFIMVNKLIEDASVDYEKLVRTLDPTAIRDFVLNIVQEVEATDGRITAITFRNGTAHRFKYKT

SEQ ID NO: 1283 - protein, 571 aa, Unknown
  Description of Unknown: Integrase B1284 sequence
  SM00857,G3DSA:1.10.10.2600,IPR036162,PF13408,IPR025827, G3DSA:3.40.50.1390,PS51737,IPR006119,IPR038109,PF07508, SSF53041,IPR011109,PTHR30461,Coil,cd00338, PF00239
MAYRKITDIRDTIGMRAVFYARVSTAEEEQLNAIELQIEENRGCIKDHGWKLVGEYIDRSKSGTMVKGRDDYQRLYEDLYEDLFDIVVIKDQERLQRNTLDWYLFINRVVQTGKLLFMYMDGKFYSPDDALITGVRAIIAEEFSRNLSKKLHNYHDHRIEKARQGQEIALQGSGNVYGWDKKDGKYYINPEQAKVRRLMCEGIMARKGSTLIAKELNDAGYRNTVGKPWKPMDIPKFVYDCKNVGTMIINKERHDFESKQTIKLPKEEWVYVENALPPIVTQEEWDLICKIHEERVIATGSDRRGKKTSGYSFSGKLVCGICGAPYWRKQRVSKDEYWVCSTKQTKGRRTRKRDSTMGKAGEINPLGCDNENISYNSLMEIMGVVSERLQANTDTIKQDMINWLTKLRKQLLEANGGHTEADLQRELSRKSKLLDAYLDGILNKQEYQKKAEELDERIIQLKAETEKNKANSGDIAEIDKVLANIDEEVSRYVDGNEKLKVEYLLEHLEQVQIFPDKVIVIVPILSEGIVVVEKTQYVSREKWLWKKYINEYYNGQFKSGSGMRLLRWRSD

SEQ ID NO: 1284 - protein, 571 aa, Unknown
  Description of Unknown: Integrase B1285 sequence
  SM00857,G3DSA:1.10.10.2600,IPR036162,PF13408,PS51737, G3DSA:3.40.50.1390,IPR025827,IPR006119,IPR038109,PF07508, IPR011109,SSF53041,PTHR30461,Coil,PS51736, cd00338,PF00239
MNIYHARETLRTCSIYDLKLRVAYYARVSTDRAEQQVSISHQTEYFENLIRSNPNWEFVGAYVDDGISGMHAEKREDFQNMLRDAKAGKIDMIITKEISRFARNTLDSIKYTRELLSCGVCVWFQNDGINTIDEDSELRLTIMAGVAQDELRKLSSRVKFGHARSIQNGVVLGNRIYGYKKKDGKLTIIPEEAEMVRMIFRDYAAGVSTPKIEKKLWDMGYRNSKGSKIDRNVIRHIIKNPKYKGYFCGGKVKIVDMFTKKQEFLPKSEWIMFKDDGSRVPQIIDEETWEKANQYMTMRGDAIKTRRTSFKSENLFTGMIFCSNDNAPYWLKQHYIRGKEDVRWVCSHKIKNGAASCNSFGIKESELKIMVSDLINESSCNIEEVIKKYLELLRRATDNKPDSKAEIDRLQKQIESINKKKEKILEYNLDGNISDEEFIQRNKGYNEQIEKLNSQISDLTPNQDNFVSTEMQFKNIADTLKKFNGVESEDINRQIVEELFEKIVVKSFEGNKATLTFYLKTGEVKKKQVSMSCSEYMLFNIIPERHKRFYRKTCISGASEIAFNYEYRMVI

SEQ ID NO: 1285 - protein, 571 aa, Unknown
  Description of Unknown: Integrase B1286 sequence
  PTHR30461:SF3,IPR036162,PS51737,IPR011109,PTHR30461, PS00397,PF00239,G3DSA:1.10.10.2600,IPR006119,SSF53041, SM00857,IPR025827,IPR038109,PS51736,cd03768, IPR006118,PF13408,G3DSA:3.40.50.1390,PF07508,Coil
MMQNRTAPASTNRVAIYIRVSTTHQIDKDSLPMQRQDLIAYAKLMLNTDDYVIFEDAGYSGKNTDRPKFQEMMSQIRQGAFSHLLVWKIDRISRNLLDFATMYKELKDLGVVFVSKNEQFDTSTAMGEAMLKIILVFAELERNMTSERVTATMISRASNGQWNGGRVPYGYNYDYETKDFSTNPIEAEIVHLIHDKYEEMRSLVRESRYLNEKGLRTRAGNLWNPVSLHIILHNIFYCGDYRYNVLKEGDRQKVKDESEWITVEDHHDSIISREQKERVIAMLDANKRLDRKRNTYQSEKYVHVFAGLLYCGNCGKPMGATPAAAKKDWQYSKYTCPTRRKLASACNGKFTSDPIVGEFVFNYVLNMLNVQKNFAGIHSPEELQAALLIGNTFSYIDHIDEDGLNDLFNMLSSGKIKGTVFGKSAKLKKKKVVSELSKLRNEKQKIERALDRLTKLYLYAEDAMPESEFIIQKSKLTEALDEVNEQIGFSNTDEWNQSVSDEEFVRRASEFIIAQKLTDRNYVSYKRLATSVDTAVIKTFVQSIIDSIIMDAGQVKQIIFKNGLSHTFIFK

SEQ ID NO: 1286 - protein, 571 aa, Unknown
  Description of Unknown: Integrase B1287 sequence
  cd03768,PTHR30461:SF3,SM00857,G3DSA:1.10.10.2600,IPR036162, PF13408,IPR025827,PS51737,G3DSA:3.40.50.1390,IPR006119, IPR038109,PF07508,IPR011109,SSF53041,PTHR30461, PS51736,Coil,PF00239
MLKVAVYSRKSKFTGKGDSIENQIEMCKDYITNTIGKDVEFTIYEDEGFSGGNLDRPNFKKLMSAIKNKKFNILVCYRLDRISRNVADFSSTLEILQSNNCSFISIKEQFDTSSPMGRAMIYIASVFAQLERETIAERVKDNMLEIAKNGKWTGGKIPLGFTSDKVEYIDEKGITRTAPQLIINEKEMEFINFLYNKYLELGSLHKLEVYIHENNIRSRNDVLYEKSSLKTILQNPIYVKANDDVVEYLNNSNWTVYGQPDNIHSLLTYNKTEQTKKDGKYTKVKKDLSERLAAVSSIKGYIDPELWLSVQRQFDKNKDTFPRLGKTHNALLVGKIRCGKCKEYMLISHGRISKTTGEKLFYYTCSLKKKSRKKLCDNGNAKAADLEKLVLLSLKQLSLNKKDFLSKIRDKYKTDENYKNIDLEKLSLNKSLKEKKLQIDNLVTKLSLCNDIEDIILNKIKTLKDECNNIEKTLTELETKTLTLKNNLLNLDLIESLLNKCSMIDKLDRSEQKLIVDNLIDTIYWYSDGPGKGKIKIKFVGTEDNQKEISFTIKEMQQLMLHFCSHSMSSI

SEQ ID NO: 1287 - protein, 571 aa, Unknown
  Description of Unknown: Integrase B1288 sequence
  PTHR30461:SF3,SM00857,G3DSA:1.10.10.2600,IPR036162,PF13408, IPR025827,PS51737,G3DSA:3.40.50.1390,IPR006119,IPR038109, PF07508,IPR011109,SSF53041,PF00239,PTHR30461, PS51736,Coil,cd00338
MQRAVIYARYSPGPNQTEQSIEGQVRECTKYAELHDLRIVGTYVDRKISGKTDNRREFQRMIDDSEKHIFDVIILYHTDRFARNRYDSAIYKHKLKENGVELRYATTDIPKGPEGIILESIMEGWAEYYSAELSRKIKRGMRESALKCHSTGAGRCLGYRTAEDKSLVIEPEGAKAVQTVFDMYIKGKSHADICRYLNDCGFRTAQGKLFNKNSVTHIIRNKRYIGVYTYDDITIEDGIPAIISKDTFHLAQLEAARRKTAKRPKEPKAEYLLSGKAFCGHCQKPLVGVSGTGKSGNKWYYYYCQESRAKRGCTKKPVKRDWLEREVVERTVAEILQPEVIQRIAKKCYDLQMEDRQDNSDVLFYELKLKDVRKAIKNTMHAIESGVKTKTLPARLQELENEEEALEAELAIAKASDFVITTDQIEFLLTQFAEPWECESEEEYHRRIIKCFVHKVFLFDDKLLIYYNVSRDGKTREQSEAELLEEALGEGFDKRSSGSTKAEPDEPRGRLALLLSLQSIWSAESSFWSVRSTRKNKKEATAQDCSCAVASLCFFIAITDFVIIYQNPARF

SEQ ID NO: 1288 - protein, 571 aa, Unknown
  Description of Unknown: Integrase B1289 sequence
  PTHR30461:SF3,IPR036162,PS51737,IPR011109,PTHR30461, PS00397,PF00239,G3DSA:1.10.10.2600,IPR006119,SSF53041, SM00857,IPR025827,IPR038109,PS51736,cd03768, IPR006118,PF13408,G3DSA:3.40.50.1390,PF07508,Coil
MMQDRTAPASTNRVAIYIRVSTTHQIDKDSLPMQRQDLIAYAKLMLNTDDYVIFEDAGYSGKNTDRPKFQEMMSQIRQGAFSHLLVWKIDRISRNLLDFATMYKELKDLGVVFVSKNEQFDTSTAMGEAMLKIILVFAELERNMTSERVTATMISRASNGQWNGGRVPYGYNYDYETKDFSINPIEAEIVRLIHDKYEEMRSLVRESRYLNEKGLRTRAGNLWNPVSLHIILHNIFYCGDYRYNVLKEGDRQKVKDESEWITVEDHHEPIISREQKERVIAMLDTNKRLDRKRNTYQSEKYVHVFAGLLYCGNCGKPMGATPAAAKKDWQYSKYTCPTRRKLASACNGKFTSDPIVGEFVFNYVLNMLNVQKNFADIHSPEELQAALLIGNTFSYIDHIDEDGLNDLFNMLSSGKIKGTVFGKSAKLKKKKVVSELSKLRNEKQKIERALDRLTKLYLYAEDAMPESEFIIQKSKLTEALDEVNEQIGFSNTDEWNQSVSDEEFVRRASEFIIAQKLTDRNYVSYKRLATSVDTAVIKTFVQGIIDSIIMDAGQVKQIIFKNGLSHTFIFK

SEQ ID NO: 1289 - protein, 571 aa, Unknown
  Description of Unknown: Integrase B1290 sequence
  PTHR30461:SF3,IPR036162,PS51737,IPR011109,PTHR30461, PS00397,PF00239,G3DSA:1.10.10.2600,IPR006119,SSF53041, SM00857,IPR025827,IPR038109,PS51736,cd03768, IPR006118,PF13408,G3DSA:3.40.50.1390,PF07508,Coil
MMQDRTAPASTNRVAIYIRVSTTHQIDKDSLPMQRQDLIAYAKLMLNTDDYVIFEDAGYSGKNTDRPKFQEMMSQIRQGAFSHLLVWKIDRISRNLLDFATMYKELKDLGVVFVSKNEQFDTSTAMGEAMLKIILVFAELERNMTSERVTATMISRASNGQWNGGRVPYGYNYDYETKDFSINPIEAEIVRLIHDKYEEMRSLVRESRYLNEKGLRTRAGNLWNPVSLHIILHNIFYCGDYRYNVLKEGDRQKVKDESEWITVEDHHEPIISREQKERVIAMLDANKRLDRKRNTYQSEKYVHVFSGLLYCGNCGKPMGATPAAAKKDWQYSKYTCPTRRKLASACNGKFTSDPIVGEFVFNYVLNMLNVQKNFADIHSPEELQAALLIGNTFSYIDHIDEDGLNDLFNMLSSGKIKGTVFGKSAKLKKKKVVSELSKLRNEKQKIERALDRLTKLYLYAEDAMPESEFIIQKSKLTEALDEVNEQIGFSNTDEWNQSVSDEEFVRRASEFIIAQKLTDRNYVSYKRLATSVDTAVIKTFVQGIIDSIIMDAGQVKQIIFKNGLSHTFIFK

SEQ ID NO: 1290 - protein, 571 aa, Unknown
  Description of Unknown: Integrase B1291 sequence
  SM00857,G3DSA:1.10.10.2600,IPR036162,PF13408,PS51737, IPR025827,G3DSA:3.40.50.1390,IPR006119,IPR038109,PF07508, IPR011109,SSF53041,PF00239,PTHR30461,PS51736, Coil,cd00338
MNIYHAREMLRTHSIYDLKLRVAYYARVSTDRAEQQVSIKHQTEHFENLIRSNQNWDFGEAYIDDGISGMHVEKREEFQNMLRDAKAGKIDMIITKEISRFARNTLDSIKYTRELLSYGVCVWFQNDGINTIDEDSELRLTIMAGVAQDELRKLSSRVKFGHARSIQNGVVLGNRIYGYHKKDGKLTIIPEEAEMVQMIFKDYASGVTTPQIEIKLWKMGYRNSKGGKINRNVIRNIIRNPKYKGYFCGGKVKIVDMFTRKQEFLPESKWVMFKDDGSRVPQIVDEETWEKANQYMSIRGDAIKSRRTSFKKGNLFTGMIFCGNDGAPYWLKQHYVRGKEDVRWVCSYKIKNGASSCNSFGIKESELKIIISELINESSCNIDEIAKKYLELLQKVMNDKLGSKTEIDRIQKQIDSINKKKEKILEYNLDGNISDNEFLQRNKEYNEQILKLNSQITALTSQQNEIKTPEEQLKNIVDTLKKFDGVKPDDINRQIVEELFEKISVKSFEGKKALLTFYLKTGDAKTRKFGMGCSGHVLLNIVPERHKRFYRKNCILNASEIAFDYTYEAVI

SEQ ID NO: 1291 - protein, 571 aa, Unknown
  Description of Unknown: Integrase B1292 sequence
  PTHR30461:SF3,IPR036162,PS51737,IPR011109,PTHR30461, PS00397,PF00239,G3DSA:1.10.10.2600,IPR006119,SSF53041, SM00857,IPR025827,IPR038109,PS51736,cd03768, IPR006118,PF13408,G3DSA:3.40.50.1390,PF07508,Coil
MMQDRTAPASTNRVAIYIRVSTTHQIDKDSLPMQRQDLIAYAKLMLNTDDYVIFEDAGYSGKNTDRPKFQEMMSQIRQGAFSHLLVWKIDRISRNLLDFATMYKELKDLGVVFVSKNEQFDTSTAMGEAMLKIILVFAELERNMTSERVTATMISRASNGQWNGGRVPYGYNYDYETKDFSINPIEAEIVRLIHDKYEEMRSLVRESRYLNEKGLRTRAGNLWNPVSLHIILHNIFYCGDYRYNVLKEGDRQKVKDESEWITVEDHHEPIISREQKERIIAMLDANKRLDRKRNTYKSEKYVHVFAGLLYCGNCGKPMGATPAAAKKDWQYSKYTCPTRRKLASACNGKFTSDPIVGEFVFNYVLNMLNVQKNFADIHSPEELQAALLIGNTFSYIDHIDEDGLNDLFNMLSSGKIKGTVFGKSTKLKKKKVVSELSKLRNEKQKIERALDRLTKLYLYAEDAMPESEFIIQKSKLTEALDEVNEQIGFSNTDEWNQSVSDEEFVRRASEFIIAQKLTDRNYVSYKRLATSVDTAVIKTFVQGIIDSIIMDAGQVKQIIFKNGLSHTFIFK

SEQ ID NO: 1292 - protein, 571 aa, Unknown
  Description of Unknown: Integrase B1293 sequence
  PTHR30461:SF3,SM00857,G3DSA:1.10.10.2600,IPR036162,PF13408, IPR025827,G3DSA:3.40.50.1390,PS51737,IPR006119,IPR038109, PF07508,SSF53041,IPR011109,PF00239,PTHR30461, PS51736,Coil,cd00338
MRDVKEDTKKIVRILLRVSSDQQLEADGDLSIQRQLVVEEVKKHEEWILDSKEYFEGSNSGYKNSVVDRDVLQEALRDAENKEYDILLAYKDDRLGRRMLEIPMYIMSLKQFGVDVYTVKDGLLTPDIGDVMGMLRLTMQYGMAEKSSSDTGIRVKDTAKKLVQQGKFMGGKAPYGYKLEYSGEYSKHQRALKHLVIVPEHAEVVKYIYKLSLYKEYGSGKIATTLNLDNRYKNLAPNDVWKSGTITSILTNPIYTGYTAYRRREHIGGRYRSLSQEDWIIAEKPNDEITIIDRDMWEKVQISRQKRSRKYQKQSWNEKATVISRNDGQLALIDVAYCGYCGRKLTNGTKYDYWTIKGTGERRSSQKSIYKCQNVWQGVPHEKMKQIRADKIEPIVFKKLSEYVGRLQEDENIFEQILENQSFEKKQQEQILVREKRKLQEIEKDMDILNDAIPKAITGTYPLPLEDLAKNIERQKDKAAKQKAVVDELEINIKNLSVSQEDWENLYHNLPTWQDIFMNADVATKRVLVNKLIERIDITDDTVVIHFKVDLDHFCSQPRETINERVSQSGL

SEQ ID NO: 1293 - protein, 571 aa, Unknown
  Description of Unknown: Integrase B1294 sequence
  PTHR30461:SF3,SM00857,G3DSA:1.10.10.2600,IPR036162,PF13408, IPR025827,G3DSA:3.40.50.1390,PS51737,IPR006119,IPR038109, PF07508,SSF53041,IPR011109,PF00239,PTHR30461, PS51736,Coil,cd00338
MSKLYETIEQLCKNKGVNITKMCKDAGTSLGAQENVVHSPFFQCELYHILLQMSRSDNKYMKTAVIYARYSSDKQTEQSIEGQLYDCYNYAKQHGITVVREYIDRAMTGKNDDRPAFQQMLHESAMHKWDSVIVWKLDRFARNTIDSAVNRQILAKNGVKLLSVMESFGDDASGQMMTHIIEAINEYYSADLREKTIRGMRQSAMKAQTTGHIPLGYKVVDKKLVIDDETRIIPETVFRMYAEGERLTDIADHLNAQGYRNRRGRPFTTNSFYNMLANEKYIGIYKYDDIVIEGGIPQMIPNEVFEAVREKLITNRKRAAKNTAKADYYLSGKLYCGHCGEPMSGLSGTGRNGVKHYYYRCNGVQKKSGCHKKLENKYLIEDEVCRAARSAFEQMDKAETAETIYQMYLQTVRNEYAPAELEKELTECTKQAENVVNAIAQTGGNQLLFDKVRELEERKEQLGSALRLSQAMTDNVPSVEQITVFIDDILATDINTTEGKKAIADIMISKVYVYDDKLTAIFKDKDGKSVDIPLSDVSDSSSADCAPSALGSQSTHRRTVGNNQWFAFVIS

SEQ ID NO: 1294 - protein, 571 aa, Unknown
  Description of Unknown: Integrase B1295 sequence
  SM00857,G3DSA:1.10.10.2600,IPR036162,PF13408,IPR025827, PS51737,G3DSA:3.40.50.1390,IPR006119,IPR038109,PF07508, IPR011109,SSF53041,PF00239,PTHR30461,PS51736, Coil,cd00338
MNIYHAREMLRTHSIYDLKLRVAYYARVSTDRAEQQVSIKHQTEHFENLIRSNQNWDFGEAYIDDGISGMHVEKREEFQNMLRDAKAGKIDMIITKEISRFARNTLDSIKYTRELLSYGVCVWFQNDGINTIDEDSELRLTIMAGVAQDELRKLSSRVKFGHARSIQNGVVLGNRIYGYHKKDGKLTIIPEEAAMIQMIFKDYASGVATPQIEKKLWEMGYRNSKGEKINRNVIRNIIKNPKYKGYFCGGKVKIVDMFTRKQEFLPESKWVMFKDDGSRVPQIVDEETWEKANQYMSMRGDAIKSRRTSFKKGNLFTGMIFCGNDGAPYWLKQHYVRGIEDVRWVCSYKIKNGASSCNSFGIKESELKIMISELINESSCNIDEIAKKYLELLQKVMNDKLSSKTEIDRIQEQIDSINKKKEKILEYNLDGNISDNEFLQRNKEYNEQILKLNSQITALTSQQNEIKTPEEQLKNIVDTLKKFDGVKPDDINRQIVEELFEKISVKSFEGKKALLTFYLKTGDAKTRKFGMGCSGHVLLNIVPERHKRFYRKNCILNASEIAFDYTYEAVI

SEQ ID NO: 1295 - protein, 571 aa, Unknown
  Description of Unknown: Integrase B1296 sequence
  PTHR30461:SF3,IPR036162,PS51737,IPR011109,PTHR30461, PS00397,PF00239,G3DSA:1.10.10.2600,IPR006119,SSF53041, cd00338,SM00857,IPR025827,IPR038109,PS51736, IPR006118,PF13408,G3DSA:3.40.50.1390,PF07508,Coil
MSIRDKLSALKVAIYIRVSTHWQVDKDSLKVQERELIAYCQMVLGINDYVVFTDPGYSAKNTDRPDYQAMMDRIRTGEFSHLLVWKIDRISRNIIDFATMSEELKHLGVAFVSKNEQFDTSTAMGEAMLQIIMVFAQFERKQTSERVTAVMLSRAGNGQWNGGRVPYGYLWDKETASFQLCETEAGYVRRMAQLYEEHQSLLHIVKWLNDAGVKTRRGFAWTPTSVHVILTNPWYIGQYVYNVHSDGKGVERRDESEWVCVEHHHEPILSEDQFYRIKFLLTRNRRGTPTPGKSYARKHTHIFSGLMRCGICGSNMSASADRRRANGFRPSQYACASRRRKGTTCTNKYISDLTVGSFVLNYAANIIRAARNSAAGVQPDILERKLLRGETFKDVESINSEAIQQLLSSFAEAGDAVEYRPQYAFTSASGEGRDMDNLRARKRKLETALSRLNALFLYDDEAMPEKDFIVERTNIEHQLAETDKRIAELAATGLSSSEDSSDFLKKASYFIMVNKLIEDASVDYEKLVRTLDPTAIRDFVLNIVQEVEATDGRITAITFRNGTAHRFKYKT

SEQ ID NO: 1296 - protein, 571 aa, Unknown
  Description of Unknown: Integrase B1297 sequence
  SM00857,G3DSA:1.10.10.2600,IPR036162,PF13408,IPR025827, G3DSA:3.40.50.1390,PS51737,IPR006119,IPR038109,PF07508, IPR011109,SSF53041,PF00239,PTHR30461,PS51736, Coil,cd00338
MKDVKEDTKKIVRILLRVSSDQQLEADGDLSIQRKIVVEEVKKHEEWILDSKEYFEGSNSGYKNSVADRDVLQEALRDAENKEYDILLAYKDDRLGRRMLEIPMYIMSLKQFGVDVYTVKDGLLTPDLGDITGMLMLSMRYAMAEKSSSDTGMRVKDTAQKLVQQGKFMGGKAPYGYKLEYSGEYSKHQRALKHLVIAPEQAEVVKYIYELSFYKEFGSGKIASSLNNDSRYKNLAPNDVWKSGTITSILTNPIYAGYTAYKRRETQNGMSHSLDRKDWIIAEKQNKEITIINPELWEKVQISRQKRRTKYQKQPWNEKATIISRNDGNLALIDVAYCGYCGRKLTNGTKYDYWTIKGTGERRSSQKSIYKCQNVWQGVPHEKMKQIRADKIEPIVFKKLSEYVGRLQEDENIFEQILENQSFEKKRQEQILVREKRNLQEIEKNIDILNDAIPNAITGTYPLSLEDLAKSIEKQKDKASKQKTVVEELETNIKNLSVSQEDWENLYHNLPTWQDIFMNADVATKRVLVNKLIERIDITDDTVVIRFKVDLDHFCPQPRMTVNERVSQSGL

SEQ ID NO: 1297 - protein, 571 aa, Unknown
  Description of Unknown: Integrase B1298 sequence
  PTHR30461:SF3,IPR036162,PS51737,IPR011109,PTHR30461, PF00239,G3DSA:1.10.10.2600,IPR006119,SSF53041,cd00338, SM00857,IPR025827,IPR038109,PS51736,mobidb-lite, PF13408,G3DSA:3.40.50.1390,PF07508,Coil
MSLTYVVAYARFSSDNQREESIDAQLRAIRQYCQQHDYILLDTYVDEARSATTDDRPAFQQMVKDSASGDWSAVIVHKLDRFSRNRYDSAIYKKQLKDNGVHVESVLERLDDSPESVILESLLEGMSEYYSKNLAREVLKGKHETALQCKHNGGQPPYGLMVNKDGTYAINEYEAEAVRMMFDLTLSGHSQSAIRNTLSHAGYKTRSGKPFCGSTINNMLHNEKYNGTFVYNRVKPQPKGGKRTNESRPDDEIMRIPNGIPAIIDAQTWNDVQEVLERRSDQASKRSEGGIEVYLLQGLIKCGNCGSAMVGCRRKDGRNKKLRISYECNGRKRKHTDCQMRNINRDYIEDIVIDYIEQCILSDDAMAKVKKMLLDEIDAQQKATGSLDSLQKELASVEAGLNKLIDAIIAGIDALSLKDKIDALEAKKALLNSQISTVKARQATFGQIDIDSLDCYLAHYRNIRSHPRRHQKEIIHKFVKEVLVYDNDTDGDKIVLTLKVPASSITLQSSKSGDTVNGVLSPYSISEIQRASSIISRLSFYSTSSVYGQPISNKHCYIIDMAHCLSLTESI

SEQ ID NO: 1298 - protein, 571 aa, Unknown
  Description of Unknown: Integrase B1299 sequence
  SM00857,G3DSA:1.10.10.2600,IPR036162,PF13408,IPR025827, G3DSA:3.40.50.1390,PS51737,IPR006119,IPR038109,PF07508, IPR011109,SSF53041,PTHR30461,Coil,PS51736, cd00338,PF00239
MNIYHARETLRMCSIYDLKLRVAYYARVSTDRAEQQVSISHQTEYFENLIRSNPNWEFVDAYVDDGISGMHAEKREDFQNMLRDAKAGKIDMIITKEISRFARNTLDSIKYTRELLSCGVCVWFQNDGINTIDEDSELRLTIMAGVAQDELRKLSSRVKFGHARSIQNGVVLGNRIYGYKKKDGKLTIIPEEAEMVRMIFRDYAAGVSTPKIEKKLWDMGYRNSKGSKIDRNVIRHIIKNPKYKGYFCGGKVKIVDMFTKKQEFIPESEWIMFKDDGSRVPQIIDEETWEKANQYMTMRGDAIKTRRTSFKSENLFTGMIFCSNDNAPYWLKQHYIRGKEDVRWVCSHKIKNGAASCNSFGIKESELKIMVSDLINESSCNIEEVIKKYLELLRRAIDNKPDSKAEIDRLQKQIESINKKKEKILEYNLDGNISDEEFIQRNKGYNEQIQKLNSQISDLTPNQDDFVSAEMQFKNIIDTLKKFNGVDSEDINRQIVEELFEKIVVKSFEGNKATLTFYLKTGEVKKKQVSMSCSEYMLFNIIPERHKRFYRKTCISGASEIAFNYEYRMVI

SEQ ID NO: 1299 - protein, 571 aa, Unknown
  Description of Unknown: Integrase B1300 sequence
  SM00857,G3DSA:1.10.10.2600,IPR036162,PF13408,IPR025827, PS51737,G3DSA:3.40.50.1390,IPR006119,IPR038109,PF07508, SSF53041,IPR011109,PTHR30461,Coil,cd00338, PF00239
MAYRKITDIRDTIGMRAVFYARVSTAEEEQLNAIELQIEENRGCIKDHGWKLVGEYIDRSKSGTMVKGRDDYQRLYEDLYEDLFDIVVIKDQERLQRNTLDWYLFINRVVQTGKLLFMYMDGKFYSPDDALITGVRAIIAEEFSRNLSKKLHNYHDHRIEKARQGQEIALQGSGNVYGWDKKDGKYYINPEQAKVRRLMCEGIMARKGSTLIAKELNEAGYRNTVGKLWKPMDIPKFVYDCKNVGTMIINKERHDFESKQTIKLPKEEWVYVENALPPIVTQEEWDLICKIHEERVIATGSDRRGKKTSGYSFSGKLVCGICGAPYWRKQRVSKDEYWVCSTKQTKGRRTRKRDSTMGKAGEINPLGCDNENISYNSLMEIMGVVSERLQANTDTIKHDMINWLTKLRKQLLEANGGHTEADLQRELSRKSKLLDAYLDGILNKQEYQKKAEELDERIIQLKAETEKNKANSGDIAEIDKVLANIDEEVSRYVDGNEKLKVEYLLEHLEQVQIFPDKVIVIVPILSEGIVVEKAQYVSREKWCRQDHYSKTFQWNSASHLRRSADQRRRYQ

SEQ ID NO: 1300 - protein, 571 aa, Unknown
  Description of Unknown: Integrase B1301 sequence
  PTHR30461:SF3,IPR036162,PS51737,IPR011109,PTHR30461, PS00397,PF00239,G3DSA:1.10.10.2600,IPR006119,SSF53041, SM00857,IPR025827,IPR038109,PS51736,cd03768, IPR006118,PF13408,G3DSA:3.40.50.1390,PF07508,Coil
MMQDRTAPASANRVAIYIRVSTTHQIDKDSLPMQRQDLIAYAKLMLNTDDYVIFEDAGYSGKNTDRPRFQEMMSQIRQGAFSHLLVWKIDRISRNLLDFATMYKELKDLGVVFVSKNEQFDTSTAMGEAMLKIILVFAELERNMTSERVTATMISRASNGQWNGGRVPYGYNYDYETKDFSTNPIEAEIVHLIHDKYEEMRSLVRESRYLNEKGLRTRAGNLWNPVSLHIILHNIFYCGDYRYNVLKEGDRQKVKDESEWITVEDHHDSIISREQKERVIAMLDANKRLDRKRNTYQSEKYVHVFAGLLYCGNCGKPMGATPAAAKKDWQYSKYTCPTRRKLASACNGKFTSDPIVGEFVFNYVLNMLNVQKNFADIHSPEELQAALLIGNTFSYIDHIDEDGLNDLFNMLSSGKIKGTVFGKSAKLKKKKVVSELSKLRNEKQKIERALDRLTKLYLYAEDAMPESEFIIQKSKLTEALDEVNEQIGFSNTDEWNQSVSDEEFVRRASEFIIAQKLTDRNYVSYKRLATSVDTAVIKTFVQSIIDSIIMDAGQVKQIIFKNGLSHTFIFK

SEQ ID NO: 1301 - protein, 571 aa, Unknown
  Description of Unknown: Integrase B1302 sequence
  cd00338,SM00857,G3DSA:1.10.10.2600,IPR036162,PF13408, IPR025827,PS51737,G3DSA:3.40.50.1390,IPR006119,IPR038109, PF07508,SSF53041,IPR011109,PTHR30461,PS51736, Coil,PF00239
MICVDQNGQAVEISVADQMWLDDAYFKEKQMRLEPNAPRAALAYRVSTKGQVDHDDIPMQKIDCRKFAQKQGWRVVKEVAEKGVSGSKVSASKRDAIQQLKEEAANGEFDILLVYMFDRLGRIESETPFVLEWFVQHGIQMWSTHEGQQKIETHGDKLMNYIRFWQAAGESEKTSIRTRDRIRQIVSSGHYTGGFVCYGYQLVDQGRRNKRDKPVMDLVINEEESTWVRELFYKVIQEGASGYALAEMLNNRGLRTRAGAKFQSSNIIRIIRHEGYTGYIITKNARSEYIPELQIIDRETFDKANDIINRRKAKSEQERKIAHTSQNPTLLAGIVYCAHCGAKMSGFMHTDRYKLADGSIREKVQPKYNCFQRGQRNKGGRDCDGQALYLAEKVDAIVLQAVSKIFEQIRDTPYSRMAENRIRQESNLQKSKRASVEKKIKTAQHALERFEGEILKCLDGTSNFTEDMIAKQIRRYQQELDDAKAEYAALQNARLNEAAEIRKLRTYYDEFRGWAEEFDAAPLEIKRMIQSQLIERVEVGRKYQVTIKLNMEYQQFLEITEEQKLIPLISA

SEQ ID NO: 1302 - protein, 571 aa, Unknown
  Description of Unknown: Integrase B1303 sequence
  PTHR30461:SF3,IPR036162,PS51737,IPR011109,PTHR30461, PS00397,PF00239,G3DSA:1.10.10.2600,IPR006119,SSF53041, SM00857,IPR025827,IPR038109,PS51736,cd03768, IPR006118,PF13408,G3DSA:3.40.50.1390,PF07508,Coil
MMQDRTAPASTNRVAIYIRVSTTHQIDKDSLPMQRQDLIAYAKLMLNTDDYVIFEDAGYSGKNTDRPKFQEMMSQIRQGAFSHLLVWKIDRISRNLLDFATMYKELKDLGVVFVSKNEQFDTSTAMGEAMLKIILVFAELERNMTSERVTATMISRASNGQWNGGRVPYGYNYDYETKDFSINPIEAEIVRLIHDKYEEMRSLVRESRYLNEKGLRTRAGNLWNPVSLHIILHNIFYCGDYRYNVLKEGDRQKVKDESEWITIEDHHDSIISREQKERVIAMLDANKRLDRKRNTYQSEKYVHVFAGLLYCGNCGKPMGATPAAAKKDWQYSKYTCPTRRKLASACNGKFTSDPIVGEFVFNYVLNMLNVQKNFADIHSPEELQATLLIGNTFSYIDHIDEDGLNDLFNMLSSGKIKGTVFGKSAKLKKKKVVSELSKLRNEKQKIERALDRLTKLYLYAEDAMPESEFIIQKSKLTEALDEVNEQIGFSNTDEWNQSVSDEEFVRRASEFIIAQKLTDRNYVSYKRLATSVDTAVIKTFVQSIIDSIIMDAGQVKQIIFKNGLSHTFIFK

SEQ ID NO: 1303 - protein, 571 aa, Unknown
  Description of Unknown: Integrase B1304 sequence
  SM00857,G3DSA:1.10.10.2600,IPR036162,PF13408,PS51737, IPR025827,G3DSA:3.40.50.1390,IPR006119,IPR038109,PF07508, IPR011109,SSF53041,PF00239,PTHR30461,PS51736, Coil,cd00338
MNIYHAREMLRTHSIYDLKLRVAYYARVSTDRAEQQVSIKHQTEHFENLIRSNQNWDFGEAYIDDGISGMHVEKREEFQNMLRDAKAGKIDMIITKEISRFARNTLDSIKYTRELLSYGVCVWFQNDGINTIDEDSELRLTIMAGVAQDELRKLSSRVKFGHARSIQNGVVLGNRIYGYHKKDGKLTIIPEEAEMVQMIFKDYASGVTTPQIEIKLWKMGYRNSKGGKINRNVIRNIIRNPKYKGYFCGGKVKIVDMFTRKQEFLPESKWVMFKDDGSRVPQIVDEETWEKANQYMSIRGDAIKSRRTSFKKGNLFTGMIFCGNDGAPYWLKQHYVRGKEDVRWVCSYKIKNGASSCNSFGIKESELKIIISELINESSCNIDEIAKKYLELLQKVMNDKLGSKTEIDRIQEQINSINKKKEKILEYNLDGNISDNEFLQRNKEYNEQILKLNSQIAALTSQQNEIKTPEEQLKNIVDTLKKFDGVKPDDINRQIVEELFEKISVKSFEGKKALLTFYLKTGDAKTRKFGMGCSGHVLLNIVPERHKRFYRKNCILNASEIAFDYTYEAVI

SEQ ID NO: 1304 - protein, 571 aa, Unknown
  Description of Unknown: Integrase B1305 sequence
  SM00857,G3DSA:1.10.10.2600,IPR036162,PF13408,IPR025827, PS51737,G3DSA:3.40.50.1390,IPR006119,IPR038109,PF07508, SSF53041,IPR011109,PTHR30461,Coil,PS51736, cd00338,PF00239
MNIYHARETLRTCSIYDLKLRVAYYARVSTDRVEQQVSISHQTEYFENLIRSNPNWEFVGAYVDDGISGMHAEKREDFQNMLRDAKAGKIDMIITKEISRFARNTLDSIKYTRELLSCGVCVWFQNDGINTIDEDSELRLTIMAGVAQDELRKLSSRVKFGHARSIQNGVVLGNRIYGYKKKDGKLTIIPEEAEMVRMIFRDYAAGVSTPKIEKKLWDMGYRNSKGSKIDRNVIRHIIKNPKYKGYFCGGKVKIVDMFTKKQEFIPESEWIMFKDDGSRVPQIIDEETWEKANQYMTMRGDAIKTRRTSFKSENLFTGMIFCSNDNAPYWLKQHYIRGKEDVRWVCSHKIKNGAASCNSFGIKESELKIMVSDLINESSCNIEEVIKKYLELLRRATYNKPDSKAEIDRLQKQIESINKKKEKILEYNLDGNISDEEFIQRNKGYNEQIQKLNSQISDLTPNQDDFVSAEMQFKNIIDTLKKFNGVESEDINRQIVEELFEKIVVKSFEGNKATLTFYLKTGEVKKKQVSMSCSEYMLFNIIPERHKRFYRKTCISGASEIAFNYEYRMVI

SEQ ID NO: 1305 - protein, 571 aa, Unknown
  Description of Unknown: Integrase B1306 sequence
  PTHR30461:SF3,IPR036162,PS51737,IPR011109,PTHR30461, PS00397,PF00239,G3DSA:1.10.10.2600,IPR006119,SSF53041, cd00338,SM00857,IPR025827,IPR038109,PS51736, IPR006118,PF13408,G3DSA:3.40.50.1390,PF07508,Coil
MSIRDKLSALKVAIYIRVSTHWQVDKDSLKVQERELIAYCQMVLGINDYVVFTDPGYSAKNTDRPDYQAMMDRIRTGEFSHLLVWKIDRISRNIIDFATMSEELKHLGVAFVSKNEQFDTSTAMGEAMLQIIMVFAQFERKQTSERVTAVMLSRAGNGQWNGGRVPYGYLWDKETASFQLCETEAGYVRRMAQLYEEHQSLLHIVKWLNDAGVKTRRGFAWTPTSVHVILTNPWYIGQYVYNVHSDGKGVERRDESEWVCVEHHHEPILSEDQFYRIKFLLTRNRRGTPTPGKSYARKHTHIFSGLMRCGICGSNMSASADRRRANGFRPSQYACASRRRKGTTCTNKYISDLTVGSFVLNYAANIIRAARNSAADVQPDILERKLLRGETFKDVESINSEAIQQLLSSFAEAGEAVEYRPQYAFTSASGEGRDMDNLRARKRKLETALSRLNALFLYDDEAMPEKDFIVERTNIERQLAETDKRIAELAATGLSSSEDSSDFLKKASYFIMVNKLIEDASVDYEKLVRTLDPTAIRDFVLNIVQEVEATDGRITAIAFRNGTAHRFKYKT

SEQ ID NO: 1306 - protein, 571 aa, Unknown
  Description of Unknown: Integrase B1307 sequence
  PTHR30461:SF3,IPR036162,PS51737,IPR011109,PTHR30461, PF00239,G3DSA:1.10.10.2600,IPR006119,PF14287,SSF53041, IPR025378,SM00857,IPR025827,cd03770,IPR038109, PS51736,PF13408,G3DSA:3.40.50.1390,PF07508,Coil
MKQSNNNKKSRDVTAFLYERLSRDDNMDGESYSIGNQKKLLTKVAKEKGYTNLVHFFDDGISGVTMDRPGFADMIQQLEQGKAAAVFVKDLSRLGRNYIEVGRLTEEFFPNHDIRLVAVSDNIDTDEGENELAPIRNLFNEWYARDISKKRRISNKIKGNAGEPMGQPPYGYVKDPENPKRWIVDEEAAQVVRRIYRMTLEGVGTEQIAAKLEEDGVLTPRAYWHSKGINRPGKVKDLPPTHWNSSSVIKMLSVQEYCGDILNFKTYSKSYKNKKRLENDRENWAIFKDVHEPIIERAVFEQVQQKRGKMRKRQAKDGERSMFSGLLVCADCGSNLHFHFNQGNPEIKYFNCSNYKGNRGTCGSTHYVRVDFLEQVVLGEIRRLTKYAGLYEDDFLKEVIGHSRQAEETERRLKEKELKSLLARDDELDGLFEHIYEDNVSGKLSDDRFAKMSRRYEEEQKELSEKIKKLRSEIEKQSSRATSTDMFVSIVRKYTRARKLTPRMLNELVEKIEVYNAEKIDGEWVQRLRIHYNCVGEMNIPNEPALPIPAVTVNTRKGVFVSYTTDDRPAV

SEQ ID NO: 1307 - protein, 571 aa, Unknown
  Description of Unknown: Integrase B1308 sequence
  PTHR30461:SF3,IPR036162,PS51737,IPR011109,PTHR30461, PS00397,PF00239,G3DSA:1.10.10.2600,IPR006119,SSF53041, SM00857,IPR025827,IPR038109,PS51736,cd03768, IPR006118,PF13408,G3DSA:3.40.50.1390,PF07508,Coil
MMQDRTAPASTNRVAIYIRVSTTHQIDKDSLPMQRQDLIAYAKLMLNTDDYVIFEDAGYSGKNTDRPKFQEMMSQIRQGAFSHLLVWKIDRISRNLLDFATMYKELKDLGVVFVSKNEQFDTSTAMGEAMLKIILVFAELERNMTSERVTATMISRASNGQWNGGRVPYGYNYDYETKDFSINSIEAEIVHLIHDKYEEMRSLVRESRYLNEKGLRTRAGNLWNPVSLHIILHNIFYCGDYRYNVLKEGDRQKVKDESEWITIEDHHEQIISREQKERVIAMLDANKRLDRKRNTYQSEKYVHVFAGLLYCGNCGKPMGATPAAAKKDWRYSKYTCPTRRKLASACDGKFTSDPIVGEFVFNYVLNMLNVQKNFADIHSPEELQVALLIGNTFSYIDHIDEDGLNDLFNMLSSGKIKGTVFGKSAKLKKKKVVSELSKLRNEKQKIERALDRLTKLYLYAEDAMPESEFIIQKSKLTEALDEVNEQIGFSNTDEWNQSVSDEEFVRRASEFIIAQKLTDRNYVSYKRLATSVDTAVIKTFVQSIIDSIIMDAGQVKQIIFKNGLSHTFIFK

SEQ ID NO: 1308 - protein, 571 aa, Unknown
  Description of Unknown: Integrase B1309 sequence
  cd03768,PTHR30461:SF3,SM00857,IPR006118,G3DSA:1.10.10.2600, IPR036162,PS51737,G3DSA:3.40.50.1390,IPR006119,IPR038109, PF07508,IPR011109,SSF53041,PTHR30461,PS00397, PS51736,Coil,PF00239
MDNNSNIRVAIYIRVSTLYQIDKDSLPMQREDLTNYCKYIFNTEDYEIFEDAGYSGKNTGRPAYQEMMLKIRKKQFTHLLVWKIDRISRNLLDFSNMYEELKKYNVTFISKNEQFDTSSAMGEAMLKIILVFAELERKLTSERVSSTMISRATKGLWNGANVPLGYKWNEEKKYPSPDEKEAKVVQYIYSTYIQCKSCAKVSKILNEEDIPTKRGGKWTSKTVNDILRNPFYKGTYRYNYKESARGKKKDESEWIIIDNNHEAIIDKAIWQLANETLDTNAGLVGRRYVGKIHTHIFSRKLVCSKCKSGYNASKDTMRENGYTPSKYVCSGKVRKFICDAKLVSDVVLGPFVLTLIKNIILAGNMCIDTTDELEDILLDGSPFEDVLSINQEDLEMLYVALYKVPTQKSNITYSHIKDKQPKSLEDQENEYVKKRIEKFKKEKTKYINALERLEELYMFSEEGISKVDYVIKKKEYESKLNNSEENLKQFYRMNDTEKNIQDMTFILNYENIIFNRAMNDNNELDFKMLMTNVNNKVVKDLIDMVIKNIYMKDKAVDIIEFQNGLALHFNY

SEQ ID NO: 1309 - protein, 571 aa, Unknown
  Description of Unknown: Integrase B1310 sequence
  PTHR30461:SF3,IPR036162,PS51737,IPR011109,PTHR30461, PS00397,PF00239,G3DSA:1.10.10.2600,IPR006119,SSF53041, SM00857,IPR025827,IPR038109,PS51736,mobidb-lite, cd03768,IPR006118,PF13408,G3DSA:3.40.50.1390,PF07508,Coil
MTAISEKLNSKKVAIYIRVSTRYQVDKDSLQVQRRELIAYSEMILGTSDYVIFEDAGYSAKNTDRPDYQRMMDRLRTGEFSHLLVWKIDRISRNLLDFAEMYSELKKLGIAFVSKNEQFDTSNAVGEAMLKIILVFAELERQMTSERVTAVMLSRANNGQWNGGRIPYGYDYDKKTKQFSVNAKEADIVKKIYLLYDQYRSLIYVCRHLNNLGIKTRAGNEWNVPGVHKILTSPFYIGAYQYNVHNDRKGNKKNKEDEWVTIENHHQPIVSKTDFDRISKALSDNCLGGVSKNKTYLRKNIHTFAGIMRCGICGTSMTASLDSPHADGWSPSIYTCRKRRENTAICSNKMVSDSTFGGVIVNFIANIIRAKDTVTDQTTLSSLENILLKNLSSSGITGIERPGLEALKQAIISGKTGIEYNPPIAESGLSNTSSEKSLLESKHRSKESALSRLKSLYLYSDSGMSEREYASERNKIISELQDIEKRLGEIRSEDQETMISSEDFISRASYFVMVENLIGDSKIDYKKFSQTVDKSIQKSFFTSIIAEIDIVNGKVTSVVFKNAITVRFKYE

SEQ ID NO: 1310 - protein, 571 aa, Unknown
  Description of Unknown: Integrase B1311 sequence
  PTHR30461:SF3,SM00857,G3DSA:1.10.10.2600,IPR036162,PF13408, IPR025827,G3DSA:3.40.50.1390,PS51737,IPR006119,IPR038109, PF07508,SSF53041,IPR011109,PTHR30461,Coil, PS51736,cd00338,PF00239
MRDVKEDTKKIVRILLRVSSDQQLEADGDLSIQRQLVVEEVKKHEEWILDSKEYFEGSNSGYKNSVVDRDVLQEALRDAENKEYDILLAYKDDRLGRRMLEIPMYIMSLKQFGVDVYTVKDGLLTPDIGDVMGMLRLTMQYGMAEKSSSDTGIRVKDTAKKLVQQGKFMGGKAPYGYKLEYSGEYSKHQRALKHLVIVPEHAEVVKYIYKLSLYKEYGSGKIATTLNLDNRYKNLAPNDVWKSGTITSILTNPIYTGYTAYRRREHIGGRYRSLSQEDWIIAEKPNDEITIIDRDMWEKVQISRQKRGRKYQKQSWNEKATVISRNDGQLALIDVAYCGYCGRKLTNGTKYDYWTIKGTGERRSSQKSIYKCQNVWQGVPHEKMKQIRADKIEPIVFKKLSEYVGRLQEDENIFEQILENQSFEKKQQEQILVREKRKLQEIEKDMDILNDAIPKAITGTYPLPLEDLAKNIERQKDKAAKQKAVVDELEINIKNLSVSQEDWENLYHNLPTWQDIFMNADVATKRVLVNKLIERIDITDDTVVIHFKVDLDHFCSQPRETINERVSQSGL

SEQ ID NO: 1311 - protein, 571 aa, Unknown
  Description of Unknown: Integrase B1312 sequence
  PTHR30461:SF3,IPR036162,PS51737,IPR011109,PTHR30461, PS00397,PF00239,G3DSA:1.10.10.2600,IPR006119,SSF53041, SM00857,IPR025827,IPR038109,PS51736,cd03768, IPR006118,PF13408,G3DSA:3.40.50.1390,PF07508,Coil
MMQDRTAPASTNRVAIYIRVSTTHQIDKDSLPMQRQDLIAYAKLMLNTDDYVIFEDAGYSGKNTDRPKFQEMMSQIRQGAFSHLLVWKIDRISRNLLDFATMYKELKDLGVVFVSKNEQFDTSTAMGEAMLKIILVFAELERNMTSERVTATMISRASNGQWNGGRVPYGYNYDYETKDFSINPIEAEIVHLIHDKYEEMRSLVRESRYMNEKGLRTRAGNLWNPVSLHIILHNIFYCGDYRYNVLKEGDRQKVKDESEWITVEDHHESIISREQKERVIAMLDANKRLDRKRNTYQSEKYVHVFAGLLYCGNCGKPMGATPAAAKKDWQYSKYTCPTRRKLASACNGKFTSDPIVGEFVFNYVLNMLNVQKNFADIHSPEELQAALLIGNTFSYIDHIDEDGLNDLFNMLSSGKIKGTVFGKSAKLKKKKVVSELSKLRNEKQKIERALDRLTKLYLYAEDAMPESEFIIQKSKLTEALDEVNEQIGFSNTDEWNQSLSDEEFVRRASEFIIAQKLTDRNYVSYKRLATSVDTAVIKTFVQSIIDSIIMDAGQVKQIIFKNGLSHTFIFK

SEQ ID NO: 1312 - protein, 571 aa, Unknown
  Description of Unknown: Integrase B1313 sequence
  cd00338,SM00857,G3DSA:1.10.10.2600,IPR036162,PF13408, IPR025827,PS51737,G3DSA:3.40.50.1390,IPR006119,IPR038109, PF07508,IPR011109,SSF53041,PTHR30461,PS51736, Coil,PF00239
MTDVKEDTKKIVRILLRVSSDQQLEANGDLSIQRKLVVEEVKKHEEWILDSKEYFEGSNSGYKNSVADRDVLQEALRDAENREYDILLAYKDDRLGRRMLEIPMYIMSLKQFGVDVYTVKDGLLTPDLGDVMGMLKLAMQYGMAEKSSSDTGMRVKDTAKKLVQQGKFMGGKAPYGYKLEYSGEYSKHQRALKHLVIVPEHAEVVKYIYKLSLYKEYGSGKIATTLNLDNRYKNLAPNDVWKSGTITSILTNPIYAGYTAYGRRQHTAGRYRSLSQEDWIIAEKPNDEITIIDRDMWEKVQISRQKRGTKYQKQPWNEKATVISRNDGQLALIDVAYCGYCGRKLTNGTKYDYWTIKGTGERRSSQKSIYKCQNVWQGVPHEKMKQIRADKIEPIVFKKLSEYVGRLQEDENIFEQILENQSFEKSQQEQILVREKRNLQEIEKNIDILNDAIPNAITGTYPLSLEDLAKSIERQKDKASKQKTVVEELETNIKNLSVSQEDWENLYHNLPTWQDIFMNADVATKRVLVNKLIERIDITDDTVVIHFKVDLDHFCPQPRMTNYDGVPEPGL

SEQ ID NO: 1313 - protein, 571 aa, Unknown
  Description of Unknown: Integrase B1314 sequence
  PTHR30461:SF3,IPR036162,PS51737,IPR011109,PTHR30461, PS00397,PF00239,G3DSA:1.10.10.2600,IPR006119,SSF53041, SM00857,IPR025827,IPR038109,PS51736,cd03768, IPR006118,PF13408,G3DSA:3.40.50.1390,PF07508,Coil
MMQDRTAPASTNRVAIYIRVSTTHQIDKDSLPMQRQDLIAYAKLMLNTDDYVIFEDAGYSGKNTDRPKFQEMMSQIRQGAFSHLLVWKIDRISRNLLDFATMYKELKDLGVVFVSKNEQFDTSTAMGEAMLKIILVFAELERNMTSERVTATMISRASNGQWNGGRVPYGYNYDYETKDFSINPIEAEIVRLIHDKYEEMRSLVRESRYLNEKGLRTRAGNLWNPVSLHIILHNIFYCGDYRYNVLKEGDRQKVKDESEWITVEDHHEPIISREQKERVIAMLDANKRLDRKRNTYKSEKYVHVFAGLLYCGNCGKPMGATPAAAKKDWQYSKYTCPTRRKLASACNGKFTSDPIVGEFVFNYVLNMLNVQKNFADIHSPEELQAALLIGNTFSYIDHIDEDGLNDLFNMLSSGKIKGTVFGKSAKLKKKKVVSELSKLRNEKQKIERALDRLTKLYLYAEDAMPESEFIIQKSKLTEALDEVNEQIGFSNTDEWNQSVSDEEFVRRASEFIIAQKLTDRNYVSYKRLATSVDTAVIKTFVQGIIDSIIMDAGQVKQIIFKNGLSHTFIFK

SEQ ID NO: 1314 - protein, 571 aa, Unknown
  Description of Unknown: Integrase B1315 sequence
  PTHR30461:SF3,cd00338,SM00857,G3DSA:1.10.10.2600,IPR036162, PF13408,IPR025827,G3DSA:3.40.50.1390,PS51737,IPR006119, IPR038109,PF07508,IPR011109,SSF53041,PTHR30461, PS51736,Coil,PF00239
MICVDQNGQAVEISVADQMWLDDAYFKEKQMRLEPNAPRAALAYRVSTKGQVDHDDIPMQKIDCRKFAQKQGWRVVKEVAEKGVSGSKVSASKRDAIQQLKEEAANGEFDILLVYMFDRLGRIESETPFVLEWFVQHGIQMWSTHEGQQKIETHGDKLMNYIRFWQAAGESEKTSIRTRDRIRQIVSSGHYTGGFVCYGYQLVDQGRRNKRDKPVMDLVINEEESTWVRELFYKVIQEGASGYALAEMLNNRGLRTRAGAKFQSSNIIRIIRHEGYTGYIITKNARSEYIPELQIIDRETFDKANDIINRRKAKSEQERKIAHTSQNPTLLAGIVYCAHCGAKMSGFMHTDRYKLADGSIREKVQPKYNCFQRGQRNKGGRDCDGQALYLAEKVDAIVLQAVSKIFEQIRDTPYSRMAENRIRQESNLQKSKRASVEKKIKTAQHALERFEGEILKCLDGTSNFTEDMIAKQIRRYQQELDDAKAEYAALQNARLNEAAEIRKLRTYYDEFRGWAEEFDAAPLEIKRMILSQLIERVEVGRKYQVTIKLNMEYQQFLEITEEQKLIPLISA

SEQ ID NO: 1315 - protein, 571 aa, Unknown
  Description of Unknown: Integrase B1316 sequence
  PTHR30461:SF3,IPR036162,PS51737,IPR011109,PTHR30461, PS00397,PF00239,G3DSA:1.10.10.2600,IPR006119,SSF53041, SM00857,IPR025827,IPR038109,PS51736,cd03768, IPR006118,PF13408,G3DSA:3.40.50.1390,PF07508,Coil
MMQDRTAPASTNRVAIYIRVSTTHQIDKDSLPMQRQDLIAYAKLMLNTDDYVIFEDAGYSGKNTDRPKFQEMMSQIRQGAFSHLLVWKIDRISRNLLDFATMYKELKDLGVVFVSKNEQFDTSTAMGEAMLKIILVFAELERNMTSERVTATMISRASNGQWNGGRVPYGYNYDYEAKDFSINPIEAEIVRLIHDKYEEMRSLVRESRYLNEKGLRTRAGNLWNPVSLHIILHNIFYCGDYRYNVLKEGDRQKVKDESEWITVEDHHEPIISREQKERVIAMLDANKRLDRKRNTYQSEKYVHVFAGLLYCGNCGKPMGATPAAAKKDWQYSKYTCPTRRKLSSACNGKFTSDPIVGEFVFNYVLNMLNVQKNFADIHSPEELQAALLIGNTFSYIDHIDEDGLNDLFNMLSSGKIKGTVFGKSAKLKKKKVVSELSKLRNEKQKIERALDRLTKLYLYAEDAMPESEFIIQKSKLTEALDEVNEQIGFSNTDEWNQSVSDEEFVRRASEFIIAQKLTDRNYVSYKRLATSVDTAVIKTFVQGIIDSIIMDAGQVKQIIFKNGLSHTFIFK

SEQ ID NO: 1316 - protein, 571 aa, Unknown
  Description of Unknown: Integrase B1317 sequence
  cd03768,PTHR30461:SF3,SM00857,G3DSA:1.10.10.2600,IPR036162, PF13408,PS51737,G3DSA:3.40.50.1390,IPR025827,IPR006119, IPR038109,PF07508,IPR011109,SSF53041,PTHR30461, PS51736,Coil,PF00239
MKTTDQPQVKQYVIYSRKSKFTGKGESIENQIELCRQYIAMHFGEDEAEHALVYEDEGFSGGNLERPQFKQMMKDSQKIEFAAIVVYRLDRISRNIGDFAKLIEDLGDRHIDFISIREQFDTSSPMGRAMMYIASVFSQLERETIAERIRDNMHELSKTGRWLGGTTPTGYASESLSSVTVDGKVKKACKLKPIPEEIQLVKTIFSVFTESGSLSKTDQYLLEHRCVTKRGKQFTRFAIRGILTNPVYMIADDTAYQYLKENNVDLFAEPSEFDGEHGIMAYNRTLQRPGKATQIRPMEDWIVAVGKHPGIISGANWVRVQSMLDVNKSKSYRRPRSNVALLSGLLRCGECGDYMRPKLTGRTNANGELIYTYMCSTKERSHGAVCSMKNCNGNTLDAKIVEEIRKVATDKKDFGQLLSKTKKVINDNKASYEAELTLLVKNHAETEARIKRLVESLSVASETSAKYVMEQIDELHRQSEQEQTRIAELEKLARQSNALSQNLFFYRDMIESFADTVDSTTIEERRRLLRTIVKKVVWDGKNVYVYLFAEDGELNLPPIGQLMCPSGEDSE

SEQ ID NO: 1317 - protein, 571 aa, Unknown
  Description of Unknown: Integrase B1318 sequence
  SM00857,G3DSA:1.10.10.2600,IPR036162,PF13408,IPR025827, G3DSA:3.40.50.1390,PS51737,IPR006119,IPR038109,PF07508, SSF53041,IPR011109,PTHR30461,Coil,PS51736, cd00338,PF00239
MNIYHARETLRTCSIYDLKLRVAYYARVSTDRAEQQVSISHQTEYFENLIRSNPNWEFVGAYVDDGISGMHAEKREDFQNMLRDAKAGKIDMIITKEISRFARNTLDSIKYTRELLSCGVCVWFQNDGINTIDEDSELRLTIMAGVAQDELRKLSSRVKFGHARSIQNGVVLGNRIYGYKKKDGKLTVIPEEAEMVRMIFRDYAAGVSTPKIEKKLWDMGYRNSKGSKIDRNVIRHIIKNPKYKGYFCGGKVKIVDMFTKKQEFIPESEWIMFKDDGSRVPQIIDEETWEKANQYMTMRGDAIKTRRTSFKSENLFTGMIFCSNDNAPYWLKQHYIRGKEDVRWVCSHKIKNGAASCNSFGIKESELKIMVSDLINESSCNIEEVIKKYLELLRRAIDNKPDSKAEIDRLQKQIESINKKKEKILEYNLDGNISDEEFIQRNKGYNEQIQKLNSQISDLTPNQDDFVSAEMQFKNIIDTLKKFNGVESEDINRQIVEELFEKIVVKSFEGNKATLTFYLKTGEVKKKQVSMSCSEYMLFNIIPERHKRFYRKTCISGASEIAFNYEYRMVI

SEQ ID NO: 1318 - protein, 571 aa, Unknown
  Description of Unknown: Integrase B1319 sequence
  cd03768,PTHR30461:SF3,SM00857,G3DSA:1.10.10.2600,IPR036162, PF13408,PS51737,G3DSA:3.40.50.1390,IPR025827,IPR006119, IPR038109,PF07508,IPR011109,SSF53041,PTHR30461, PS51736,Coil,PF00239
MLKIAIYSRKSKFTGKGDSIENQIEMCKDYTLSTISKDVEFTVYEDEGFSGGNLDRPNFKKLMSAIKNKKFNILVCYRLDRISRNVADFSSTLEILQSNNCSFISIKEQFDTSSPMGRAMIYIASVFAQLERETIAERVKDNMLEIAKNGKWTGGKIPLGFTSDKIEYIDEKGITRTSPQLIINEKEMKFVNFLYNKYLELGSLHKLEVYIHENNIRSRNDILYEKSSLKTILQNPIYVKANDDVVEYLNNSNWTVYGKPDNIHSLLTYNKTEQTKKDGKYTKVKKDLSERLAAVSSIKGYIEPELWLSVQKQFDKNKNTFPRLGKTHNALLVGKIRCGKCKEYMLISHGRISKTTGEKLFYYTCSLKKKSRKKLCDNGNAKAADLEKLVLLSLKQLSINKKDFLSKIRDKYKTDETYKNLDLDKLSLNKSLKEKKLQIDNLVTKLSLCNDIEDILLNKIKDLKDECTNIEKSLTELNSKTLTLKNNLLNLDLIESLLTKCSIIDKLDKSEQKLIIDNLIDTVYWYSDGPGKGKIKIKFVGTDDNQKEISFSIKEMQQLMLHFYSHSMSSI

SEQ ID NO: 1319 - protein, 571 aa, Unknown
  Description of Unknown: Integrase B1320 sequence
  PTHR30461:SF3,IPR036162,PS51737,IPR011109,PTHR30461, PS00397,PF00239,G3DSA:1.10.10.2600,IPR006119,SSF53041, SM00857,IPR025827,IPR038109,PS51736,cd03768, IPR006118,PF13408,G3DSA:3.40.50.1390,PF07508,Coil
MMQDRTAPASTNRVAIYIRVSTTHQIDKDSLPMQRQDLIAYAKLMLNTDDYVIFEDAGYSGKNTDRPKFQEMMSQIRQGAFSHLLVWKIDRISRNLLDFATMYKELKDLGVVFVSKNEQFDTSTAMGEAMLKIILVFAELERNMTSERVTATMISRASNGQWNGGRVPYGYNYDYETKDFSTNPIEAEIVHLIHDKYEEMRSLVRESRYLNEKGLRTRAGNLWNPVSLHIILHNIFYCGDYRYNVLKEGDRQKVKDESEWITVENHHEPIISREQKERVIAMLDANKRLDRKRNTYQSEKYVHVFAGLLYCGNCGKPMGATPAAAKKDWQYSKYTCPTRRKLASACNGKFTSDPIVGEFVFNYVLNMLNVQKNFADIHSPEELQAALLIGNTFSYIDHIDEDGLNDLFNMLSSGKIKGTVFGKSAKPKKKKVVSELSKLRNEKQKIERALDRLTKLYLYAEDAMPESEFIIQKSKLTEALDEVNEQIGFSNTDEWNQSVSDEEFVRRASEFIIAQKLTDRNYVSYKRLATSVDTAVIKTFVQSIIDSIIMDAGQVKQIIFKNGLSHTFIFK

SEQ ID NO: 1320 - protein, 571 aa, Unknown
  Description of Unknown: Integrase B1321 sequence
  PTHR30461:SF3,IPR036162,PS51737,IPR011109,PTHR30461, PS00397,PF00239,G3DSA:1.10.10.2600,IPR006119,SSF53041, cd00338,SM00857,IPR025827,IPR038109,PS51736, IPR006118,PF13408,G3DSA:3.40.50.1390,PF07508,Coil
MSIRDKLSALKVAIYIRVSTHWQVDKDSLKVQERELIAYCQMVLGINDYVVFTDPGYSAKNTDRPDYQAMMDRIRTGEFSHLLVWKIDRISRNIIDFATMSEELKHLGVAFVSKNEQFDTSTAMGEAMLQIIMVFAQFERKQTSERVTAVMLSRAGNGQWNGGRVPYGYLWDKETASFQLCETEAGYVRRMAQLYEEHQSLLHVVKWLNDAGVKTRRGFAWTPTSVHVILTNPWYIGQYVYNVHSDGKGVERRDESEWVCVEHHHEPILSEDQFYRIKFLLTRNRRGTPTPGKSYARKHTHIFSGLMRCGICGSNMSASADRRRANGFRPSQYACASRRRKGTTCTNKYISDLTVGSFVLNYAANIIRAARNSAADVQPDVLERKLLRGETFKDVEGINSEAIQQLLSSFAEAGEAVEYRPQYAFTSASGEGRDMDNLRARKRKLETALSRLNALFLYDDEAMPEKDFIVERTNIERQLAETGKRIAELAATGLSSSEDSSDFLKKASYFIMVNKLIEDASVDYEKLVRTLDPTAIRDFVLNIVQEVEATDGRITAITFRNGTAHRFKYKT

SEQ ID NO: 1321 - protein, 570 aa, Unknown
  Description of Unknown: Integrase B1322 sequence
  PTHR30461:SF3,SM00857,G3DSA:1.10.10.2600,IPR036162,PF13408, PS51737,G3DSA:3.40.50.1390,IPR025827,IPR006119,IPR038109, PF07508,IPR011109,SSF53041,PTHR30461,Coil, PS51736,cd00338,PF00239
MNIYYVREKLRNCSIYDIELNVAYYARVSTEKVEQQASIKHQEEHFEELIHSNNRWKFAGSYIDDGISGMHADKREEFQRMLRDAKLGKIDMIITKEISRFARNTLDSIQYTRELLSYGVCVWFQNDGINTIDDDSEFRLTIMAGVAQDEIRKLSSRVKFGHAQSIKNGVVLGHRMYGYSNNQGKLELIPEEADMVRMVFRDYASGMSTPRIEKKLWNMGYRSFKGGKISRDVIKNIIRNPKYKGYYCGGKVKVVDMFTKKQEFLPQSEWIMFKDDGSRVPQIIDETTWEKANAYLRERGEAIKSRRTSFKNENIFTGKLFCANDGAPYWMKQHYIRGKEDVRWVCSYKIKNGAASCDSFGLAESELKEVIADLINESSENIDNILKEYFEILQSTIKNIPDNKSEISRLEKQIETLKQKREKILEYNLDGKISDDEFISRNKEYVKQIKQTESHIRELQNIKSPEPVEIQLSAIKEQLEKFKGVTPKDINRQIVNELFEKITVEPLAATCATLTFQLRSGSLEKWGFPLRCSDDMILTLHSEQHKIFSRKTCIKTQDMVFFKYKYLLAL

SEQ ID NO: 1322 - protein, 570 aa, Unknown
  Description of Unknown: Integrase B1323 sequence
  PTHR30461:SF3,SM00857,G3DSA:1.10.10.2600,IPR036162,PF13408, PS51737,G3DSA:3.40.50.1390,IPR025827,IPR006119,IPR038109, PF07508,IPR011109,SSF53041,PF00239,PTHR30461, PS51736,Coil,cd00338
MNIYYVREKLRSCSIYDIELNVAYYARVSTEKLEQQVSIKHQEEHFEELIHSNNRWRFAGSYIDDGISGMNANKREEFQRMLRDAKLGKIDMIITKEISRFARNTLDSIQYTRELLSYGVCVWFQNDGINTIDEDSELRLTIMAGVAQDEIRKLSSRIKFGHAQSIKNGVVLGHRMYGYSNNQGKLELIPEEADMVRMVFRDYASGMSTPRIEKKLWNMGYRSFKGGKISRDVIKNIIRNPKYKGYYCGGKVKIVDMFTKKQEFLPQSEWVMFKDDGSRVPQIIDETTWEKANAYLRERGEAIKSRRTSFKSENIFTGKLFCANDGAPYWMKQHYIRGKEDVRWVCSYKIKNGAASCNSFGLAESELKEVIAELINKSSENIDSILEEYFEILQSSIKNIPDNKNEISRLEKQIDLLKQKREKILEYNLDGKISDDEFVSRNKEYVKQIKQTESHIRELQNIKSPEPAEIQLSAIKEQLEKFKGVTPQDINRQIVNELFEKITVEPLAVTCATLTFQLRSGSLEKWGFPLRRSDDMILTLHSEQHKIFSRKTCIKTQDMVFFKYKYLLAL

SEQ ID NO: 1323 - protein, 570 aa, Unknown
  Description of Unknown: Integrase B1324 sequence
  PTHR30461:SF3,SM00857,G3DSA:1.10.10.2600,IPR036162,PF13408, PS51737,G3DSA:3.40.50.1390,IPR025827,IPR006119,IPR038109, PF07508,IPR011109,SSF53041,PF00239,PTHR30461, PS51736,Coil,cd00338
MNIYYVREKLRSCSIYDIELNVAYYARVSTEKIEQQASIKHQEEHFEELIHSNNRWKFAGSYIDDGISGIHADKREEFQRMLRDAKLGKIDMIITKEISRFARNTLDSIQYTRELLSYGVCVWFQNDGINTIDDDSEFRLTIMAGVAQDEIRKLSSRVKFGHAQSIKNGVVLGHRMYGYSNNQGKLELVPEEADMVRMIFQDYASGISTPRIEKKLWDMGYRSFKGGKINRDVIKNIIRNPKYKGYYCGGKVKVVDMFTKKQEFLPQSEWIMFKDDGSRVPQIIDETTWEKANAYLRERGEAIKSRRTSFKNENIFTGKLFCANDGAPYWMKQHYTRGKEDVRWVCSYKIKNGAASCDSFGLAESELKEIIAELINKSSENIDSILEEYFEILQSSIKNIPDNKNEISRLEKQIDLLKQKREKILEYNLDGKISDDEFISRNKEYVKQIKQIESHILEIQNTKSPEPVEIQLSAIKEQLEKFKGVTPQDINRQIVNELFEKITVEPLAVTCATLTFQLRSGSLEKWGFPLRRSDDMILTLHSEQHKIFSRKTCIKTQDMVFFKYKYLLAL

SEQ ID NO: 1324 - protein, 570 aa, Unknown
  Description of Unknown: Integrase B1325 sequence
  PTHR30461:SF3,SM00857,G3DSA:1.10.10.2600,IPR036162,PF13408, PS51737,G3DSA:3.40.50.1390,IPR025827,IPR006119,IPR038109, PF07508,IPR011109,SSF53041,PF00239,PTHR30461, PS51736,Coil,cd00338
MNIYYVREKLRSCSIYDIELNVAYYARVSTEKLEQQASIKHQEEHFEELIHSNSKWKFAGSYIDDGISGMHADKREEFQRMLRDAKLGKIDMIITKEISRFARNTLDSIQYTRELLSYGVCVWFQNDGINTIDDDSEFRLTIMAGVAQDEIRKLSSRVKFGHAQSIKNGVVLGHRMYGYSNNQGKLELIPEEADMVRMIFQDYASGISTPRIEKKLWNMGYRNFKGGKINRDVIKNIIRNPKYKGYYCGGKVKVIDMFTKKQEFLPQSEWVMFKDDGSRVPQIIDETTWEKANAYLRERGEAIKSRRTSFKNENIFTGKLFCANDGAPYWMKQHYIRGKEDVRWVCSYKIKNGAASCNSFGLAESELKEVIAELINKSSENIDSILEEYFEILQSSIKNIPDNKNEISRLEKQIDMLKQKREKILEYNLDGKISDDEFISRNKEYVKQIKQTENYIQELQNIKSPEPVETQLSAIKEQLEKFKGVTPQDINRQIVNELFEKITVEPLAVTCATLTFQLRSGSLEKWGFPLRRSDDMILTLHSEQHKIFSRKTCIKTQHMVFYKYKYLLAL

SEQ ID NO: 1325 - protein, 570 aa, Unknown
  Description of Unknown: Integrase B1326 sequence
  PTHR30461:SF3,SM00857,G3DSA:1.10.10.2600,IPR036162,PF13408, PS51737,G3DSA:3.40.50.1390,IPR025827,IPR006119,IPR038109, PF07508,IPR011109,SSF53041,PF00239,PTHR30461, PS51736,Coil,cd00338
MNIYYVREKLRSCSIYDIELNVAYYARVSTEKLEQQVSIKHQEEHFEELIHSNNRWRFAGSYIDDGISGMNANKREEFQRMLRDAKLGKIDMIITKEISRFARNTLDSIQYTRELLSYGVCVWFQNDGINTIDEDSELRLTIMAGVAQDEIRKLSSRIKFGHAQSIKNGVVLGHRMYGYSNNQGKLELIPEEADMVRMVFRDYASGMSTPRIEKKLWNMGYRSFKGGKISRDVIKNIIRNPKYKGYYCGGKVKIVDMFTKKQEFLPQSEWVMFKDDGSRVPQIIDETTWEKANAYLRERGEAIKSRRTSFKSENIFTGKLFCANDGAPYWMKQHYIRGKEDVRWVCSYKIKNGAASCNSFGLAESELKEVIAELINKSSENIDSILEEYFEILQSSIKNIPDNKNEISRLEKQIDLLKQKREKILEYNLDGKISDDEFVSRNKEYVKQIKQTESHIRELQNIKSPEPAEIQLSAIKEQLEKFKGVTPQDINRQIVNELFEKITVEPLAVTCATLTFQLRSGSLEKWGFPLRRSDDMIFTLHPEQHKVFSRKTCIKTQDMVFYKYKYLLAL

SEQ ID NO: 1326 - protein, 570 aa, Unknown
  Description of Unknown: Integrase B1327 sequence
  PTHR30461:SF3,SM00857,G3DSA:1.10.10.2600,IPR036162,PF13408, IPR025827,G3DSA:3.40.50.1390,PS51737,IPR006119,IPR038109, PF07508,IPR011109,SSF53041,PTHR30461,Coil, PS51736,cd00338,PF00239
MNIYYVREKLRNCSIYDIELNVAYYARVSTEKVEQQASIKHQEEHFEELIHSNNRWKFAGSYIDDGISGMHADKREEFQRMLRDAKLGKIDMIITKEISRFARNTLDSIQYTRELLSYGVCVWFQNDGINTIDDDSEFRLTIMAGVAQDEIRKLSSRVKFGHAQSIKNGVVLGHRMYGYSNNQGKLELVPEEADMVRMIFQDYASGISTPRIEKKLWDMGYRSFKGGKINRDVIKNIIRNPKYKGYYCGGKVKVVDMFTKKQEFLPQSEWIMFKDDGSRVPQIIDETTWEKANAYLRERGEAIKSRRTSFKNENIFTGKLFCANDGAPYWMKQHYIRGKEDVRWVCSYKIKNGAASCTSFGLAESELKEVIADLINKSSENIDSILEEYFEILQSSIKNIPDNKNEISRLEKQIDLLKQKREKILEYNLDGKISDDEFISRNKEYVKQIKQIESHILEIQNTKSPEPVEIQLSAIKEQLEKFKGVTPQDINRQIVNELFEKITVEPLAVTCATLTFQLRSGSLEKWGFPLRRSDDMILTLHPEQHKIFSRKTCIKTQDMVFFKYKYLLAL

SEQ ID NO: 1327 - protein, 570 aa, Unknown
  Description of Unknown: Integrase B1328 sequence
  PTHR30461:SF3,SM00857,G3DSA:1.10.10.2600,IPR036162,PF13408, PS51737,G3DSA:3.40.50.1390,IPR025827,IPR006119,IPR038109, PF07508,IPR011109,SSF53041,PF00239,PTHR30461, PS51736,Coil,cd00338
MNIYYVREKLRSCSIYDIELNVAYYARVSTEKVEQQASIKHQEEHFEELIRSNNRWKFAGSYIDDGISGMHADKREEFQRMLKDAKLGKIDMIITKEISRFARNTLDSIQYTRELLSYGVCVWFQNDGINTIDDDSEFRLTIMAGVAQDEIRKLSSRVKFGHAQSIKNGVVLGHRMYGYSNNKGKLELIPEEADMIRIIFQDYASGISTPRIEKKLWDMGYRSFKGGKINRDVIKNIIRNPKYKGYYCGGKVKVVDMFTKKQEFLPQSEWIMFKDDGSRVPQIIDETTWEKANAYLRERGEAIKSRKTSFKSENIFTGKLFCANDGAPYWMKQHYIRGKEDVRWVCSYKIKNGAASCDSFGLAESELKEVIAELINKSSENIDSILEEYFEILQSLIKNIPDNKNEISRLEKQIDLLKQKREKILEYNLDGKISDDEFISRNKEYMKQIKQIESHILEIQNTKSPEPVEIQLSAIKEQLEKFKGVTPKDINRQIVNELFEKITVEPLAATCATLTFQLRSGNLEKRGFPLRCSDDMIFTLHSEQHKIFSRKTCIKTQDMVFFKYKYLLAL

SEQ ID NO: 1328 - protein, 570 aa, Unknown
  Description of Unknown: Integrase B1329 sequence
  PTHR30461:SF3,SM00857,G3DSA:1.10.10.2600,IPR036162,PF13408, PS51737,G3DSA:3.40.50.1390,IPR025827,IPR006119,IPR038109, PF07508,IPR011109,SSF53041,PF00239,PTHR30461, PS51736,Coil,cd00338
MNIYYVREKLRNCSIYDIELNVAYYARVSTEKVEQQASIKHQEEHFEELIHSNNRWKFAGSYIDDGISGMHADKREEFQRMLRDAKLGKIDMIITKEISRFARNTLDSIQYTRELLSYGVCVWFQNDGINTIDDDSEFRLTIMAGVAQDEIRKLSSRVKFGHAQSIKNGVVLGHRMYGYSNNQGKLELIPEEADMVRMIFQDYASGISTPRIEKKLWDMGYRSFKGGKINRDVIKNIIRNPKYKGYYCGGKVKVVDMFTKKQEFLPQSEWIMFKDDGSRVPQIIDETTWEKANAYLRERGEAIKSRRTSFKNENIFTGKLFCANDGAPYWMKQHYIRGKEDVRWVCSYKIKNGAASCDSFGLAESELKEVIADLINESSENIDNILKEYFEILQSTIKNIPDNKSEISRLEKQIETLKQKREKILEYNLDGKISDDEFISRNKEYVKQIKQTESHIRELQNIKSPEPVEIQLSAIKEQLEKFKGVTPKDINRQIVNELFEKITVEPLAATCATLTFQLRSGSLEKWGFPLRCSDDMILTLHPEQHKIFSRKTCIKTQHMVFYKYKYLLAL

SEQ ID NO: 1329 - protein, 570 aa, Unknown
  Description of Unknown: Integrase B1330 sequence
  PTHR30461:SF3,SM00857,G3DSA:1.10.10.2600,IPR036162,PF13408, IPR025827,G3DSA:3.40.50.1390,PS51737,IPR006119,IPR038109, PF07508,SSF53041,IPR011109,PTHR30461,Coil, PS51736,cd00338,PF00239
MNIYYVREKLRSCSIYDIELNVAYYARVSTEKIEQQASIKHQEEHFEELIHSNNRWKFAGSYIDDGISGMHADKREEFQRMLRDAKLGKIDMIITKEISRFARNTLDSIQYTRELLSYGVCVWFQNDGINTIDEDSELRLTIMAGVAQDEIRKLSSRIKFGHAQSIKNGVVLGHRMYGYSNHQGKLELIPEEADMVRMVFRDYASGMSTPRIEKKLWNMGYRSFKGGKISRDVIKNIIRNPKYKGYYCGGKVKIVDMFTKKQEFLPQSEWVMFKDDGSRVPQIIDEITWEKANAYLRERGEAIKSRKTSFKSENIFTGKLFCANDGAPYWMKQHYIRGKEDVRWVCSYKIKNGAASCDSFGLAESELKEVIAELINKSSENIDSILEEYFEILQSSIKNIPDNKNEISRLEKQIDLLKQKREKILEYNLDGKISDDEFISRNKEYVKQIKQIESHILEIQNTKSPEPVEIQLSAIKEKLEKFKGVNPKDINRQIVNELFEKITVEPLAATCATLTFQLRSGNLEKWGFPLRCSDDMIFTLHSEQHKIFSRKTCIKTQDMVFFKYKYLLAL

SEQ ID NO: 1330 - protein, 570 aa, Unknown
  Description of Unknown: Integrase B1331 sequence
  PTHR30461:SF3,SM00857,G3DSA:1.10.10.2600,IPR036162,PF13408, PS51737,G3DSA:3.40.50.1390,IPR025827,IPR006119,IPR038109, PF07508,IPR011109,SSF53041,PTHR30461,Coil, PS51736,cd00338,PF00239
MNIYYVREKLRSCSIYDIELNVAYYARVSTEKVEQQASIKHQEEHFEELIHSNNRWKFAGSYIDDGISGMHADKREEFQRMLRDAKLGKIDMIITKEISRFARNTLDSIQYTRELLSYGVCVWFQNDGINTIDDDSEFRLTIMAGVAQDEIRKLSSRVKFGHAQSIKNGVVLGHRMYGYSNNQGKLELIQEEADMVRMIFQDYASGISTPRIEKKLWNMGYRNFKGGKINRDVIKNIIRNPKYKGYYCGGKVKVIDMFTKKQEFLPQSEWVMFKDDGSRVPQIIDENTWEKANAYLRERGEAIKSRRTSFKNENIFTGKLFCANDGAPYWMKQHYIRGKEDVRWVCSYKIKNGAASCNSFGLAESELKEVIAELINKSSENIDSILEEYFEILQSSIKNIPDNKNEISRLEKQIDMLKQKREKILEYNLDGKISDDEFISRNKEYVKQIKQTENHIRELQNTKSPEPVETQLSAIKEQLEKFKGVTPQDINRQIVNELFEKITVEPLAVTCATLTFKLRSGSLEKWRFPLRRSDDMILTLHPEQHKIFSRKTCIKTQHMVFYKYKYLLAL

SEQ ID NO: 1331 - protein, 570 aa, Unknown
  Description of Unknown: Integrase B1332 sequence
  PTHR30461:SF3,SM00857,G3DSA:1.10.10.2600,IPR036162,PF13408, IPR025827,G3DSA:3.40.50.1390,PS51737,IPR006119,IPR038109, PF07508,IPR011109,SSF53041,PTHR30461,Coil, PS51736,cd00338,PF00239
MNIYYVREKLRNCSIYDIELNVAYYARVSTEKVEQQASIKHQEEHFEELIHSNNRWKFAGSYIDDGISGIHADKREEFQKMLRDAKLGKIDMIITKEISRFARNTLDSIQYTRELLSYGVCVWFQNDGINTIDEDSELRLTIMAGVAQDEIRKLSSRIKFGHAQSIKNGVVLGHRMYGYSNHQGKLELIPEEADMVRMVFRDYASGMSTPRIEKKLWNMGYRSFKGGKISRDVIKNIIRNPKYKGYYCGGKVKVVDMFTKKQEFLPQSEWIMFKDDGSRVPQIIDETTWEKANAYLRERGEAIKSRRTSFKNENIFTGKLFCANDGAPYWMKQHYIRGKEDVRWVCSYKIKNGADSCDSFGLAESELKEVIAELINKSSENIDSILEEYFEILQSSIKNIPDNKNEISRLEKQIDLLKQKREKILEYNLDGKISDDEFISRNKEYVKQIKQIESHILEIQNTKSPEPVEIQLSAIKEQLEKFKGVNPKDINRQIVNELFEKITVEPLAATCATLTFQLRSGSIEKWGFPLRRSDDMILTLNSEQHKIFSRKTCIKTQDMVFFKYKYLLAL

SEQ ID NO: 1332 - protein, 570 aa, Unknown
  Description of Unknown: Integrase B1333 sequence
  PTHR30461:SF3,SM00857,G3DSA:1.10.10.2600,IPR036162,PF13408, PS51737,G3DSA:3.40.50.1390,IPR025827,IPR006119,IPR038109, PF07508,SSF53041,IPR011109,PF00239,PTHR30461, PS51736,Coil,cd00338
MNIYYVREKLRNCSIYDIELNVAYYARVSTEKVEQQASIKHQEEHFEELIHSNNRWKFAGSYIDDGISGMHADKREEFQRMLRDAKLGKIDMIITKEISRFARNTLDSIQYTRELLSYGVCVWFQNDGINTIDDDSEFRLTIMAGVAQDEIRKLSSRVKFGHAQSIKNGVVLGHRMYGYSNNQGKLELIPEEADMVRMIFEDYASGISTPRIEKKLWDMGYRSLKGGKINRDVIKNIIRNPKYKGYYCGGKVKVVDMFTKKQEFLPQSEWIMFKDDGSRVPQIIDETTWEKANAYLRERGEAIKSRRTSFKNENIFTGKLFCANDGAPYWMKQHYIRGKEDVRWVCSYKIKNGAASCDSFGLAESELKEVIADLINESSENIDNILKEYFEILQSTIKNIPDNKSEISRLEKQIETLKQKREKILEYNLDGKISDDEFISRNKEYVKQIKQTESHIRELQNIKSPEPVEIQLSAIKEQLEKFKGVTPKDINRQIVNELFEKITVEPLAATCATLTFQLRSGSLEKWGFPLRCSDDMIFTLHSEQHKIFSRKTCIKTQDMVFFKYKYLLAL

SEQ ID NO: 1333 - protein, 570 aa, Unknown
  Description of Unknown: Integrase B1334 sequence
  PTHR30461:SF3,SM00857,G3DSA:1.10.10.2600,IPR036162,PF13408, PS51737,G3DSA:3.40.50.1390,IPR025827,IPR006119,IPR038109, PF07508,IPR011109,SSF53041,PF00239,PTHR30461, PS51736,Coil,cd00338
MNIYYVREKLRNCSIYDIELNVAYYARVSTEKVEQQASIKHQEEHFEELIHSNNRWKFAGSYIDDGISGMHADKREEFQRMLRDAKLGKIDMIITKEISRFARNTLDSIQYTRELLSYGVCVWFQNDGINTIDDDSEFRLTIMAGVAQDEIRKLSSRVKFGHAQSIKNGVVLGHRMYGYSNNQGKLELIPEEADMVRMVFRDYASGMSTPRIEKKLWNMGYRSFKGGKISRDVIKNIIRNPKYKGYYCGGKVKVVDMFTKKQEFLPQSEWIMFKDDGSRVPQIIDETTWEKANAYLRERGEAIKSRRTSFKNENIFTGKLFCANDGAPYWMKQHYIRGKEDVRWVCSYKIKNGAASCTSFGLAESELKEVIADLINKSSENIDSILEEYFEILQSSIKNIPDNKNEISRLEKQIDLLKQKREKILEYNLDGKISDDEFISRNKEYVKQIKQIESHILEIQNTKSPEPVEIQLSAIKEQLEKFKGVTPQDINRQIVNELFEKITVEPLAVTCATLTFQLRSGSLEKWGFPLRRSDDMILTLHPEQHKIFSRKTCIKTQDMVFYKYKYLLAL

SEQ ID NO: 1334 - protein, 570 aa, Unknown
  Description of Unknown: Integrase B1335 sequence
  PTHR30461:SF3,cd00338,SM00857,G3DSA:1.10.10.2600,IPR036162, PF13408,IPR025827,G3DSA:3.40.50.1390,PS51737,IPR006119, IPR038109,PF07508,SSF53041,IPR011109,PTHR30461, PS51736,Coil,PF00239
MICVDQNGQAVEISVADQMWLDDAYFKEKQLRLGTDAPRAALAYRVSTKGQVDHDDIPMQKIDCRKFAQKQGWRVVKEVAEKGVSGSKVSASKRDAIQQLKEEAANGEFDILLVYMFDRLGRIESETPFVLEWFVQHGIEMWSTHEGQQKIETHGDKLMNYIRFWQAAGESEKTSIRTRDRIRQIVSSGHYTGGFVCYGYQLVDQGRRNKRDKPVMDLVINEEEATWVRELFYKVIQEGTSGYALAEMLNNRGLRTRAGAKFQSSNILRIIRHEGYTGYIITKNARSEYIPELQIIDQETFEKANDIISRRSAKTAQDRRIAHTSQNPTLLAGIVYCAHCGAKMSGFMHTDRYKLADGSIREKVQPKYNCFQRGQRNKGGRDCDGQALYLAERVDAIVLKIVEEVFEQIRDTPYSQVAENRIRQESNLQKTKRAAAEKKIKAAQHALERFEGEILKCLDGTSNFTEDMIAKQIRRYQQELDDAKAEYAELQNARLNEAAEIRKLRTYYDDFKGWAEEFDTAPLEMKRMILSHLIDRVEVGRKYQVIVKFNMKYRQFLECTAETYNTEIGA

SEQ ID NO: 1335 - protein, 570 aa, Unknown
  Description of Unknown: Integrase B1336 sequence
  PTHR30461:SF3,IPR036162,PS51737,IPR011109,PTHR30461, PS00397,PF00239,G3DSA:1.10.10.2600,IPR006119,SSF53041, SM00857,IPR025827,IPR038109,PS51736,cd03768, IPR006118,PF13408,G3DSA:3.40.50.1390,PF07508,Coil
MTNNAASARVAIYVRVSTLYQVDKDSLPMQKQDLLSYAKLMLNTEDCMIFEDAGYSGKNMDRPKFQEMMSQIRTGTFTHLLVWKIDRISRNLLDFASMYAELKELGVTFVSKSEQFDTSTAMGEAMLKIILVFAELERNMTSERVTATMISRAHNRLWNGGRIPYGYNYDPQTREFSFNETEMPLVIMIHDMYEQQRSLVRVARELNEKGYRSRAGNYWSPVSLRLILKNLFYCGDYVYNKQREGNRQKVKDESEWVITKEHHPAMISRDQKEHVIKILNSNSKLCRERDIYSAPDHVHVFGGLLVCSSCGKTFNSSPGSITRDKWHYSKYGCSTRRKSTTLCKSKGTSDPIVGEFTFNYILNMLNAQANFASINSPADLQKRLLIGDTFSYIDHIEADGLNDLYNILNSGKITGAVWGNNVKAPTKKVAVESELTKIKAEKQKTERALERLRNLYLYVDDAMSDAEYIIQRNKLTETLDNLNEQIGLLNTDTWEQSVSDEEFIQRASEFIVAQKLTGRKYVSYKRLAKSVDAAVLRDFVLSIIDRMTVTDGKISSIVFRNGLCHNFVFK

SEQ ID NO: 1336 - protein, 570 aa, Unknown
  Description of Unknown: Integrase B1337 sequence
  PTHR30461:SF3,SM00857,G3DSA:1.10.10.2600,IPR036162,PF13408, IPR025827,G3DSA:3.40.50.1390,PS51737,IPR006119,IPR038109, PF07508,IPR011109,SSF53041,PF00239,PTHR30461, PS51736,Coil,cd00338
MNIYYVREKLRSCSIYDIELNVAYYARVSTEKLEQQASIKHQEEHFEELIHSNSKWKFAGSYIDDGISGMHADKREEFQRMLRDAKLGKIDMIITKEISRFARNTLDSIQYTRELLSYGVCVWFQNDGINTIDDDSEFRLTIMAGVAQDEIRKLSSRVKFGHAQSIKNGVVLGHRMYGYSNNQGKLELIPEEADMVRMIFQDYASGISTPRIEKKLWNMGYRNFKGGKINRDVIKNIIRNPKYKGYYCGGKVKVIDMFTKKQEFLPQSEWVMFKDDGSRVPQIIDENTWEKANAYLRERGEAIKSRRTSFKNENIFTGKLFCANDGAPYWMKQHYIRGKEDVRWVCSYKIKNGAASCDSFGLAESELKEVIAELINKSSENIDAILEEYFEILQSSIKNIPDNKNEISRLEKQIDMLKQKREKILEYNLDRKISDDEFISRNKEYVKQIKQTENHIRELQNTKSPEPVETQLSAIKEQLEKFKGVTPQDINRQIVNELFEKITVEPLAVTCATLTFHLRSGSLEKWGFPLRRSDDMIFTLHPEQHKIFSRKTCIKTQHMVFYKYKYLLAL

SEQ ID NO: 1337 - protein, 570 aa, Unknown
  Description of Unknown: Integrase B1338 sequence
  PTHR30461:SF3,SM00857,G3DSA:1.10.10.2600,IPR036162,PF13408, PS51737,IPR025827,G3DSA:3.40.50.1390,IPR006119,IPR038109, PF07508,IPR011109,SSF53041,PTHR30461,Coil, PS51736,cd00338,PF00239
MNIYYVREKLRNCSIYDIELNVAYYARVSTEKVEQQASIKHQEEHFEELIHSNNRWKFAGSYIDDGISGIHADKREEFQRMLRDAKLGKIDMIITKEISRFARNTLDSIQYTRELLSYGVCVWFQNDGINTIDDDSEFRLTIMAGVAQDEIRKLSSRVKFGHAQSIKNGVVLGHRMYGYSNNQGKLELVPEESDMVRMIFQDYASGISTPRIEKKLWDMGYRSFKGGKINRDVIKNIIRNPKYKGYYCGGKVKVVDMFTKKQEFLPQSEWIMFKDDGSRVPQIIDETTWEKANAYLRERGEAIKSRRTSFKNENIFTGKLFCANDGAPYWMKQHYIRGKEDVRWVCSYKIKNGAASCDSFGLAESELKEIIAELINKSSENIDSILEEYFEILQSSIKNIPDNKNEISRLEKQIDLLKQKREKILEYNLDGKISDDEFISRNKEYVKQIKQIESHILEIQNTKSPEPVEIQLSAIKEQLEKFKGVNPKDINRQIVNELFEKITVEPLAATCATLTFQLRSGSIEKWGFPLRRSDDMILTLHPEQHKIFSRKTCIKTQDMVFFKYKYLLAL

SEQ ID NO: 1338 - protein, 570 aa, Unknown
  Description of Unknown: Integrase B1339 sequence
  PTHR30461:SF3,SM00857,G3DSA:1.10.10.2600,IPR036162,PF13408, IPR025827,G3DSA:3.40.50.1390,PS51737,IPR006119,IPR038109, PF07508,IPR011109,SSF53041,PTHR30461,Coil, PS51736,cd00338,PF00239
MNIYYVREKLRSCSIYDIELNVAYYARVSTEKIEQQASIKHQEEHFEELIHSNNRWKFAGSYIDDGISGMHADKREEFQRMLRDAKLGKIDMIITKEISRFARNTLDSIQYTRELLSYGVCVWFQNDGINTIDEDSELRLTIMAGVAQDEIRKLSSRIKFGHAQSIKNGVVLGHRMYGYSNHQGKLELIPEEADMVRMVFRDYASGMSTPRIEKKLWDMGYRSFKGGKINRDVIKNIIRNPKYKGYYCGGKVKVVDMFTKKQEFLPQSEWIMFKDDGSRVPQIIDETTWEKANAYLRERGEAIKSRKTSFKSENIFTGKLFCANDGAPYWMKQHYIRGKEDVRWVCSYKIKNGAASCDSFGLAESELKEIIAELINKSSENIDSILEEYFEILQSSIKNIPDNKNEISRLEKQIDLLKQKREKILEYNLDGKISDDEFISRNKEYVKQIKQIESHILEIQNTKSPEPVEIQLSAIKEQLEKFKGVTPQDINRQIVNELFEKITVEPLAVTCATLTFQLRSGGLEKWGFPLCRSDDMILTLHSEQHKIFSRKTCIKTQDMVFFKYKYLLAL

SEQ ID NO: 1339 - protein, 570 aa, Unknown
  Description of Unknown: Integrase B1340 sequence
  PTHR30461:SF3,SM00857,G3DSA:1.10.10.2600,IPR036162,PF13408, IPR025827,G3DSA:3.40.50.1390,PS51737,IPR006119,IPR038109, PF07508,SSF53041,IPR011109,PTHR30461,Coil, PS51736,cd00338,PF00239
MNIYYVREKLRSCSIYDIELNVAYYARVSTEKVEQQASIKHQEEHFEELIHSNNRWKFAGSYIDDGISGMHADKREEFQRMLKDAKLGKIDMIITKEISRFARNTLDSIQYTRELLSYGVCVWFQNDGINTIDEDSELRLTIMAGVAQDEIRKLSSRIKFGHAQSIKNGVVLGHRMYGYSNHQGKLELIPEEADMVRMVFRDYASGISTPRIEKKLWNMGYRSFKGGKISRDVIKNIIRNPKYKGYYCGGKVKIVDMFTKKQEFLPQSEWVMFKDDGSRVPQIIDEITWEKANAYLRERGEAIKSRKTSFKSENIFTGKLFCANDGAPYWMKQHYIRGKEDVRWVCSYKIKNGAASCDSFGLAESELKEVIAELINKSSENIDSILEEYFEILQSSIKNIPDNKNEISRLEKQIDLLKQKREKILEYNLDGKISDDEFISRNKEYVKQIKQIESHILEIQNTKSPEPVEIQLSAIKEQLEKFKGVTSKDINRQIVNELFEKITVEPLAATCATLTFQLRSGNLEKWGFPLRCSDDMIFTLHSEQHKIFSRKTCIKTQDMVFFKYKYLLAL

SEQ ID NO: 1340 - protein, 570 aa, Unknown
  Description of Unknown: Integrase B1341 sequence
  PTHR30461:SF3,SM00857,G3DSA:1.10.10.2600,IPR036162,PF13408, IPR025827,G3DSA:3.40.50.1390,PS51737,IPR006119,IPR038109, PF07508,IPR011109,SSF53041,PTHR30461,Coil, PS51736,cd00338,PF00239
MNIYYVREKLRSCSIYDIELNVAYYARVSTEKVEQQASIKHQEEHFEELIHSNNRWKFAGSYIDDGISGMHADKREEFQRMLKDAKLGKIDMIITKEISRFARNTLDSIQYTRELLSYGVCVWFQNDGINTIDEDSELRLTIMAGVAQDEIRKLSSRIKFGHAQSIKNGVVLGHRMYGYSNHQGKLELIPEEADMVRMVFRDYASGISTPRIEKKLWNMGYRSFKGGKISRDVIKNIIRNPKYKGYYCGGKVKIVDMFTKKQEFLPQSEWVMFKDDGSRVPQIIDEITWEKANAYLRERGEAIKSRKTSFKSENIFTGKLFCANDGAPYWMKQHYIRGKEDVRWVCSYKIKNGAASCDSFGLAESELKEVIAELINKSSENIDSILEEYFEILQSSIKNIPDNKNEISRLEKQIDLLKQKREKILEYNLDGKISDDEFISRNKEYVKQIKQIESHILEIQNTKSPEPVEIQLSAIKEQLEKFKGVTPKDINRQIVNELFEKITVEPLAATCATLTFQLRSGNLEKWGFPLRCSDDMILTLHSEQHKIFSRKTFIKTQDMVFFKYKYLLAL

SEQ ID NO: 1341 - protein, 570 aa, Unknown
  Description of Unknown: Integrase B1342 sequence
  PTHR30461:SF3,SM00857,G3DSA:1.10.10.2600,IPR036162,PF13408, IPR025827,G3DSA:3.40.50.1390,PS51737,IPR006119,IPR038109, PF07508,IPR011109,SSF53041,PF00239,PTHR30461, PS51736,Coil,cd00338
MNIYYVREKLRNCSIYDIELNVAYYARVSTEKVEQQASIKHQEEHFEELIHSNNRWKFAGSYIDDGISGMHADKREEFQRMLRDAKLGKIDMIITKEISRFARNTLDSIQYTRELLSYGVCVWFQNDGINTIDDDSEFRLTIMAGVAQDEIRKLSSRVKFGHAQSIKNGVVLGHRMYGYSNNQGKLELIPEEADMVRMIFQDYASGISTPRIEKKLWDMGYRSFKGGKINRDVIKNIIRNPKYKGYYCGGKVKVVDMFTKKQEFLPQSEWIMFKDDGSRVPQIIDETTWEKANAYLRERGEAIKSRRTSFKNENIFTGKLFCANDGAPYWMKQHYIRGKEDVRWVCSYKIKNGAASCDSFGLAESELKEVIADLINESSENIDNILKEYFEILQSTIKNIPDNKSEISRLEKQIETLKQKREKILEYNLDGKISDDEFISRNKEYVKQIKQTESHIRELQNIKSPEPVEIQLSAIKEQLEKFKGVTPKDINRQIVNELFEKITVEPLAATCATLTFQLRSGSLEKWGFPLRCSDDMILTLHSEQHKIFSRKTCIKTQDMVFFKYKYLLAL

SEQ ID NO: 1342 - protein, 570 aa, Unknown
  Description of Unknown: Integrase B1343 sequence
  PTHR30461:SF3,SM00857,G3DSA:1.10.10.2600,IPR036162,PF13408, IPR025827,G3DSA:3.40.50.1390,PS51737,IPR006119,IPR038109, PF07508,SSF53041,IPR011109,PF00239,PTHR30461, PS51736,Coil,cd00338
MNIYYVREKLRNCSIYDIELNVAYYARVSTEKIEQQASIKHQEEHFEELIHSNNRWKFAGSYIDDGISGMHADKREEFQRMLKDAKLGKIDMIITKEISRFARNTLDSIQYTRELLSYGVCVWFQNDGINTIDDDSEFRLTIMAGVAQDEIRKLSSRVKFGHAQSIKNGVVLGHRMYGYSNHQGKLELIPEEADMVRMVFRDYASGMSTPRIEKKLWNMGYRSFKGGKISRDVIKNIIRNPKYKGYYCGGKVKVVDMFTKKQEFLPQSEWIMFKDDGSRVPQIIDETTWEKANAYLRERGEAIKSRRTSFKNENIFTGKLFCANDGAPYWMKQHYIRGKEDVRWVCSYKIKNGAASCDSFGLAESELKEVIADLINESSENIDNILKEYFEILQSTIKNIPDNKSEISRLEKQIETLKQKREKILEYNLDGKISDDEFISRNKEYVKQIKQTESHIRELQNIKSPEPVEIQLSAIKEQLEKFKGVTPKDINRQIVNELFEKITVEPLAATCATLTFQLRSGSLEKWGFPLRCSDDMILTLHPEQHKIFSRKTCIKTQHMVFYKYKYLLAL

SEQ ID NO: 1343 - protein, 570 aa, Unknown
  Description of Unknown: Integrase B1344 sequence
  PTHR30461:SF3,SM00857,G3DSA:1.10.10.2600,IPR036162,PF13408, PS51737,G3DSA:3.40.50.1390,IPR025827,IPR006119,IPR038109, PF07508,IPR011109,SSF53041,PF00239,PTHR30461, PS51736,Coil,cd00338
MKKFPIDLSCLTEEEISQFQEDPYTLYNGDQNVAIYLRYSSTGQSDQSIEGQLRDCRTFCKANHYRIVAIYVDRATTARKDVEKRVHLMEMISDSAKQNWEYVIVWKLDRFARNRNDSAIMKMRLRKNGVKVLSATEHLTDSPESIILESVLEGMAEFFSAELSQKVTRGMRESALKCHSVGGHIPLGYKVENHKLVVDPDTAHIVQEAFSLYANGESVAAICRKFNSAGYKTAKNTEFNRSSFKAMFRNTRYIGTYTYKDIVIENGIPAIIDKELFETVQRRLSKTATAPARGKAKVDYLLSGKLFCGHCGASMNGESGAGRHGKVYHYYSCYTKKRKLGCDKRPLKKDYIEGIVARDALNLLTDQLIDEIADMAIRQSEQDLINDTHIPQLTAQLSEVEKSITNITAAIEKGIASETLMNRLVQLEHEKKTLNKEIKAEEKFVYRIDRDQIVFWLSQFKYGNIEDEDFRRRLIDLLVNSVTVWDEPDGYKITTAYNLTSCKTKTFRVEKNPAAEEATGFDFGESECAKKLVKSLDFTSFFYFLPRLCSPANGAAAQLSDQDPFCRRIP

SEQ ID NO: 1344 - protein, 570 aa, Unknown
  Description of Unknown: Integrase B1345 sequence
  SM00857,G3DSA:1.10.10.2600,IPR036162,PF13408,IPR025827, G3DSA:3.40.50.1390,IPR006119,IPR038109,PF07508,SSF53041, IPR011109,PTHR30461,Coil,cd00338,PF00239
MAYRKITDIKDTIGMRAVFYARVSTAEEEQLNAIELQIEENRGCIKDHGWKLVGEYIDRSKSGTMVKGRDDYQRLYEDLYEDLFDIVVIKDQERLQRNTLDWYLFINRVVQTGKLLFMYMDGKFYSPDDALITGVRAIIAEEFSRNLSKKLHNYHDHRIEKARQGQEIALQGSGNVYGWDKKDGKYYINPEQAKVRRLMCEGIMARKGSTLIAKELNDAGYRNTVGKPWKPMDIPKFVYDCKNVGTMIINKERHDFESKQTIKLPKEEWVYVENALPPIVTQEEWDLICKIHEERVIATGSDRRGKKTSGYSFSGKLVCGICGAPYWRKQRVSKDEYWVCSTKQTKGRRTRKRDSTMGKAGEINPLGCDNENISYNSLMEIMGVVSERLQANTDTIKQDMINWLTKLRKQLIEANGGHTEADLQRELSRKSKLLDAYLDGILNKQEYQTKAEELDERIIQLKAETEKNKANSGDIAEIDKVLANIDEEVSRYVDGNEKLKVEYLLEHLEQVQIFPDKVIVIVPILSEGIVVEKTQYVSRAKRCGQDNFNAYDLRCSKAYFRQYLFERKEH

SEQ ID NO: 1345 - protein, 570 aa, Unknown
  Description of Unknown: Integrase B1346 sequence
  cd03768,SM00857,G3DSA:1.10.10.2600,IPR036162, PF13408,PS51737,SSF109709,G3DSA:3.40.50.1390, IPR025827,IPR006119,IPR038109,PF07508, IPR011109,SSF53041,PTHR30461,PS51736,PF00239
MEEQKQIRCAIYTRKSTDEGLEKEFNTLEAQREAGENFVMSMKHQGWVILPERYDDGGFSGGNLKRPALKRLMADVEKGIVDMIVVYKIDRLTRSLLDFAQLVQTFEKNNCSFVSVTQHFNTCDSMGKLTLNILLSFAQFERELGAERVRDKIAASKKKGMWTGGAIPLGYDVNNKKLVINPAEAETIRFIFEDYKRTRSQIRTVEDLNEKGFKPKTWKTKTGKIVGCEMFNHAMISNILNNPIYIGMVPYKGELYKGQHKAIITQELWDETRKVKKDNIGTAFRPCRSVKNSLLKGLLECSCCGTMTPTRSKRGNKYYEYYTSLKAVKEGANNAHCQIGSIPAGAIDNFVLDKVKKIFQTPELQEELLKEFKRQNEDFNGADVHNIVQDIGQAFQYFEPATVHEFITEVVEKVIVYTDHIIIKLRPMSADLFERGAIEKDSHYNEKLLELSYPIKFGRKRGCVQIVEPNQPSGETCERDMKLYNAVTQAFYYKQVMDDQKISLSELSKREKLDRGYMGQILRLTTLAPDIIMAIIEGRQPKLLTARRLIRDHFPYSWEDQRRELGFNPA

SEQ ID NO: 1346 - protein, 570 aa, Unknown
  Description of Unknown: Integrase B1347 sequence
  SM00857,G3DSA:1.10.10.2600,IPR036162,PF13408,IPR025827, G3DSA:3.40.50.1390,PS51737,IPR006119,IPR038109,PF07508, SSF53041,IPR011109,PTHR30461,Coil,cd00338, PF00239
MAYRKITDIRDTIGMRAVFYARVSTAEEEQLNAIELQIEENRGCIKDHGWKLVGEYIDRSKSGTMVKGRDDYQRLYEDLYEDLFDIVVIKDQERLQRNTLDWYLFINRVVQTGKLLFMYMDGKFYSPDDALITGVRAIIAEEFSRNLSKKLHNYHDHRIEKARQGQEIALQGSGNVYGWDKKDGKYYINPEQAKVRRLMCEGIMARKGSTLIAKELNDAGYRNTVGKPWKPMDIPKFVYDCKNVGTMIINKERHDFESKQTIKLPKEEWVYVENALPPIVTQEEWDLICKIHEERVIATGSDRRGKKTSGYSFSGKLVCGICGAPYWRKQRVSKDEYWVCSTKQTKGRRTRKRDSTMGKAGEINPLGCDNENISYNSLMEIMGVVSERLQANTDTIKHDMINWLTKLRKQLLEANGGHTEADLQRELSRKSKLLDAYLDGILNKQEYQKKAEELDERIIQLKAETEKNKANSGDIAEIDKVLANIDEEVSRYVDGNEKLKVEYLLEHLEQVQIFPDKVIVIVPILSEGIVVEKAQYVSREKWLWKKYINEYYNGQFKSGSGMRLLRWRSD

SEQ ID NO: 1347 - protein, 570 aa, Unknown
  Description of Unknown: Integrase B1348 sequence
  PTHR30461:SF3,IPR036162,PS51737,IPR011109,PTHR30461, PF00239,G3DSA:1.10.10.2600,IPR006119,SSF53041,cd00338, SM00857,IPR025827,IPR038109,mobidb-lite,PS51736, PF13408,G3DSA:3.40.50.1390,PF07508,Coil
MAQVEIIAANLKDKNNNITIANKKKRVCAYGRVSTDDEEQITSYNSQIKYYTEKIKSNPDWEFVGIYADEGISGTQVKNRTEFQRMIDDALNGKIDIIMTKSISRFARNVVDTLKTIRELRDKKVDVYFEKENIHTIDLDSEMFLTLYSAFAQAESESTSQNVKLGLKAMMKRGEYVGSPDCYGYDWNKETKQLEINEEQAEVVRMIFNWYIEGLGCRRIANKLEEMKIPNYTGTRWSTSSISNMIHQEKYVGDLLQNKSYTVSPITHKCVRNKGEREKYYVKDHHEPIITREVWDKVQEISKKRYEGITFSKSNYKSRETRKYAFSGKIKCAFCGTNFCRRQSSYSKKHPTYNYYWTCFKKREHSDACPDSVGISETKLEETFVMIYNDIIKNKHKTKQALIKAIKDVLSDNDYQDKLNNLLKEKETIEQRLSKIIDMELDNDIDRKEMFIQKERELLNQLNDIKSKITEYEKILDENKGLSKQIKEIDEYFDNYPSTLKKFNREAFENMIECIIVGDYDENGNKLPRVARFVLKTGKEYKFEISKNSSNDKGNSDKNNEVSLCTRNMT

SEQ ID NO: 1348 - protein, 570 aa, Unknown
  Description of Unknown: Integrase B1349 sequence
  PTHR30461:SF3,SM00857,G3DSA:1.10.10.2600,IPR036162,PF13408, IPR025827,G3DSA:3.40.50.1390,PS51737,IPR006119,IPR038109, PF07508,IPR011109,SSF53041,PF00239,PTHR30461, PS51736,Coil,cd00338
MNIYYVREKLRSCSIYDIELNVAYYARVSTEKVEQQASIKHQEEHFEELIHSNNRWKFAGSYIDDGISGMHADKREEFQRMLRDAKLGKIDMIITKEISRFARNTLDSIQYTRELLSYGVCVWFQNDGINTIDEDSELRLTIMAGVAQDEIRKLSSRIKFGHAQSIKNGVVLGHRMYGYSNHQGKLELIPEEADMVRMVFRDYASGMSTPRIEKKLWNMGYRSFKGGKISRDVIKNIIRNPKYKGYYCGGKVKIVDMFTKKQEFLPQSEWIMFKDDGSRVPQIIDETTWEKANAYLRERGEAIKSRRTSFKNENIFTGKLFCANDGAPYWMKQHYIRGKEDVRWVCSYKIKNGADSCDSFGLAESELKEVIAELINKSSENIDSILEEYFEILQSSIKNIPDNKNEISRLEKQIDLLKQKREKILEYNLDGKISDDEFISRNKEYVKQIKQIESHILEIQNTKSPEPVEIQLSAIKEQLEKFKGVNPKDINRQIVNELFEKITVEPLAATCATLTFQLRSGSIEKWGFPLRRSDDMILTLHSEQHKIFSRKTCIKTQDMVFFKYKYLLAL

SEQ ID NO: 1349 - protein, 570 aa, Unknown
  Description of Unknown: Integrase B1350 sequence
  PTHR30461:SF3,SM00857,G3DSA:1.10.10.2600,IPR036162,PF13408, IPR025827,G3DSA:3.40.50.1390,PS51737,IPR006119,IPR038109, PF07508,SSF53041,IPR011109,PF00239,PTHR30461, PS51736,Coil,cd00338
MNIYYVREKLRSCSIYDIELNVAYYARVSTEKVEQQASIKHQEEHFEELIHSNNRWKFAGSYIDDGISGMHADKREEFQRMLRDAKLGKIDMIITKEISRFARNTLDSIQYTRELLSYGVCVWFQNDGINTIDDDSEFRLTIMAGVAQDEIRKLSSRVKFGHAQSIKNGVVLGHRMYGYSNNQGKLELIPEEADMVRMIFRDYASGMSTPRIEKKLWNMGYRSFKGGKISRDVIKNIIRNPKYKGYYCGGKVKVVDMFTKKQEFLPQSEWIMFKDDGSRVPQIIDETTWEKANAYLRERGEAIKSRRTSFKSENIFTGKLFCANDGAPYWMKQHYIRGKEDVRWVCSYKIKNGAASCNSFGLAESELKEVIADLINKSSENIDNILKEYFEILQSTIKNIPDNKSEISRLEKQIDTLKQKREKILEYNLDGKISDDEFVSRNKEYMKQIKQTENRIRELQNVKVKEPEDAQLKAIKEQLEKFKGVTPQDINRQIVNELFEKITVEPLAVTCATLTFQLRSGSLEKWGFPLRRSDDMILTLHPEQHKIFSRKTCIKTQDMVFFKYKYFLAL

SEQ ID NO: 1350 - protein, 570 aa, Unknown
  Description of Unknown: Integrase B1351 sequence
  PTHR30461:SF3,SM00857,G3DSA:1.10.10.2600,IPR036162,PF13408, PS51737,IPR025827,G3DSA:3.40.50.1390,IPR006119,IPR038109, PF07508,IPR011109,SSF53041,PTHR30461,Coil, PS51736,cd00338,PF00239
MNIYYVREKLRNCSIYDIELNVAYYARVSTEKVEQQASIKHQEEHFEELIHSNNRWKFAGSYIDDGISGIHADKREEFQRMLRDAKLGKIDMIITKEISRFARNTLDSIQYTRELLSYGVCVWFQNDGINTIDDDSEFRLTIMAGVAQDEIRKLSSRVKFGHAQSIKNGVVLGHRMYGYSNNQGKLELVPEESDMVRMIFQDYASGISTPRIEKKLWDMGYRSFKGGKINRDVIKNIIRNPKYKGYYCGGKVKVVDMFTKKQEFLPQSEWIMFKDDGSRVPQIIDETTWEKANAYLRERGEAIKSRRTSFKNENIFTGKLFCANDGAPYWMKQHYIRGKEDVRWVCSYKIKNGAASCDSFGLAESELKEIIAELINKSSENIDSILEEYFEILQSSIKNIPDNKNEISRLEKQIDLLKQKREKILEYNLDGKISDNEFISRNKEYVKQIKQIESHILEIQNTKSPEPVEIQLSAIKEQLEKFKGVNPKDINRQIVNELFEKITVEPLAATCATLTFQLRSGSIEKWGFPLRRSDDMILTLHPEQHKIFSRKTCIKTQDMVFFKYKYLLAL

SEQ ID NO: 1351 - protein, 570 aa, Unknown
  Description of Unknown: Integrase B1352 sequence
  PTHR30461:SF3,SM00857,G3DSA:1.10.10.2600,IPR036162,PF13408, IPR025827,G3DSA:3.40.50.1390,PS51737,IPR006119,IPR038109, PF07508,SSF53041,IPR011109,PTHR30461,Coil, PS51736,cd00338,PF00239
MNIYYVREKLRSCSIYDIELNVAYYARVSTEKVEQQASIKHQEEHFEELIHSNNRWKFAGSYIDDGISGMHADKREEFQRMLKDAKLGKIDMIITKEISRFARNTLDSIQYTRELLSYGVCVWFQNDGINTIDEDSELRLTIMAGVAQDEIRKLSSRIKFGHAQSIKNGVVLGHRMYGYSNHQGKLELIPEEADMVRMVFRDYASGISTPRIEKKLWNMGYRSFKGGKISRDVIKNIIRNPKYKGYYCGGKVKIVDMFTKKQEFLPQSEWVMFKDDGSRVPQIIDEITWEKANAYLRERGEAIKSRKTSFKSENIFTGKLFCANDGAPYWMKQHYIRGKEDVRWVCSYKIKNGAASCDSFGLAESELKEVIAELINKSSENIDSILEEYFEILQSSIKNIPDNKNEISRLEKQIDLLKQKREKILEYNLDGKISDDEFISRNKEYVKQIKQIESHILEIQNTKSPEPVEIQLSAIKEQLEKFKGVTPKDINRQIVNELFEKITVEPLAATCATLTFQLRSGNLEKWGFPLRCSDDMIFTLHSEQHKIFSRKTCIKTQDMVFFKYKYLLAL

SEQ ID NO: 1352 - protein, 570 aa, Unknown
  Description of Unknown: Integrase B1353 sequence
  PTHR30461:SF3,SM00857,G3DSA:1.10.10.2600,IPR036162,PF13408, PS51737,G3DSA:3.40.50.1390,IPR025827,IPR006119,IPR038109, PF07508,IPR011109,SSF53041,PF00239,PTHR30461, PS51736,Coil,cd00338
MKKFPIDLSCLTEEEISQFQEDPYTLYNGDQNVAIYLRYSSTGQSDQSIEGQLRDCRTFCKANHYRIVAIYVDRATTARKDVEKRVHLMEMISDSAKQNWEYVIVWKLDRFARNRNDSAIMKMRLRKNGVKVLSATEHLTDSPESIILESVLEGMAEFFSAELSQKVTRGMRESALKCHSVGGHIPLGYKVENHKLVVDPDTAHIVQEAFSLYANGESVAAICRKFNSAGYKTAKNTEFNRSSFKAMFRNTRYIGTYTYKDIVIENGIPAIIDKELFETVQRRLSKTATAPARGKAKVDYLLSGKLFCGHCGASMNGESGAGRHGKVYHYYSCYTKKRKLGCDKRPLKKDYIEGIVARDALNLLTDQLIDEIADMAIRQSEQDLINDTHIPQLTAQLSEVEKSITNITAAIEKGIASETLMNRLVQLEHEKKTLNKEIKAEEKFVYRIDRDQIVFWLSQFKYGNIEDENFRRRLIDLLVNSVTVWDEPDGYKITTAYNLTSCKTKTFRVEKNPAAEEATGFDFGESECAKKLVKSKDFTSFFYFLPRLCSPANGAAAQLSDQDPFCRRIP

SEQ ID NO: 1353 - protein, 570 aa, Unknown
  Description of Unknown: Integrase B1354 sequence
  PTHR30461:SF3,SM00857,G3DSA:1.10.10.2600,IPR036162,PF13408, IPR025827,G3DSA:3.40.50.1390,PS51737,IPR006119,IPR038109, PF07508,IPR011109,SSF53041,PTHR30461,Coil, PS51736,cd00338,PF00239
MNIYYVREKLRSCSIYDIELNVAYYARVSTEKVEQQASIKHQEEHFEELIHSNNRWKFAGSYIDDGISGMHADKREEFQRMLKDAKLGKIDMIITKEISRFARNTLDSIQYTRELLSYGVCVWFQNDGINTIDEDSELRLTIMAGVAQDEIRKLSSRIKFGHAQSIKNGVVLGHRMYGYSNHQGKLELIPEEADMVRMVFRDYASGISTPRIEKKLWNMGYRSFKGGKISRDVIKNIIRNPKYKGYYCGGKVKIVDMFTKKQEFLPQSEWVMFKDDGSRVPQIIDEITWEKANAYLRERGEAIKSRKTSFKSENIFTGKLFCANDGAPYWMKQHYIRGKEDVRWVCSYKIKNGAASCDSFGLAESELKEVIAELINKSSENIDSILEEYFEILQSSIKNIPDNKNEISRLEKQIDLLKQKREKILEYNLDGKISDDEFISRNKEYVKQIKQIESHILEIQNTKSPEPVEIQLSAIKEKLEKFKGVNPKDINRQIVNELFEKITVEPLAATCATLTFQLRSGNLEKWGFPLRCSDDMILTLHSEQHKIFSRKTCIKTQDMVFFKYKYLLAL

SEQ ID NO: 1354 - protein, 570 aa, Unknown
  Description of Unknown: Integrase B1355 sequence
  PTHR30461:SF3,SM00857,G3DSA:1.10.10.2600,IPR036162,PF13408, IPR025827,G3DSA:3.40.50.1390,PS51737,IPR006119,IPR038109, PF07508,SSF53041,IPR011109,PF00239,PTHR30461, PS51736,Coil,cd00338
MNIYYVREKLRSCSIYDIELNVAYYARVSTEKVEQQASIKHQEEHFEELIRSNNRWKFAGSYIDDGISGMHADKREEFQRMLKDAKLGKIDMIITKEISRFARNTLDSIQYTRELLSYGVCVWFQNDGINTIDDDSEFRLTIMAGVAQDEIRKLSSRVKFGHAQSIKNGVVLGHRMYGYSNNQGKLELVPEEADMVRMIFQDYASGISTPRIEKKLWDMGYRSFKGGKINRDVIKNIIRNPKYKGYYCGGKVKVVDMFTKKQEFLPQSEWIMFKDDGSRVPQIIDETTWEKANAYLRERGEAIKSRRTSFKNENIFTGKLFCANDGAPYWMKQHYIRGKEDVRWVCSYKIKNGADSCDSFGLAESELKEVIAELINKSSENIDRILEEYFEILQSLIKNIPDNKNEISRLEKQIDLLKQKREKILEYNLDGKISDDEFISRNKEYMKQIKQIESHILEIQNTKSPEPVEIQLSAIKEQLEKFKGVTPKDINRQIVNELFEKITVEPLAVTCATLTFQLRSGGLEKWGFPLCRSDDMILTLHSEQHKIFSRKTCIKTQDMVFFKYKYLLAL

SEQ ID NO: 1355 - protein, 570 aa, Unknown
  Description of Unknown: Integrase B1356 sequence
  SM00857,G3DSA:1.10.10.2600,IPR036162,PF13408,IPR025827, G3DSA:3.40.50.1390,PS51737,IPR006119,IPR038109,PF07508, IPR011109,SSF53041,PTHR30461,Coil,PS51736, cd00338,PF00239
MFLTLEQYIESIQAINTSGEKDKKIEALLEYYEKYNKRIKAAPGMFYAVIYARYSSHGQREESIEGQVREALEYAARNNMIVIGVYIDKALTGKTDTRDGFQRMIKDAAKKKWQYVICWKLDRFARNRYDSARYKAKLKEYNIRVVSAREYIPDGPEGILLEGALESQAEFYSASLRENVKRGMTDNALECISNGGNIPFGFKTEKKRYVLDTEKAPVVKRIYQMYNTGSTIQELVKYLDGLGIRSTKGNKITINGINSILRNPKYMGVYKYKDTYVEGAIPQIVEKELFEAVQKKLNDRASKKRLKKNDVEFLLTTKLYCGKCGMGMTGMSGTGKLGAKYYYYSCVGRRRDHNCDKDNVGKDWIENIVISETVNTVLNDDVIKRIADGVIDFQRREQNNQVLSGLKNRLVEVEKSIENIIRAIEQGIITPSTKSRMETLEAEKVAIEHGITEESLKNPIVTREQVIFFLEKFKGGDIADQEYRRKLVDTFVNSVYVYDDHILISYNFTSSGDRTKLEEISKGYEKAEETANTSRFSHFFMGSPLLPNGPPKRHSPIGGCLFLAASRIPC

SEQ ID NO: 1356 - protein, 570 aa, Unknown
  Description of Unknown: Integrase B1357 sequence
  PTHR30461:SF3,SM00857,G3DSA:1.10.10.2600,IPR036162,PF13408, PS51737,G3DSA:3.40.50.1390,IPR025827,IPR006119,IPR038109, PF07508,IPR011109,SSF53041,PTHR30461,Coil, PS51736,cd00338,PF00239
MNIYYVREKLRSCSIYDIELNVAYYARVSTEKIEQQASIKHQEEHFEELIHSNNRWKFAGSYIDDGISGIHADKREEFQRMLRDAKLGKIDMIITKEISRFARNTLDSIQYTRELLSYGVCVWFQNDGINTIDDDSEFRLTIMAGVAQDEIRKLSSRVKFGHAQSIKNGVVLGHRMYGYSNNQGKLEMVPEEADMVRMIFQDYASGISTPRIEKKLWDMGYRSFKGGKINRDVIKNIIRNPKYKGYYCGGKVKVVDMFTKKQEFLPQSEWIMFKDDGSRVPQIIDETTWEKANAYLRERGEAIKSRRTSFKNENIFTGKLFCANDGAPYWMKQHYTRGKEDVRWVCSYKIKNGAASCDSFGLAESELKEIIAELINKSSENIDSILEEYFEILQSSIKNIPDNKNEISRLEKQIDLLKQKREKILEYNLDGKISDDEFISRNKEYVKQIKQIESHILEIQNTKSPEPVEIQLSAIKEQLEKFKGVTPQDINRQIVNELFEKITVEPLAVTCATLTFQLRSGSLEKWGFPLRRSDDMILTLHSEQHKIFSRKTCIKTQDMVFFKYKYLLAL

SEQ ID NO: 1357 - protein, 570 aa, Unknown
  Description of Unknown: Integrase B1358 sequence
  PTHR30461:SF3,SM00857,G3DSA:1.10.10.2600,IPR036162,PF13408, IPR025827,G3DSA:3.40.50.1390,PS51737,IPR006119,IPR038109, PF07508,IPR011109,SSF53041,PF00239,PTHR30461, PS51736,Coil,cd00338
MNIYYVREKLRNCSIYDIELNVAYYARVSTEKVEQQASIKHQEEHFEDLIHSNNRWKFAGSYIDDGISGIHADKREEFQRMLRDAKLGKIDMIITKEISRFARNTLDSIQYTRELLSYGVCVWFQNDGINTIDDDSEFRLTIMAGGAQDEIRKLSSRVKFGHAQSIKNGVVLGHRMYGYSNNQGKLELVPEEADMVRMIFQDYASGISTPRIEKKLWDMGYRSFKGGKINRDVIKNIIRNPKYKGYYCGGKVKVVDMFTKKQEFLPQSEWIMFKDDGSRVPQIIDETTWEKANAYLRERGEAIKSRRTSFKNENIFTGKLFCANDGAPYWMKQHYIRGKEDVRWVCSYKIKNGAASCDSFGLAESELKEIIAELINKSSENIDSILEEYFEILQSSIKNIPDNKNEISRLEKQIDLLKQKREKILEYNLDGKISDDEFISRNKEYVKQIKQIESHILEIQNAKSPEPVEIQLSAIKEQLEKFKGVNPKDINRQIVNELFEKITVEPLAVTCATLTFQLRSGSLEKWGFPLRCSDDMIFTLHSEQHKIFSRKTCIKTQDMVFFKYKYLLAL

SEQ ID NO: 1358 - protein, 570 aa, Unknown
  Description of Unknown: Integrase B1359 sequence
  PTHR30461:SF3,SM00857,G3DSA:1.10.10.2600,IPR036162,PF13408, IPR025827,PS51737,G3DSA:3.40.50.1390,IPR006119,IPR038109, PF07508,IPR011109,SSF53041,PTHR30461,Coil, PS51736,cd00338,PF00239
MNIYYVREKLRSCSIYDIELNVAYYARVSTEKLEQQVSIKHQEEHFEELIHSNNRWRFAGSYIDDGISGMNANKREEFQRMLRDAKLGKIDMIITKEISRFARNTLDSIQYTRELLSYGVCVWFQNDGINTIDEDSELRLTIMAGVAQDEIRKLSSRIKFGHAQSIKNGVVLGHRMYGYSNNQGKLELIPEEADMVRMVFRDYASGMSTPRIEKKLWNMGYRSFKGGKISRDVIKNIIRNPKYKGYYCGGKVKIVDMFTKKQEFLPQSEWVMFKDDGSRVPQIIDETTWEKANAYLRERGEAIKSRRTSFKSENIFTGKLFCANDGAPYWMKQHYIRGKEDVRWVCSYKIKNGAASCNSFGLAESELKEVIAELINKSSENIDSILEEYFEILQSSIKNIPDNKNEISRLEKQIDLLKQKREKILEYNLDGKISDDEFVSRNKEYVKQIKQTESHIRELQNIKSPEPAEIQLSAIKEQLEKFKGVTPQDINRQIVNELFEKITVEPLAVTCATLTFQLRSGSLEKWGFPLRRSDDMIFTLHSEQHKIFSRKTCIKTQDMVFFKYKYLLAL

SEQ ID NO: 1359 - protein, 570 aa, Unknown
  Description of Unknown: Integrase B1360 sequence
  PTHR30461:SF3,SM00857,G3DSA:1.10.10.2600,IPR036162,PF13408, IPR025827,G3DSA:3.40.50.1390,PS51737,IPR006119,IPR038109, PF07508,IPR011109,SSF53041,PF00239,PTHR30461, PS51736,Coil,cd00338
MNIYYVREKLRNCSIYDIELNVAYYARVSTEKVEQQASIKHQEEHFEDLIHSNNRWKFAGSYIDDGISGIHADKREEFQRMLRDAKLGKIDMIITKEISRFARNTLDSIQYTRELLSYGVCVWFQNDGINTIDDDSEFRLTIMAGVAQDEIRKLSSRVKFGHAQSIKNGVVLGHRMYGYSNNQGKLELVPEEADMVRMIFQDYASGISTPRIEKKLWDMGYRSFKGGKINRDVIKNIIRNPKYKGYYCGGKVKVVDMFTKKQEFLPQSEWIMFKDDGSRVPQIIDEATWEKANAYLRERGEAIKSRRTSFKSENIFTGKLFCANDGAPYWMKQHYIRGKEDVRWVCSYKIKNGAASCNSFGLAESELKEVIAELINKSSENIDSILEEYFEILQSSIKNIPDNKNEISRLEKQIDLLKQKREKILEYNLDGKISDDEFVSRNKEYVKQIKQTESHIRELQNIKSPEPAEIQLSAIKEQLEKFKGVTPQDINRQIVNELFEKITVEPLAVTCATLTFQLRSGSLEKWGFPLRRSDDMIFTLHSEQHKIFSRKTCIKTQDMVFFKYKYLLAL

SEQ ID NO: 1360 - protein, 570 aa, Unknown
  Description of Unknown: Integrase B1361 sequence
  PTHR30461:SF3,cd00338,SM00857,G3DSA:1.10.10.2600,IPR036162, PF13408,PS51737,G3DSA:3.40.50.1390,IPR025827,IPR006119, IPR038109,PF07508,IPR011109,SSF53041,PTHR30461, PS51736,Coil,PF00239
MCAKKKPAMLEPDMQDAVIYTRYSSHNQRDCSIEQQVADCEIFARQNNLRVVKVYADRHLSGTTDNRPQFQQMLKDATHGHWAYVICWKIDRFARNRYDSATYKFRLKKAGVRVLYAKESIPDGPEGILLESVLEGSAEYYSAALAQNIRRGMKYNAEQCKVNSGSIPFGYCKGPDGRFAIHEANAEVVREIFRKAAAGMPFVDIANDLNSRGLKTSRGGRWNKGSFRLLMNEAYIGVYHFSDTRIEGGMPALIDQGTFWAANERLKANSSVRGRHQDGGDYLLTGKLKCAHCGSYMIGFSGTGKNGELHYYYGCQKRRRERACKKANVPREWIERVVVKAALDYVLRPDVMEWIADAVMEYQEREAASAQLAALTAELEENQKATDNVMKAIEAGIITSTTKQRLLDLEAKAQDLKRAIELEKLSHVRLERDQVLFWLDRFRGGSLQSQEFRRKVIDAFVSVVYLSDDHLRIAFNYSGGSNAEADFDLVMDAEAAAGELSKKFAQGHVASTTQEKSEPLSVGKKVRIFSFAVFLTASFSFPVSAARLFSRCRLHIRSGCRLFRQRGGRE

SEQ ID NO: 1361 - protein, 570 aa, Unknown
  Description of Unknown: Integrase B1362 sequence
  PTHR30461:SF3,IPR036162,PS51737,IPR011109,PTHR30461, PS00397,PF00239,G3DSA:1.10.10.2600,IPR006119,SSF53041, SM00857,IPR025827,IPR038109,PS51736,cd03768, IPR006118,PF13408,G3DSA:3.40.50.1390,PF07508,Coil
MQYKESNIRRNNRVAIYVRVSTVYQADKDSLPMQKQELISYAKLMLGTDDVVIFEDAGYSGKNTIRPKFQEMMEKIRVGAFTHLLVWKIDRISRNLLDFAAMYNELKKLGVTFVSKNEQFDTSTAMGEAMLKIILVFAELERNMTAERVTATMISRAGNGLWNGGRVPYGYSYNAEDQTFSLNSNEDNIVHMIHDKYEELRSLIRLARYLNEKGYRTRAGNEWSPVSLLIILRSFFYCGDYQYNRLKEGDRQQPKDKSEWVTVKDHHIAIISRDQKERIIGILDTNSKLCKDHNIYSTTHTHIFAGLLICSSCGKTMGASPAAAKKDWQYSKYICSTRRSSVACAGKATSDPIIGEFVFNYILNMLNAQNNFKRISSPAELQDMLLLGNTFCNVDHIESDGLNDLYNVLVSGNIEGEVYGKDTKIKDQAPAISDLSRLRSEKQRLERAMDRLTNLYLYSDDAMSEREYIIQKTKLADSISEIDDQIGFATSGGWQQSISDELFIQRASQFIISQKLSGRNYVSYKRLAISTDAKVLQSFVRSIIDSITMDSGRVKQIIFKNGLSHIFVYK

SEQ ID NO: 1362 - protein, 570 aa, Unknown
  Description of Unknown: Integrase B1363 sequence
  PTHR30461:SF3,SM00857,G3DSA:1.10.10.2600,IPR036162,PF13408, IPR025827,G3DSA:3.40.50.1390,PS51737,IPR006119,IPR038109, PF07508,SSF53041,IPR011109,PTHR30461,Coil, PS51736,cd00338,PF00239
MNIYYVREKLRSCSIYDIELNVAYYARVSTEKVEQQASIKHQEEHFEELIHSNNRWKFAGSYIDDGISGMHADKREEFQRMLKDAKLGKIDMIITKEISRFARNTLDSIQYTRELLSYGVCVWFQNDGINTIDDDSEFRLTIMAGVAQDEIRKLSSRVKFGHAQSIKNGVVLGHRMYGYSNNKGKLELIPEEADMIRIIFQDYASGISTPRIEKKLWNMGYRSFKGGKISRDVIKNIIRNPKYKGYYCGGKVKIVDMFTKKQEFLPQSEWVMFKDDGSRVPQIIDEITWEKANAYLKERGEAIKSRRTSFKNENIFTGKLFCANDGAPYWMKQHYIRGKEDVRWVCSYKIKNGAASCNSFGLAESELKEIIAELINKSSENIDSILEEYFEILQSSIKNIPDNKNEISRLEKQIDLLKQKREKILEYNLDGKISDDEFISRNKEYVKQIKQIESHILEIQNTKSPEPVEIQLSAIKEKLEKFKGVNPKDINRQIVNELFEKITVEPLAATCATLTFQLRSGNLEKWGFPLRCSDDMILTLHSEQHKIFSRKTCIKTQNMVFFKYKYLLAL

SEQ ID NO: 1363 - protein, 570 aa, Unknown
  Description of Unknown: Integrase B1364 sequence
  PTHR30461:SF3,SM00857,G3DSA:1.10.10.2600,IPR036162,PF13408, PS51737,G3DSA:3.40.50.1390,IPR025827,IPR006119,IPR038109, PF07508,IPR011109,SSF53041,PTHR30461,Coil, PS51736,cd00338,PF00239
MNIYYVREKLRNCSIYDIELNVAYYARVSTEKVEQQASIKHQEEHFEELIHSNNRWKFAGSYIDDGISGIHADKREEFQRMLRDAKLGKIDMIITKEISRFARNTLDSIQYTRKLLSYGVCVWFQNDGINTIDDDSEFRLTIMAGVAQDEIRKLSSRVKFGHAQSIKNGVVLGHRMYGYSNNQGKLELIPEEADMVRMVFRDYASGMSTPRIEKKLWNMGYRSFKGGKISRDVIKNIIRNPKYKGYYCGGKVKVVDMFTKKQEFLPQSEWIMFKDDGSRVPQIIDETTWEKANAYLRERGEAIKSRRTSFKNENIFTGKLFCANDGAPYWMKQHYIRGKEDVRWVCSYKIKNGAASCTSFGLAESELKEVIADLINKSSENIDSILEEYFEILQSSIKNIPDNKNEISRLEKQIDLLKQKREKILEYNLDGKISDDEFISRNKEYVKQIKQIESHILEIQNTKSPEPVEIQLSAIKEQLEKFKGVTPQDINRQIVNELFEKITVEPLAVTCATLTFQLRSGSLEKWGFPLRRSDDMILTLHSEQHKIFSRKTCIKTQDMVFFKYKYLLAL

SEQ ID NO: 1364 - protein, 570 aa, Unknown
  Description of Unknown: Integrase B1365 sequence
  PTHR30461:SF3,SM00857,G3DSA:1.10.10.2600,IPR036162,PF13408, IPR025827,G3DSA:3.40.50.1390,PS51737,IPR006119,IPR038109, PF07508,IPR011109,SSF53041,PF00239,PTHR30461, PS51736,Coil,cd00338
MNIYYVREKLRSCSIYDIELNVAYYARVSTEKVEQQASIKHQEEHFEELIHSNNRWKFAGSYIDDGISGMHADKREEFQRMLRDAKLGKIDMIITKEISRFARNTLDSIQYTRELLSYGVCVWFQNDGINTIDEDSELRLTIMAGVAQDEIRKLSSRIKFGHAQSIKNGVVLGHRMYGYSNHQGKLELIPEEADMVRMVFRDYASGMSTPRIEKKLWNMGYRSFKGGKISRDVIKNIIRNPKYKGYYCGGKVKVVDMFTKKQEFLPQSEWIMFKDDGSRVPQIIDETTWEKANAYLRERGEAIKSRRTSFKNENIFTGKLFCANDGAPYWMKQHYIRGKEDVRWVCSYKIKNGADSCDSFGLAESELKEVIAELINKSSENIDSILEEYFEILQSSIKNIPDNKNEISRLEKQIDLLKQKREKILEYNLDGKISDDEFISRNKEYVKQIKQIESHILEIQNTKSPEPVEIQLSAIKEQLEKFKGVNPKDINRQIVNELFEKITVEPLAATCATLTFQLRSGSIEKWGFPLRRSDDMILTLHSEQHKIFSRKTCIKTQDMVFFKYKYLLAL

SEQ ID NO: 1365 - protein, 570 aa, Unknown
  Description of Unknown: Integrase B1366 sequence
  PTHR30461:SF3,SM00857,G3DSA:1.10.10.2600,IPR036162,PF13408, PS51737,IPR025827,G3DSA:3.40.50.1390,IPR006119,IPR038109, PF07508,IPR011109,SSF53041,PTHR30461,Coil, PS51736,cd00338,PF00239
MNIYYVREKLRNCSIYDIELNVAYYARVSTEKVEQQASIKHQEEHFEELIHSNNRWKFAGSYIDDGISGIHADKREEFQRMLRDAKLGKIDMIITKEISRFARNTLDSIQYTRELLSYGVCVWFQNDGINTIDDDSEFRLTIMAGVAQDEIRKLSSRVKFGHAQSIKNGVVLGHRMYGYSNNQGKLELVPEESDMVRMIFQDYASGISTPRIEKKLWDMGYRSFKGGKINRDVIKNIIRNPKYKGYYCGGKVKVVDMFTKKQEFLPQSEWIMFKDDGSRVPQIIDETTWEKANAYLRERGEAIKSRRTSFKNENIFTGKLFCANDGAPYWMKQHYIRGKEDVRWVCSYKIKNGAASCDSFGLAESELKEIIAELINKSSENIDSILEEYFEILQSSIKNIPDNKSEISRLEKQIDTLKQKREKILEYNLDGKISDDEFISRNKEYVKQIKQIESHILEIQNTKSPEPVEIQLSAIKEQLEKFKGVTPQEINRQIVNELFEKITVEPLAATCATLTFQLRSGSLEKWGFPLRRSDDMILTLHSEQHKIFSRKTCIKTQDMVFFKYKYLLAL

SEQ ID NO: 1366 - protein, 570 aa, Unknown
  Description of Unknown: Integrase B1367 sequence
  PTHR30461:SF3,SM00857,G3DSA:1.10.10.2600,IPR036162,PF13408, IPR025827,G3DSA:3.40.50.1390,PS51737,IPR006119,IPR038109, PF07508,IPR011109,SSF53041,PTHR30461,Coil, PS51736,cd00338,PF00239
MQQALNAVIYARYSSHSQQEQSIEGQLRDCYAYAQREGLQVVGEYIDRAISGKTDERPDFQRMIADASKKQFQRVIVWKLDRFARNRYDSAHYKAKLKKYGVKVVSATENISDEPEGIILEGLLESMAEYYSANLSKHVRRGQRESIINGTYLGGVPPIGYKVENKRLVIDERTAPTIRYMFEQYAKGVPKREIIAELNARGIRNKKGKPLTLSSMQAALRNEKYIGIYRYSGQEVMGGCEALIDEATFRKVQERLDKVKHAPAAAKAKIDYLLQGKAFCGYCGSRMVGESGRGKMGNTYHYYACGKRKKEHTCAKKNEKKDFIEWYVVEQTVEYVLTPDRMDYIAAALVAQYEKDFGDNRIKDYEKQLERINGEIRSLVDTLAVCPPSARQPIFDKMELLDVQKTDLEIDIAKLRVAARVQLTEEQIKVWLKQFCKGDLDDMEFRERIIDVFINSVYLYDDKTVIYYNIEGGKQVSYMEMLDSTEEPPFADDPQGSSGVRISNDTLRQIRTVILIQSVSGLRFLLFGKNGVFAALLHPAAPKENPARLFSWSGFCLCVGFVVLVIVERA

SEQ ID NO: 1367 - protein, 570 aa, Unknown
  Description of Unknown: Integrase B1368 sequence
  PTHR30461:SF3,SM00857,G3DSA:1.10.10.2600,IPR036162,PF13408, IPR025827,G3DSA:3.40.50.1390,PS51737,IPR006119,IPR038109, PF07508,IPR011109,SSF53041,PF00239,PTHR30461, PS51736,Coil,cd00338
MNIYYVREKLRSCSIYDIELNVAYYARVSTEKIEQQASIKHQEEHFEELIHSNNRWKFAGSYIDDGISGMHADKREEFQRMLRDAKLGKIDMIITKEISRFARNTLDSIQYTRELLSYGVCVWFQNDGINTIDEDSELRLTIMAGVAQDEIRKLSSRVKFGHAQSIKNGVVLGHRMYGYSNNQGKLELVPEEADMVRMIFQDYASGISTPRIEKKLWNMGYRSFKGGKISRDVIKNIIRNPKYKGYYCGGKVKIVDMFTKKQEFLPQSEWVMFKDDGSRVPQIIDEITWEKANAYLRERGEAIKSRKTSFKSENIFTGKLFCANDGAPYWMKQHYIRGKEDVRWVCSYKIKNGAASCNSFGLAESELKEIIAELINKSSENIDSILEEYFEILQSSIKNIPDNKNEISRLEKQIDLLKQKREKILEYNLDGKISDDEFVSRNKEYVKQIKQTESHIRELQNTKSPEPVEIQLNAIKEQLKKFKGVTQKDINRQIVNELFEKITVEPLAVTCATLTFQLRSESLEKWGFPLRCSDDMILTLHSEQHKIFSRKTFIKTQDMVFFKYKYLLAL

SEQ ID NO: 1368 - protein, 570 aa, Unknown
  Description of Unknown: Integrase B1369 sequence
  PTHR30461:SF3,SM00857,G3DSA:1.10.10.2600,IPR036162,PF13408, IPR025827,G3DSA:3.40.50.1390,PS51737,IPR006119,IPR038109, PF07508,SSF53041,IPR011109,PTHR30461,Coil, PS51736,cd00338,PF00239
MNIYYVREKLRSCSIYDIELNVAYYARVSTEKIEQQASIKHQEEHFEELIHSNNRWKFAGSYIDDGISGMHADKREEFQRMLRDAKLGKIDMIITKEISRFARNTLDSIQYTRELLSYGVCVWFQNDGINTIDDDSEFRLTIMAGVAQDEIRKLSSRVKFGHAQSIKNGVVLGHRMYGYSNHQGKLELIPEEADMVRMVFRDYASGMSTPRIEKKLWDMGYRSFKGGKINRDVIKNIIRNPKYKGYYCGGKVKVVDMFTKKQEFLPQSEWIMFKDDGSRVPQIIDETTWEKANAYLRERGEAIKSRKTSFKSENIFTGKLFCANDGAPYWMKQHYIRGKEDVRWVCSYKIKNGAASCDSFGLAESELKEVIAELINKSSENIDSILEEYFEILQSSIKNIPDNKNEISRLEKQIDLLKQKREKILEYNLDGKISDDEFISRNKEYVKQIKQIESHILEIQNTKSPEPVEIQLSAIKEKLEKFKGVNPKDINRQIVNELFEKITVEPLAATCATLTFQLRSGNLEKWGFPLRCSDDMIFTLHSEQHKIFSRKTCIKTQDMVFFKYKYLLAL

SEQ ID NO: 1369 - protein, 570 aa, Unknown
  Description of Unknown: Integrase B1370 sequence
  PTHR30461:SF3,SM00857,G3DSA:1.10.10.2600,IPR036162,PF13408, IPR025827,G3DSA:3.40.50.1390,PS51737,IPR006119,IPR038109, PF07508,IPR011109,SSF53041,PF00239,PTHR30461, PS51736,Coil,cd00338
MNIYYVREKLRSCSIYDIELNVAYYARVSTEKLEQQASIKHQEEHFEELIHSNSKWKFAGSYIDDGISGMHADKREEFQRMLRDAKLGKIDMIITKEISRFARNTLDSIQYTRELLSYGVCVWFQNDGINTIDDDSEFRLTIMAGVAQDEIRKLSSRVKFGHAQSIKNGVVLGHRMYGYSNNQGKLELIPEEADMVRMIFQDYASGISTPRIEKKLWNMGYRNFKGGKINRDVIKNIIRNPKYKGYYCGGKVKVIDMFTKKQEFLPQSEWVMFKDDGSRVPQIIDENTWEKANAYLRERGEAIKSRRTSFKNENIFTGKLFCANDGAPYWMKQHYIRGKEDVRWVCSYKIKNGAASCDSFGLAESELKEVIAELINKSSENIDAILEEYFEILQSSIKNIPDNKNEISRLEKQIDMLKQKREKILEYNLDRKISDDEFISRNKEYVKQIKQTENHIRELQNTKSPEPVETQLSAIKEQLEKFKGVTPQDINRQIVNELFEKITVEPLAVTCATLTFHLRSGSLEKWGFPLRRSDDMILTLHPEQHKIFSRKTCIKTQHMVFYKYKYLLAL

SEQ ID NO: 1370 - protein, 570 aa, Unknown
  Description of Unknown: Integrase B1371 sequence
  PTHR30461:SF3,SM00857,G3DSA:1.10.10.2600,IPR036162,PF13408, PS51737,G3DSA:3.40.50.1390,IPR025827,IPR006119,IPR038109, PF07508,IPR011109,SSF53041,PTHR30461,Coil, PS51736,cd00338,PF00239
MNIYYVREKLRNCSIYDIELNVAYYARVSTEKVEQQASIKHQEEHFEELIHSNNRWKFAGSYIDDGISGMHADKREEFQRMLRDAKLGKIDMIITKEISRFARNTLDSIQYTRELLSYGVCVWFQNDGINTIDDDSEFRLTIMAGVAQDEIRKLSSRVKFGHAQSIKNGVVLGHRMYGYSNNQGKLELIPEEADMVRMVFRDYASGMSTPRIEKKLWNMGYRSFKGGKISRDVIKNIIRNPKYKGYYCGGKVKVVDMFTKKQEFLPQSEWIMFKDDGSRVPQIIDETTWEKANAYLRERGEAIKSRRTSFKNENIFTGKLFCANDGAPYWMKQHYIRGKEDVRWVCSYKIKNGAASCDSFGLAESELKEIIAELINKSSENIDSILEEYFEILQSSIKNIPDNKNEISRLEKQIDLLKQKREKILEYNLDGKISDDEFISRNKEYVKQIKQIESHILEIQNTKSPEPVEIQLSAIKEQLEKFKGVTPQDINRQIVNELFEKITVEPLAVTCATLTFQLRSGSLEKWGFPLRRSDDMILTLHSEQHKIFSRKTCIKTQDMVFFKYKYLLAL

SEQ ID NO: 1371 - protein, 570 aa, Unknown
  Description of Unknown: Integrase B1372 sequence
  PTHR30461:SF3,SM00857,G3DSA:1.10.10.2600,IPR036162,PF13408, IPR025827,G3DSA:3.40.50.1390,PS51737,IPR006119,IPR038109, PF07508,IPR011109,SSF53041,PF00239,PTHR30461, PS51736,Coil,cd00338
MNIYYVREKLRSCSIYDIELNVAYYARVSTEKLEQQASIKHQEEHFEELIHSNSKWKFAGSYIDDGISGMHADKREEFQRMLRDAKLGKIDMIITKEISRFARNTLDSIQYTRELLSYGVCVWFQNDGINTIDDDSEFRLTIMAGVAQDEIRKLSSRVKFGHAQSIKNGVVLGHRMYGYSNNQGKLELIPEEADMVRMIFQDYASGISTPRIEKKLWNMGYRNFKGGKINRDVIKNIIRNPKYKGYYCGGKVKVIDMFTKKQEFLPQSEWVMFKDDGSRVPQIIDEITWEKANAYLRERGEAIKSRKTSFKSENIFTGKLFCANDGAPYWMKQHYIRGKEDVRWVCSYKIKNGAASCDSFGLAESELKEVIAELINKSSENIDAILEEYFEILQSSIKNIPDNKNEITRLEKQIDVLKQKREKILEYNLDGKISDDEFISRNKEYVKQIKQTENHIRELQNIKSPEPVEIQLSAIKEQLEKFKGVTPKDINRQIVNELFEKITVEPLAATCATLTFQLRSGSLEKWGFPLRRSDDMILTLNPEQHKIFSRKTCIKTQDMVFFKYKYLLAL

SEQ ID NO: 1372 - protein, 570 aa, Unknown
  Description of Unknown: Integrase B1373 sequence
  PTHR30461:SF3,SM00857,G3DSA:1.10.10.2600,IPR036162,PF13408, PS51737,G3DSA:3.40.50.1390,IPR025827,IPR006119,IPR038109, PF07508,IPR011109,SSF53041,PTHR30461,Coil, PS51736,cd00338,PF00239
MNIYYVREKLRNCSIYDIELNVAYYARVSTEKVEQQASIKHQEEHFEELIHSNNRWKFAGSYIDDGISGMHADKREEFQRMLRDAKLGKIDMIITKEISRFARNTLDSIQYTRELLSYGVCVWFQNDGINTIDDDSEFRLTIMAGVAQDEIRKLSSRVKFGHAQSIKNGVVLGHRMYGYSNNQGKLELIPEEADMVRMVFRDYASGMSTPRIEKKLWNMGYRSFKGGKISRDVIKNIIRNPKYKGYYCGGKVKVVDMFTKKQEFLPQSEWIMFKDDGSRVPQIIDETTWEKANAYLRERGEAIKSRRTSFKNENIFTGKLFCANDGAPYWMKQHYIRGKEDVRWVCSYKIKNGAASCDSFGLAESELKEIIAELINKSSENIDSILEEYFEILQSSIKNIPDNKNEISRLEKQIDLLKQKREKILEYNLDGKISDDEFISRNKEYVKQIKQIESHILEIQNTKSPEPVEIQLSAIKEQLEKFKGVTPQDINRQIVNELFEKITVEPLAVTCATLTFQLRSGSLEKWGFPLRRSDDMIFTLHSEQHKIFSRKTCIKTQDMVFFKYKYLLAL

SEQ ID NO: 1373 - protein, 570 aa, Unknown
  Description of Unknown: Integrase B1374 sequence
  PTHR30461:SF3,SM00857,G3DSA:1.10.10.2600,IPR036162,PF13408, IPR025827,G3DSA:3.40.50.1390,PS51737,IPR006119,IPR038109, PF07508,IPR011109,SSF53041,PF00239,PTHR30461, PS51736,Coil,cd00338
MNIYYVREKLRSCSIYDIELNVAYYARVSTEKVEQQASIKHQEEHFEELIHSNNRWKFAGSYIDDGISGMHADKREEFQRMLRDAKLGKIDMIITKEISRFARNTLDSIQYTRELLSYGVCVWFQNDGINTIDDDSEFRLTIMAGVAQDEIRKLSSRVKFGHAQSIKNGVVLGHRMYGYSNNQGKLELIPEEADMVRMIFQDYASGISTPRIEKKLWNMGYRNFKGGKINRDVIKNIIRNPKYKGYYCGGKVKVIDMFTKKQEFLPQSEWIMFKDDGSRVPQIIDETTWEKANAYLRERGEAIKSRRTSFKNENIFTGKLFCANDGAPYWMKQHYIRGKEDVRWVCSYKIKNGAASCNSFGLAESELKEVIAELINKSSENIDSILEEYFEILQSSIKNIPDNKNEISRLEKQIDLLKQKREKILEYNLDGKISDDEFISRNKEYVKQIKQIESHILEIQNTKSPEPVEIQLSAIKEQLEKFKGVTPQDINRQIVNELFEKITVEPLAVTCATLTFQLRSGSLEKWGFPLRRSDDMILTLHPEQHKIFSRKTCIKTQDMVFFKYKYLLAL

SEQ ID NO: 1374 - protein, 570 aa, Unknown
  Description of Unknown: Integrase B1375 sequence
  PTHR30461:SF3,SM00857,G3DSA:1.10.10.2600,IPR036162,PF13408, PS51737,G3DSA:3.40.50.1390,IPR025827,IPR006119,IPR038109, PF07508,IPR011109,SSF53041,PTHR30461,Coil, PS51736,cd00338,PF00239
MNIYYVREKLRNCSIYDIELNVAYYARVSTEKVEQQASIKHQEEHFEDLIHSNNRWKFAGSYIDDGISGIHADKREEFQRMLRDAKLGKIDMIITKEISRFARNTLDSIQYTRELLSYGVCVWFQNDGINTIDDDSEFRLTIMAGVAQDEIRKLSSRVKFGHAQSIKNGVVLGHRMYGYSNNQGKLELIPEEADMVRMVFRDYASGMSTPRIEKKLWNMGYRSFKGGKISRDVIKNIIRNPKYKGYYCGGKVKVVDMFTKKQEFLPQSEWIMFKDDGSRVPQIIDETTWEKANAYLRERGEAIKSRRTSFKNENIFTGKLFCANDGAPYWMKQHYIRGKEDVRWVCSYKIKNGAASCDSFGLAESELKEIIAELINKSSENIDSILEEYFEILQSSIKNIPDNKNEISRLEKQIDLLKQKREKILEYNLDGKISDDEFISRNKEYVKQIKQIESHILEIQNTKSPEPVEIQLSAIKEQLEKFKGVTPQDINRQIVNELFEKITVEPLAVTCATLTFQLRSGSLEKWGFPLRRSDDMIFTLHSEQHKIFSRKTCIKTQDMVFFKYKYLLAL

SEQ ID NO: 1375 - protein, 570 aa, Unknown
  Description of Unknown: Integrase B1376 sequence
  PTHR30461:SF3,SM00857,G3DSA:1.10.10.2600,IPR036162,PF13408, PS51737,IPR025827,G3DSA:3.40.50.1390,IPR006119,IPR038109, PF07508,SSF53041,IPR011109,PF00239,PTHR30461, PS51736,Coil,cd00338
MNIYYVREKLRSCSIYDIELNVAYYARVSTEKVEQQASIKHQEEHFEELIHSNSKWKFAGSYIDDGISGMHADKREEFQRMLRDAKLGKIDMIITKEISRFARNTLDSIQYTRELLSYGVCVWFQNDGINTIDDDSEFRLTIMAGVAQDEIRKLSSRVKFGHAQSIKNGVVLGHRMYGYSNNQGKLELIPEEADMVRMIFQDYASGISTPRIEKKLWNMGYRNFKGGKINRDVIKNIIRNPKYKGYYCGGKVKVIDMFTKKQEFLPQSEWVMFKDDGSRVPQIIDETTWEKANAYLRERGEAIKSRRTSFKNENIFTGKLFCANDGAPYWMKQHYIRGKEDVRWVCSYKIKNGAASCNSFGLAESELKEVIAELINKSSENIDSILEEYFEILQSSIKNIPDNKNEISRLEKQIDMLKQKREKILEYNLDGKISDDEFISRNKEYVKQIKQTENYIQELQNIKSPEPVETQLSAIKEQLEKFKGVTPQDINRQIVNELFEKITVEPLAVTCATLTFQLRSGSLEKWGFPLRRSDDMILTLNPEQHKIFSRKTCIKTQDMVFFKYKYLLAL

SEQ ID NO: 1376 - protein, 570 aa, Unknown
  Description of Unknown: Integrase B1377 sequence
  cd03768,SM00857,G3DSA:1.10.10.2600,IPR036162,PF13408, PS51737,IPR025827,G3DSA:3.40.50.1390,IPR006119,IPR038109, PF07508,IPR011109,SSF53041,PTHR30461,PS51736, Coil,PF00239
MKAAIYSRVSTEGQDYSKQTNELKDYAKRNGIEVAYIFEEKESGFNNDRPEFEKLRKLTKQDIDIILVWEISRLSRRSVYLQQQVEDFTNKGICIYALSNSLRTINTDGTINEMARVVLAVTATIAEQEAATLKARTLSGKRHKVLKEGHSYTQIAPYGYDYDKETKLLSINEKEATVVRRIFQLSIDGYSLIRIATALNVEGIKNKNGNKWYFATIRDMLINPVYMGKARYALKKAPAKEGKKYRKPLEFVEVDSPAIVSEETYQLSLERMQGRKSISKSSYSVEYPLLRGLIVCPVCGRRYVYKRASKLYTCNNRDNDCKAKGASAHKLESIVWDIIKVYFKENMTNNKVEEQIEPLQAEIDSYKQKILLLDGQLSELTEEASRIYDAAIEAQKRFPNMPKLYEDKMKELDSIDKEASRYKKEKELTDKKIRSISKKINHIKEARDINLDDITDELEKYNIFHQFIDNLVICGTKHTSFIVLTLTTGQILYIGHYSKRCSNYYILFYPSSDIYFDIQTNKGYINHLKEKATINSDGSIYLGDLTGEVKEYSIIDFVNYLDIEENRRYY

SEQ ID NO: 1377 - protein, 570 aa, Unknown
  Description of Unknown: Integrase B1378 sequence
  SM00857,G3DSA:1.10.10.2600,IPR036162,PF13408,IPR025827, G3DSA:3.40.50.1390,PS51737,IPR006119,IPR038109,PF07508, SSF53041,IPR011109,PTHR30461,Coil,cd00338, PF00239
MAYRKITDIRDTIGMRAVFYARVSTAEEEQLNAIELQIEENRGCIKEHGWKLVGEYIDRSKSGTMVKGRDDYQRLYEDLYEDLFDIVVIKDQERLQRNTLDWYLFINRVVQTGKLLFMYMDGKFYSPDDALITGVRAIIAEEFSRNLSKKLHNYHDHRIEKARQGQEIALQGSGNVYGWDKKDGKYYINPEQAKVRRLMCEGIMARKGSTLIAKELNEAGYRNTVGKLWKPMDIPKFVYDCKNVGTMIINKERHDFESKQTIKLPKEEWVYVENALPPIVTQEEWDLICKIHEERVIATGSDRRGKKTSGYSFSGKLVCGICGAPYWRKQRVSKDEYWVCSTKQTKGRRTRKRDSTMGKAGEINPLGCDNENISYNSLMEIMGVVSERLQANTDTIKQDMINWLTKLRKQLLEANGGHTEADLQRELSRKSKLLDAYLDGILNKQEYQKKAEELDERIIQLKTETEKNKANSGDIAEIDKVLANIDEEVARYVDGNEKLKVEYLLEHLEQVQIFPDKVIVIVPILSEGIVVEKTQYVSREKWLWKKYINEYYNGQFKSGSGMRLLRWRSD

SEQ ID NO: 1378 - protein, 570 aa, Unknown
  Description of Unknown: Integrase B1379 sequence
  PTHR30461:SF3,SM00857,G3DSA:1.10.10.2600,IPR036162,PF13408, PS51737,G3DSA:3.40.50.1390,IPR025827,IPR006119,IPR038109, PF07508,IPR011109,SSF53041,PTHR30461,Coil, PS51736,cd00338,PF00239
MNIYYVREKLRSCSIYDIELNVAYYARVSTEKVEQQASIKHQEEHFEELIHSNNRWKFAGSYIDDGISGMHADKREEFQRMLRDAKLGKIDMIITKEISRFARNTLDSIQYTRELLSYGVCVWFQNDGINTIDDDSEFRLTIMAGVAQDEIRKLSSRVKFGHAQSIKNGVVLGHRMYGYSNNKGKLELIPEEADMIRIIFQDYASGISTPRIEKKLWNMGYRSFKGGKISRDVIKNIIRNPKYKGYYCGGKVKVVDMFTKKQEFLPQSEWIMFKDDGSRVPQIIDETTWEKANAYLKERGEAIKSRRTSFKNENIFTGKLFCANDGAPYWMKQHYIRGKEDVRWVCSYKIKNGAASCNSFGLAESELKEIIAELINKSSENIDSILEEYFEILQSSIKNIPDNKNEISRLEKQIDLLKQKREKILEYNLDGKISDDEFVSRNKEYVKQIKQTESHIRELQNTKSPEPVEIQLNAIKEQLKKFKGVTQKDINRQIVNELFEKITVEPLAVTCATLTFQLRSGSLEKWGFPLRCSDDMIFTLHSEQHKIFSRKTCIKTQDMVFFKYKYLLAL

SEQ ID NO: 1379 - protein, 570 aa, Unknown
  Description of Unknown: Integrase B1380 sequence
  PTHR30461:SF3,SM00857,G3DSA:1.10.10.2600,IPR036162,PF13408, PS51737,G3DSA:3.40.50.1390,IPR025827,IPR006119,IPR038109, PF07508,IPR011109,SSF53041,PF00239,PTHR30461, PS51736,Coil,cd00338
MNIYYVREKLRSCSIYDIELNVAYYARVSTEKIEQQASIKHQEEHFEELIHSNNRWKFAGSYIDDGISGIHADKREEFQRMLRDAKLGKIDMIITKEISRFARNTLDSIQYTRELLSYGVCVWFQNDGINTIDDDSEFRLTIMAGVAQDEIRKLSSRVKFGHAQSIKNGVVLGHRMYGYSNNQGKLELVPEEADMVRMIFQDYASGISTPRIEKKLWDMGYRSFKGGKINRDVIKNIIRNPKYKGYYCGGKVKVVDMFTKKQEFLPQSEWIMFKDDGSRVPQIIDETTWEKANAYLRERGEAIKSRRTSFKNENIFTGKLFCANDGAPYWMKQHYTRGKEDVRWVCSYKIKNGAASCDSFGLAESELKEIIAELINKSSENIDSILEEYFEILQSSIKNIPDNKNEISRLEKQIDLLKQKREKILEYNLDGKISDDEFISRNKEYVKQIKQIESHILEIQNTKSPEPVEIQLSAIKEQLEKFKGVTPQDINRQIVNELFEKITVEPLAVTYATLTFQLRSGSLEKWGFPLRRSDDMILTLHSEQHKIFSRKTCIKTQDMVFFKYKYLLAL

SEQ ID NO: 1380 - protein, 570 aa, Unknown
  Description of Unknown: Integrase B1381 sequence
  PTHR30461:SF3,SM00857,G3DSA:1.10.10.2600,IPR036162,PF13408, IPR025827,PS51737,G3DSA:3.40.50.1390,IPR006119,IPR038109, PF07508,SSF53041,IPR011109,PF00239,PTHR30461, PS51736,Coil,cd00338
MKKFPIDLSCLTEEEISQFQEDPYTLYNGDQDVALYLRYSSTGQSDQSIEGQLRDCRAFCKANHYRIVAIYVDRATTAHKDVEKRVHLMEMVADSAKQNWEYVIVWKLDRFARNRNDSAIMKMRLRKNGVKVLSATEHLTDSPESIILESVLEGMAEFFSAELSQKVTRGMRESALKCHSVGGHIPLGYKVENHKLVVDPDTAHIVQEAFSLYANGESVADICRKFNSAGYKTAKNTEFNRSSFKAMFRNTRYIGTYTYKDIVIENGIPAIIDKELFETVQRRLSKTATAPARGKAKVDYLLSGKLFCGHCGASMNGESGAGRHGKVYHYYSCYTKKRKLGCDKRPLKKDYIEGIVARDALNLLTDQLIDEIADMAIQQSEQDLINDTHIPQLTAQLSEVEKSITNITAAIEKGIASETLMNRLVQLEHEKKTLNKEIKAEEKFVYRIDRDQIVFWLSQFKYGNIEDEDFRRRLIDLLVNSVTVWDEPDGYKITTAYNLTSCKTKTFRVEKNPAAEEATGFDFGESECAKKLVKSLDFTSFFYFLPRLCSPANGAAAQLSDQDPFCRRIP

SEQ ID NO: 1381 - protein, 570 aa, Unknown
  Description of Unknown: Integrase B1382 sequence
  PTHR30461:SF3,SM00857,G3DSA:1.10.10.2600,IPR036162,PF13408, PS51737,G3DSA:3.40.50.1390,IPR025827,IPR006119,IPR038109, PF07508,IPR011109,SSF53041,PTHR30461,Coil, PS51736,cd00338,PF00239
MNIYYVREKLRNCSIYDIELNVAYYARVSTEKVEQQASIKHQEEHFEELIHSNNRWKFAGSYIDDGISGMHADKREEFQRMLRDAKLGKIDMIITKEISRFARNTLDSIQYTRELLSYGVCVWFQNDGINTIDDDSEFRLTIMAGVAQDEIRKLSSRVKFGHAQSIKNGVVLGHRMYGYSNNQGKLELIPEEADMVRMVFRDYASGMSTPRIEKKLWNMGYRSFKGGKISRDVIKNIIRNPKYKGYYCGGKVKVVDMFTKKQEFLPQSEWIMFKDDGSRVPQIIDETTWEKANAYLRERGEAIKSRRTSFKNENIFTGKLFCANDGAPYWMKQHYIRGKEDVRWVCSYKIKNGAASCDSFGLAESELKEIIAELINKSSENIDSILEEYFEILQSSIKNIPDNKNEISRLEKQIDLLKQKREKILEYNLDGKISDDEFISRNKEYVKQIKQIESHILEIQNTKSPEPVEIQLSAIKEQLEKFKGVTPKDINRQIVNELFEKITVEPLAATCATLTFQLRSGNLEKWGFPLRCSDDMILTLHPEQHKIFSRKTCIKTQDMVFFKYKYLLAL

SEQ ID NO: 1382 - protein, 570 aa, Unknown
  Description of Unknown: Integrase B1383 sequence
  PTHR30461:SF3,IPR036162,PS51737,IPR011109,PTHR30461, PS00397,PF00239,G3DSA:1.10.10.2600,IPR006119,SSF53041, SM00857,IPR025827,IPR038109,PS51736,cd03768, IPR006118,PF13408,G3DSA:3.40.50.1390,PF07508,Coil
MQYKESNIRRNNRVAIYVRVSTVYQADKDSLPMQKQELISYAKLMLGTDDVVIFEDAGYSGKNTIRPKFQEMMEKIRVGAFTHLLVWKIDRISRNLLDFAAMYNELKKLGVTFVSKNEQFDTSTAMGEAMLKIILVFAELERNMTAERVTATMISRAGNGLWNGGRVPYGYSYNAEDQTFSLNSNEDNIVHMIHDKYEELRSLIRLARYLNEKGYRTRAGNEWSPVSLLIILRSFFYCGDYQYNRLKEGDRQQPKDKSEWVTVKDHHIAIISRDQKERIIGILDTNSKLCKDHNIYSTTHTHIFAGLLICSSCGKTMGASPATAKKDWQYSKYICSTRRSSVACAGKATSDPIIGEFVFNYILNMLNAQNNFKRISSPAELQDMLILGNTFCNVDHIESDGLNDLYNVLVSGNIEGEVYGKDTKIKDQAPTISDLSRLRSEKQRLERAMDRLTNLYLYSDDAMSEREYIIQKTKLADSISEIDDQIGFATSGGWQQSISDELFIQRASQFIISQKLSGRNYVSYKRLAISTDAKVLQSFVRSIIDSITMDSGRVKQIIFKNGLSHIFVYK

SEQ ID NO: 1383 - protein, 570 aa, Unknown
  Description of Unknown: Integrase B1384 sequence
  PTHR30461:SF3,SM00857,G3DSA:1.10.10.2600,IPR036162,PF13408, IPR025827,G3DSA:3.40.50.1390,PS51737,IPR006119,IPR038109, PF07508,SSF53041,IPR011109,PF00239,PTHR30461, PS51736,Coil,cd00338
MNIYYVREKLRSCSIYDIELNVAYYARVSTEKIEQQASIKHQEEHFEELIHSNNRWKFAGSYIDDGISGMHADKREEFQRMLRDAKLGKIDMIITKEISRFARNTLDSIQYTRELLSYGVCVWFQNDGINTIDDDSEFRLTIMAGVAQDEIRKLSSRVKFGHAQSIKNGVVLGHRMYGYSNNKGKLELIPEEADMIRIIFQDYASGISTPRIEKKLWDMGYRSFKGGKISRDVIKNIIRNPKYKGYYCGGKVKIVDMFTKKQEFLPQSEWVMFKDDGSRVPQIIDDITWEKANAYLRERGEAIKSRKTSFKSENIFTGKLFCANDGAPYWMKQHYIRGKEDVRWVCSYKIKNGAASCNSFGLAESELKEVIAELINKSYENIDSILEEYFEILQSSIKNIPDNINEITRLEKQIDLLKQKREKILEYNLDGKISDDEFISRNKEYVKQIKQIESHILEIQNAKSPEPVEIQLSAIKEQLEKFKGVNPKDINRQIVNELFEKITVEPLAATCATLTFQLRSGSLEKWGFPLRCSGDMILTLHSEQHKIFSRKTCIKTQDMVFFKYKYLLAL

SEQ ID NO: 1384 - protein, 570 aa, Unknown
  Description of Unknown: Integrase B1385 sequence
  PTHR30461:SF3,cd00338,SM00857,IPR036162,PF13408, PS51737,G3DSA:3.40.50.1390,IPR025827,IPR006119,PF07508, IPR011109,SSF53041,PTHR30461,PS51736,Coil, PF00239
MKTVAIYSRKSRFTGKGDSIENQIEMCKEHIKKFVSPKVEFLIYEDEGFSGGNTNRPAFQRLINDIKYGNIDLLICYRLDRISRNVADFSSVLDVLQEYKVDFISIKEQFDTSSPMGRAMIYIASVFAQLERETIAERIKDNMLEMAKKGKWTGGKLPLGFTSKKIAYIDEEGKKRFKVTLEHDSKDLEFVKFLYEKYLELGSLHKLETYTHENNIRSASGKIFEKSTLKIILQNPIYVKADENVFNYFENKGWSVYGEPDGLHSLLSYNKTETAKKDGKLTKRTKDESESLVAVSDIKGFIDSSLWLKVQYQFKKNKNTFPRLGKTHNALLVGKLFCGNCGTRMIIQHGRTSTKTGIKTFYYVCSLKKTSKKKLCSAHNVKTDFLENLVLDSLEKLYYKKDFINDSLKINLKENKDNIKEINTTKKLIELNKNKINSLIEKLSLDFDNVLSDILIPQIKKIKIENDVLESKLEKLKLKKQESEMNRIEIDLITSLLNKCKNIKELTRTEQKQIIDCLVDSIYYYSNDNGNDKIKIKFINDIDSINTLLSDEEKRQFEKLSFYSHSMSSI

SEQ ID NO: 1385 - protein, 570 aa, Unknown
  Description of Unknown: Integrase B1386 sequence
  SM00857,G3DSA:1.10.10.2600,IPR036162,PF13408,IPR025827, G3DSA:3.40.50.1390,PS51737,IPR006119,IPR038109,PF07508, SSF53041,IPR011109,PTHR30461,Coil,cd00338, PF00239
MAYRKITDIRDTIGMRAVFYARVSTAEEEQLNAIELQIEENRGCIKDHGWKLVGEYIDRSKSGTMVKGRDDYQRLYEDLYEDLFDIVVIKDQERLQRNTLDWYLFINRVVQTGKLLFMYMDGKFYSPDDALITGVRAIIAEEFSRNLSKKLHNYHDHRIEKARQGQEIALQGSGNVYGWDKKDGKYYINPEQAKVRRLMCEGIMARKGSTLIAKELNDAGYRNTVGKPWKPMDIPKFVYDCKNVGTMIINKERHDFESKQTIKLPKEEWVYVENALPPIVTQEEWDLICKIHEERVIATGSDRRGKKTSGYSFSGKLVCGICGAPYWRKQRVSKDEYWVCSTKQTKGRRTRKRDSTMGKAGEINPLGCDNENISYNSLMEIMGVVSERLQANTDTIKQDIINWLTKLRKQLLEANGGHTEADLQREISRKSKLLDTYLDGILNKQEYQKKAEELDERIIQLKAETEKNKANSGDIAEIDKVLANIDEEVSRYVDGNEKLKVEYLLEHLEQVQIFPDKVIVIVPILSEGIVVEKTQYVSREKRRRKVHNHFNYVWADKKGQRKNSNLRQRY

SEQ ID NO: 1386 - protein, 570 aa, Unknown
  Description of Unknown: Integrase B1387 sequence
  PTHR30461:SF3,SM00857,G3DSA:1.10.10.2600,IPR036162,PF13408, IPR025827,G3DSA:3.40.50.1390,PS51737,IPR006119,IPR038109, PF07508,SSF53041,IPR011109,PTHR30461,Coil, PS51736,cd00338,PF00239
MNIYYVREKLRNCSIYDIELNVAYYARVSTEKVEQQASIKHQEEHFEELIHSNNRWKFAGSYIDDGISGIHADKREEFQKMLRDAKLGKIDMIITKEISRFARNTLDSIQYTRELLSYGVCVWFQNDGINTIDEDSELRLTIMAGVAQDEIRKLSSRIKFGHAQSIKNGVVLGHRMYGYSNHQGKLELIPEEADMVRMVFRDYASGMSTPRIEKKLWNMGYRSFKGGKISRDVIKNIIRNPKYKGYYCGGKVKVVDMFTKKQEFLPQSEWIMFKDDGSRVPQIIDETTWEKANAYLRERGEAIKSRRTSFKNENIFTGKLFCANDGAPYWMKQHYIRGKEDVRWVCSYKIKNGAASCDSFGLAESELKEVIAELINKSSENIDSILEEYFEILQSSIKNIPDNKNEISRLEKQIDLLKQKREKILEYNLDGKISDDEFISRNKEYVKQIKQIESHILEIQNTKSPEPVEIQLSAIKEQLEKFKGVTPKDINRQIVNELFEKITVEPLAATCATLTFQLRSGSIEKWGFPLRRSDDMILTLNSEQHKIFSRKTCIKTQDMVFFKYKYLLAL

SEQ ID NO: 1387 - protein, 570 aa, Unknown
  Description of Unknown: Integrase B1388 sequence
  PTHR30461:SF3,SM00857,G3DSA:1.10.10.2600,IPR036162,PF13408, IPR025827,G3DSA:3.40.50.1390,PS51737,IPR006119,IPR038109, PF07508,IPR011109,SSF53041,PTHR30461,Coil, PS51736,cd00338,PF00239
MNIYYVREKLRNCSIYDIELNVAYYARVSTEKVEQQASIKHQEEHFEELIHSNNRWKFAGSYIDDGISGIHADKREEFQRMLRDAKLGKIDMIITKEISRFARNTLDSIQYTRKLLSYGVCVWFQNDGINTIDDDSEFRLTIMAGVAQDEIRKLSSRVKFGHAQSIKNGVVLGHRMYGYSNNQGKLELIPEEADMVRMVFRDYASGMSTPRIEKKLWNMGYRSFKGGKISRDVIKNIIRNPKYKGYYCGGKVKVVDMFTKKQEFLPQSEWIMFKDDGSRVPQIIDETTWEKANAYLRERGEAIKSRRTSFKNENIFTGKLFCANDGAPYWMKQHYIRGKEDVRWVCSYKIKNGAASCDSFGLAESELKEVIAELINKSSENIDSILEEYFEILQSSIKNIPDNKNEISRLEKQIDLLKQKREKILEYNLDGKISDDEFISRNKEYVKQIKQIESHILEIQNTKSPEPVEIQLSAIKEQLEKFKGVNPKDINRQIVNELFEKITVEPLAATCATLTFQLRSGSIEKWGFPLRRSDDMILTLHSEQHKIFSRKTCIKTQDMVFFKYKYLLAL

SEQ ID NO: 1388 - protein, 570 aa, Unknown
  Description of Unknown: Integrase B1389 sequence
  PTHR30461:SF3,SM00857,G3DSA:1.10.10.2600,IPR036162,PF13408, IPR025827,G3DSA:3.40.50.1390,PS51737,IPR006119,IPR038109, PF07508,IPR011109,SSF53041,PTHR30461,Coil, PS51736,cd00338,PF00239
MNIYYVREKLRSCSIYDIELNVAYYARVSTEKLEQQASIKHQEEHFEELIHSNNRWKFAGSYIDDGISGMHADKREEFQRMLKDAKLGKIDMIITKEISRFARNTLDSIQYTRELLSYGVCVWFQNDGINTIDDDSEFRLTIMAGVAQDEIRKLSSRVKFGHAQSIKNGVVLGHRMYGYSNNQGKLELIPEEADMVRMIFQDYASGISTPRIEKKLWNMGYRNFKGGKINRDVIKNIIRNPKYKGYYCGGKVKVIDMFTKKQEFLPQPEWVMFKDDGSRVPQIIDENTWEKANAYLRERGEAIKSRRTSFKNENIFTGKLFCANDGAPYWMKQHYIRGKEDVRWVCSYKIKNGAASCDSFGLAESELKEVIAELINKSSENIDSILEEYFEILQSSIKNIPDNKNEISRLEKQIDLLKQKREKILEYNLDGKISDDEFISRNKEYVKQIKQIESHILEIQNTKSPEPVEIQLSAIKEKLEKFKGVNPKDINRQIVNELFEKITVEPLAATCATLTFQLRSGNLEKWGFPLRCSDDMILTLHSEQHKIFSRKTCIKTQDMVFFKYKYLLAL

SEQ ID NO: 1389 - protein, 570 aa, Unknown
  Description of Unknown: Integrase B1390 sequence
  PTHR30461:SF3,IPR036162,PS51737,IPR011109,PTHR30461, PS00397,PF00239,G3DSA:1.10.10.2600,IPR006119,SSF53041, SM00857,IPR025827,IPR038109,PS51736,cd03768, IPR006118,PF13408,G3DSA:3.40.50.1390,PF07508,Coil
MTNNAASARVAIYVRVSTLYQVDKDSLPMQKQDLLSYAKLMLNTEDCMIFEDAGYSGKNMDRPKFQEMMSQIRTGTFTHLLVWKIDRISRNLLDFASMYAELKELGVTFVSKSEQFDTSTAMGEAMLKIILVFAELERNMTSERVTATMISRAHNRLWNGGRIPYGYNYDPQTREFSFNETEMPLVIMIHDMYEQQRSLVRVARELNEKGYRSRAGNYWSPVSLRLILKNLFYCGDYVYNKQREGNRQKVKDESEWVITKEHHPAMISRDQKEHVIKILNSNSKLCRERDIYSAPDHVHVFGGLLVCSSCGKTFNSSPGSITRDKWHYSKYGCSTRRKSTTLCKSKGTSDPIVGEFTFNYILNMLNAQANFASINSPADLQKRLLIGDTFSYIDHIEADGLNDLYNILASGKITGAVWGNNVKAPTKKVAVESELTKIKAEKQKTERALDRLRNLYLYVDDAMSDAEYIIQRNKLTETLDNLNEQIGLLNTDTWEQSVSDEEFIQRASEFIVAQKLTGRKYVSYKRLAKSVDATVLRDFVLSIIDRMTVTDGKISSIVFRNGLCHNFVFK

SEQ ID NO: 1390 - protein, 570 aa, Unknown
  Description of Unknown: Integrase B1391 sequence
  SM00857,G3DSA:1.10.10.2600,IPR036162,PF13408,PS51737, G3DSA:3.40.50.1390,IPR025827,IPR006119,IPR038109,PF07508, IPR011109,SSF53041,PTHR30461,Coil,PS51736, cd00338,PF00239
MNIYYVREKLRSCSIYDIELNVAYYARVSTEKVEQQASIKHQEEHFEELIHSNNRWKFAGSYIDDGISGMHADKREEFQRMLRDAKLGKIDMIITKEISRFARNTLDSIQYTRELLSYGVCVWFQNDGINTIDEDSELRLTIMAGVAQDEIRKLSSRIKFGHAQSIKNGVVLGHRMYGYSNHQGKLELIPEEADMVRMVFRDYASGMSTPRIEKKLWNMGYRSFKGGKISRDVIKNIIRNPKYKGYYCGGKVKIVDMFTKKQEFLPQSEWVMFKDDGSRVPQIIDETTWEKANAYLRERGEAIKSRKTSFKSENIFTGKLFCANDGAPYWMKQHYIRGKEDVRWVCSYKIKNGAASCNSFGLAESELKEIIAELINKSSENIDSILEEYFEILQSSIKNIPDNKNEISRLEKQIDLLKQKREKILEYNLDGKISDDEFISRNKEYVKQIKQIESHILEIQNTKSPEPVEIQLSAIKEKLEKFKGVNPKDINRQIVNELFEKITVEPLAVTCATLTFQLRSGNLEKRGFPLRCSDDMIFTLHSEQHKIFSRKTCIKTQDMVFFKYKYLLAL

SEQ ID NO: 1391 - protein, 570 aa, Unknown
  Description of Unknown: Integrase B1392 sequence
  PTHR30461:SF3,SM00857,G3DSA:1.10.10.2600,IPR036162,PF13408, PS51737,G3DSA:3.40.50.1390,IPR025827,IPR006119,IPR038109, PF07508,IPR011109,SSF53041,PTHR30461,Coil, PS51736,cd00338,PF00239
MNIYYVREKLRSCSIYDIELNVAYYARVSTEKVEQQASIKHQEEHFEELIRSNNRWKFAGSYIDDGISGMHADKREEFQRMLKDAKLGKIDMIITKEISRFARNTLDSIQYTRELLSYGVCVWFQNDGINTIDDDSEFRLTIMAGVAQDEIRKLSSRVKFGHAQSIKNGVVLGHRMYGYSNNKGKLELIPEEADMIRIIFQDYASGISTPRIEKKLWDMGYRSFKGGKINRDVIKNIIRNPKYKGYYCGGKVKVVDMFTKKQEFLPQSEWIMFKDDGSRVPQIIDETTWEKANAYLRERGEAIKSRKTSFKSENIFTGKLFCANDGAPYWMKQHYIRGKEDVRWVCSYKIKNGAASCDSFGLAESELKEVIAELINKSSENIDSILEEYFEILQSSIKNIPDNKNEISRLEKQIDLLKQKREKILEYNLDGKISDDEFISRNKEYVKQIKQIESHILEIQNTKSPEPVEIQLSAIKEQLEKFKGVTSKDINRQIVNELFEKITVEPLAATCATLTFQLRSGNLEKWGFPLRCSDDMILTLHSEQHKIFSRKTCIKTQDMVFFKYKYLLAL

SEQ ID NO: 1392 - protein, 570 aa, Unknown
  Description of Unknown: Integrase B1393 sequence
  PTHR30461:SF3,SM00857,G3DSA:1.10.10.2600,IPR036162,PF13408, PS51737,G3DSA:3.40.50.1390,IPR025827,IPR006119,IPR038109, PF07508,IPR011109,SSF53041,PF00239,PTHR30461, PS51736,Coil,cd00338
MNIYYVREKLRNCSIYDIELNVAYYARVSTEKVEQQASIKHQEEHFEELIHSNNRWKFAGSYIDDGISGIHADKREEFQRMLRDAKLGKIDMIITKEISRFARNTLDSIQYTRKLLSYGVCVWFQNDGINTIDDDSEFRLTIMAGVAQDEIRKLSSRVKFGHAQSIKNGVVLGHRMYGYSNNQGKLELVPEEADMVRMIFQDYASGISTPRIEKKLWDMGYRSFKGGKINRDVIKNIIRNPKYKGYYCGGKVKVVDMFTKKQEFLPQSEWIMFKDDGSRVPQIIDETTWEKANAYLRERGEAIKSRRTSFKSENIFTGKLFCANDGAPYWMKQHYIRGKEDVRWVCSYKIKNGAASCNSFGLAESELKEVIAELINKSSENIDSILEEYFEILQSSIKNIPDNKNEISRLEKQIDLLKQKREKILEYNLDGKISDDEFISRNKEYVKQIKQIESHILEIQNTKSPEPVEIQLSAIKEQLEKFKGVTPQDINRQIVNELFEKITVEPLAVTCATLTFQLRSGSLEKWGFPLRRSDDMIFTLHSEQHKIFSRKTCIKTQDMVFFKYKYLLAL

SEQ ID NO: 1393 - protein, 570 aa, Unknown
  Description of Unknown: Integrase B1394 sequence
  PTHR30461:SF3,SM00857,G3DSA:1.10.10.2600,IPR036162,PF13408, IPR025827,G3DSA:3.40.50.1390,PS51737,IPR006119,IPR038109, PF07508,IPR011109,SSF53041,PTHR30461,Coil, PS51736,cd00338,PF00239
MNIYYVREKLRNCSIYDIELNVAYYARVSTEKVEQQASIKHQEEHFEDLIHSNNRWKFAGSYIDDGISGIHADKREEFQRMLRDAKLGKIDMIITKEISRFARNTLDSIQYTRELLSYGVCVWFQNDGINTIDDDSEFRLTIMAGVAQDEIRKLSSRVKFGHAQSIKNGVVLGHRMYGYSNNQGKLELVPEEADMVRMIFQDYASGISTPRIEKKLWDMGYRSFKGGKINRDVIKNIIRNPKYKGYYCGGKVKVVDMFTKKQEFLPQSEWIMFKDDGSRVPQIIDEATWEKANAYLRERGEAIKSRRTSFKSENIFTGKLFCANDGAPYWMKQHYIRGKEDVRWVCSYKIKNGAASCNSFGLAESELKEIIAELINKSSENIDSILEEYFEILQSSIKNIPDNKNEISRLEKQIDLLKQKREKILEYNLDGKISDDEFISRNKEYVKQIKQIESHILEIQNTKSPEPVEIQLSAIKEQLEKFKGVTPQDINRQIVNELFEKITVEPLAVTCATLTFQLRSGSLEKWGFPLRRSDDMIFTLHSEQHKIFSRKTCIKTQDMVFFKYKYLLAL

SEQ ID NO: 1394 - protein, 570 aa, Unknown
  Description of Unknown: Integrase B1395 sequence
  PTHR30461:SF3,SM00857,G3DSA:1.10.10.2600,IPR036162,PF13408, IPR025827,G3DSA:3.40.50.1390,PS51737,IPR006119,IPR038109, PF07508,IPR011109,SSF53041,PF00239,PTHR30461, PS51736,Coil,cd00338
MNIYYVREKLRSCSIYDIELNVAYYARVSTEKLEQQASIKHQEEHFEELIHSNNRWKFAGSYIDDGISGMHADKREEFQRMLKDAKLGKIDMIITKEISRFARNTLDSIQYTRELLSYGVCVWFQNDGINTIDDDSEFRLTIMAGVAQDEIRKLSSRVKFGHAQSIKNGVVLGHRMYGYSNNQGKLELIPEEADMVRMIFQDYASGISTPRIEKKLWNMGYRNFKGGKINRDVIKNIIRNPKYKGYYCGGKVKVIDMFTKKQEFLPQPEWVMFKDDGSRVPQIIDENTWEKANAYLRERGEAIKSRRTSFKNENIFTGKLFCANDGAPYWMKQHYIRGKEDVRWVCSYKIKNGAASCNSFGLAESELKEVIAELINKSSENIDSILEEYFEILQSSIKNIPDNKNEISRLEKQIDLLKQKREKILEYNLDGKISDDEFISRNKEYMKQIKQIESHILEIQNTKSPEPVEIQLSAIKEQLEKFKGVTPKDINRQIVNELFEKITVEPLAATCATLTFQLRSGNLEKWGFPLRCSDDMILTLHSEQHKIFSRKTCIKTQDMVFFKYKYLLAL

SEQ ID NO: 1395 - protein, 570 aa, Unknown
  Description of Unknown: Integrase B1396 sequence
  PTHR30461:SF3,SM00857,G3DSA:1.10.10.2600,IPR036162,PF13408, PS51737,G3DSA:3.40.50.1390,IPR025827,IPR006119,IPR038109, PF07508,IPR011109,SSF53041,PF00239,PTHR30461, PS51736,Coil,cd00338
MNIYYVREKLRNCSIYDIELNVAYYARVSTEKVEQQASIKHQEEHFEELIHSNNRWKFAGSYIDDGISGMHADKREEFQRMLRDAKLGKIDMIITKEISRFARNTLDSIQYTRELLSYGVCVWFQNDGINTIDDDSEFRLTIMAGVAQDEIRKLSSRVKFGHAQSIKNGVVLGHRMYGYSNNQGKLELIPEEADMVRMIFQDYASGISTPRIEKKLWDMGYRSFKGGKINRDVIKNIIRNPKYKGYYCGGKVKVVDMFTKKQEFLPQSEWIMFKDDGSRVPQIIDETTWEKANAYLRERGEAIKSRRTSFKSENIFTGKLFCANDGAPYWMKQHYIRGKEDVRWVCSYKIKNGAASCDSFGLAESELKEIIAELINKSSENIDSILEEYFEILQSSIKNIPDNKNEISRLEKQIDLLKQKREKILEYNLDGKISDDEFISRNKEYVKQIKQIESHILEIQNTKSPEPVEIQLSAIKEQLEKFKGVTPQDINRQIVNELFEKITVEPLAVTCATLTFQLRSGSLEKWGFPLRRSDDMIFTLHSEQHKIFSRKTCIKTQDMVFFKYKYLLAL

SEQ ID NO: 1396 - protein, 570 aa, Unknown
  Description of Unknown: Integrase B1397 sequence
  PTHR30461:SF3,SM00857,G3DSA:1.10.10.2600,IPR036162,PF13408, IPR025827,G3DSA:3.40.50.1390,PS51737,IPR006119,IPR038109, PF07508,IPR011109,SSF53041,PTHR30461,Coil, PS51736,cd00338,PF00239
MNIYYVREKLRNCSIYDIELNVAYYARVSTEKVEQQASIKHQEEHFEELIHSNNRWKFAGSYIDDGISGIHADKREEFQRMLRDAKLGKIDMIITKEISRFARNTLDSIQYTRKLLSYGVCVWFQNDGINTIDDDSEFRLTIMAGVAQDEIRKLSSRVKFGHAQSIKNGVVLGHRMYGYSNNQGKLELVPEEADMVRMIFQDYASGISTPRIEKKLWDMGYRSFKGGKINRDVIKNIIRNPKYKGYYCGGKVKVVDMFTKKQEFLPQSEWIMFKDDGSRVPQIIDETTWEKANAYLRERGEAIKSRRTSFKNENIFTGKLFCANDGAPYWMKQHYIRGKEDVRWVCSYKIKNGAASCDSFGLAESELKEVIAELINKSSENIDSILEEYFEILQSSIKNIPDNKNEISRLEKQIDLLKQKREKILEYNLDGKISDDEFISRNKEYVKQIKQIESHILEIQNTKSPEPVEIQLSAIKEQLEKFKGVTPQDINRQIVNELFEKITVEPLAVTCATLTFQLRSGSLEKWGFPLRRSDDMIFTLHSEQHKIFSRKTCIKTQDMVFFKYKYLLAL

SEQ ID NO: 1397 - protein, 570 aa, Unknown
  Description of Unknown: Integrase B1398 sequence
  PTHR30461:SF3,SM00857,G3DSA:1.10.10.2600,IPR036162,PF13408, IPR025827,PS51737,G3DSA:3.40.50.1390,IPR006119,IPR038109, PF07508,IPR011109,SSF53041,PTHR30461,Coil, PS51736,cd00338,PF00239
MNIYYVREKLRSCSIYDIELNVAYYARVSTEKLEQQASIKHQEEHFEELIHSNNRWKFAGSYIDDGISGMHADKREEFQRMLKDAKLGKIDMIITKEISRFARNTLDSIQYTRELLSYGVCVWFQNDGINTIDDDSEFRLTIMAGVAQDEIRKLSSRVKFGHAQSIKNGVVLGHRMYGYSNNQGKLELIPEEADMVRMIFQDYASGISTPRIEKKLWNMGYRNFKGGKINRDVIKNIIRNPKYKGYYCGGKVKVIDMFTKKQEFLPQPEWVMFKDDGSRVPQIIDENTWEKANAYLRERGEAIKSRRTSFKNENIFTGKLFCANDGAPYWMKQHYIRGKEDVRWVCSYKIKNGAASCNSFGLAESELKEVIAELINKSSENIDSILEEYFEILQSSIKNIPDNKNEISRLEKQIDLLKQKREKILEYNLDGKISDDEFISRNKEYMKQIKQIESHILEIQNTKSPEPVEIQLSAIKEQLEKFKGVTPKDINRQIVNELFEKITVEPLAATCATLTFQLRSGNLKKWGFPLRCSDDMILTLHSEQHKIFSRKTCIKTQDMVFFKYKYLLAL

SEQ ID NO: 1398 - protein, 570 aa, Unknown
  Description of Unknown: Integrase B1399 sequence
  PTHR30461:SF3,SM00857,G3DSA:1.10.10.2600,IPR036162,PF13408, PS51737,G3DSA:3.40.50.1390,IPR025827,IPR006119,IPR038109, PF07508,IPR011109,SSF53041,PTHR30461,Coil, PS51736,cd00338,PF00239
MNIYYVREKLRSCSIYDIELNVAYYARVSTEKVEQQASIKHQEEHFEELIHSNNRWKFAGSYIDDGISGMHADKREEFQRMLRDAKLGKIDMIITKEISRFARNTLDSIQYTRELLSYGVCVWFQNDGINTIDDDSEFRLTIMAGVAQDEIRKLSSRVKFGHAQSIKNGVVLGHRMYGYSNNQGKLELIPEEADMVRMVFRDYASGMSTPRIEKKLWNMGYRSFKGGKISRDVIKNIIRNPKYKGYYCGGKVKVVDMFTKKQEFLPQSEWIMFKDDGSRVPQIIDETTWEKANAYLRERGEAIKSRRTSFKNENIFTGKLFCANDGAPYWMKQHYIRGKEDVRWVCSYKIKNGAASCDSFGLAESELKEIIAELINKSSENIDSILEEYFEILQSSIKNIPDNKNEISRLEKQIDLLKQKREKILEYNLDGKISDDEFISRNKEYVKQIKQIESHILEIQNTKSPEPVEIQLSAIKEQLEKFKGVTPQDINRQIVNELFEKITVEPLAVTCATLTFQLRSGSLEKWGFPLRRSDDMIFTLHSEQHKIFSRKTCIKTQDMVFFKYKYLLAL

SEQ ID NO: 1399 - protein, 570 aa, Unknown
  Description of Unknown: Integrase B1400 sequence
  PTHR30461:SF3,SM00857,G3DSA:1.10.10.2600,IPR036162,PF13408, IPR025827,G3DSA:3.40.50.1390,PS51737,IPR006119,IPR038109, PF07508,IPR011109,SSF53041,PF00239,PTHR30461, PS51736,Coil,cd00338
MNIYYVREKLRNCSIYDIELNVAYYARVSTEKVEQQASIKHQEEHFEDLIHSNNRWKFAGSYIDDGISGIHADKREEFQRMLRDAKLGKIDMIITKEISRFARNTLDSIQYTRELLSYGVCVWFQNDGINTIDDDSEFRLTIMAGVAQDEIRKLSSRVKFGHAQSIKNGVVLGHRMYGYSNNQGKLELVPEEADMVRMIFRDYASGMSTPRIEKKLWNMGYRSFKGGKISRDVIKNIIRNPKYKGYYCGGKVKVVDMFTKKQEFLPQSEWIMFKDDGSRVPQIIDETTWEKANAYLRERGEAIKSRRTSFKSENIFTGKLFCANDGAPYWMKQHYIRGKEDVRWVCSYKIKNGAASCNSFGLAESELKEVIADLINKSSENIDNILKEYFEILQSTIKNIPDNKSEISRLEKQIDTLKQKREKILEYNLDGKISDDEFVSRNKEYMKQIKQTENRIRELQNVKVKEPEDAQLKAIKEQLEKFKGVTPQDINRQIVNELFEKITVEPLAVTCATLTFQLRSGSLEKWGFPLRRSDDMILTLHSEQHKVFSRKTCIKTQDMVFYKYKYLLAL

SEQ ID NO: 1400 - protein, 570 aa, Unknown
  Description of Unknown: Integrase B1401 sequence
  cd03768,PTHR30461:SF3,SM00857,IPR036162,PF13408, PS51737,IPR025827,G3DSA:3.40.50.1390,IPR006119,PF07508, SSF53041,IPR011109,PTHR30461,PS51736,Coil, PF00239
MKTVAIYSRKSRFTGKGDSIENQIEMCKEHIKKFVSPNVEFLIYEDEGFSGGNTNRPAFQRLINDIKYGNINLLICYRLDRISRNVADFSSVLDVLQEYKVDFISIKEQFDTSSPMGRAMIYIASVFAQLERETIAERIKDNMLEMAKKGKWTGGKLPLGFTSKKIAYIDEEGKKRFKVTLEHDSKDLEFVKFLYEKYLELGSLHKLETYTHENNIRSASGKIFEKSTLKIILQNPIYVKADENVFNYFENKGWSVYGEPDGLHSLLSYNKTETAKKDGKLTKRNKDESESLVAVSDVKGFIDSSLWLKVQYQFKKNKNTFPRLGKTHNALLVGKLFCGNCGTRMIIQHGRTSTKTGIKTFYYVCSLKKTSKKKLCSAHNVKTDFLENLVLDSLEKLYYKKDFINDSLKINLKENKDNIKEINTTKKLIELNKNKINSLIEKLSLDFDNILSDILIPQIKKIKIENDVLESKLEELKLKKQESEMNRIEIDLITSLLNKCKNIKELTRTEQKQIIDCLVDSIYYYSNDNGNDKIKIKFINDIDSINTLLSDEEKRQFEKLSFYSHSMSSI

SEQ ID NO: 1401 - protein, 570 aa, Unknown
  Description of Unknown: Integrase B1402 sequence
  cd03768,SM00857,G3DSA:1.10.10.2600,IPR036162,PF13408, IPR025827,G3DSA:3.40.50.1390,PS51737,IPR006119,IPR038109, PF07508,IPR011109,SSF53041,PTHR30461,PS51736, Coil,PF00239
MKAAIYSRVSTDQQDYSKQTDELKDYAKRNGIEVVYVFEEKESGFNNDRPEFEKLRKLTKQDIDIILVWEISRLSRRSVYLQQQIEDFTNKGICIYALSNSLRTINADGTINEMARVVLAVTATIAEQEAATLKARTLSGKRHKVLKEGHSYTQIAPYGYDYDKETKLLSINEKEATVVRRIFQLSIDGYSLIRIATALNVEGIKNKKGNKWYFATIRDMLINPVYMGKARYALKKAPAKEGKKYRKPLEFVEVDSPAIVSEETYQLSLERMQGRKSISKSSYSVEYPLLRGLIVCPVCGRRYVYKRASKLYTCNNRDNDCKAKGASAHKLESIVWDIIKVYFKENMTNNKVEEQIEPLQAEIDSYKQKILLLDGQLSELTEEASRIYDAAIEAQKRFPNMPKLYEDKMKELDSIDKEASRYKKEKELTDKKIRSISKKINHIKEARDINLDDITDELEKYNIFHQFIDNLVICGTKHTSFIVLTLTTGQILYIGHYSKRCSNYYILFYPSSDIYFDIQTNKGYINHLKEKATINSDGSIYLGDLTGEVKEYSIIDFVNYLDIEENRRYY

SEQ ID NO: 1402 - protein, 570 aa, Unknown
  Description of Unknown: Integrase B1403 sequence
  PTHR30461:SF3,SM00857,G3DSA:1.10.10.2600,IPR036162,PF13408, IPR025827,G3DSA:3.40.50.1390,PS51737,IPR006119,IPR038109, PF07508,IPR011109,SSF53041,PTHR30461,Coil, PS51736,cd00338,PF00239
MNIYYVREKLRSCSIYDIELNVAYYARVSTEKLEQQVSIKHQEEHFEELIHSNNRWRFAGSYIDDGISGMNANKREEFQRMLRDAKLGKIDMIITKEISRFARNTLDSIQYTRELLSYGVCVWFQNDGINTIDEDSEFRLTIMAGVAQDEIRKLSSRVKFGHAQSIKNGVVLGHRMYGYSNNQGKLELVPEEADMVRMIFQDYASGISTPRIEKKLWDMGYRSFKGGKINRDVIKNIIRNPKYKGYYCGGKVKVVDMFTKKQEFLPQSEWIMFKDDGSRVPQIIDEATWEKANAYLRERGEAIKSRRTSFKSENIFTGKLFCANDGAPYWMKQHYIRGKEDVRWVCSYKIKNGAASCNSFGLAESELKEIIAELINKSSENIDSILEEYFEILQSSIKNIPDNKNEISRLEKQIDLLKQKREKILEYNLDGKISDDEFISRNKEYVKQIKQIESHILEIQNTKSPEPVEIQLSAIKEQLEKFKGVTPQDINRQIVNELFEKITVEPLAVTCATLTFQLRSGSLEKWGFPLRRSDDMILTLHSEQHKVFSRKTCIKTQDMVFYKYKYLLAL

SEQ ID NO: 1403 - protein, 570 aa, Unknown
  Description of Unknown: Integrase B1404 sequence
  PTHR30461:SF3,SM00857,G3DSA:1.10.10.2600,IPR036162,PF13408, IPR025827,G3DSA:3.40.50.1390,PS51737,IPR006119,IPR038109, PF07508,SSF53041,IPR011109,PF00239,PTHR30461, PS51736,Coil,cd00338
MNIYYVREKLRNCSIYDIELNVAYYARVSTEKVEQQASIKHQEEHFEELIHSNNRWKFAGSYIDDGISGMHADKREEFQRMLKDAKLGKIDMIITKEISRFARNTLDSIQYTRELLSCGVCVWFQNDGINTIDDDSEFRLTIMAGVAQDEIRKLSSRVKFGHAQSIKNGVVLGHRMYGYSNNRGKLELIQEEADMVRMIFQDYASGISTPRIEKKLWDMGYRSLKGGKINRDVIKNIIRNPKYKGYYCGGKVKVIDMFTKKQEFLPQSEWVMFKDDGSRVPQIIDETTWEKANAYLRERGEAIKSRRTSFKNENIFTGKLFCANDGAPYWMKQHYIRGKEDVRWVCSYKIKNGAASCSSFGLAESELKEVIAELINKSSENIDSILEEYFEILQSSIKNIPDNTNEITRLEKQIDLLKQKREKILEYNLDGKITDDEFIARNKEYVNRIKQTENLIRELQNVKSPEPVDVQLKSIKEQLEKFKGVTPQDINRQIVDELFEKITVEPLAVTCATLTFHLRSGSLEKWGFPLRCSDDMILTLHPEQHKIFSRKTCIKTQHMVFYKYKYLLAL

SEQ ID NO: 1404 - protein, 570 aa, Unknown
  Description of Unknown: Integrase B1405 sequence
  PTHR30461:SF3,SM00857,G3DSA:1.10.10.2600,IPR036162,PF13408, PS51737,IPR025827,G3DSA:3.40.50.1390,IPR006119,IPR038109, PF07508,IPR011109,SSF53041,PF00239,PTHR30461, PS51736,Coil,cd00338
MNIYYVREKLRNCSIYDIELNVAYYARVSTEKVEQQASIKHQEEHFEELIHSNNRWKFAGSYIDDGISGIHADKREEFQRMLRDAKLGKIDMIITKEISRFARNTLDSIQYTRELLSYGVCVWFQNDGINTIDDDSEFRLTIMAGVAQDEIRKLSSRVKFGHAQSIKNGVVLGHRMYGYSNNQGKLELVPEESDMVRMIFQDYASGISTPRIEKKLWDMGYRSFKGGKINRDVIKNIIRNPKYKGYYCGGKVKVVDMFTKKQEFLPQSEWIMFKDDGSRVPQIIDETTWEKANAYLRERGEAIKSRRTSFKNENIFTGKLFCANDGAPYWMKQHYIRGKEDVRWVCSYKIKNGAASCDSFGLAESELKEVIAELINKSSENIDSILEEYFEILQSSIKNIPDNKNEISRLEKQIDLLKQKREKILEYNLDGKISDDEFVSRNKEYVKQIKQTESHIRELQNIKSPEPAEIQLSAIKEQLEKFKGVTPKDINRQIVNELFEKITVEPLAATCATLTFQLRSGSLEKWGFPLRRSDDMILTLHSEQHKIFSRKTCIKTQDMVFFKYKYLLAL

SEQ ID NO: 1405 - protein, 570 aa, Unknown
  Description of Unknown: Integrase B1406 sequence
  PTHR30461:SF3,IPR036162,PS51737,IPR011109,PTHR30461, PS00397,PF00239,G3DSA:1.10.10.2600,IPR006119,SSF53041, SM00857,IPR025827,IPR038109,PS51736,cd03768, IPR006118,PF13408,G3DSA:3.40.50.1390,PF07508,Coil
MRKKITKKQAEDKVAIYVRVSTHWQIDKDSLPMQKTDLANYCAYVLNINNYEIFEDAGYSAKNTDRPDFQKMMSRIRSGEFSHLLVWKIDRISRNLLDFIDMYEELKRLGVAFVSRNEQFDTTTAMGEAMLKIILVFAELERNTTSERVSNVMISRAETGKWNGGRVPYGYVSPGRGKMPVVDKIEAAVVKQIFNNYESSRSTTMVARDLSDKGILTKAGNKWSATTISKILGNRWYIGSYIYNMRDSTDDYNLKDESEWVVVDNHHEPIISRDQFNRVQETLSMNTKDKTRGAITRQRKNAHIFSCLLECGQCGGNMAATIDRPRKDGTRPSIYGCYSRRSTSKCTNKYVSDVTLLPFMLSYIKAMMLMKKKVSSIENVKSAENFLIANAGMTDVKAIEGVGETYKLLKSGSVGIEYEPGISSYKDAPETKASMERLRTEYGKNVRALNRMKSLFLYGDDDIDKASFLKEQHDLEDEIKRQETILARYESTDGSLDEMDEDEFEAKASYVIMAKMLTGEFDPSYDIVCKTLDPMVLQRFFKSIIDKVGIVDGKVCWIRFRNGITHKFMY

SEQ ID NO: 1406 - protein, 570 aa, Unknown
  Description of Unknown: Integrase B1407 sequence
  SM00857,G3DSA:1.10.10.2600,IPR036162,PF13408,IPR025827, G3DSA:3.40.50.1390,PS51737,IPR006119,IPR038109,PF07508, SSF53041,IPR011109,PTHR30461,Coil,cd00338, PF00239
MAYRKITDIKDTIGMRAVFYARVSTAEEEQLNAIELQIEENRGCIKDHGWKLVGEYIDRSKSGTMVKGRDDYQRLYEDLYEDLFDIVVIKDQERLQRNTLDWYLFINRVVQTGKLLFMYMDGKFYSPDDALITGVRAIIAEEFSRNLSKKLHNYHDHRIEKARQGQEIALQGSGNVYGWDKKDGKYYINPEQAKVRRLMCEGIMARKGSTLIAKELNDAGYRNTVGKPWKPMDIPKFVYDCKNVGTMIINKERHDFESKQTIKLPKEEWVYVENALPPIVTQEEWDLICKIHEERVIATGSDRRGKKTSGYSFSGKLVCGICGAPYWRKQRVSKDEYWVCSTKQTKGRRTRKRDSTMGKAGEINPLGCDNENISYNSLMEIMGVVSERLQANTDTIKHDMINWLTKLRKQLLEANGGHAEADLQRELSRKSKLLDAYLDGILNKQEYQKKAEELDERIIQLKAETEKNKANSGDIAEIDKVLANIDEEVSRYVDGNEKLKVEYLLEHLEQVQIFPDKVIVIVPILSEGIVVEKAQYVSREKWLWKKYINEYYNGQFKSGSGMRLLRWKSD

SEQ ID NO: 1407 - protein, 570 aa, Unknown
  Description of Unknown: Integrase B1408 sequence
  PTHR30461:SF3,SM00857,G3DSA:1.10.10.2600,IPR036162,PF13408, PS51737,G3DSA:3.40.50.1390,IPR025827,IPR006119,IPR038109, PF07508,IPR011109,SSF53041,PTHR30461,Coil, PS51736,cd00338,PF00239
MNIYYVREKLRNCSIYDIELNVAYYARVSTEKVEQQASIKHQEEHFEELIHSNNRWKFAGSYIDDGISGIHADKREEFQRMLRDAKLGKIDMIITKEISRFARNTLDSIQYTRELLSYGVCVWFQNDGINTIDDDSEFRLTIMAGVAQDEIRKLSSRVKFGHAQSIKNGVVLGHRMYGYSNNQGKLELIPEEAEMVRMIFQDYASGISTPRIEKKLWNMGYRSFKGGKISRDVIKNIIRNPKYKGYYCGGKVKVVDMFTKKQEFLPQSEWIMFKDDGSRVPQIIDETTWEKANAYLRERGEAIKSRRTSFKSENIFTGKLFCANDGAPYWMKQHYIRGKEDVRWVCSYKIKNGAASCDSFGLAESELKEIIAELINKSSENIDSILEEYFEILQSSIKNIPDNKNEISRLEKQIDLLKQKREKILEYNLDGKISDDEFISRNKEYVKQIKQIESHILEIQNTKSPEPVEIQLSAIKEQLEKFKGVTPQDINRQIVNELFEKITVEPLAVTCATLTFQLRSGSLEKWGFPLRRSDDMILTLHSEQHKIFSRKTCINTQDMVFFKYKYLLAL

SEQ ID NO: 1408 - protein, 570 aa, Unknown
  Description of Unknown: Integrase B1409 sequence
  cd03768,SM00857,G3DSA:1.10.10.2600,IPR036162,PF13408, IPR025827,G3DSA:3.40.50.1390,PS51737,IPR006119,IPR038109, PF07508,IPR011109,SSF53041,PTHR30461,PS51736, Coil,PF00239
MKAAIYSRVSTDQQDYSKQTDELKDYAKRNGIEVVYVFEEKESGFNNDRPEFEKLRKLTKQDIDIILVWEISRLSRRSVYLQQQIEDFTNKGICIYALSNSLRTINADGTINEMARVVLAVTATIAEQEAATLKARTLSGKRHKVLKEGHSYTQIAPYGYDYDKETKLLSINEKEATVVRRIFQLSIDGYSLIRIATALNVEGIKNKKGNKWYFATIRDMLINPVYMGKARYALKKAPAKEGKKYRKPLEFVEVDSPAIVSEETYQLSLERMQGRKSISKSSYSVEYPLLRGLIVCPVCGRRYVYKRASKLYTCNNRDNDCKAKGASAHKLESIVWDIIKVYFKENMTNNKVEEQIEPLQAEIDSYKQKILLLDGQLSELTEEASRIYDAAIEAQKRFPNMPKLYEDKMKELDSIDKEASRYKKEKELTDKKIRSISKKINHIKEARDINLDDITDELEKYNIFHQFIDNLVICGTKHTSFIVLTLTTGQILYIGHYSKRCSNYYILFYPSSDIYFDIQTSKGYINHLKEKATINSDGSIYLGDLTGEVKEYSIIDFVNYLDIEENRRYY

SEQ ID NO: 1409 - protein, 570 aa, Unknown
  Description of Unknown: Integrase B1410 sequence
  PTHR30461:SF3,SM00857,G3DSA:1.10.10.2600,IPR036162,PF13408, IPR025827,G3DSA:3.40.50.1390,PS51737,IPR006119,IPR038109, PF07508,IPR011109,SSF53041,PTHR30461,Coil, PS51736,cd00338,PF00239
MNIYYVREKLRSCSIYDIELNVAYYARVSTEKLEQQASIKHQEEHFEELIHSNSKWKFAGSYIDDGISGMHADKREEFQRMLRDAKLGKIDMIITKEISRFARNTLDSIQYTRELLSYGVCVWFQNDGINTIDDDSEFRLTIMAGVAQDEIRKLSSRVKFGHAQSIKNGVVLGHRMYGYSNNQGKLELIPEEADMVRMIFQDYASGISTPRIEKKLWNMGYRNFKGGKINRDVIKNIIRNPKYKGYYCGGKVKVIDMFTKKQEFLPQSEWVMFKDDGSRVPQIIDENTWEKANAYLRERGEAIKSRRTSFKNENIFTGKLFCANDGAPYWMKQHYIRGKEDVRWVCSYKIKNGAASCDSFGLAESELKEVIAELINKSSENIDSILEEYFEILQSSIKNIPDNKNEISRLEKQIDLLKQKREKILEYNLDGKISDDEFISRNKEYVKQIKQIESHILEIQNTKSPEPVEIQLSAIKEQLEKFKGVTPQDINRQIVNELFEKITVEPLAVTCATLTFQLRSGSLEKWGFPLRRSDDMILTLHPEQHKIFSRKTCIKTQHMVFYKYKYLLAL

SEQ ID NO: 1410 - protein, 570 aa, Unknown
  Description of Unknown: Integrase B1411 sequence
  PTHR30461:SF3,SM00857,G3DSA:1.10.10.2600,IPR036162,PF13408, PS51737,G3DSA:3.40.50.1390,IPR025827,IPR006119,IPR038109, PF07508,SSF53041,IPR011109,PTHR30461,Coil, PS51736,cd00338,PF00239
MKKFPIDLSCLTEEEISQFQEDPYTLYNGDQEVALYLRYSSTGQSDQSIEGQLRDCRTFCKANHYRIVAIYVDRATTARKDVEKRVHLMEMISDSAKQNWEYVIVWKLDRFARNRNDSAIMKMRLRKNGVKVLSATEHLTDSPESIILESVLEGMAEFFSAELSQKVTRGMRESALKCHSVGGHIPLGYKVENHKLVVDPDTAHIVQEAFSLYANGESVADICRKFNSAGYKTAKNTEFNRSSFKAMFRNTRYIGTYTYKDIVIENGIPAIIDKELFETVQRRLSKTATAPARGKAKVDYLLSGKLFCGHCGASMNGESGAGRHGKVYHYYSCYTKKRKLGCDKRPLKKDYIEGIVARDALNLLTDQLIDEIADMAIRQSEQDLINDTHIPQLTAQLSEVEKSITNITAAIEKGIASETLMNRLVQLEHEKKTLNKEIKAEEKFVYRIDRDQIVFWLSQFKYGNIEDENFRRRLIDLLVNSVTVWDEPDGYKITTAYNLTSCKTKTFRVEKNPAAEEATGFDFGESECAKKLVKSLDFTSFFYFLPRLCSPANGAAAQLSDQDPFCRRIP

SEQ ID NO: 1411 - protein, 569 aa, Unknown
  Description of Unknown: Integrase B1412 sequence
  PTHR30461:SF3,IPR036162,PS51737,IPR011109,PTHR30461, PF00239,G3DSA:1.10.10.2600,IPR006119,SSF53041,cd00338, SM00857,IPR025827,IPR038109,mobidb-lite,PS51736, PF13408,G3DSA:3.40.50.1390,PF07508,Coil
MPRAAQAAGAEFDGTPRAVIYARYSSTHQRERSIEDQIADCRAYAEHCGLMVVGIYADRAISGKTDERPDFQRMIDDSKKRQFDRVIVWKLDRFARNRYDSALYKHKLKQNGVSVLSAMENIGEGDESIILEAILEASAEYYSRDLRKKVLRGMTTSAKKGLHNTGSVPYGYRLEGESAVPDGDRAEFVKHVFEAYAKGETPAELYREMQCRGLDTKVNGRKVSDNIIGSILRNEKYTGRGMWRGIPVEWPRLIDDELFEAARARTEKNRRAPAAYKAAEPFILCGKAFCGYCGAPLMSGGGKGRSGKYYRHYICRTKKRERACGKKTEDKDFLEWYIVEQTCAYVLAPERLEYIADRVVECYKESFDGQRVSALEARIAKLDRDLDKTTDLLFAAPSAAAVDRINKHVVELEAQKSELEAELSGLKIAAAITYTRDEVVAWLKQFCNGDPLEAEFRRRIVETFINSVYVYDDRIVIYFNVRGGKQISYAEMLDSAGDVEPLPPGPESKKSGGPDNGTAASNSKERFLHEKNTEQTAESAVRFCSGLVHQKAQLRKRLSFFLFIVHCKE

SEQ ID NO: 1412 - protein, 569 aa, Unknown
  Description of Unknown: Integrase B1413 sequence
  PTHR30461:SF3,IPR036162,PS51737,IPR011109,PTHR30461, PS00397,PF00239,G3DSA:1.10.10.2600,IPR006119,SSF53041, SM00857,IPR025827,IPR038109,PS51736,cd03768, IPR006118,PF13408,G3DSA:3.40.50.1390,PF07508,Coil
MTNQKEKIVALYVRVSTGYQIDKDSLPFQKKELKAYCEHVLHVNKKRIEVFEDAGKSGKNTKRPAFERMMEKVKAGKVSHVVVYKIDRITRNLVDFSLMYDDFKYNNVTFISLNEQFDTSSAIGEAILKIILVFAELERKLTSERVTDVMIGRAQSGQWNGARVPYGWDWDAENKCPVHSKKEAPYAKAMYQMYLDGGSSVTIRDYNNSHNIPTKRGGEWTSKTVADFLRNPINKGDYRYNYRESARGKKKAEEEVIYLEGVFPPLVDPEIWNEVNRRMDENHTRKNTSSMHPIRKNCNVFAGLIACGKCGANYQVTSKDRRRGNGFRPSSYACTGKYQKKHCDNLNVSDVKIGPFMINYIAAIIDASKSRRFIKDTESLERVILSHIDFTDVAGISESSLQDTIDLLYGRSGTETLSGKPVSKDGKNTDTAEKKKELQEKLQKTDRALERLKKAYLFDDDAMGEKEFLEMKTKLEVDKVKLENSIKSLDSSSISENVDQAAFIKSASQFLISHKINSGGNIEYSELAMMDEEAMKTLMNSIIDHITVMDRHITEIVFKNGLTHTLLYR

SEQ ID NO: 1413 - protein, 569 aa, Unknown
  Description of Unknown: Integrase B1414 sequence
  SM00857,G3DSA:1.10.10.2600,IPR036162,PF13408,IPR025827, PS51737,G3DSA:3.40.50.1390,IPR006119,IPR038109,PF07508, SSF53041,IPR011109,PF00239,PTHR30461,PS51736, Coil,cd00338
MNIYYAREQLRSCSIYDLKINVAYYARVSTEKMEQQVSIKHQEEHFEELIRNNHQWFFAGAYIDDGISGIHTEKREEFQRMLRDAKLGKIDMIITKEISRFARNTLDSIQYTRELLSYGVCVWFQNDGINTIDEDSELRLTIMAGVAQDEIRKLSSRIKFGHAQSIKNGVVLGHRMYGYSNDKGKLTIVPEEADMVRMIFRDYASGVTTPQIEKKLWDMGYRSFKGKRIDRNVIKSIIKNPKYKGYYCGGKVKIVDMFTKKQEFLPQSEWVMFKDDGSRVPQIIDERTWEKANTYMRERGDAIRSRKTSFKQENIFTGKLICANDGAHYWLKRHCIHKKEDARWVCSHKIRNGANSCNSFGLSEAELQVIIANLINKSIENIDQILKKYFEILKSIIDNRPDNLDEIKRLERQIDTLKLKREKILEYNLSGDISDSEFVSRNKEYVNQIKETEKRIFDLQNTKKPEPIDNQIDAIKKQLEKFKGIVPDDVNRLVVDELFDKILVEPLDGSCLLSFYLKDGNVEKWGFPLRCSDSMKLNIFPEQHTIFSRNNCIKTQDIVLYNYTYKLAL

SEQ ID NO: 1414 - protein, 569 aa, Unknown
  Description of Unknown: Integrase B1415 sequence
  SM00857,IPR006118,G3DSA:1.10.10.2600,IPR036162,PS51737, G3DSA:3.40.50.1390,IPR006119,IPR038109,PF07508,IPR011109, SSF53041,PF00239,PTHR30461,PS00397,PS51736, Coil,cd00338
MDVIGYIRVSTNNQDLQRQRYLINKYCTENGYTLVHIYEDFAISGANLDRKEYQNLLNIKKGDADLIVISELSRFSRNENYLKTANDIYELLDKANIVLLDKPENILTKEDFLDIDKFIPFIFEAKGSAYERKKIITRAITGKDAKVAMNPLAITESYYSIPFGFKAVSNPNYVSGKTPKSLLAVDDEAMEIVKDVFKYISEGMTFQATTDKINMMYGDTISKQTAQNIIHNTIYKGLRKRKGEYFRLPIEQPISDDLWEKANYSCANNRLFKGNSTKHFNPIKGIGKCICGKNLTVGNTPSKLGSSLSYECAERAVLYSKSRCKNPNINFHLLNRIVWDIVKQNVLSKNYTIKSNEAIKALENENKKLQTAIASLEKEKEKLDSEKNTIITNGLLSTDSSVMKIVNEKVAEYNDKLKDIETKITNIKKEVTKNKKKITDEKKSQTSKELNEMSLEGKSKIFYQMLESIVTYSVKAKSGMVIVTFNNGLQVIALWKNYIKPSVWYLPVGFQFDMEKRMIYVKTMPKTEGFDFTISDYETKFYEYRDLFKHFDLAQYQVEIPKEELERKN

SEQ ID NO: 1415 - protein, 569 aa, Unknown
  Description of Unknown: Integrase B1416 sequence
  PTHR30461:SF3,IPR036162,PS51737,IPR011109,PTHR30461, PS00397,PF00239,G3DSA:1.10.10.2600,IPR006119,SSF53041, SM00857,IPR025827,IPR038109,PS51736,cd03768, IPR006118,PF13408,G3DSA:3.40.50.1390,PF07508,Coil
MTEQNEKIVALYVRVSTGYQVDKDSLPFQKKELKAYCEHVLHIDKNRIEIFEDAGKSGKNTKRPAFERMMGKVKSGQISHVIVYKIDRISRNLVDFSLMYDDFKYNNVTFISLNEQFDTSSAIGEAILKIILVFAELERKLTSERVTDVMIGRAQNGQWNGARVPYGWDWDEEKQCPVHSKKEAQYAIAMYEMYLNGGSTVSIRDYNNAHNIPTKRGGEWTSKTVADFLRNPINKGAYRYNYRESARGRKKPNEEVVFIENVFPPLVEPRIWELVNKRMDENTLKLNTSSMHTIRKNCNVFAGLIVCGKCGVNYQVTAKDRRKGSGFRPSSYACTGKYQKNHCDNLNVSDVKIGPFMINYIAAMVDASKSRKFIKDTKSLEQVLLSHINFSNIAGIANDSLQETLELISGYSASKSALWSAETLSKEQQTDVDSKQSELNERLQKVNRAMERLKKVYLFSDDGMDEKEFLEMKSSLEADRVKIENEIKGLSAPIATNIDQVAFIKSASEFLLMHKINSGEFVDYKELATLDEESLKQFMNSVIDHIVVRERKIVEIVFTNGLSHTLLYK

SEQ ID NO: 1416 - protein, 569 aa, Unknown
  Description of Unknown: Integrase B1417 sequence
  SM00857,G3DSA:1.10.10.2600,IPR036162,PF13408,IPR025827, G3DSA:3.40.50.1390,PS51737,IPR006119,IPR038109,PF07508, SSF53041,IPR011109,PF00239,PTHR30461,PS51736, Coil,cd00338
MNIYYAREQLRSCSIYDLKINVAYYARVSTEKMEQQVSIKHQEEHFEELIRNNHQWFFAGAYIDDGISGIHTEKREEFQRMLRDAKLGKIDMIITKEISRFARNTLDSIQYTRELLSYGVCVWFQNDGINTIDEDSELRLTIMAGVAQDEIRKLSSRIKFGHAQSIKNGVVLGHRMYGYSNDKGKLTIVPEEADMVRMIFRDYASGVTTPQIEKKLWDMGYRSFKGKKIDRNVIKSIIKNPKYKGYYCGGKVKIVDMFTKKQEFLPQSEWVMFKDDGSRVPQIIDERTWEKANTYMRERGDAIRSRKTSFKQENIFTGKLICANDGAHYWLKRHCIHKKEDARWVCSHKIRNGANSCNSFGLSEAELQVIIANLINKSIENIDQILKKYFEILKSIIDNRPDNLDEIKRLERQIDTLKLKREKILEYNLNGDISDSEFVSRNKEYVNQIKETEKRIFDLQNTKKPEPIDNQIDAIKKQLEKFKGIVPDDVNRLVVDELFDKILVEPLDGSCLLSFYLKDGNVEKWGFPLRCSDSMKLNIFPEQHTTFSRNNCIKTQDVVLYNYTYKLAL

SEQ ID NO: 1417 - protein, 569 aa, Unknown
  Description of Unknown: Integrase B1418 sequence
  PTHR30461:SF3,cd00338,SM00857,G3DSA:1.10.10.2600,IPR036162, PF13408,PS51737,IPR025827,G3DSA:3.40.50.1390,IPR006119, IPR038109,PF07508,IPR011109,SSF53041,PTHR30461, PS51736,Coil,PF00239
MSSVDKIAVVYARYSSHGQTEQSIEGQIAAAQKYAEQHGYTIIHVYADRAMTGRNDDREQFQKMLSDTAMHQFGVILLWKIDRFGRNREEIAFNRYRCKKNGVRVERVAEDVPDGPEGVILDSVLEGMAEYYSLQLAQNVRRGQRESAKKSMSIGGNKMLGYIVNPETKRYESDPKTASYVTEIFKRYANGETISEIVTWLNAQGIRTTRGSEFTVNSLHRLLKNEKYTGVYIFHDIRNEGGMPALTDRATFDKVQEMLKVNRRAPARVWSKTEYLLTDKLFCGHCGAMMVGESGHGRNGIKHSYYTCLNRKKKKSCDKKPVRQDVIEPLVLRAIGKLLENPATLENIADQVWAAYERSDTSGDTIKALDKQIADVDRALSNVMKAIEMGIINEMTKTRMDELTDQKQALSAARAEAGLAGGFKLTRDMILFFLQEIAALDMADRDSQKRLIKTFVNAIYLYDDHFDIAFNYTDNGKVVVRMQEINDAVRGEMFGRCAQCPTKRVVASILPRLFLCFSTVKCNRASCILQCCPDRVLFPCALAICGGSGYNSLVTAPLHDTQKTEYQSQ

SEQ ID NO: 1418 - protein, 569 aa, Unknown
  Description of Unknown: Integrase B1419 sequence
  PTHR30461:SF3,IPR036162,PS51737,IPR011109,PTHR30461, PS00397,PF00239,G3DSA:1.10.10.2600,IPR006119,SSF53041, SM00857,IPR025827,IPR038109,PS51736,cd03768, IPR006118,PF13408,G3DSA:3.40.50.1390,PF07508,Coil
MINQKEKIVALYVRVSTGYQVDKDSLPFQKKELKAYCEHVLHVDKKRIEVFEDAGKSGKNTKRPAFERMMEKVKAGKVSHVVVYKIDRITRNLVDFSLMYDDFKYNNVTFISLNEQFDTSSAIGEAILKIILVFAELERKLTSERVTDVMIGRAQSGQWNGARVPYGWDWDAENKCPVHSKKEAPYAKAMYQMYLDGGSSVTIRDYNNSHNIPTKRGGEWTSKTVADFLRNPINKGAYRYNYRESSRGKRKADEEVIYMEGVFPPLIDQEIWNEVNRRMDANHTRKNTSAMHPIRKNCNVFAGLIVCGKCGSNYQVTAKDRRRGNGFRPSSYACTGKYQKKHCDNLNVSDVKIGPFMINYIAAIIDASKSRRFIKDTESLERVILSHIDFTDVAGISESSLQDTIDLLYGRSGTETLSGKPVSKDGKNTDTVEKKKELQEKLQKTDRALERLKKAYLFDDDAMDEKEFLEMKTKLEVDKVKLENSIKSLDSSSISENVDQAAFIKSASQFLISHKINSGGNIEYSELAMMDEEAMKTLMNSIIDHITVMDRHITEIVFKNGLTHTLLYR

SEQ ID NO: 1419 - protein, 569 aa, Unknown
  Description of Unknown: Integrase B1420 sequence
  PTHR30461:SF3,IPR036162,PS51737,IPR011109,PTHR30461, PF00239,G3DSA:1.10.10.2600,IPR006119,PF14287,SSF53041, IPR025378,SM00857,IPR025827,cd03770,IPR038109, PS51736,PF13408,G3DSA:3.40.50.1390,PF07508,Coil
MKQSSKKHELGTAALYCRLSRDDNMDSESNSIQNQRKILQKAAKDKGYTDTVFFVDDGITGTTMKRPGFQKMLTAIEAGYISAVFVKDLSRLGRNYIEVGKLTEEFFPLHDIRLVAVSDGVDSDEGEDDFTPFKNIMNEYYAKDISKKRRIVNKMKGNAGVPLSPPPYGYIKNPDDPRFWVVEPEAAEVVRRIYRMALEGYGLAETAAQLAADGVVNPTYYWRSRGTSRGGSKSTVEPTKWGHTTVKKILTLQEYCGDVINFKSYSKSYKMKKRIENPEENRAIFLNVHEAIIDRQTWEKVQALQKGTRRKKPTVTQEPSVFSGLLKCPECGGNLNFHFNQNNHDIKFFSCQNHNSGYRKCSKTHYIRLDFLEQVVLYEVKRLACFASEYENDFIKAMIGRSAKVAENTALRKQRELDALTARDRELDMLFERLYEDNVAGKIDDARFAKMSKRYEQEQGENAKKIKALRLELKKDESKRMDIDDFLETVRRYTDATTITKRMVAELIDHIEVYHAEKQDGVTNQRVVIYYNCIGAFDVPDRRKIPEADIIMETRKGVALSYAPEQVAV

SEQ ID NO: 1420 - protein, 569 aa, Unknown
  Description of Unknown: Integrase B1421 sequence
  PTHR30461:SF3,IPR036162,PS51737,IPR011109,PTHR30461, PS00397,PF00239,G3DSA:1.10.10.2600,IPR006119,SSF53041, SM00857,IPR025827,IPR038109,PS51736,cd03768, IPR006118,PF13408,G3DSA:3.40.50.1390,PF07508,Coil
MTNQKEKIVALYVRVSTGYQVDKDSLPFQKKELKAYCEHVLHVDKKRIEVFEDAGKSGKNTKRPAFERMMEKVKAGKVSHVVVYKIDRITRNLVDFSLMYDDFKYNNVTFISLNEQFDTSSAIGEAILKIILVFAELERKLTSERVTDVMIGRAQSGQWNGARVPYGWDWDAENKCPVHSKKEAPYAKAMYQMYLDGGSSVTIRDYNNSHNIPTKRGGEWTSKTVADFLRNPINKGAYRYNYRESARGKRKADEEVIYMEGVFPPLIDQEIWNEVNRRMDANHTRKNTSAMHPIRKNCNVFAGLIVCGKCGSNYQVTAKDRRRGNGFRPSSYACTGKYQKKHCDNLNVSDVKIGPFMINYIAAIIDASKSRRFIKDTESLERVILSHIDFTDVAGISESSLQDTIDLLYGRSGTETLSGKPVSKDGKNTDTVEKKKELQEKLQKTDRALERLKKAYLFDDDAMDEKEFLEMKTKLEVDKVKLENSIKSLDSSSISENVDQAAFIKSASQFLISHKINSGGNIEYSELAMMDEEAMKTLMNSIIDHITVMDRHITEIVFKNGLTHTLLYR

SEQ ID NO: 1421 - protein, 569 aa, Unknown
  Description of Unknown: Integrase B1422 sequence
  PTHR30461:SF3,IPR036162,PS51737,IPR011109,PTHR30461, PS00397,PF00239,G3DSA:1.10.10.2600,IPR006119,SSF53041, SM00857,IPR025827,IPR038109,PS51736,cd03768, IPR006118,PF13408,G3DSA:3.40.50.1390,PF07508,Coil
MPDNPATIKKVAIYIRVSTKFQVDKDSLSVQRRELGTYSEMILNCSDYVVFEDAGYSAKNTDRPDYQRMMARLRTGEFSHLLVWKIDRISRNLLDFTEMYNELRSLGITFVSKNEQFDTSNAIGEAMLKIILVFAELERKMTSERVTDVMLSRASNGQWNGGRIPYGYQYDKASKKFSENPSEAKTVRTIYNMYEQYRSLIYVARYLNQANIKTRRGYEWTPTVIQSILRNPFYIGSYVYNVHDDGKGGKKKEKKEWITVENHHEAIISKKQYDSVSNVLTKNQKNDFSFSKAYVRKNIHVFAGLVKCGECGCAMTASPDRCRASGWRPSIYGCARRRRNSGACTNKFVSDASIGDFIINYIANIIRLKSVVNKNTSLESLEKRILRGEAFKNVTGMVGGLEEIREMLLSGESGFEYKPSIATSTPDKKESEVEYLNERYRKCETVMNRLKTLYLYGDGSMSQTEYILEREKILEELAGIEKKLTELNNAEMTRIDSNDEFSQKASYFIMLDRIMNSKYINYEKFSLSVDKVTQRAFFLQVIEKVIVKDGRVTSIYFRNGIVNTFTYAE

SEQ ID NO: 1422 - protein, 569 aa, Unknown
  Description of Unknown: Integrase B1423 sequence
  PTHR30461:SF3,IPR036162,PS51737,IPR011109,PTHR30461, PF00239,G3DSA:1.10.10.2600,IPR006119,PF14287,SSF53041, IPR025378,SM00857,IPR025827,cd03770,IPR038109, PS51736,PF13408,G3DSA:3.40.50.1390,PF07508,Coil
MKQSNNKKFRDVTAFLYERLSRDDNLEGESYSIGNQKKLLTKVAKEKGYTNLVHFLDDGISGVTMDRPGFVEMIKQLEQGKAAAVFVKDLSRLGRNYIEVGRLTEEFFPEHDIRLVAVSDNIDTAEGENELAPIRNLFNEWYARDISKKRRISNKIKGNGGEPMGQPPYGYMKDPDNPKRWIVDDEAAQVVKHIYGMTLDGMGTEQIAAQLEREEILTPRAYWLKKGVKRPGKGKQQPPTKWNSSTVTKILSLQEYCGDILNFKTYSKSYKNKKRIENDRENWVVFKDVHEPIIDRAVWEQVQQKRGKVRKRRTNEGEKNMFSGLLVCADCGNNLHFHFNQGNPEIRYFNCSNYKGNRGTCTSTHYVRVDFLEQVVLGEIKRLTKFASRYEDDFVKAVMGSTQQNVALDRKLKKKELAALQARDEELDGLFERIYEDNVSGKLSDDRFAKMSRRYEDEQKEISEKIKALRAEMDKLSSKSVTADMFISTVRKYTRAKVLTPRMLNELIDHIEVHQAEKIDGIWEQHLVIHYNCVGAIFIPDVFPLPAPQVSVNTRKGVVVNYAPGQLAV

SEQ ID NO: 1423 - protein, 569 aa, Unknown
  Description of Unknown: Integrase B1424 sequence
  PTHR30461:SF3,IPR036162,PS51737,IPR011109,PTHR30461, PF00239,G3DSA:1.10.10.2600,IPR006119,PF14287,SSF53041, IPR025378,SM00857,IPR025827,cd03770,IPR038109, PS51736,PF13408,G3DSA:3.40.50.1390,PF07508,Coil
MKQSSKKISTGTAALYCRLSRDDNMDSESNSIQNQRKILQKAAKDKGYTDTIFFVDDGITGTTMKRPGFQKMLTAIEAGYISAVFVKDLSRLGRNYIEVGKLTEEFFPLHDIRLVAVSDGVDSDEGEDDFTPFKNIMNEYYAKDISKKRRIVNKMKGNAGVPLSPPPYGYIKNPDDPRFWVVEPEAAEVVRRIYCMALEGYGLAEIAARLAADGVVNPTYYWRSRGTSRGGSKSTVEPTKWGHTTVKKILTLQEYCGDVINFKSYSKSYKMKKRIENPEENRAIFLNVHEAIIDRQTWEKVQALQKGTRRKKPTVTQAPSVFSGLLKCPECGGNLNFHFNQNNHDIKFFSCQNHNSGYRKCSKTHYIRLDFLEQVVLYEVKRLACFASEYENDFIKAMIGRSAKVAENTALRKQRELDTLTARDRELDMLFERLYEDNVAGKIDDARFAKMSKRYEQEQGENAKKIKALRLELKKDESKRMDIDDFLETVRRYTDATTITKRMVAELIDHIEVYHAEKQDGITNQRVDIHYNCIGAFDVPDRRKIPEADIIMETRKGVALSYAPEQVAV

SEQ ID NO: 1424 - protein, 569 aa, Unknown
  Description of Unknown: Integrase B1425 sequence
  cd03768,SM00857,G3DSA:1.10.10.2600,IPR036162,PF13408, IPR025827,PS51737,G3DSA:3.40.50.1390,IPR006119,IPR038109, PF07508,IPR011109,SSF53041,PTHR30461,PS51736, Coil,PF00239
MKGAIYSRVSTEGQDYSKQTNELKEYASKNGIDIVYVFEEKESGFNNDRPEFEKVRKLTKLDIDIILVWEISRISRRAIYLQQQVQEFTDKGICIYAKKEGFSTLNGDGTVNASTKMLIGFASIIAEQEAATLKERTISSKRNKILREGKSYTGVAPYGYDYSKDTKKLSINKEEAEVVKRIFQLSIDGYSAYRIPIILNAEGILSKKGNSWTVASIRTLLSNPVYMGKANYTLKSEKPKEGKTYRKAIEVASVDVPPIIDAELFNLSLEKITGRTNRSKSTGTKYNPLLRGLIICPNCGRRYTYKNRNQTYTCNNLIDNKLCKAKTITTKLDSIIWNVVKIFFYKELAAGKAQEQIEPLQVEIESYKQQLLLLDGKQSELTSKANIIINAAIEIKIQFPNMPDLYTNKLKEADVINKEAGRYLKERERLEKLIHSNESRIKNINKASKESSLVDSITDETEKYDLVHRAVECIMIFGEDKTSIIVVTFTTGQTIYIGYFSKRNSKYYTIFYPSVDIYFDIHKEKGYINHLKEEVAGIMPISQLNKQTVEYCITDFVNYLDIEDNRRYY

SEQ ID NO: 1425 - protein, 569 aa, Unknown
  Description of Unknown: Integrase B1426 sequence
  PTHR30461:SF3,IPR036162,PS51737,IPR011109,PTHR30461, PF00239,G3DSA:1.10.10.2600,PF14287,IPR006119,SSF53041, IPR025378,SM00857,IPR025827,cd03770,IPR038109, PS51736,PF13408,G3DSA:3.40.50.1390,PF07508,Coil
MKQSNNKKSRDVTAFLYERLSRDDNLEGESYSIGNQKKLLAKVAKEKGYTNLVHFLDDGISGVTMDRPGFVEMICQLEQGKAAAVFVKDLSRLGRNYIEVGRLTEEFFPNHDIRLVAVSDNIDTAEGENELAPIRNLFNEWYARDISKKRRISNKIKGNAGEPMGQPPYGYIKDPNDPKHWIVDDEAAQVVRRVYSMTLEGFGTEQIAAQLEKDDVLTPRAYWLTKGIKRPGKGKQQPPTKWNSSTITKILSLQEYCGDILNFKTYSKSYKNKKRIDNDRENWVVFQDVHEAIIERAMYEQVQQKRGKIRKRRTNNGEHNMFSGLLVCADCGSNLHFHFNQGNPEIKYFNCSNYKGNRGTCTSTHYVRVDFLEEVVLGEIRRLTKFASLYEDEFVKAVIGHSQQAEQTDRKLKEKELRTLLARDEELDGLFERIYEDNVSGKLSDDRFAKMSRRYEDEQKELAEKIKKLRSEIEKQSSRSMTTDMFIGLVRKYTRARKLTPRMLNELIEKIEVFNAEKIDGVWEQRLRIHYNCVGTIEIPTVLPLPIPEVSVNTRKGVVVNYAPCELAV

SEQ ID NO: 1426 - protein, 569 aa, Unknown
  Description of Unknown: Integrase B1427 sequence
  PTHR30461:SF3,IPR036162,PS51737,IPR011109,PTHR30461, PS00397,PF00239,G3DSA:1.10.10.2600,IPR006119,SSF53041, SM00857,IPR025827,IPR038109,PS51736,cd03768, IPR006118,PF13408,G3DSA:3.40.50.1390,PF07508,Coil
MTNQKEKIVALYVRVSTGYQVDKDSLPFQKKELKAYCEHVLHIDKKRIEIFEDAGKSGKNTKRPAFERMMEKVKAGLVSHVIVYKIDRISRNLVDFSIMYDNFKRNDVTFISLNEQFDTSSAMGEAMLKIILVFAELERKLTSERVTDVMIGRAQSGQWNGARVPYGWDWDEENKRPVHSKKEAPYAKAMYQMYLDGGSSVTIRDYNNSHNIPTKRGGEWTSKTVADFLRNPINKGDYRYNYRESARGKRKSDEEVIYMDGVFPPLVDPEIWNEVNRRMDMNCKKRNTSAFHPIRKRCNVFAGLIVCGKCGSNYQVTSKDGRRGNGFRPSSYACTGKYQKKHCDNLNVSDVKIGPFMINYIAAIIDASKSRRFIKDTESLERVILSHIDFTDVAGISESSLQDTIDLLYGRSGTETLSGKPVSKDGKNTDTAEKKKELQEKLQKTDRALERLKKAYLFDDDAMDEKEFLEMKTKLEVDKVKLGNSIKSLDSSSISENVDQAAFIKSASQFLISHKINSGGNIEYSELAMMDEEAMKTLMNSIIDHITVMDRHITEIVFKNGLTHTLLYR

SEQ ID NO: 1427 - protein, 569 aa, Unknown
  Description of Unknown: Integrase B1428 sequence
  PTHR30461:SF3,SM00857,G3DSA:1.10.10.2600,IPR036162,PF13408, IPR025827,G3DSA:3.40.50.1390,PS51737,IPR006119,IPR038109, PF07508,SSF53041,IPR011109,PTHR30461,PS51736, cd00338,PF00239
MARAAKQDNNSEIIDGVIYARYSEGPNQTEASIEGQVRECKEYAKRNGIRIINVYSDSKHTGTNDNRAEFQKMLRDSRRGGFSVVVVWKIDRFGRNRAEMAQNKALLKLQGVKVVSAKEYIPDSPEGIILESVLEGMAEYYSANLSQNIKRGMKENALHCKSNGSGKSLGYIVDKDGYFEIEPNEATIVKTIFQKYDEGMKIADIWREIVASGAKTKRGKDFTQYGISRVLSNRAYIGEYRYGDIVTPGGMPRIIDDDLFNRVQERRALSKKAPASRRSNSDVDFLLTGKVFCGHCKGTMRGMSGTSKTGRKFYYYACHDKIFKHNKCTKKNVKKEWLETEVTRITRDDILNKETIEFIADRVVEIQRQEQEDKSMLRYYEQQLRDTQSAINNIMKAIEAGIITSSTKSRLFELEEQKSIIEGEIERKKIITPVIEKEQVIFSLERFFGGDINNKEYQRNIIDMFVNKVILYDNKIIITYNISSQNEISVDVVEQAAFAALDECSSKLSLPPPATRRGGHFPSRLFVNTRSHRCDNLCVTFTNSGACPCTQFRFTLCKADFLLPLINFI

SEQ ID NO: 1428 - protein, 569 aa, Unknown
  Description of Unknown: Integrase B1429 sequence
  SM00857,IPR006118,G3DSA:1.10.10.2600,IPR036162,PS51737, G3DSA:3.40.50.1390,IPR006119,IPR038109,PF07508,IPR011109, SSF53041,PF00239,PTHR30461,PS00397,PS51736, Coil,cd00338
MDVIGYIRVSTNNQDLQRQRYLINKYCTENGYTLVHIYEDFAISGANLDRKEYQNLLNIKKGDADLIVISELSRFSRNENYLKTANDIYELLDKANIVLLDKPENILTKEDFLDIDKFIPFIFEAKGSAYERKKIITRAITGKDAKVAMNPLAITESYYSIPFGFKAVSNPNYVSGKTPKSLLAVDDEAMEIVKDVFKYISEGMTFQATTDKINMMYGDTISKQTAQNIIHNTIYKGLRKRKGEYFRLPIEQPISDDLWEKANYSCANNRLFKGNSTKHFNPIKGIGKCICGKNLTVGNTPSKLGSSLSYECAERAVLYSKSRCKNPNINFHLLNRIVWDIVKQNVLSKNYTIKSNEAIKALENENKKLQTAIASLEKEKEKLDSEKNTIITNGLLSTDSSVMKIVNEKVAEYNDKLKDIETKITNIKKEVTKNKKKITDEKKSQTSKELNEMSLEGKSKIFYQMLESIVTYSVKAKSGMVIVTFNNGLQVIALWKNYIKPSVWYLPVGFQFDMEKRMIYVKTMPKTEGFDFTISDDETKFYEYRDLFKHFDLAQYQVEIPKEELERKN

SEQ ID NO: 1429 - protein, 569 aa, Unknown
  Description of Unknown: Integrase B1430 sequence
  PTHR30461:SF3,IPR036162,PS51737,IPR011109,PTHR30461, PS00397,PF00239,G3DSA:1.10.10.2600,IPR006119,SSF53041, SM00857,IPR025827,IPR038109,PS51736,cd03768, IPR006118,PF13408,G3DSA:3.40.50.1390,PF07508,Coil
MTEQNEKIVALYVRVSTGYQVDKDSLPFQKKELKAYCEHVLHIDKNCIEIFEDAGKSGKNTKRPAFERMMGKVKSGQVSHVIVYKIDRISRNLVDFSLMYDDFKYNNVTFISLNEQFDTSSAIGEAILKIILVFAELERKLTSERVTDVMIGRAQNGQWNGARVPYGWDWDEEKQCPVHSKKEAQYAIAMYEMYLNGGSTVSIRDYNNAHNIPTKRGGEWTSKTVADFLRNPINKGAYRYNYRESARGRKKPNEEVVFIENAFPPLVEPRIWELVNKRMDENTLKLNTSSMHTIRKNCNVFAGLIVCGKCGVNYQVTAKDRRKGSGFRPSSYACTGKYQKNHCDNLNVSDVKIGPFMINYIAAMVDASKSRKFIKDTRSLEQVLLSHINFSNIAGIANDSLQETLELISGYSASKSALWSAETLSKEQQTDVDSKQSELNERLQKVNRAMERLKKVYLFSDDGMDEKEFLEMKSSLEADRVKIENEIKGLSAPIATNVDQVAFIKSASEFLLMHKINSGEFVDYKELATLDEESLKQFMNSVIDHIVVRERKIVEIVFVNGLSHTLLYK

SEQ ID NO: 1430 - protein, 569 aa, Unknown
  Description of Unknown: Integrase B1431 sequence
  PTHR30461:SF3,IPR036162,PS51737,IPR011109,PTHR30461, PF00239,G3DSA:1.10.10.2600,IPR006119,PF14287,SSF53041, IPR025378,SM00857,IPR025827,cd03770,IPR038109, PS51736,PF13408,G3DSA:3.40.50.1390,PF07508,Coil
MKQSNNKKSRDVTAFLYERLSRDDNLEGESYSIGNQKKLLTKVAKEKGYTNLVHFLDDGISGVTMDRPGFVDMIRQLEQGKAAAVFVKDLSRLGRNYIEVGRLTEEFFPEHDIRLVAVSDNIDTAEGDNELAPIRNLFNEWYARDISKKRRISNKIKGNAGEPMGQPPYGYMKDPDNPKRWIVDDEAAQVVKHIYGMTLDGMGTEQIAAQLEREEILTPRAYWLKKGVKRPGKGKQQPPTKWNSSTVTKILSLQEYCGDILNFKTYSKSYKNKKRIENDRENWVVFKDVHEPIIDRAVWEQVQQKRGKVRKRRTNEGEKNMFSGLLVCADCGNNLHFHFNQGNPEIRYFNCSNYKGNRGTCTSTHYVRVDFLKQVVLGEIKRLTKFASRYEDDFVKAVMGSTQQNVALDRKLKEKELAALQARDEELDGLFERIYEDNVSGKLSDDRFAKMSRRYEDEQKEISEKIKTLRAEMDKLSSKSVMADMFISTVRKYTRAKVLTPRMLNELIDHIEVHQAEKIDGIWEQHLVIHYNCVGAIFIPDVFPLPAPQVSVNTRKGVVVNYAPGQLAV

SEQ ID NO: 1431 - protein, 569 aa, Unknown
  Description of Unknown: Integrase B1432 sequence
  PTHR30461:SF3,IPR036162,PS51737,IPR011109,PTHR30461, PF00239,G3DSA:1.10.10.2600,IPR006119,PF14287,SSF53041, IPR025378,SM00857,IPR025827,cd03770,IPR038109, PS51736,PF13408,G3DSA:3.40.50.1390,PF07508,Coil
MKKSNNKKTRDVTAFIYPRLSRDDNLEGGSYSIGNQKKLLTKTAKDMGYTNIVTFVDDGVSGFTMARPGFNEMMRQLEEGKASALFVKDLSRLGRNYIEVGRLMEEFFPEHDIRLVAVSDNIDTTEGENELAPIRNLFNEWYARDISKKRPISNKIKGIAGEPMGPPPFGYMKDPENPKHWIIDEEAAQVVRRIFSMILDGYGTEQIASIFELEGILTPCAYWLKKEIRKPGRAKQQPSTKWNASTIVNILTLQEYCGDVLNFKTYSKSYKNKKRIPNDRENWAIFKDVHESVIDRVIWELVQEKRGKIRRRKPKDGERNMFCGLLVCADCGHNLNYHFNQGNHDIKYFNCSNYNSGRGSCTSTHYIRVDFLEQVVLGEIKRLTKYAVHYEDEFQQAIMGSTQKAVELERKLKQKELAAAQARDGELDGLFERIYEDNISGKLSDERFAKMSQRYEEEQAELSGKIKALRKELDKLNGDAVSTDMFLATVRKYTRAKKLTPRMLNELVNHIEVHQAEKINGEWVQKLTIYYNCVGALFIPDTPSMPVPDVTVNTRRGVYVSYEPAQNRQ

SEQ ID NO: 1432 - protein, 569 aa, Unknown
  Description of Unknown: Integrase B1433 sequence
  PTHR30461:SF3,IPR036162,PS51737,IPR011109,PTHR30461, PS00397,PF00239,G3DSA:1.10.10.2600,IPR006119,SSF53041, SM00857,IPR025827,IPR038109,PS51736,cd03768, IPR006118,PF13408,G3DSA:3.40.50.1390,PF07508,Coil
MAEQNEKIVALYVRVSTGYQVDKDSLPFQKKELKAYCEHVLHIDKNCIEIFEDAGKSGKNTKRPAFERMMGKVKSGQVSHVIVYKIDRISRNLVDFSLMYDDFKYNNVTFISLNEQFDTSSAIGEAILKIILVFAELERKLTSERVTDVMIGRAQNGQWNGARVPYGWDWDEEKQCPVHSEKEAQYAIAMYEMYLNGGSTVSIRDYNNAHNIPTKRGGEWTSKTVADFLRNPINKGAYRYNYRESARGRKKPNEEVVFIENVFPPLVEPRIWELVNKRMDENTLKLNTSSMHTIRKNCNVFAGLIVCGKCGVNYQVTAKDRRKGSGFRPSSYACTGKYQKNHCDNLNVSDVKIGPFMINYIAAMVDASKSRKFIKDTKSLEQVLLSHINFSNIAGIANDSLQETLELISGYSASKSALWSAETLSKEQQTDVDSKQSELNERLQKVNRAMERLKKVYLFSDDGMDEKEFLEMKSSLEADRVKIENEIKGLSAPIATNVDQVAFIKSASEFLLMHKINSGEFVDYKELATLDEESLKQFMNSVIDHIVVRERKIVEIVFVNGLSHTLLYK

SEQ ID NO: 1433 - protein, 569 aa, Unknown
  Description of Unknown: Integrase B1434 sequence
  SM00857,G3DSA:1.10.10.2600,IPR036162,PF13408,IPR025827, G3DSA:3.40.50.1390,PS51737,IPR006119,IPR038109,PF07508, SSF53041,IPR011109,PTHR30461,Coil,cd00338, PF00239
MAYRKITDIRDTIGMRAVFYARVSTAEEEQLNAIELQIEENRGCIKDHGWKLVGEYIDRSKSGTMVKGRDDYQRLYEDLYEDLFDIVVIKDQERLQRNTLDWYLFINRVVQTGKLLFMYMDGKFYSPDDALITGVRAIIAEEFSRNLSKKLHNYHDHRIEKARQGQEIALQGSGNVYGWDKKDGKYYINPEQAKVRRLMCEGIMARKGSTLIAKELNDAGYRNTVGKPWKPMDIPKFVYDCKNVGTMIINKERHDFESKQTIKLPKEEWVYVENALPPIVTQEEWDLICKIHEERVIATGSDRRGKKTSGYSFSGKLVCGICGAPYWRKQRVSKDEYWVCSTKQTKGRRTRKRDSTMGKAGEINPLGCDNENISYNSLMEIMGVVSERLQANTDTIKQDMINWLTKLRKQLLEANGGHTEADLQRELSRKSKLLDAYLDGILNKQEYQKKAEELDERIIQLKAETEKNKANSGDIAEIDKVLANIDEEVSRYVDGNEKLKVEYLLEHLEQVQIFPDKVIVIVPILSEGIVVEKTQYVSREKWGWKNNFNSFNLWITKSNRGRFFAIRNK

SEQ ID NO: 1434 - protein, 569 aa, Unknown
  Description of Unknown: Integrase B1435 sequence
  PTHR30461:SF3,IPR036162,PS51737,IPR011109,PTHR30461, PS00397,PF00239,G3DSA:1.10.10.2600,IPR006119,SSF53041, SM00857,IPR025827,IPR038109,PS51736,cd03768, IPR006118,PF13408,G3DSA:3.40.50.1390,PF07508,Coil
MTNQKEKIVALYVRVSTGYQVDKDSLPFQKKELKAYCEHVLHVDKKRIEVFEDAGKSGKNTKRPAFERMMEKVKAGEVSHVVVYKIDRITRNLVDFSLMYDDFKYNNVTFISLNEQFDTSSAIGEAILKIILVFAELERKLASERVTDVMIGRAQSGQWNGARVPYGWDWDAENKCPVHSKKEAPYAKAMYQMYLDGGSSVTIRDYNNSHNIPTKRGGEWTSKTVADFLRNPINKGDYRYNYRESARGKRKADEEVIYMEGVFPPLIDPDIWNEVNRRMDANHTRKNTSAMHPIRKNCNVFAGLIVCGKCGSNYQVTAKDRRRGNGFRPSSYACTGKYQKKHCGNLNVSDVKIGPFMINYIAAIIDASKSRRFIKDTESLERVILSHIDFTDVAGISESSLQDTIDLLYGRSGTETLSGKLVSKDGKNTDTAEKKKELLEKLQKTDRALERLKKAYLFDDDAMDEKEFLEMKTKLEVDKVKLENSIKSLDSSSISENVDQAAFIKSASQFLISHKINSGGNIEYSELAMMDEEAMKTLMNSIIDHITVMDRHITEIVFKNGLTHTLLYR

SEQ ID NO: 1435 - protein, 569 aa, Unknown
  Description of Unknown: Integrase B1436 sequence
  PTHR30461:SF3,IPR036162,PS51737,IPR011109,PTHR30461, PF00239,G3DSA:1.10.10.2600,IPR006119,PF14287,SSF53041, IPR025378,SM00857,IPR025827,cd03770,IPR038109, PS51736,PF13408,G3DSA:3.40.50.1390,PF07508,Coil
MKQSNNKKSRDVTAFLYERLSRDDNLEGESYSIGNQKKLLTKVAKEKGYTNLVHFLDDGISGVTMDRPGFVEMIQQLEQGKAAAVFVKDLSRLGRNYIEVGRLTEEFFPEHDIRLVAVSDNIDTAEGDNELAPIRNLFNEWYARDISKKRRISNKIKGNAGEPMGQPPYGYMKDPDNPKHWIVDDEAAQVVKRIYGMTLDGMGTEQIAAQLEREEILTPRAYWLKKGVKRPGKGKQQPPTKWNSSTITKILSLQEYCGDILNFKTYSKSYKNKKRIENDRENWVVFKDVHEPIVDRAVWEQVQQKRGKVRKRRTNEGEKNMFSGLLVCADCGNNLHFHFNQGNPEIRYFNCSNYKGNRGTCTSTHYVRVDFLEQVVLGEIKRLTKFASRYEDDFVKAVMGSTQQNVALDRKLKEKELAALQARDEELDGLFERIYEDNVSGKLSDDRFAKMSRRYEDEQKEISEKIKALRAEMDKLSSKSVTADMFISTVRKYTRAKVLTPRMLNELIDHIEVHQAEKIDGIWEQHLVIHYNCVGAIFIPDVFPLPAPQVSVNTRKGVVVNYAPGQLAV

SEQ ID NO: 1436 - protein, 569 aa, Unknown
  Description of Unknown: Integrase B1437 sequence
  PTHR30461:SF3,IPR036162,PS51737,IPR011109,PTHR30461, PS00397,PF00239,G3DSA:1.10.10.2600,IPR006119,SSF53041, SM00857,IPR025827,IPR038109,PS51736,cd03768, IPR006118,PF13408,G3DSA:3.40.50.1390,PF07508,Coil
MAEQNEKIVALYVRVSTGYQVDKDSLPFQKKELKAYCEHVLHIDKNRIEIFEDAGKSGKNTKRPAFERMMGKVKSGQVSHVIVYKIDRISRNLVDFSLMYDDFKYNNVTFISLNEQFDTSSAIGEAILKIILVFAELERKLTSERVTDVMIGRAQNGQWNGARVPYGWDWDEEKQCPVHSKKEAQYAIAMYEMYLNGGSTVSIRDYNNAHNIPTKRGGEWTSKTVADFLRNPINKGAYRYNYRESARGRKKPNEEVVFIENAFPPLVEPRIWELVNKRMDENTLKLNTSSMHTIRKNCNVFAGLIVCGKCGVNYQVTAKDRRKGSGFRPSSYTCTGKYQKNHCDNLNVSDVKIGPFMINYIAAMVDASKSRKFIKDTKSLEQVLLSHISFSNIVGIANDSLQETLELISGYSASKSALWSAETLSKEQQTDVDSKQSELNERLQKVNRAMERLKKVYLFSDDGMDEKEFLEMKSSLEADRVKIENEIKGLSTPIATNVDQVAFIKSASEFLLMHKINSGEFVDYKELATLDEESLKQFMNSVIDHIVVRERKIVEIVFINGLSHTLLYK

SEQ ID NO: 1437 - protein, 569 aa, Unknown
  Description of Unknown: Integrase B1438 sequence
  PTHR30461:SF3,IPR036162,PS51737,IPR011109,PTHR30461, PF00239,G3DSA:1.10.10.2600,IPR006119,SSF53041,cd00338, SM00857,IPR025827,IPR038109,mobidb-lite,PS51736, PF13408,G3DSA:3.40.50.1390,PF07508,Coil
MPRAAQAAGAEFDGTPRAVIYARYSSTHQRERSIEDQIADCRAYAERCGLMVVGIYADRAISGKTDERPDFQRMIDDSKKRQFDRVIVWKLDRFARNRYDSALYKHKLKQNGVSVLSAMENIGEGDESIILEAILEASAEYYSRDLRKKVLRGMTTSAKKGLHNTGSVPYGYRLEGESAVPDGDRAEFVKHVFDAYAKGETPAELYREMQRRGLDTKVNGRKVSDNIIGSILRNEKYTGRGMWRGIPVEWPRLIDDELFEAARARTEKNRRAPAAYKAAEPFILCGKAFCGYCGAPLMSGGGKGRSGKYYRHYICRTKKRERACGKKTEDKDFLEWYIVEQTCAYVLAPERLEYIADRVVECYKESFDGQRVSALEARIAKLDHDLDKTTDLLFAAPSAAAVDRINKHVVELEAQKSELEAELSGLKIAAAITYTRDEVVAWLKQFCNGDPLEAEFRRRIVETFINSVYVYDDRIVIYFNVRGGKQISYAEMLESAGDVEPLPPGPESKKSGGPDNGTAANNSKERFLHGKNTEQTAESAVRFCSGLGHQKAQLRKRLSFFLFIVHCKE

SEQ ID NO: 1438 - protein, 569 aa, Unknown
  Description of Unknown: Integrase B1439 sequence
  PTHR30461:SF3,IPR036162,PS51737,IPR011109,PTHR30461, PF00239,G3DSA:1.10.10.2600,PF14287,IPR006119,SSF53041, IPR025378,SM00857,IPR025827,cd03770,IPR038109, PS51736,PF13408,G3DSA:3.40.50.1390,PF07508,Coil
MKQSSKKHELGTAALYCRLSRDDNMDSESNSIQNQRKILQKAAKDKGYTDTVFFVDDGITGTTMKRPGFQKMLTAIEAGYISAVFVKDLSRLGRNYIEVGKLTEEFFPLHDVRLVAVSDGVDSDEGEDDFTPFKNIMNEYYAKDISKKRRIVNKMKGNAGVPLSPPPYGYIKNPDDPRFWVVEPEAAEVVRRIYRMALEGYGLAETAAQLAADGVVNPTYYWRSRGTSRSGSKSTVEPTKWGHTTVKKILTLQEYCGDVINFKSYSKSYKMKKRIENPEENRAIFLNVHEAIIDRQTWEKVQALQKGTRRKKPTVTQEPSVFSGLLKCPECGGNLNFHFNQNNHDIKFFSCQNHNSGYRKCSKTHYIRLDFLEQVVLYEVKRLACFASEYENDFIKAMIGRSAKVAENTALRKQRELDALTARDRELDMLFERLYEDNVAGKIDDARFAKMSKRYEQEQGENAKKIKALRLELKKDESKRMDIDDFLETVRRYTDAATITKRMVAELIDHIEVYHAEKQDGITNQRVVIHYNCIGAFDVPDRRKIPEADIIMETRKGVALSYAPEQVAV

SEQ ID NO: 1439 - protein, 569 aa, Unknown
  Description of Unknown: Integrase B1440 sequence
  PTHR30461:SF3,IPR036162,PS51737,IPR011109,PTHR30461, PS00397,PF00239,G3DSA:1.10.10.2600,IPR006119,SSF53041, SM00857,IPR025827,IPR038109,PS51736,cd03768, IPR006118,PF13408,G3DSA:3.40.50.1390,PF07508,Coil
MAEQNEKIVALYVRVSTGYQVDKDSLPFQKKELKAYCEHVLHIDKNRIEIFEDAGKSGKNTKRPAFERMMGKVKSGQVSHVIVYKIDRISRNLVDFSLMYDDFKYNNVTFISLNEQFDTSSAIGEAILKIILVFAELERKLTSERVTDVMIGRAQNGQWNGARVPYGWDWDEEKQCPVHSKKESQYAIAMYEMYLNGGSTVSIRDYNNAHNIPTKRGGEWTSKTVADFLRNPINKGAYRYNYRESARGRKKPNEEVVFIENAFPPLVEPRTWELVNKRMDENTLKLNTSSMHTIRKNCNVFAGLIVCGKCGVNYQVTAKDRRKGSGFRPSSYACTGKYQKNHCDNLNVSDVKIGPFMINYIAAMVDASKSRKFIKDTKSLEQVLLSHINFSNIAGIANDSLQETLELISGYSASKSALWSAETLSKEQQTDVDSKQSELNERLQKVNRAMERLKKVYLFSDDGMDEKEFLEMKSSLEADRVKIENEIKGLSAPIATNVDQVAFIKSASEFLLMHKINSGEFVDYKELATLDEESLKQFMNSVIDHIVVRERKIVEIVFINGLSHTLLYK

SEQ ID NO: 1440 - protein, 569 aa, Unknown
  Description of Unknown: Integrase B1441 sequence
  PTHR30461:SF3,IPR036162,PS51737,IPR011109,PTHR30461, PF00239,G3DSA:1.10.10.2600,IPR006119,PF14287,SSF53041, IPR025378,SM00857,IPR025827,cd03770,IPR038109, PS51736,PF13408,G3DSA:3.40.50.1390,PF07508,Coil
MKQSSKKHELGTAALYCRLSRDDNMDSESNSIQNQRKILQKAAKDKGYTDTVFFVDDGITGTTMKRPGFQKMLTAIEAGYISAVFVKDLSRLGRNYIEVGKLTEEFFPLHDIRLVAVSDGVDSDEGEDDFTPFKNIMNEYYAKDISKKRRIVNKMKGNAGVPLSPPPYGYIKNPDDPRFWVVEPEAAEVVRRIYRMALEGYGLAETAAQLAADGVVNPTYYWRSRGTSRGGSKSTVEPTKWGHTTVKKILTLQEYCGDVINFKSYSKSYKMKKRIENPEENRAIFLNVHEAIIDRQTWEKVQALQKGTRRKKPTVTQEPSVFSGLLKCPECGGNLNFHFNQNNHDIKFFSCQNHNSGYRKCSKTHYIRLDFLEQVVLYEVKRLACFASEYENDFIKAMIGRSAKVAENTALRKQRELDALTARDRELDMLFERLYEDNVAGKIDDARFAKMSKRYEQEQGENAKKIKALRLELKKDESKRMDIDDFLETVRRYTDVATITKRMVAELIDHIEVYHAEKQDGITNQRVVIHYNCIGAFDVPDRRKIPEADIIMETRKGVALSYAPEQVAV

SEQ ID NO: 1441 - protein, 569 aa, Unknown
  Description of Unknown: Integrase B1442 sequence
  PTHR30461:SF3,IPR036162,PS51737,IPR011109,PTHR30461, PS00397,PF00239,G3DSA:1.10.10.2600,IPR006119,SSF53041, SM00857,IPR025827,IPR038109,PS51736,cd03768, IPR006118,PF13408,G3DSA:3.40.50.1390,PF07508,Coil
MTNQKEKIVALYVRVSTGYQIDKDSLPFQKKELKAYCEHVLHVDKKRIEVFEDAGKSGKNTKRPAFERMMEKVKAGKVSHVVVYKIDRITRNLVDFSLMYDDFKYNNVTFISLNEQFDTSSAIGEAILKIILVFAELERKLTSERVTDVMIGRAQSGQWNGARVPYGWDWDAENKCPVHSKKEAPYAKAMYQMYLDGGSSVTIRDYNNSHNIPTKRGGEWTSKTVADFLRNPINKGDYRYNYRESARGKRKADEEVIYMEGVFPPLIDPDIWNEVNRRMDANHTRKNTSAMHPIRKNCNVFAGLIVCGKCGSNYQVTAKDRRRGNGFRPSSYACTGKYQKKHCDNLNVSDVKIGPFMINYIAAIIDASKSRRFIKDTESLERVILSHIDFTDVAGISESSLQDTIDLLYGRSGTETLSGKQVSKDGKNTDTAEKKKELQEKLQKTDRALERLKKAYLFDDDAMDEKEFLEMKTKLEVDKVKLGNSIKSLDSSSISENVDQAAFIKSASQFLISHKINSGGNIEYSELAMMDEEAMKTLMNSIIDHITVMDRHITEIVFKNGLTHTLLYR

SEQ ID NO: 1442 - protein, 569 aa, Unknown
  Description of Unknown: Integrase B1443 sequence
  SM00857,G3DSA:1.10.10.2600,IPR036162,PF13408,IPR025827, G3DSA:3.40.50.1390,PS51737,IPR006119,IPR038109,PF07508, IPR011109,SSF53041,PF00239,PTHR30461,PS51736, Coil,cd00338
MNIYYAREQLRSCSIYDLKINVAYYARVSTEKMEQQVSIKHQEEHFEELIRNNHQWFFAGAYIDDGISGIHTEKREEFQRMLRDAKLGKIDMIITKEISRFARNTLDSIQYTRELLSYGVCVWFQNDGINTIDEDSELRLTIMAGVAQDEIRKLSSRIKFGHAQSIKNGVVLGHRMYGYSNDKGKLTIVPEEADMVRMIFRDYASGVTTPQIEKKLWDMGYRSFKGKRIDRNVIKSIIKNPKYKGYYCGGKVKIVDMFTKKQEFLPQSEWVMFKDDGSRVPQIIDERTWEKANTYMRERGDAIRSRKTSFKQENIFTGKLICANDGAHYWLKRHCIHKKEDARWVCSHKIRNGANSCNSFGLSEAELQVIIANLINKSIENIDQILKKYFEILKSIIDNRPDNLDEIKRLERQIDTLKLKREKILEYNLSGDISDSEFVSRNKEYVNQIKETEKRIFDLQNVKEPEPIDNQIDAIKKQLEKFKGIVPDDVNRLVVDELFDKILVEPLDGSCLLSFYLKDGNVEKWGFPLRCSDSMKLNIFPEQHTTFSRNNCIKTQDVVLYNYTYKLAL

SEQ ID NO: 1443 - protein, 569 aa, Unknown
  Description of Unknown: Integrase B1444 sequence
  PTHR30461:SF3,IPR036162,PS51737,IPR011109,PTHR30461, PS00397,PF00239,G3DSA:1.10.10.2600,IPR006119,SSF53041, SM00857,IPR025827,IPR038109,PS51736,cd03768, IPR006118,PF13408,G3DSA:3.40.50.1390,PF07508,Coil
MAEQNEKIVALYVRVSTGYQVDKDSLPFQKKELKAYCEHVLHIDKNRIEIFEDAGKSGKNTKRPAFERMMGKVKSGQVSHVIVYKIDRISRNLVDFSLMYDDFKYNNVTFISLNEQFDTSSAIGEAILKIILVFAELERKLTSERVTDVMIGRAQNGQWNGARVPYGWDWDEEKQCPVHSKKEAQYAIAMYEMYLNGGSTVSIRDYNNAHNIPTKRGGEWTSKTVADFLRNPINKGAYRYNYRESARGRKKPNEEVVFIENAFPPLVEPRIWELVNKRMDENTLKLNTSSMHTIRKNCNVFAGLIVCGKCGVNYQVTAKDRRKGSGFRPSSYACTGKYQKNHCDNLNVSDVKIGPFMINYIAAMVDVSKSRKFIKGTKSLEQVLLSHISFSNIVGIANDSLQETLELISGYSASKSALWSAETLSKEQQTDVDSKQSELNERLQKVNRAMERLKKVYLFSDDGMDEKEFLEMKSSLEADRVKIENEIKGLSAPIATNVDQVAFIKSASEFLLMHKINSGEFVDYKELATLDEESLKQFMNSVIDHIVVRERKIVEIVFINGLSHTLLYK

SEQ ID NO: 1444 - protein, 569 aa, Unknown
  Description of Unknown: Integrase B1445 sequence
  PTHR30461:SF3,IPR036162,PS51737,IPR011109,PTHR30461, PS00397,PF00239,G3DSA:1.10.10.2600,IPR006119,SSF53041, SM00857,IPR025827,IPR038109,PS51736,mobidb-lite, cd03768,IPR006118,PF13408,G3DSA:3.40.50.1390,PF07508,Coil
MTNQKEKIVALYVRVSTGYQVDKDSLPFQKKELKAYCEHVLHVDKKRIEVFEDAGKSGKNTKRPAFERMMGKVKAGKVSHVVVYKIDRITRNLVDFSLMYDDFKYNNVTFISLNEQFDTSSAIGEAILKIILVFAELERKLTSERVTDVMIGRAQSGQWNGARVPYGWDWDAENKCPVHSKKEAPYAKAMYQMYLDGGSSVTIRDYNNSHNIPTKRGGEWTSKTVADFLRNPINKGAYRYNYRESARGKRKADEEVIYMEGVFPPLIDPEIWNEVNRRMDANHTRKNTSAMHPIRKNCNVFAGLIVCGKCGSNYQVTAKDRRRGNGFRPSSYACTGKYQKKHCDNLNVSDVKIGPFMINYIAAIIDASKSRRFIKDTESLERVILSHIDFTDVAGISESSLQDTIDLLYGRSGAETLSGKPVSKDGKNTDTTEKKKELQEKLQKTDRALERLKKAYLFDDDAMDEKEFLEMKTKLEVNKVKLENSIKSLDSSSISENVDQAAFIKSASQFLISHKINSGGNIEYSELAMMDEEAMKTLMNSIIDHITVMDRHITEIVFKNGLTHTLLYR

SEQ ID NO: 1445 - protein, 569 aa, Unknown
  Description of Unknown: Integrase B1446 sequence
  PTHR30461:SF3,IPR036162,PS51737,IPR011109,PTHR30461, PS00397,PF00239,G3DSA:1.10.10.2600,IPR006119,SSF53041, SM00857,IPR025827,IPR038109,PS51736,mobidb-lite, cd03768,IPR006118,PF13408,G3DSA:3.40.50.1390,PF07508,Coil
MTNQKEKIVALYVRVSTGYQVDKDSLPFQKKELKAYCEHVLHVDKKRIEVFEDAGKSGKNTKRPAFERMMEKVKAGKVSHVVVYKIDRITRNLVDFSLMYDDFKYNNVTFISLNEQFDTSSAIGEAILKIILVFAELERKLTSERVTDVMIGRAQSGQWNGARVPYGWDWDAENKCPVHSKKEAPYAKAMYQMYLDGGSSVTIRDYNNSHNIPTKRGGEWTSKTVADFLRNPINKGDYRYNYRESARGKKKSDDEVVYIKDVFPPLIDPKIWDEVNRRMDANSQSRNTSAFHPIRKRCNVFAGLMICGKCGSGYQVKGKDSRKGDGFRPSSYACTGKYQKKNCDNLNVSDVKIGPFMINYIAAIIDASKSRRFIKDTESLERVILSHIDFTDVAGISESSLQDTIDLLYGRSGTETLSGKPVSKDGKNTDTAEKKKELQEKLQKTDRALERLKKAYLFDDDAMDEKEFLEMKTKLEVDKVKLENSIKSLDSSSISENVDQAAFIKSASQFLISHKINSGGNIEYSELAMMDEEAMKTLMNSIIDHITVMDRHITEIVFKNGLTHTLLYR

SEQ ID NO: 1446 - protein, 569 aa, Unknown
  Description of Unknown: Integrase B1447 sequence
  cd03768,PTHR30461:SF3,SM00857,IPR036162,PF13408, PS51737,IPR025827,G3DSA:3.40.50.1390,IPR006119,PF07508, IPR011109,SSF53041,PTHR30461,PS51736,Coil, PF00239
MKTKDTPKQYVIYSRKSKFTGKGESIENQIELCRQYIAMHFGEEAAENVLVYEDEGFSGGNLERPQFKKMMKDSQKITFAAIVVYRLDRISRNIGDFAKLIEDLGDRHIDFISIREQFDTSSPMGRAMMYIASVFSQLERETIAERIRDNMHELSKTGRWLGGTTPTGYASESLSSVTVDGKVKKACKLKPIPEEIQLVKTIFEVFMETGSLSKTDQYLLEHRCVTKRGKQFTRFAIRGILTNPVYMIADETAYQYLKENNVDLFAERSEFDGEHGVMAYNRTLQRPGKANQIRPMEEWIVAVGKHPGIIAGSDWVRVQAMLDINKSKSYRRPRSNVALLSGLLRCGECGDYMRPKLTNRRTADGELIYTYMCSTKERSHGTVCSMKNCNGNTLDAKIIEEIRKLSADKETLTRLLAQTKKVISGSKEGYDAELALLREKHAETEDRIKRLVESLSVASDTSAKYVMEQIDALHQESETQQLRLAELEALTEQSRMLHQEFAFHQEMIESFASAVDSATLEEKRRLLRTIVKKVVWDGKNAYVYLFAEDGEADLPPIDQPMYPLGVDSE

SEQ ID NO: 1447 - protein, 569 aa, Unknown
  Description of Unknown: Integrase B1448 sequence
  SM00857,G3DSA:1.10.10.2600,IPR036162,PF13408,IPR025827, G3DSA:3.40.50.1390,PS51737,IPR006119,IPR038109,PF07508, IPR011109,SSF53041,PF00239,PTHR30461,PS51736, Coil,cd00338
MNIYYAREQLRSCSIYDLKINVAYYARVSTEKMEQQVSIKHQEEHFEELIRNNHQWFFAGAYIDDGISGIHTEKREEFQRMLRDAKLGKIDMIITKEISRFARNTLDSIQYTRELLSYGVCVWFQNDGINTIDEDSELRLTIMAGVAQDEIRKLSSRIKFGHAQSIKNGVVLGHRMYGYSNDKGKLTIVPEEADMVRMIFRDYASGVTTPQIEKKLWDMGYRSFKGKKIDRNVIKSIIKNPKYKGYYCGGKVKIVDMFTKKQEFLPQSEWVMFKDDGSRVPQIIDERTWEKANTYMRERGDAIRSRKTSFKQENIFTGKLICANDGAHYWLKRHCIHKKEDARWVCSHKIRNGANSCNSFGLSEAELQVIIANLINKSIENIDQILKKYFEILKSIIDNRPDNLDEIKRLERQIDTLKLKREKILEYNLNGDISDSEFVSRNKEYVNQIKETEKRIFDLQNAKEPEPIDNQIDAIKKQLEKFKGIVPDDVNRLVVDELFDKILVEPLDGSCLLSFYLKDGNVEKWGFPLRCSDSMKLNIFPEQHTIFSRNNCIKTQDIVLYNYTYKLAL

SEQ ID NO: 1448 - protein, 569 aa, Unknown
  Description of Unknown: Integrase B1449 sequence
  PTHR30461:SF3,IPR036162,PS51737,IPR011109,PTHR30461, PS00397,PF00239,G3DSA:1.10.10.2600,IPR006119,SSF53041, SM00857,IPR025827,IPR038109,PS51736,cd03768, IPR006118,PF13408,G3DSA:3.40.50.1390,PF07508,Coil
MAEQNEKIVALYVRVSTGYQVDKDSLPFQKKELKAYCEHVLHIDKNRIEIFEDAGKSGKNTKRPAFERMMGKVKSGQVSHVIVYKIDRISRNLVDFSLMYDDFKYNNVTFISLNEQFDTSSAIGEAILKIILVFAELERKLTSERVTDVMIGRAQNGQWNGARVPYGWDWDEEKQCPVHSKKEAQYAIAMYEMYLNGGSTVSIRDYNNAHNIPTKRGGEWTSKTVADFLRNPINKGAYRYNYRESARGRKKPNGEVVFIENAFPPLVEPRIWELVNKRMDENTLKLNTSSMHTIRKNCNVFAGLIVCGKCGVNYQVTAKDRRKGSGFRPSSYACTGKYQKNHCDNLNVSDVKIGPFMINYIAAMVDASKSRKFIKDTKSLEQVLLSHINFSNIAGIANDSLQDTLELISGYSASKSALWSAKTLSKEQQTDVDSKQSELNERLQKVNRAMERLKKVYLFSDDGMDEKEFLEMKSSLEADRVKIENEIKGLSAPIATNVDQVAFIKSASEFLLMHKINSGEFVDYKELATLDEESLKQFMNSVIDHIVVRDRKIVEIVFINGLSHTLLYK

SEQ ID NO: 1449 - protein, 569 aa, Unknown
  Description of Unknown: Integrase B1450 sequence
  PTHR30461:SF3,IPR036162,PS51737,IPR011109,PTHR30461, PF00239,G3DSA:1.10.10.2600,IPR006119,SSF53041,cd00338, SM00857,IPR025827,IPR038109,PS51736,mobidb-lite, PF13408,G3DSA:3.40.50.1390,PF07508,Coil
MPRAAQAAGAAFDGTPRAVIYTRYSSTHQRERSIEDQIADCRAYAERCGLMVVGIYADRAISGKTDERPDFQRMIDDSKKRQFDRVIVWKLDRFARNRYDSALYKHKLKQNGVSVLSAMENIGEGDESIILEAILEASAEYYSRDLRKKVLRGMTTSAKKGLHNTGSVPYGYRLEGESAVPDGDRAEFVKHVFEAYAKGETPAELYREMQSRGLDTKVNGRKVSDNIIGSILRNEKYTGRGMWRGIPVEWPRLIDDELFEAARARTEKNRRAPAAYKAAEPFILCGKAFCGYCGAPLMSGGGKGRSGKYYRHYICRTKKRERACGKKTEDKDFLEWYIVEQTCAYVLAPERLEYIAERVVECYKESFDGQRVSALEARIAKLDRDLDKTTDLLFAAPSAAAVDRINKHVVELEAQKSELEAELSGLKIAAAITYTRDEVVAWLKQFCNGDPLEAEFRRRIVETFINSVYVYDDRIVIYFNVRGGKQISYAEMLESVGDVEPLPPGPENEKSGGPDNGTAANNSKERFLHGKNTEQTTESAVRFCSGLVHQKAQLRKRLSFFLFIIHGKE

SEQ ID NO: 1450 - protein, 569 aa, Unknown
  Description of Unknown: Integrase B1451 sequence
  PTHR30461:SF3,IPR036162,PS51737,IPR011109,PTHR30461, PS00397,PF00239,G3DSA:1.10.10.2600,IPR006119,SSF53041, SM00857,IPR025827,IPR038109,mobidb-lite,PS51736, cd03768,IPR006118,PF13408,G3DSA:3.40.50.1390,PF07508,Coil
MTNQKEKIVALYVRVSTGYQVDKDSLPFQKKELKAYCEHVLHIDKKRIEIFEDAGKSGKNTKRPAFERMMEKVKAGLVSHVIVYKIDRISRNLVDFSIMYDNFKRNDVTFISLNEQFDTSSAMGEAMLKIILVFAELERKLTSERVTDVMIGRAQSGQWNGARVPYGWDWDEENKRPVHSKKEAPYAKAMYQMYLDGGSSVTIRDYNNSHNIPTKRGGKWTSKTVADFLRNPINKGDYRYNYRESARGKRKSDEEVIYMDGVFPPLVDPEIWNEVNRRMDMNCKKRNTSAFHPIRKRCNVFAGLIVCGKCGSNYQVTSKDGRRGNGFRPSSYACTGKYQKKNCDNLNVSDVKIGPFMINYIAAIIDASKSKRFIKDTESLERVILSHIDFTDVAGISESSLQDTIDLLYGRSGTETLSGKPVSKDSKNTDTAEKKKELQEKLQKTDRALERLKKAYLFDDDAMDEKEFLEMKTKLEVDKVKLGNSIKSLDSSSISENVDQAAFIKSASQFLISHKINSGGNIEYSELAMMDEEAMKTLMNSIIDHITVMDRHITEIVFKNGLTHTLLYR

SEQ ID NO: 1451 - protein, 569 aa, Unknown
  Description of Unknown: Integrase B1452 sequence
  PTHR30461:SF3,IPR036162,PS51737,IPR011109,PTHR30461, PS00397,PF00239,G3DSA:1.10.10.2600,IPR006119,SSF53041, SM00857,IPR025827,IPR038109,PS51736,cd03768, IPR006118,PF13408,G3DSA:3.40.50.1390,PF07508,Coil
MTEQNEKIVALYVRVSTGYQVDKDSLPFQKKELKAYCEHVLHIDKNRIEIFEDAGKSGKNTKRPAFERMMGKVKSGQVSHVIVYKIDRISRNLVDFSLMYDDFKYNNVTFISLNEQFDTSSAIGEAILKIILVFAELERKLTSERVTDVMIGRAQNGQWNGARVPYGWDWDEEKQCPVHSKKEAQYAIAMYEMYLNGGSTVSIRDYNNAHNIPTKRGGEWTSKTVADFLRNPINKGAYRYNYRESARGRKKPNEEVVFIENAFPPLVEPRIWELVNKRMDENTLKLNTSSMHTIRKNCNVFAGLIVCGKCGVNYQVTAKDRRKGSGFRPSSYACTGKYQKNHCDNLNVSDVKIGPFMINYIAAMVDASKSRKFIKDTKSLEQVLLSHISFSNIAGIANDSLQETLELISGYSASKSALWSAETLSKEQQTDVDSKQSELNERLQKVNRAMERLKKVYLFSDDGMDEKEFLEMKSSLEADRVKIENEIKGLNAPIATNVDQVAFIKSASEFLLMHKINSGEFVDYKELATLDEESLKQFMNSVIDHIVVRERKIVEIVFVNGLSHTLLYK

SEQ ID NO: 1452 - protein, 569 aa, Unknown
  Description of Unknown: Integrase B1453 sequence
  SM00857,G3DSA:1.10.10.2600,IPR036162,PF13408,IPR025827, G3DSA:3.40.50.1390,PS51737,IPR006119,IPR038109,PF07508, IPR011109,SSF53041,PF00239,PTHR30461,PS51736, Coil,cd00338
MNIYYAREQLRSCSIYDLKINVAYYARVSTEKMEQQVSIKHQEEHFEELIRNNHQWFFAGAYIDDGISGIHTEKREEFQRMLRDAKLGKIDMIITKEISRFARNTLDSIQYTRELLSYGVCVWFQNDGINTIDEDSELRLTIMAGVAQDEIRKLSSRIKFGHAQSIKNGVVLGHRMYGYSNDKGKLTIVPEEADMVRMIFRDYASGVTTPQIEKKLWDMGYRSFKGKKIDRNVIKSIIKNPKYKGYYCGGKVKIVDMFTKKQEFLPQSEWVMFKDDGSRVPQIIDEKTWEKANTYMRERGDAIRSRKTSFKQENIFTGKLICANDGAHYWLKRHCIHKKEDARWVCSHKIRNGANSCNSFGLSEAELQVIIANLINKSIENIDQILKKYFEILKSIIDNRPDNLDEIKRLERQIDTLKLKREKILEYNLSGDISDSEFVSRNKEYVNQIKETEKRIFDLQNTKKPEPIDNQIDAIKKQLEKFKGIVPDDVNRLVVDELFDKILVEPLDGSCLLSFYLKDGNVEKWGFPLRCSDSMKLNIFPEQHTTFSRNNCIKTQDVVLYNYTYKLAL

SEQ ID NO: 1453 - protein, 569 aa, Unknown
  Description of Unknown: Integrase B1454 sequence
  PTHR30461:SF3,IPR036162,PS51737,IPR011109,PTHR30461, PS00397,PF00239,G3DSA:1.10.10.2600,IPR006119,SSF53041, SM00857,IPR025827,IPR038109,PS51736,cd03768, IPR006118,PF13408,G3DSA:3.40.50.1390,PF07508,Coil
MTEQNEKIVALYVRVSTGYQVDKDSLPFQKKELKAYCEHVLHIDKNCIEIFEDAGKSGKNTKRPAFERMMGKVKSGQVSHVIVYKIDRISRNLVDFSLMYDDFKYNNVTFISLNEQFDTSSAIGEAILKIILVFAELERKLTSERVTDVMIGRAQSGQWNGARVPYGWDWDEEKQCPVHSKKEAQYAIAMYEMYLNGGSTVSIRDYNNAHNIPTKRGGEWTSKTVADFLRNPINKGAYRYNYRESARGRKKPNEEVVFIENAFPPLVEPRIWELVNKRMDENTLKLNTSSMHTIRKNCNVFAGLIVCGKCGVNYQVTAKDRRKGSGFRPSSYACTGKYQKNHCDNLNVSDVKIGPFMINYIAAMVDASKSRKFIKDTKSLEQVLLSHINFSNIAGIANDSLQETLELISGYSASKSALWSAETLSKEQQTDVDSKQSELNERLQKVNRAMERLKKVYLFSDDGMDEKEFLEMKSSLEADRVKIENEIKGLSAPIATNVDQVAFIKSASEFLLMHKINSGEFVDYKELATLDEESLKQFMNSVIDHIVVRERKIVEIVFINGLSHTLLYK

SEQ ID NO: 1454 - protein, 569 aa, Unknown
  Description of Unknown: Integrase B1455 sequence
  PTHR30461:SF3,IPR036162,PS51737,IPR011109,PTHR30461, PS00397,PF00239,G3DSA:1.10.10.2600,IPR006119,SSF53041, SM00857,IPR025827,IPR038109,PS51736,cd03768, IPR006118,PF13408,G3DSA:3.40.50.1390,PF07508,Coil
MTNQKEKIVALYVRVSTGYQVDKDSLPFQKKELKAYCEHVLHVDKKRIEVFEDAGKSGKNTKRPAFERMMEKVKAGKVSHVVVYKIDRITRNLVDFSLMYDDFKYNNVTFISLNEQFDTSSAIGEAILKIILVFAELERKLTSERVTDVMIGRAQSGQWNGARVPYGWDWDAENKCPVHSKKEAPYAKAMYQMYLDGGSSVTIRDYNNSHNIPTKRGGEWTSKTVADFLRNPINKGDYRYNYRESARGKRKADEEVIYMEGVFPPLIDPEIWNEVNRRMDANHTRKNTSAMHPIRKNCNVFAGLIVCGKCGSNYQVTAKDRRRGNGFRPSSYACTGKYQKKHCDNLNVSDVKIGPFMINYIAAIIDASKSRRFIKDTESLERVILSHIDFTDVAGISESSLQDTIDLLYGRSGTETLSGKPVSKDGKNTDTAEKKKELQEKLQKTDRALERLKKAYLFDDDAMDEKEFLEMKTKLEVDKVKLENSIKSLDSSSISENVDQAAFIKSASQFLISHKINSGGNIEYSELAMMDEEAMKALMNSIIDHITVMDRHITEIVFKNGLTHTLLYR

SEQ ID NO: 1455 - protein, 568 aa, Unknown
  Description of Unknown: Integrase B1456 sequence
  SM00857,G3DSA:1.10.10.2600,IPR036162,PF13408,IPR025827, G3DSA:3.40.50.1390,PS51737,IPR006119,IPR038109,PF07508, SSF53041,IPR011109,PTHR30461,Coil,cd00338, PF00239
MAYRKITDIKDTIGMRAVFYARVSTAEEEQLNAIELQIEENRGCIKDHGWKLVGEYIDRSKSGTMVKGRDDYQRLYEDLYEDLFDIVVIKDQERLQRNTLDWYLFINRVVQTGKLLFMYMDGKFYSPDDALITGVRAIIAEEFSRNLSKKLHNYHDHRIEKARQGQEIALQGSGNVYGWDKKDGKYYINPEQAKVRRLMCEGIMARKGSTLIAKELNEAGYRNTVGKLWKPMDIPKFVYDCKNVGTMIINKERHDFESKQTIKLPKEEWVYVENALPPIVTQEEWDLICKIHEERVIATGSDRRGKKTSGYSFSGKLVCGICGAPYWRKQRVSKDEYWVCSTKQTKGRRTRKRDSTMGKAGEINPLGCDNENISYNSLMEIMGVVSERLQANTDTIKHDMINWLTKLRKQLLEANGGHTEADLQRELSRKSKLLDAYLDGILNKQEYQKKAEELDERIIQLKAETEKNKANSGDIAEIDKVLANIDEEVSRYVDGNEKLKVEYLLEHLEQVQIFQDKVIVIVPILSEGIVVEKAQYVSREKWSRKDDNHEYDDRLYRSHIRNRKSVWT

SEQ ID NO: 1456 - protein, 568 aa, Unknown
  Description of Unknown: Integrase B1457 sequence
  PTHR30461:SF3,IPR036162,PS51737,IPR011109,PTHR30461, PF00239,G3DSA:1.10.10.2600,IPR006119,PF14287,SSF53041, IPR025378,SM00857,IPR025827,cd03770,IPR038109, PS51736,PF13408,G3DSA:3.40.50.1390,PF07508,Coil
MQSKKKQDKAGITALYCRLSRDDGVEGDSNSVANQKKLLKQFAKENGLSNTRYYVDDGYTGTNFERPGFQKMIEDIDLGYISTVIVKDLSRLGRRYDMVGYYMDTYFPDRDVRFIAVNDNIDSDEGESEIAPFKNVLNEFYARDISKKCRSSYRIRGSTGEPLAPPPYGYIKSPDNPKKWVIDPEAAQVVRDIFKMALEGKSNETIASILQERKVLIPMAYWQEKGIRKGGKVTQPNKYKWCKTTVTKILTQQEYCGDIINFKTYSKSYKNKKRYDNPKENWVIFKDVHEPIISRDDFELVQMLVVKTKRRAPKQENGEKNMFCDFLYCADCGSKLWYHTNTTNKEIHYFSCSNYKKDTRGNCETRHYIRADAIEQIVMLELKRLAKYLEFHEEEFAKLLAEKTNADMLAEQKTLETELNRATARNEMLTSLFAKTYEDNVSGKLSDEMYMELSHKYEVERLELKTKIFEYKERLAKISEMEQNKDDFLKAVRKFMEMKSLTAPMLRELIDHIDVYEKEGGKKNYTQRIVIYYRFVGYLELPSSDDENYKANTRKGVDVEYIPTVKSA

SEQ ID NO: 1457 - protein, 568 aa, Unknown
  Description of Unknown: Integrase B1458 sequence
  PTHR30461:SF3,SM00857,G3DSA:1.10.10.2600,IPR036162,PF13408, PS51737,IPR025827,G3DSA:3.40.50.1390,IPR006119,IPR038109, PF07508,IPR011109,SSF53041,PTHR30461,Coil, PS51736,cd00338,PF00239
MNRYERLNEERKIIEKRKRVAAYCRVSTDNEDQANSFESQQRYFRQYIERNPDWELYEIFADEGISGTSTKKRKEFNRMIACAKNGDFDLIITKEISRFARNTLDSIYYTRDLKKHGVGVIFMNDNINTLDGDAELRLAIMSSIAQEESRKTSERVKWGQKRQMEQGVVFGRSMLGYDVKDGKMTINEEGAKIVRLIFHKFVNEGKGTHVIARELREEGIEPMRVKEWQNTVILRVIRNEKYCGDLVQKKTYTPDFLSHEKKYNRGQEEFVIIKDHHEPIVSRELFEEANRILDERSLSQEGKAKHSNRYPFSGKIKCGHCGASYVARYKTRKDGSKYKAWRCQEAAKHGSPHTDKAGNQIGCTGASIRNEDATHIMFLVTKELKLRQTKITKNLTSIIESIIAMDTTGTDIEKLKTQIATIEDKRTKLIDIYMSGDISKDEFSAARSKCDAEIAELQSVIDSIDKQQAMIRQQQELVQEIRDAINEIVCGVEYDDEFYKHILDKMVVNDKDNIDVYLNLLPMKWSYTVAKASKKALAPERNISGASVPISVSSPATSLYGIEYLCEM

SEQ ID NO: 1458 - protein, 568 aa, Unknown
  Description of Unknown: Integrase B1459 sequence
  cd03768,SM00857,G3DSA:1.10.10.2600,IPR036162,PF13408, IPR025827,SSF109709,G3DSA:3.40.50.1390,PS51737,IPR006119, IPR038109,PF07508,SSF53041,IPR011109,PTHR30461, PS51736,PF00239
MEDQKQIRCAIYTRKSTDEGLEKEFNTLEAQREAGENFVMSMKHQGWVILPDHYDDGGFSGGNLKRPALKRLMADVEKGKVDMIVVYKIDRLTRSLLDFAQLVQTLEKNDCSFVSVTQHFNTCDSMGKLTLNILLSFAQFERELGAERVRDKIAASKKKGMWTGGPAPLGYDIKEKKLIINPEEAEVVKFIFDDYLKTKSQLQTMKDVNEKGYKPKTRVTKTGRVASKGRFNHSMISNILSNPIYIGMVAYKDALYEGQHKGIIDKAIWDNVADLKKSNIGSGFSPQKSEKVALLKGLLECECCGAMTPTRSKKGNKYYEYYTSSKAVKEGVKTVNCQIGSIPAGEIESFVLDKVKKIFQSPNLQQAMLKEFERQNANYNGADVNAIIKDIGEAFKYFEPATVHDFIKEVVRKVIVCHDHIEIKLKPFSVSLFEDGTLGSDENFDAKHLELKYPVRFGRKRGRVLIIEPTPQTPDQGERDSKLYTAVTQAFYWKQQMEERHITLTELAKQEHTDRGYMGQILKLTTLAPDIVMAIIEGRQPKLLTTRGLIRGHFPYIWEDQRRELGFK

SEQ ID NO: 1459 - protein, 568 aa, Unknown
  Description of Unknown: Integrase B1460 sequence
  SM00857,G3DSA:1.10.10.2600,IPR036162,PF13408,PS51737, G3DSA:3.40.50.1390,SSF109709,IPR025827,IPR006119,IPR038109, PF07508,IPR011109,SSF53041,PTHR30461,PS51736, cd00338,PF00239
MESFSPIRCAIYTRKSTDEGLEKEFNTLEAQREAGENYIRSMKHQGWVILPEHYDDGGFSGGSLKRPALKQLLSDVEAGKVDMIVVYKIDRLTRSLLDFAQLVKIFEKHCCSFVSVTQHFNTCDSMGKLTLNILLSFAQFERELGAERVRDKIAASKKKGMWTGGPLPLGYDSKNKKLVINKEEAEIVRFIFEDYRRTGSQFQTVRDVNEKGYKPKERITKTGNNISKGSFNHAMISNILNNPVYLGKVVYKGELYDGQHKAIISQELWDETKSLRKANLGEAFRPSRVIKHSLLKGLIECECCGAMTPTRSKHGNKYYEYYTPLKTVKEGAKIAHCKVGSIPAGEIESFVIDKIKSIFQAPEFQQGLLKEFGNQGHNCNAADIHKIISDIGDAIKYFEPRTIHNFISELVRKVIICHDHIEIKLQPFAATLYESSLVKPDPAFNNKILELKYPVQFGQKRGRTVIVEPASVERITPHRDEKLFNAVTLAFYWKQIMEEKHLSVTELARRENIDRGYMGQIIRLTTLAPDIIMAIINGTQPKLLNLRKLLRERFPYSWEEQKRELGFI

SEQ ID NO: 1460 - protein, 568 aa, Unknown
  Description of Unknown: Integrase B1461 sequence
  PTHR30461:SF3,SM00857,G3DSA:1.10.10.2600,IPR036162,PF13408, IPR025827,G3DSA:3.40.50.1390,PS51737,IPR006119,IPR038109, PF07508,SSF53041,IPR011109,PTHR30461,Coil, cd00338,PF00239
MKKFKFPIDLSMLTEEEINQFREDPSTLFQGDTDVCLYLRFSSERQKEQSIEGQLRDCIAYCKRKNYRIVAIYVDRATTARKDVEKRVHFQEMITASVHQTWKLVVVWKLDRFARNREDSAVFKMRLRKNGVKVESATEGISKNPEGIILEAVLEGIAEYYSADLSQKITRGMRESALKCHSIGGHVPLGYKIENHKLVINPDTAHIVQEAFELYANGETVADICRMFNAKGYRTAKGAEFNRNSFKSMFRNRRYIGVYRYKDFEKEGGVPPIIDKDLFETVQKRLSANAEAPARGKAKVDYLLAGKLFCGHCGGSMNGESGTSKTGAVHNYYACYTRKRQHSCDKKPLRKEWIEQIVAQDAMELLTDDTIQEMADMAISQTEKDLRENTRIPELSERMKETESGIANITKAVEKGIASDALMSRLVELEKEKKNLLRLIAEEEKYVCKIDRDQIVYWLTKFKNGNIEDENFKRIIIDLMVNSVTVWDEPDDFRITTAYNLTSCKNKTFRIPSSSDKGFGFEGLESTRWTLHEHLLFQRRLCCKGVVVMSKRKAQGARHIVPCPLGFL

SEQ ID NO: 1461 - protein, 568 aa, Unknown
  Description of Unknown: Integrase B1462 sequence
  SM00857,G3DSA:1.10.10.2600,IPR036162,PF13408,PS51737, G3DSA:3.40.50.1390,SSF109709,IPR025827,IPR006119,IPR038109, PF07508,IPR011109,SSF53041,PTHR30461,PS51736, cd00338,PF00239
MESFSPIRCAIYTRKSTDEGLEKEFNTLEAQREAGENYIRSMKHQGWVILPEHYDDGGFSGGSLKRPALKQLLSDVEAGKVDMIVVYKIDRLTRSLLDFAQLVKIFEKHCCSFVSVTQHFNTCDSMGKLTLNILLSFAQFERELGAERVRDKIAASKKKGMWTGGPLPLGYDSKNKKLVINKEEAEIVRFIFEDYKRTGSQFQTVRDVNEKGYKPKERMTKTGKNISKGSFNHAMISNILNNPVYLGKVVYKGELYDGQHKAIISQELWDEAKSLRKANLGEAFRPSRVIKHSLLKGLIECECCGAMTPTRSKKGNKYYEYYTPLKTVKEGAKIAHCKVGSIPAGEIESFVIDKIKSIFQAPEFQQRLLKEFENQGHNCNAADIHKIISDIGDAIKYFEPRTIHDFISELVRKVIICHDHIEIKLQPFAATLYESSLVKPDPAFNNKILELKYPVRFGQKRGRTVIIEPAFVERTTPHRDEKLFNAVTLAFYWKQIMEEKHLTLTDMAKRENIDRGYMGQIIRLTTLAPDIIMAIINGTQPKLLSLRKLLRERFPYSWEEQKRELGFI

SEQ ID NO: 1462 - protein, 568 aa, Unknown
  Description of Unknown: Integrase B1463 sequence
  PTHR30461:SF3,cd00338,SM00857,G3DSA:1.10.10.2600,IPR036162, PF13408,PS51737,G3DSA:3.40.50.1390,IPR025827,IPR006119, IPR038109,PF07508,IPR011109,SSF53041,PTHR30461, PS51736,Coil,PF00239
MARKKNIAAGLDAVIYARYSSHNQREVSIEQQIAECTKHAAALGLRIVGTYEDRAISGKTDNRPRFQQMMRDAEKGKFQAVVAWKSNRIGRNMLQAMVNEAKLDDYGVKVFYAEEDFDDTAAGRFALRNMMNVNQFYSENMAEDITRGLYDNANKCMANGRQPLGYKRGADGKVMLDEPAAAVVREIFTRVAAGDLFVDIARDLNAKGIKTSKGAAWNKGSFQSICQNERYKGIYIYGNVRIVDGIPRIVSDELWYKVQEAMRMKKNPVGTRHRVGAEDYLLTGKLRCGHCGSYMTGISGTSRNGELHYYYTCQKRRTEHACNKKNVRRDVIEPAIAQAIKMYCLTDDVIEWMADQTVQYWEKHDNDLQIEALEQQLAENKKATSNMLKAIEMGIITEATRSRMVELETENSKLTAQLSAAKRDVVKINREDLIDELHILRSKDIHDREVQAELFKDFLVAAYIYDDNRLKLVFSFMGKDNSVEIPLETGEDPPDGEDSPDAKMFVLTPDCSTKKALYFVGSMVLFFLLKQKMGAALPCLHRFQMFCRRFSAAPESLVFRQVRRCRFS

SEQ ID NO: 1463 - protein, 568 aa, Unknown
  Description of Unknown: Integrase B1464 sequence
  PTHR30461:SF3,SM00857,G3DSA:1.10.10.2600,IPR036162,PF13408, IPR025827,G3DSA:3.40.50.1390,PS51737,IPR006119,IPR038109, PF07508,SSF53041,IPR011109,PTHR30461,PS51736, cd00338,PF00239
MAKRSAKKNEYQSAEQVGVIYARYSSHNQKEESIEQQIAECSDFAAKNGIRIVGIYADKAVSGRSDRRPNFQRMMRDAEKRQFQIVVAYKSNRIARNMLNALQYEARLDLLGIKTLYAKEEFGNTAAGRFALRTMMNVNQFYSENMGEDIKRGMVDNANECKVNGMLPLGYVKSKEGKYAITPDEAAVVREIFDSVLKDVPVAEIARSLNQRGIRTKLGREWNKNSFHIMLKNDNYIGVYRHSGVVVEDGIPPILEKEVFAAVQEKLANKKKTAGRRSANGEYLLTGKLFCGYCGSYMIGVSGTGENGTVHNYYQCQKRHAEGRCEKKNVRRDFIEKLIARLTQDYILQDDTIEWIADSTMSFQAMARRESGVAQLERDLADNRKVAKNIMAAIEQGIITETTKARLLEVEGTIHDLERSLSIAKAASQPIEHERVVFSLEQMREGNVGSKEHQKKLIDTFVKSVTLWDDRIQIDYYHTPGKHKFSYSLEELTSKAENESNASDVRTDSLELHHCRRELHRFTTAFLLTAAPLRLYGTIKKTQESNSCVFFACIDGCVPQCPARLGIV

SEQ ID NO: 1464 - protein, 568 aa, Unknown
  Description of Unknown: Integrase B1465 sequence
  SM00857,G3DSA:1.10.10.2600,IPR036162,PF13408,PS51737, G3DSA:3.40.50.1390,SSF109709,IPR025827,IPR006119,IPR038109, PF07508,IPR011109,SSF53041,PTHR30461,PS51736, cd00338,PF00239
MESFSPIRCAIYTRKSTDEGLEKEFNTLEAQREAGENYIRSMKHQGWVILPEHYDDGGFSGGSLKRPALKQLLSDVEAGKVDMIVVYKIDRLTRSLLDFAQLVKIFEKHCCSFVSVTQHFNTCDSMGKLTLNILLSFAQFERELGAERVRDKIAASKKKGMWTGGPLPLGYDSKNKKLVINKEEAEIVRFIFEDYKRTGSQFQTVRDVNEKGYKPKERMTKTGKNISKGSFNHAMISNILNNPVYLGKVVYKGELYDGQHKAIISQELWDEVKSLRKANLGEAFRPSRVIKHSLLKGLIECEYCGAMTPTRSKHGNKYYEYYTPLKTVKEGAKIAHCKVGSIPAGEIESFVIDKIKSIFQAPEFQQGLLKEFENQGHNCNAADIHKIISDIGDAIKYFEPRTIHNFISELVRKVIICHDHIEIKLQPFAATLYESSFVKPDPAFNNKILELKYPVRFGQKRGRTVIVEPASVERITPHRDEKLFNAVTLAFYWKQIMEEKHLSVTELARRENIDRGYMGQIIRLTTLAPDIIMAIINGTQPKLLNLRKLLRERFPYSWEEQKRELGFI

SEQ ID NO: 1465 - protein, 568 aa, Unknown
  Description of Unknown: Integrase B1466 sequence
  PTHR30461:SF3,SM00857,G3DSA:1.10.10.2600,IPR036162,PF13408, IPR025827,PS51737,G3DSA:3.40.50.1390,IPR006119,IPR038109, PF07508,IPR011109,SSF53041,PF00239,PTHR30461, Coil,cd00338
MKKFKFPIDLSMLTEEEIDQFKEDPFTLFHGETDVCLYLRFSSERQKEQSIEGQLRDCIAYCKRKNYRIVAIYVDRATTARKDVEKRIHFQEMITASVHQTWKLVIVWKLDRFARNREDSAVFKMRLRKNGVKVESATEGISKNPEGIILEAVLEGIAEYYSADLSQKITRGMRESALKCHSIGGHVPLGYKIEDHKLVINPDTAHIVQEAFELYANGETVADICRMFNAKGYRTAKGAEFNRNSFKSMFRNRRYIGVYRYKDFEKEGGVPPIIDKDLFETVQKRLSANAEAPARGKAKVDYLLAGKLFCGHCGGSMNGESGTSKTGAVHNYYACYTRKRQHSCDKKPLRKEWIEQIVAQDAMELLTDDAIQEMADMAISQTEKDLRENTRIPELSERMKETESGIANITKAVEKGIASDALMSRLVELEKEKKNLLRLIAEEEKYVCKIDRDQIVYWLTKFKDGNIEDENFKRIIIDLMVNSVTVWDEPDGFRITTAYNLTSCKNKTFRIPSSSDKGFGFEGLESTKREPYEPGPDHLHGRWRVRIGLPAQSGKMKKGYRLGISPIR

SEQ ID NO: 1466 - protein, 568 aa, Unknown
  Description of Unknown: Integrase B1467 sequence
  SM00857,G3DSA:1.10.10.2600,IPR036162,PF13408,PS51737, G3DSA:3.40.50.1390,SSF109709,IPR025827,IPR006119,IPR038109, PF07508,IPR011109,SSF53041,PF00239,PTHR30461, PS51736,Coil,cd00338
MESFSPIRCAIYTRKSTDEGLEKEFNTLEAQREAGENYIRSMKHQGWVILPEHYDDGGFSGGSLKRPALKQLLSDVEAGKVDMIVVYKIDRLTRSLLDFAQLVKIFEKHCCSFVSVTQHFNTCDSMGKLTLNILLSFAQFERELGAERVRDKIAASKKKGMWTGGPLPLGYDSKNKKLVINKEEAEIVRFIFEDYRRTGSQFQTVRDVNEKGYKPKERITKTGKNISKGSFNHAMISNILNNPVYLGKVVYKGELYDGQHKAIISQELWDETKSLRKANLGEAFRPSRVIKHSLLKGLIECECCGAMTPTRSKHGNKYYEYYTPLKTVKEGAKIAHCKVGSIPAGEIESFVIDKIKSIFQAPEFQQGLLKEFGNQGHNCNAADIHKIISDIGDAIKYFEPRTIHNFISELVRKVIICHDHIEIKLQPFAATLYESSLVKPDPAFNNKILELKYPVRFGQKRGRTVIVEPASVERITPHRDEKLFNAVTLAFYWKQIMEEKHLSVTELARRENIDRGYMGQIIRLTTLAPDIIMAIINGTQPKLLNLRKLLRERFPYSWEEQKRELGFI

SEQ ID NO: 1467 - protein, 568 aa, Unknown
  Description of Unknown: Integrase B1468 sequence
  PTHR30461:SF3,cd00338,SM00857,G3DSA:1.10.10.2600,IPR036162, PF13408,IPR025827,G3DSA:3.40.50.1390,PS51737,IPR006119, IPR038109,PF07508,IPR011109,SSF53041,PTHR30461, PS51736,Coil,PF00239
MNNKKTKVYIYTRVSTVMQIDGYSLEAQKNKMKNYAEFNDFKIAGEYEDAGKSGKSIEGRMGFNQMIEDIKSGKDNVEYVLVFKLSRFGRNAADVLSTLQIMQDYGVNLICVEDGIDSSKDAGKLMISVLSAVAEIERENIRVQTMEGRSQKAREGKWNGGFAPYGYALDSGKLVINEEEAEAIRIIFDQYVHSNLGANGIAKYLENHGIHKIPRQNGKNPLFDAGYIRKIIKNPVYCGKIAYGRRRTEKVHGTRNEYRTVNKEDYILADGIHEGIISEELWKDAQIKALVQSKKYEHVNKSKNVRIHLLSGIVKCPICGTGMYGNKSIKKRKDGTKYKDFYYYGCKHRNMTRGHKCDYKKQINEEVLDAAVAEVIVKLVSNPKFAKMMQSKINTKVDVKPINQEIANYKKQLKQANMAKDRIIEEIDSMDAEDRHFEIRKKDLNDRLNKMYDKIEESSDMLATALNKKRSIEADKLTVDNIYKVLICFEKLYDKMDQTEKRQLVSALVDKVEIYEEKRENGQWLKSITFKLPIIEGRERISLDNSDRVETVAWLEQYRSEDTNHDSN

SEQ ID NO: 1468 - protein, 568 aa, Unknown
  Description of Unknown: Integrase B1469 sequence
  cd03768,SM00857,G3DSA:1.10.10.2600,IPR036162,PF13408, PS51737,SSF109709,G3DSA:3.40.50.1390,IPR025827,IPR006119, IPR038109,PF07508,IPR011109,G3DSA:1.10.10.2830,SSF53041, PTHR30461,PS51736,PF00239
MEEQKKVRCAIYTRKSTDEGLDKEFNTLEAQREAGANYILSQKHQGWVLLDERYDDGGFSGGNINRPALKRLIHDVEAGKIDMIVVYKIDRLTRSLADFSKLIEVLDKHKCSFVSVTQNFNTYDSMGRLTLNVLLSFAQFEREVGAERIRDKVAASRKKGMWMGGKVPFGYMLINKHLEINPTEAEIVRLIFNKYSACKSERDVCTFLKAGGYCINARKQKNGTELPAKEFTVSKIDYMLRNPIYIGKVVHKGTVYDGQQEAIISKELWERVENTRLGNRHGKLKPSRVVRNALLKGMLECGCGCNSSMIPTRTRKKNRTYEYYVSLKAVKEGYQHCELGSIPVGELDKFVLSKIQNILKSPLLLNELLKYLKPDMPEIGMNELLQKTKAPEDFFTYLSQESLRQILERLISRVIIYKDKLVIRLLPLGALLLEKSQTADLQASEEHSGLAELVYHISFSRKRGHMKVIPAEESQTAVDETLLNALVKAHNWRDKLENSDMSLRELARKEKVAHVYISKMMKLTYLAPDIIDAIIVGTQPQSLKISDLLKSPIPASWSEQRTKYGFNS

SEQ ID NO: 1469 - protein, 567 aa, Unknown
  Description of Unknown: Integrase B1470 sequence
  PTHR30461:SF3,IPR036162,PS51737,IPR011109,PTHR30461, PS00397,PF00239,G3DSA:1.10.10.2600,IPR006119,SSF53041, SM00857,IPR025827,IPR038109,PS51736,cd03768, IPR006118,PF13408,G3DSA:3.40.50.1390,PF07508,Coil
MKEDNRIVALYVRVSTGYQVDKDSLPFQKKELKAYCEHVLHIDKNRIEIFEDAGKSGKNTKRPAFERMMDKVKAGQVSHVVVYKIDRISRNLIDFSIMYNEFKYHRVAFISLNEQFDTSSAMGEAMLKIVLVFAEMERKLTSERVTDVMIGRAQSGLWNGARVPYGWDWDDEKKCPVHSKVEAKYVKQMYEDYLNGGSSVSIAKNYNANKIPTKRGGEWTSKTIADVIRNPMNKGDYRYNYRESARGRKKPQEEVIYIKGVFEPLVSINDWEKANKLMDGRGFKMNSSGQIIMNKRCNVFTGLIFCGKCGERYNVRSKDCRQGSGFRPSSYACGKKSRKGTCDNQNISDVIIAPIMINYIAAMVDVSKHKRHIKTTKELEQMILKRISFSDIVGISEDSLKDTLDLLYGKNGTQLWSANTVSQEDKSENKQKLTELQVKLEKTERAIERLKKAFLFDDDGIDEKEFLEMKSALEIDRVKIENEIKGMETESISVNVNQVEFIKTASQYLLMHELNKDEIINYKELAIADEDSIKNLFNSVLDHITVMDKRITEIVFKNGLTHKLLYK

SEQ ID NO: 1470 - protein, 567 aa, Unknown
  Description of Unknown: Integrase B1471 sequence
  SM00857,G3DSA:1.10.10.2600,IPR036162,PF13408,PS51737, G3DSA:3.40.50.1390,IPR025827,IPR006119,IPR038109,PF07508, SSF53041,IPR011109,PTHR30461,Coil,cd00338, PF00239
MAYRKITDIRDTIGMRAVFYARVSTAEEEQLNAIELQIEENRGCIKDHGWKLVGEYIDRSKSGTMVKGRDDYQRLYEDLYEDLFDIVVIKDQERLQRNTLDWYLFINRVVQTGKLLFMYMDGKFYSPDDALITGVRAIIAEEFSRNLSKKLHNYHDHRIEKARQGQEIALQGSGNVYGWDKKDGKYYINPEQAKVRRLMCEGIMARKGSTLIAKELNEAGYRNTVGKLWKPMDIPKFVYDCKNVGTMIINKERHDFESKQTIKLPKEEWVYVENALPPIVTQEEWDLICKIHEERVIATGSDRRGKKTSGYSFSGKLVCGICGAPYWRKQRVSKDEYWVCSTKQTKGRRTRKRDSTMGKAGEINPLGCDNENISYNSLMEIMGVVSERLQANTDTIKQDMINWLTKLRKQILEANGGHTEADLQRELSRKSKLLDAYLDGILNKQEYQKKAEELDERIIQLKAETEKNKANSGDIAEIDKVLANIDEEVSRYVDGNEKLKVEYLLEHLEQVQIFPDKVIVIVPILSEGIVVEKTQYVSREKWSGKNHINAYALYDCSTIRRTNIMEW

SEQ ID NO: 1471 - protein, 567 aa, Unknown
  Description of Unknown: Integrase B1472 sequence
  PTHR30461:SF3,IPR036162,PS51737,IPR011109,PTHR30461, PS00397,PF00239,G3DSA:1.10.10.2600,IPR006119,SSF53041, SM00857,IPR025827,IPR038109,PS51736,cd03768, IPR006118,PF13408,G3DSA:3.40.50.1390,PF07508,Coil
MTENQEKIVALYVRVSTGYQVDKDSLPFQKKELKAYCEHVLHIDKKRIEIFEDAGKSGKNTKRPAFERMMNKIKAGQVSHVIVYKIDRISRNLVDFSLMYDDFKYNNVTFISLNEQFDTSSAIGEAILKIILVFAELERKLTSERVKDVMIGRAKNVQWNGARVPYGWDWDEKNKCPVHSDKEAPYVRTMYQMYLDGGSTITIRNYNNSHNIPTKRGGEWTSKTVADLLRNPMNRGDYRYNYRESSRGRKKPAEEVIYIKDAFPPIVDPKIWDAVNKKMDENAALRNTSGLHTIRNRCNVFAGLIVCGKCGHNYQVKGKDSRKGNGFRPSSYACTGKFQKNNCDNMNISDVNIGPFIINYIAAMVDASKKRKNIRNIDDLEQLILSHINFSDVIGISEESLRNTMDLFSAQTSSLGISSLSTQDQDGSVISQKNKLEEELQKTNRALERLKKAFLFDDDGISEKEFLEMKSKLEIDRIQIENSLKKISQDSISANVNHIEFIKTASQFLMIHEINSGNFVDYKKLASADEKTMKDFISSVVSGITVLDKRIVKIVFRNGLSHTLLYR

SEQ ID NO: 1472 - protein, 567 aa, Unknown
  Description of Unknown: Integrase B1473 sequence
  PTHR30461:SF3,IPR036162,PS51737,IPR011109,PTHR30461, PF00239,G3DSA:1.10.10.2600,IPR006119,PF14287,SSF53041, IPR025378,SM00857,IPR025827,cd03770,IPR038109, PF13408,G3DSA:3.40.50.1390,PF07508,Coil
MQPKKNNKIGITALYCRLSRDDGMDGESNSIVNQKTLLSQKAKEKGLTDIKFYVDDGYTGTNFNRPGFGQLISDIEMGYIYAVMVKDLSRLGRDYVSVGNYTDVYFPDHDIRFIAVNDGIDSEEGESEIAPFKNILNEMYARDISKKIRSSHRLRGSMGEPLSQPPYGYMKSAENKKKWVIDPEAADVVKSIFKMCLEGKGNETIARILQEKQILVPMAYWQSKGLPRGGKKTQPNPYKWCKTTIQKILSQQEYCGDVINFKTCSKSFKNKTRLPNDPENWAIFRDVHEPIIARGDFEKVQTLIAKTKRRAPKPQNGEKSIFCDLLFCGDCHGKLRHHTNTINKDIHYFVCANNKVDYRGECPGRHYVRADAVEQVVMLELRRMAEFLESDEEAFAELLAQKTDRELLKEKKHDEEELQKVTVRNDTVCRLYEKLYEDNATGKVSDEWFMQLSHKYEAERMELKAKIKALRQKLSECGQRESERESFTSAIREFMRMDRLTAPLLRELIDIEVFETEGKGKNRTQRIVIYYRFVGYVEIPEVSDRRHIKAETRRGVAVEYLTEPKTA

SEQ ID NO: 1473 - protein, 567 aa, Unknown
  Description of Unknown: Integrase B1474 sequence
  PTHR30461:SF3,IPR036162,PS51737,IPR011109,PTHR30461, PF00239,G3DSA:1.10.10.2600,PF14287,IPR006119,SSF53041, IPR025378,SM00857,IPR025827,cd03770,IPR038109, PS51736,PF13408,G3DSA:3.40.50.1390,PF07508,Coil
MQSKNKNQIGITALYCRLSRDDGTESESNSIGNQKKLLSQKAKEMGLTDTKYYVDDGYTGTNFNRPGFQQLIDDIEIGLVSAVMVKDLSRLGRDYVSVGNYTDSYFPEHNVRFIAVNDAIDSDEGESEIAPFKNILNEMYARDISKKIRSSHRLRGSMGEPLSQPPYGYMKSAENKKKWIIDPEAATVVKSIFKMCLDGKGNETIARELQENKVLIPMAYWQSKGLNRGGKKTQTNPYKWCKTTVQKILSQQEYCGDIINFKTYSKSFKNKTRYENSKENWAVFKNVNEPIINRETFETVQKFISKTKRRAPKKENGERSIFNGLIYCGDCHSKMRYHTSTSNKEIHYFTCSDNKVDYRGKCPGRHYVRADALEEVVKLELRRLVEMLEIDESYFAQLLLRKNDEEREKDKKFLESELQKAIARNNTVSQIYEKLYEDNVIGKVSDEWFVELSHKYEKERMNLKAKIADTRHKIEELKNNNSEYEKFISAIRRFMQMDNLTSPLLRELIDHIDIFETEGTGKSRTQRIVIYYRFIGYIELPNATKQTHIADTRKGVAVEYITEQFTA

SEQ ID NO: 1474 - protein, 567 aa, Unknown
  Description of Unknown: Integrase B1475 sequence
  SM00857,G3DSA:1.10.10.2600,IPR036162,PF13408,IPR025827, G3DSA:3.40.50.1390,PS51737,IPR006119,IPR038109,PF07508, SSF53041,IPR011109,PTHR30461,Coil,cd00338, PF00239
MAYRKITDIRDTIGMRAVFYARVSTAEEEQLNAIELQIEENRGCIKDHGWKLVGEYIDRSKSGTMVKGRDDYQRLYEDLYEDLFDIVVIKDQERLQRNTLDWYLFINRVVQTGKLLFMYMDGKFYSPDDALITGVRAIIAEEFSRNLSKKLHNYHDHRIEKARQGQEIALQGSGNVYGWDKKDGKYYINPEQAKVRRLMCEGIMARKGSTLIAKELNDAGYRNTVGKPWKPMDIPKFVYDCKNVGTMIINKERHDFESKQTIKLPKEEWVYVENALPPIVTQEEWDLICKIHEERVIATGSDRRGKKTSGYSFSGKLVCGICGAPYWRKQRVSKDEYWVCSTKQTKGRKTRKRDSTMGKAGEINPLGCDNENISYNSLMEIMGVVSERLQANTDTIKQDMINWLTKLRKQLLEANGGHTEADLQRELSRKSKLLDAYLDGILNKQEYQKKAEELDERIIQLKTETEKNKANSGDIAEIDKVLANIDEEVARYVDGNEKLKVEYLLEHLEQVQIFPDKVIVIVPILSEGIVVEKTQYVSRDKWSRKDHINAYALYDCSTIRRTNIMEW

SEQ ID NO: 1475 - protein, 567 aa, Unknown
  Description of Unknown: Integrase B1476 sequence
  PTHR30461:SF3,IPR036162,PS51737,IPR011109,PTHR30461, PS00397,PF00239,G3DSA:1.10.10.2600,IPR006119,SSF53041, SM00857,IPR025827,IPR038109,PS51736,cd03768, IPR006118,PF13408,G3DSA:3.40.50.1390,PF07508,Coil
MSATATKNRVAIYVRVSTLYQADKDSLPMQKQDLISYAKLMLNTDDFVIFEDAGYSGKNTDRPKFQEMMFQVRTGAFTHLLVWKIDRISRNLLDFSAMYKELKDLGVIFVSKNEQFDTSTAMGEAMLKIILVFAELERNMTAERVTATMINRASNGLWNGGRIPYGYCYNHETQKFTLNNSESKIVNLIHDKYEETRSLIQETRWLNENGYRTRAGNEWNPVSIAIILRNVFYCGDYQYNRLKEGNRQRQKNKSEWITVENHHIAIVTREQKQRILNILESNARLCKTRNMYISTKHVHIFSGLLYCGSCGNPMGSSPASAKKDWQYSKYSCSTRRKSTTSCSGKSVSDPIVGEFVFNYILNMLNAQKSFSTISSPSILQQRLLMGDTFQSIAFIESDGLNDLYNMLLSGSISGEIYGNDANFKVSDSGLSNLQSKKQKLERALDRLTSLYLYSDTAISEREYIVQKAKLTDSLDEINEQIGFIGSDSYRQAISDNLLIERASQFIIAQKLSDRNYISYKRLAMSVDAEVLQSFVRGIIDNIIIDCGHVKQITFRNGLSHIFVYKEH

SEQ ID NO: 1476 - protein, 567 aa, Unknown
  Description of Unknown: Integrase B1477 sequence
  PTHR30461:SF3,IPR036162,PS51737,IPR011109,PTHR30461, PF00239,G3DSA:1.10.10.2600,IPR006119,PF14287,SSF53041, IPR025378,SM00857,IPR025827,cd03770,IPR038109, PS51736,PF13408,G3DSA:3.40.50.1390,PF07508,Coil
MQSKNKNQIGITALYCRLSRDDGTESESNSIGNQKKLLSQKAKEMGLTDTKYYVDDGYTGTNFNRPGFQQLIDDIEIGLVSAVMVKDLSRLGRDYVSVGNYTDSYFPEHNIRFIAVNDAIDSDEGESEIAPFKNILNEMYARDISKKIRSSHRLRGSMGEPLSQPPYGYMKSPENKKKWIIDPEAATVVKSIFKMCLDGKGNETIARELQENEVLIPMAYWRSKGLNRGGKKTQTNPYKWCKTTIQKILSQQEYCGDIINFKTYSKSFKNKRRIENSKENWAVFKDVNEPIIDRETFETVQKFISKTKRRAPKKENGERSIFNGLIYCGDCHSKMRYHTSTSNKEIHYFTCSDNKVDYRGKCQGRHYVRADALEEVVKLELRRLVEMLEIDESYFAQLLLRKNDEEREKDKKFLESELQKAIARNNTVSQIYEKLYEDNVIGKVSDEWFVELSHKYEKERMNLKAKIADTRHKIEELKNNNSEYEKFISAIRRFMQMDNLTSPLLRELIDHIDIFETEGTGKSRTQRIVIYYRFIGYIELPNATKQTHIADTRKGVAVEYITEQFTA

SEQ ID NO: 1477 - protein, 567 aa, Unknown
  Description of Unknown: Integrase B1478 sequence
  PTHR30461:SF3,IPR036162,PS51737,IPR011109,PTHR30461, PS00397,PF00239,G3DSA:1.10.10.2600,IPR006119,SSF53041, SM00857,IPR025827,IPR038109,PS51736,cd03768, IPR006118,PF13408,G3DSA:3.40.50.1390,PF07508,Coil
MTENQEKIVALYVRVSTGYQVDKDSLPFQKKELKAYCEHVLHIDKKRIEIFEDAGKSGKNTKRPAFERMMDKVKAGQVSHVIVYKIDRISRNLVDFSLMYDDFKYNNVTFISLNEQFDTSSAIGEAILKIILVFAELERKLTSERVKDVMIGRAKNVQWNGARVPYGWDWDEKNKCPVHSDKEAPYVRTMYQMYLDGGSTITIRNYNNSHNIPTKRGGEWTSKTVADLLRNPMNRGDYRYNYRESSRGRKKPAEEVIYIKDAFPPIVDPKIWDAVNKKMDENAALRNTSGLHTIRNRCNVFAGLIVCGKCGHNYQVKGKDSRKGNGFRPSSYACTGKFQKNNCDNMNISDVNIGPFIINYIAAMVDASKKRKNIRNIDDLEQLILSHINFSDVIGISEESLRNAMDLFSAQTSSLGISSLSTQDQDGSVISQKNKLEEELQKTNRALERLKKAFLFDDDGISEKEFLEMKSKLEIDRIQIENSLKKISQDSISANVNHIEFIKTASQFLMIHEINSGNFVDYKKLASADEKTMKDFISSVVSGITVLDKRIVKIVFRNGLSHTLLYR

SEQ ID NO: 1478 - protein, 567 aa, Unknown
  Description of Unknown: Integrase B1479 sequence
  PTHR30461:SF3,IPR036162,PS51737,IPR011109,PTHR30461, PS00397,PF00239,G3DSA:1.10.10.2600,IPR006119,SSF53041, SM00857,IPR025827,IPR038109,PS51736,cd03768, IPR006118,PF13408,G3DSA:3.40.50.1390,PF07508,Coil
MSEDKRIVALYVRVSTGYQVDKDSLPFQKKELKAYCEHVLHIDKKRIEIFEDAGKSGKNTKRPAFERMMEKVKHGQVSHVIVYKIDRISRNLVDFSLMYDDFKYNKVTFISLNEQFDTSSAIGEAILKIILVFAELERKLTSERVTDVMIGRAQSGLWNGARVPYGWDWDDENKCPVHSKTEAKYVKQMYEDYLNGGSSVSIAKSYNANKIPTKRGGEWTSKTIADVIRNPMNKGDYRYNYRESARGRKKPQEEVIYIKGIFEPLVSINDWEKANKLMDGRGLKMNSSGQTIMNKRCNVFTGLIFCGKCGERYNVRSKDSRQGSGFRPSSYACGKRSRKGTCDNQNVSDVAIAPIIINYIAAMADIAKHKRHIKTTKELEQMILKRISFSDIVGISEDSLKDTLNLLYGKNGTQLWSANTVSQEDKSENKQKLTELQEKLEKTERAIERLKKAFLFDDDGLDEKEFLEMKSALEIDRVKIENEIKGMETESISVNVNQVEFIKTASQYLLMHELNKDEIINYKELAIADEDSIKNLFNSVLDHITVMDKRITEIVFKNGLTHKLLYK

SEQ ID NO: 1479 - protein, 567 aa, Unknown
  Description of Unknown: Integrase B1480 sequence
  PTHR30461:SF3,IPR036162,PS51737,IPR011109,PTHR30461, PS00397,PF00239,G3DSA:1.10.10.2600,IPR006119,SSF53041, SM00857,IPR025827,IPR038109,PS51736,mobidb-lite, cd03768,IPR006118,PF13408,G3DSA:3.40.50.1390,PF07508,Coil
MSEDKRIVALYVRVSTGYQVDKDSLPFQKKELKAYCEHVLHIDKKRIEIFEDAGKSGKNTKRPAFERMMEKVKHGQVSHVIVYKIDRISRNLVDFSLMYDDFKYNKVTFISLNEQFDTSSAIGEAILKIILVFAELERKLTSERVTDVMIGRAQSGLWNGARVPFGWDWDDENKCPVHSKTEAKYVKQMYSDYLNGGSSVSIAKSYNANKIPTKRGGEWTSKTIADVIRNPMNKGDYRYNYRESARGRKKPQEEVIYIKGIFEPLVSINDWEKANKLMDGRGLKMNSSGQTIMNKRCNVFTGLIFCGKCGERYNVRSKDSRQGSGFRPSSYACGKRSRKGTCDNQNVSDVAIAPIIINYIAAMADIAKHKRHIKTTKELEQMILKRISFSDIAGIAEDSLKDTLDLLYGKNGTQLWSANTVSQEDESENKQKLTELQAKLEKTERAIERLKKAFLFDDDGLDEKEFLEMKSALEINRVKIENEIKGMEAESISVNVNQVEFIKTASQYLLMHELNKDEIINYKELAITDDDSIKNLFNSVLDHITVIDKHITKIVFKNGLTHKLLYK

SEQ ID NO: 1480 - protein, 567 aa, Unknown
  Description of Unknown: Integrase B1481 sequence
  PTHR30461:SF3,IPR036162,PS51737,IPR011109,PTHR30461, PF00239,G3DSA:1.10.10.2600,IPR006119,PF14287,SSF53041, IPR025378,SM00857,IPR025827,cd03770,IPR038109, PS51736,PF13408,G3DSA:3.40.50.1390,PF07508,Coil
MQPKKNNKIGITALYCRLSRDDGMDGESNSIVNQKTLLSQKAKEKGLTDTKFYVDDGYTGTNFNRPGFQQMLSDIEMGYIYAVMVKDLSRLGRDYVSVGNYTDVYFPDHDIRFIAVNDGIDSEEGESEIAPFKNILNEMYARDISKKIRSSHRLRGSMGEPLSQPPYGYMKSAENKKKWVIDPEAAEVVKSVFKMCLEGKGNETIARILQEKQILVPMAYWQRKGLPRGGKKTQPNPYKWCKTTIQKILSQQEYCGDVINFKTCSKSFKNKTRLPNDPENWAIFRDVHEPIIARSDFEKVQTPIAKTKRRAPKPQNGEKNMFCDFLYCADCGSKLWYHTNTTNKEIHYFSCSNYKKDTRGNCETRHYIRADAIEQIVMLELKRLAKYLESHEEEFAKLLAEKNNADMLAEQKTLETELNRAIARNEMLTSLFAKTYEDNVSGKLSDEMYMELSHKYEVERLELKTKIFEYKECLAKISEMEQNKDDFLKSVRKFMEMESLTAPMLRELIDHIDVYEKEGGKKNYTQRIVIYYRFVGYLELPSSDDENYKANTRKGVDVEYIPTAKSA

SEQ ID NO: 1481 - protein, 567 aa, Unknown
  Description of Unknown: Integrase B1482 sequence
  PTHR30461:SF3,IPR036162,PS51737,IPR011109,PTHR30461, PS00397,PF00239,G3DSA:1.10.10.2600,IPR006119,SSF53041, SM00857,IPR025827,IPR038109,PS51736,mobidb-lite, cd03768,IPR006118,PF13408,G3DSA:3.40.50.1390,PF07508,Coil
MSEDKRIVALYVRVSTGYQVDKDSLPFQKKELKAYCEHVLHIDKKRIEIFEDAGKSGKNTKRPAFERMMEKVKHGQVSHVIVYKIDRISRNLVDFSLMYDDFKYNKVTFISLNEQFDTSSAIGEAILKIILVFAELERKLTSERVTDVMIGRAQSGLWNGARVPYGWDWDDEKKCPVHSKTEAKYVKQMYEDYLNGGSSVSIAKSYNANKIPTKRGGEWTSKTIADVIRNPMNKGDYRYNYRESARGRKKPQEEVIYIKGIFEPLVSINDWEKANKLMDGRGLKMNSSGQTIMNKRCNVFTGLIFCGKCGERYNVRSKDSRQGSGFRPSSYACGKRSRKGTCDNPNVSDVAIAPIIINYIAAMADIAKHKRHIKTTKELEQMILKRISFSDIVGISEDSLKDTLDLLYGKNGTQLWSANTVSQEDKSENKQKLTELQAKLEKTERAIERLKKAFLFDDDGLDEKEFLEMKSALEIDRVKIENEIKGMETESISVNVNQVEFIKTASQYLLMHELNKDEIINYKELAIADEDSIKNLFNSVLDHITVIDKHITEIVFKNGLTHKLLYK

SEQ ID NO: 1482 - protein, 567 aa, Unknown
  Description of Unknown: Integrase B1483 sequence
  PTHR30461:SF3,SM00857,G3DSA:1.10.10.2600,IPR036162,PF13408, IPR025827,G3DSA:3.40.50.1390,PS51737,IPR006119,IPR038109, PF07508,SSF53041,IPR011109,PF00239,PTHR30461, PS51736,Coil,cd00338
MRAFIYCRFSSHKQQELSIEGQRDICQEYADKHNITVVGQYADRARSGKTENRADFRRLMRDAATGVVDCVLVWRYDRFFRNRAESALYRKQLEAAGVHLISVTEYIPEGSAGIITQGMIETVAEYFSAKLSEDVSRGMNKAAQHCQIVGRAPLGYRAGPNKRWQIDPVGAELVRRIFEWYASGKAMGQLAAQLNEEGHRTTNGTLYTRSSFNSILRNEKYIGVYSYGGEVRIEGGCPRIIEDELFFTVQRRLSANRHRPGAYKAEVPYLLSGKLFCGLCGAPMTGTAGTSHTGARHYYYICNNRRAKTCKKKNVRLDLIEEAVLQSALDILTDENIAYISTEVERRCAENSDSAALLASLNAQLEEVQRRLKNIGNAIAQGIITETTKELLEEAEADRTALRQQIDRAKVQAALVVKAEAVACWLDGFRRGDRTDPDFRRQVFGALVHSVFVYDDYLKIIFNVDSAGAAVVPYEAAQAATPSEAPPGSYLDTLGAPKKALRKRKAFFIMIAALCECFRFAVDFNPSQRLFLFCRGEIHPSSWGCNNSRKRLGRVILVAMHRGNMLY

SEQ ID NO: 1483 - protein, 567 aa, Unknown
  Description of Unknown: Integrase B1484 sequence
  PTHR30461:SF3,IPR036162,PS51737,IPR011109,PTHR30461, PF00239,G3DSA:1.10.10.2600,PF14287,IPR006119,SSF53041, IPR025378,SM00857,IPR025827,cd03770,IPR038109, PS51736,PF13408,G3DSA:3.40.50.1390,PF07508,Coil
MQSKNKNQIGITALYCRLSRDDGTESESNSIGNQKKLLSQKAKEMGLTDTKYYVDDGYTGTNFNRPGFQQLIDDIEIGLVSAVMVKDLSRLGRDYVSVGNYTDSYFPEHNVRFIAVNDAIDSDEGESEIAPFKNILNEMYARDISKKIRSSHRLRGSMGEPLSQPPYGYMKSSENKKKWIIDPEAATVVKSIFKMCLDGKGNETIARELQENEVLIPMAYWRSKGLNRGGKKTQTNPYKWCKTTIQKILSQQEYCGDIINFKTYSKSFKNKRRIENSKENWAVFKDVNEPIIDRETFETVQKFISKTKRRAPKKENGERSIFNGLIYCGDCHSKMRYHTSTSNKEIHYFTCSDNKVDYRGNCPGRHYVRADALEEVVKLELRRLVEMLEIDESYFAQLLLRKNDEEREKDKKFLESELQKAITRSNTVSQLYEKLYEDNVIGKVSDEWFVELSHKYEKERMDLKAKIADTRHKIEELKNTNSEYGKFISAIRRFMQMDNLTSPLLRELIDHIDIFETEGTGKSRTQRIVIYYRFIGYIELPNVTKQTHIADTRKGVAVEYITEQFTA

SEQ ID NO: 1484 - protein, 567 aa, Unknown
  Description of Unknown: Integrase B1485 sequence
  PTHR30461:SF3,SM00857,G3DSA:1.10.10.2600,IPR036162,PF13408, IPR025827,PS51737,PS51736,G3DSA:3.40.50.1390,IPR006119, IPR038109,PF07508,SSF53041,IPR011109,PTHR30461, mobidb-lite,cd00338,PF00239
MARSAKKIEYAPAEQIGVIYARYSSHNQKEESIEQQIAECTEFAEKNGIRIIGIYADKAVSGRSDRRPNFQRMMRDAEKRHFQIVVAYKSNRIARNMLNALQYEAKLDSFGIKTLYAKEEFGNTAAGRFALRTMMNVNQFYSENMGEDIKRGMVDNAIECKVNGMLPLGYVKGEDGKYAIAADEAAVVREIYDSVLKDIPLAEIARSLNQRGIRTKLGRDWNKNSFHILLKNDNYIGVYRHSGVVVEDGIPPILDKEVFEAVQEKLTNKKKTAGRRSANGEYLLTGKLFCGYCGSYMIGVSGTGENGTVHNYYQCQKRHAEGRCEKKNVRRDFIEKLIARLTQDYILQDDTIEWIADSTMSFQAMARRESGVAQLERDLADNRKVAKNIMAAIEQGIITETTKARLLEVEGTIHDLERSLSIAKAASQPIERERVVFSLEQMREGNVGSKEHQKKLIDTFVKSVTLWDDRIQIDYYHTPGKHKFSYSLEELTSKAENESNASDVRTDSLELHQNVRNFLVFAEDSELFCIFQNQTLSTVAILPPFGSHPTQSRLKSSKETRNSTSKR

SEQ ID NO: 1485 - protein, 567 aa, Unknown
  Description of Unknown: Integrase B1486 sequence
  PTHR30461:SF3,IPR036162,PS51737,IPR011109,PTHR30461, PS00397,PF00239,G3DSA:1.10.10.2600,IPR006119,SSF53041, SM00857,IPR025827,IPR038109,PS51736,cd03768, IPR006118,PF13408,G3DSA:3.40.50.1390,PF07508,Coil
MKEDNRIVALYVRVSTGYQVDKDSLPFQKKELKAYCEHVLHIDKNRIEIFEDAGKSGKNTKRPAFERMMDKVKAGQVSHVVVYKIDRISRNLIDFSIMYNEFKYHRVAFISLNEQFDTSSAMGEAMLKIVLVFAEMERKLTSERVTDVMIGRAQSGLWNGARVPYGWDWDDEKKCPVHSKVEAKYVKQMYADYLNGGSSVSIAKSYNANKIPTKRGGEWTSKTIADVIRNPMNKGDYRYNYRESARGRKKPQEEVIYIKGVFEPLVSINDWEKANKLMDGRGFKMNSSGQIIMNKRCNVFTGLIFCGKCGERYNVRSKDCRQGSGFRPSSYACGKKSRKGTCDNQNISDVIIAPIMINYIAAMVDVSKHKKQIKTTKELEQVILKRISFSDVAGISEDSLQATLDLLYGKTGTQLWSANTVSQEDKSENKQKLTELQVKLEKTERAIERLKKAFLFDDDGIDEKEFLEMKSALEIDRVKIENEIKGMETESISVNVNQVEFIKTASQYLLMHELNKDENINYKELAITDEDSIKTLFNSVLDHITVIDKHITEIVFKNGLTHKLLYK

SEQ ID NO: 1486 - protein, 567 aa, Unknown
  Description of Unknown: Integrase B1487 sequence
  PTHR30461:SF3,IPR036162,PS51737,IPR011109,PTHR30461, PS00397,PF00239,G3DSA:1.10.10.2600,IPR006119,SSF53041, SM00857,IPR025827,IPR038109,PS51736,mobidb-lite, cd03768,IPR006118,PF13408,G3DSA:3.40.50.1390,PF07508,Coil
MSEDKRIVALYVRVSTGYQVDKDSLPFQKKELKAYCEHVLHIDKKRIEIFEDAGKSGKNTKRPAFERMMEKVKHGQVSHVIVYKIDRISRNLVDFSLMYDDFKYNKVTFISLNEQFDTSSAIGEAILKIILVFAELERKLTSERVTDVMIGRAQSGLWNGARVPYGWDWDDENKCPVHSKTEAKYVKQMYADYLNGGSSVSIAKSYNANNIPTKRGGEWTSKTIADVIRNPMNKGDYRYNYRESARGRKKPQEEVIYIKGIFEPLVSINDWEKANKLMDGRGLKMNSSGQTIMNKRCNVFTGLIFCGKCGERYNVRSKDSRQGSGFRPSSYACGKRSRKGTCDNQNVSDVAIAPIIINYIAAMADIAKHKRHIKTTKELEQMILKRISFSDIAGISEDSLKDTLDLLYGKNGTQLWSANTVSQEDKSENKQKLTELQAKLEKTERAIERLKKAFLFDDDGLDEKEFLEMKSKLEIDRVKIENEIKGMEAESISVNVNQVEFIKTASQYLLMHELNKDEIINYKELAITDEDSIKNLFNSVLDHITVMDKRITEIIFKNGLTHKLLYK

SEQ ID NO: 1487 - protein, 567 aa, Unknown
  Description of Unknown: Integrase B1488 sequence
  PTHR30461:SF3,IPR036162,PS51737,IPR011109,PTHR30461, PS00397,PF00239,G3DSA:1.10.10.2600,IPR006119,SSF53041, SM00857,IPR025827,IPR038109,PS51736,mobidb-lite, cd03768,IPR006118,PF13408,G3DSA:3.40.50.1390,PF07508,Coil
MSEDKRIVALYVRVSTGYQVDKDSLPFQKKELKAYCEHVLHIDKKRIEIFEDAGKSGKNTKRPAFERMMEKVKHGQVSHVIVYKIDRISRNLVDFSLMYDDFKYNKVTFISLNEQFDTSSAIGEAILKIILVFAELERKLTSERVTDVMIGRAQSGLWNGARVPYGWDWDDEKKCPVHSKTEAKYVKQMYEDYLNGGSSVSIAKSYNANKIPTKRGGEWTSKTIADVIRNPMNKGDYRYNYRESARGRKKPQEEVIYIKGIFEPLVSINDWEKANKLMDGRGLKMNSSGQTIMNKRCNVFTGLIFCGKCGERYNVRSKDSRQGSGFRPSSYACGKRSRKGTCDNPNVSDVAIAPIIINYIAAMVDITKHKRHIKTTKELEQMILKRISFSDIAGIAEDSLKDTLDLLYGKNGTQLWSANTVSQEDKSENKQKLTELQAKLEKTERAIERLKKAFLFDDDGLDEKEFLEMKSALEIDRVKIENEIKGMETESISVNVNQVEFIKTASQYLLMHELNKDEIINYKELAIADEDSIKNLFNSVLDHITVMDKRITEIVFKNGLTHKLLYK

SEQ ID NO: 1488 - protein, 567 aa, Unknown
  Description of Unknown: Integrase B1489 sequence
  PTHR30461:SF3,IPR036162,PS51737,IPR011109,PTHR30461, PS00397,PF00239,G3DSA:1.10.10.2600,IPR006119,SSF53041, SM00857,IPR025827,IPR038109,PS51736,mobidb-lite, cd03768,IPR006118,PF13408,G3DSA:3.40.50.1390,PF07508,Coil
MSEDKRIVALYVRVSTGYQVDKDSLPFQKKELKAYCEHVLHIDKKRIEIFEDAGKSGKNTKRPAFERMMEKVKLGQVSHVIVYKIDRISRNLVDFSLMYDDFKYNKVTFISLNEQFDTSSAIGEAILKIILVFAELERKLTSERVTDVMIGRAQSGLWNGARVPYGWDWDDEKKCPVHSKTEAKYVKQMYEDYLNGGSSVSIAKSYNANKIPTKRGGEWTSKTIADVIRNPMNKGDYRYNYRESARGRKKPQEEVIYIKGIFEPLVSINDWEKANKLMDGRGLKMNSSGQTIMNKRCNVFTGLIFCGKCGERYNVRSKDSRQGSGFRPSSYACGKRSRKGTCDNQNVSDVAIAPIIINYIAAMVDITKHKRHIKTTKELEQIILKRISFSDIVGISEDSLKDTLDLLYGKNGTQLWSANTVSQEDKSENKQKLTELQAKLEKTERAIERLKKAFLFDDDGLDEKEFLEMKSALEIDRVKIENEIKGMETESISVNVNQVEFIKTASQYLLMHEMNKDEIINYKELAIADEDSIKNLFNSVLDHITVIDKHITEIVFKNGLTHKLLYK

SEQ ID NO: 1489 - protein, 567 aa, Unknown
  Description of Unknown: Integrase B1490 sequence
  PTHR30461:SF3,IPR036162,PS51737,IPR011109,PTHR30461, PS00397,PF00239,G3DSA:1.10.10.2600,IPR006119,SSF53041, SM00857,IPR025827,IPR038109,PS51736,cd03768, IPR006118,PF13408,G3DSA:3.40.50.1390,PF07508,Coil
MTENPEKIVALYVRVSTGYQVDKDSLPFQKKELKAYCEHVLHIDKKRIEIFEDAGKSGKNTKRPAFERMMNKIKAGQVSHVIVYKIDRISRNLVDFSLMYDDFKYNNVTFISLNEQFDTSSAIGEAILKIILVFAELERKLTSERVKDVMIGRAKNVQWNGARVPYGWDWDEKNKCPVHSDKEAPYVRTMYQMYLDGGSTITIRNYNNSHNIPTKRGGEWTSKTVADLLRNPMNRGDYRYNYRESSRGRKKPAEEVIYIKDAFPPIVDPKIWDAVNKKMDENAALRNTSGLHTIRNRCNVFAGLIVCGKCGHNYQVKGKDSRKGNGFRPSSYACTGKFQKNNCDNMNISDVNIGPFIINYIAAMVDASKKRKNIRNIDDLEQLILSHINFSDVIGISEESLRNTMDLFSAQTSSLGISSLSTQDQDGSVISQKNKLEEELQKTNRALERLKKAFLFDDDGISEKEFLEMKSKLEIDRIQIENSLKKISQDSISANVNHIEFIKTASQFLMIHEINSGNFVDYKKLASADEKTMKDFISSVVSGITVLDKRIVKIVFRNGLSHTLLYR

SEQ ID NO: 1490 - protein, 567 aa, Unknown
  Description of Unknown: Integrase B1491 sequence
  PTHR30461:SF3,IPR036162,PS51737,IPR011109,PTHR30461, PS00397,PF00239,G3DSA:1.10.10.2600,IPR006119,SSF53041, SM00857,IPR025827,IPR038109,PS51736,mobidb-lite, cd03768,IPR006118,PF13408,G3DSA:3.40.50.1390,PF07508,Coil
MSEDKRIVALYVRVSTGYQVDKDSLPFQKKELKAYCEHVLHIDKKRIEIFEDAGKSGKNTKRPAFERMMEKVKHGQVSHVIVYKIDRISRNLVDFSLMYDDFKYNKVTFISLNEQFDTSSAIGEAILKIILVFAELERKLTSERVTDVMIGRAQSGLWNGARVPFGWDWDDEKKCPVHSKTEAKYVKQMYEDYLNGGSSVSIAKSYNANKIPTKRGGEWTSKTIADVIRNPMNKGDYRYNYRESARGRKKPQEEVIYIKGIFKPLVSINDWEKANKLMDGRGLKMNSSGQTIMNKRCNVFTGLIFCGKCGERYNVRSKDSRQGSGFRPSSYACGKRSRKGTCDNPNVSDVAIAPIIINYIAAMADIAKHKRHIKTTKELEQMILKRISFSDIVGISEDSLKDTLDLLYGKNGTQLWSANTVSQEDKSENKQKLTELQAKLEKTERAIERLKKAFLFDDDGLDEKEFLEMKSALEIDRVKIENEIKGMETESISVNVNQVEFIKTASQYLLMHELNKDEIINYKELAIADEDSIKNLFNSVLDHITVIDKHITEIVFKNGLTHKLLYK

SEQ ID NO: 1491 - protein, 567 aa, Unknown
  Description of Unknown: Integrase B1492 sequence
  PTHR30461:SF3,IPR036162,PS51737,IPR011109,PTHR30461, PS00397,PF00239,G3DSA:1.10.10.2600,IPR006119,SSF53041, SM00857,IPR025827,IPR038109,PS51736,cd03768, IPR006118,PF13408,G3DSA:3.40.50.1390,PF07508,Coil
MKEDNRIVALYVRVSTGYQVDKDSLPFQKKELKAYCEHVLHIDKKRIEIFEDAGKSGKNTKRPAFERMMEKVKLGQVSHVIVYKIDRISRNLVDFSLMYDDFKYNKVTFISLNEQFDTSSAIGEAILKIILVFAELERKLTSERVTDVMIGRAQSGLWNGARVPYGWDWDDEKKCPVHSKVEAKYVRQMYSDYLNGGSSVSIAKSYNANKIPTKRGGEWTSKTIADVIRNPMNKGDYRYNFRESARGRKKPQEEVVYIKGVFEPLVPINDWERANKLMDERGLKMNSSGQTIMNKRCNVFSGLIICGKCGENFNVRSKDCRKGIGFRPSSYICGKKAHKGTCDNPNVSDVIIAPLMINYIAAMVDVTKHKRQIKTTKELEQVILKRISFSDIAGIAEDSLQATLDLLYGKNGTQLWSANAVSKEQDSENKQKLTELQEKLKKTGRAIERLKKAFLFDDDGMDEKEFLEMKSSLEIDRVKIENEIKGMETESISVNVNQVEFIKTASQYLLMHELNKDEIIDYKELAVTDEESIKILFNEVLDHIAIIDRHVTEIVFKNGLTHKLLYK

SEQ ID NO: 1492 - protein, 567 aa, Unknown
  Description of Unknown: Integrase B1493 sequence
  PTHR30461:SF3,IPR036162,PS51737,IPR011109,PTHR30461, PS00397,PF00239,G3DSA:1.10.10.2600,IPR006119,SSF53041, SM00857,IPR025827,IPR038109,PS51736,cd03768, IPR006118,PF13408,G3DSA:3.40.50.1390,PF07508,Coil
MTENQEKIVALYVRVSTGYQVDKDSLPFQKKELKAYCEHVLHIDKKRIEIFEDAGKSGKNTKRPAFERMMNKIKAGQVSHVIVYKIDRISRNLVDFSLMYDDFKYNNVTFISLNEQFDTSSAIGEAILKIILVFAELERKLTSERVKDVMIGRAKNVQWNGARVPYGWDWDEKNKCPVHSDKEAPYVRTMYQMYLDGGSTITIRNYNNSHNIPTKRGGEWTSKTVADLLRNPMNRGDYRYNYRESSRGRKKPAEEVIYIKDAFPPIVDPKIWDAVNKKMDENAALRNTSGLHTIRNRCNVFAGLIVCGKCGHNYQVKGKDSRKGNGFRPSSYACTGKFQKNNCDNMNISDVNIGPFIINYIAAMVDASKKRKNIRNIDDLEQLILSHINFSDVIGISEESLRNTMDLFSVQTSSLGISSLSTQDQDGSVISQKNKLEEELQKTNRALERLKKAFLFDDDGISEKEFLEMKSKLEIDRIQIENSLKKISQDSISANVNHIEFIKTASQFLMIHEINSGNFVDYKKLASADEKTMKDFISSVVSGITVLDKRIVKIVFRNGLSHTLLYR

SEQ ID NO: 1493 - protein, 567 aa, Unknown
  Description of Unknown: Integrase B1494 sequence
  PTHR30461:SF3,IPR036162,PS51737,IPR011109,PTHR30461, PS00397,PF00239,G3DSA:1.10.10.2600,IPR006119,SSF53041, SM00857,IPR025827,IPR038109,PS51736,mobidb-lite, cd03768,IPR006118,PF13408,G3DSA:3.40.50.1390,PF07508,Coil
MSEDKRIVALYVRVSTGYQVDKDSLPFQKKELKAYCEHVLHIDKKRIEIFEDAGKSGKNTKRPAFERMMEKVKHGQVSHVIVYKIDRISRNLVDFSLMYDDFKYNKVTFISLNEQFDTSSAIGEAILKIILVFAELERKLTSERVTDVMIGRAQSGLWNGARVPYGWDWDDEKKCPVHSKVEAKYVRQMYSDYLNGGSSVSIAKSYNANKIPTKRGGEWTSKTIADVIRNPMNKGDYRYNYRESARGRKKPQEEVIYIKGIFEPLVSINDWEKANKLMDGRGLKMNSSGQTIMNKRCNVFTGLIFCGKCGERYNVRSKDSRQGSGFRPSSYACGKRSRKGTCDNQNVSDVAIAPIIINYIAAMADIAKHKRHIKTTKELEQMILKRISFSDIAGISEDSLKDTLDLLYGKNGTQLWSANTVSQEDKSENKQKLTELQVKLEKTERAIERLKKAFLFDDDGLDEKEFLEMKSALEIDRVKIENEIKGMETESISVNVNQVEFIKTASQYLLMHELNKDEIINYKELAIADEDSIKNLFNSVLDHITVMDKRITEIVFKNGLTHKLLYK

SEQ ID NO: 1494 - protein, 567 aa, Unknown
  Description of Unknown: Integrase B1495 sequence
  PTHR30461:SF3,IPR036162,PS51737,IPR011109,PTHR30461, PS00397,PF00239,G3DSA:1.10.10.2600,IPR006119,SSF53041, SM00857,IPR025827,IPR038109,PS51736,mobidb-lite, cd03768,IPR006118,PF13408,G3DSA:3.40.50.1390,PF07508,Coil
MSEDKRIVALYVRVSTGYQVDKDSLPFQKKELKAYCEHVLHIDKKRIEIFEDAGKSGKNTKRPAFERMMEKVKHGQVSHVIVYKIDRISRNLVDFSLMYDDFKYNKVTFISLNEQFDTSSAIGEAILKIILVFAELERKLTSERVTDVMIGRAQSGLWNGARVPYGWDWDDEKKCPVHSKTEAKYVKQMYEDYLNGGSSVSIAKSYNANKIPTKRGGEWTSKTIADVIRNPMNKGDYRYNYRESARGRKKPQEEVIYIKGIFEPLVPINDWEKANKLMDGRGLKMNSSGQTIMNKRCNVFTGLIFCGKCGERYNVRSKDSRQGSGFRPSSYACGKRSRKGTCDNQNVSDVAIAPIIINYIAAMADIAKHKRHIKTTKELEQMILKRISFSDIAGISEDSLKDTLDLLYGKNGTQLWSANTVSQEDKSENKQKLTELQAKLEKTERAIERLKKAFLFDDDGLDEKEFLEMKSALEIDRVKIENEIKGMETESISVNVNQVEFIKTASQYLLMHELNKDEIINYKELAIADEDSIKNLFNSVLDHITVMDKRITEIVFKNGLTHKLLYK

SEQ ID NO: 1495 - protein, 567 aa, Unknown
  Description of Unknown: Integrase B1496 sequence
  PTHR30461:SF3,IPR036162,PS51737,IPR011109,PTHR30461, PS00397,PF00239,G3DSA:1.10.10.2600,IPR006119,SSF53041, SM00857,IPR025827,IPR038109,PS51736,mobidb-lite, cd03768,IPR006118,PF13408,G3DSA:3.40.50.1390,PF07508,Coil
MSEDKRIVALYVRVSTGYQVDKDSLPFQKKELKAYCEHVLHIDKKRIEIFEDAGKSGKNTKRPAFERMMEKVKLGQVSHVIVYKIDRISRNLVDFSLMYDDFKYNKVTFISLNEQFDTSSAIGEAILKIILVFAELERKLTSERVTDVMIGRAQSGLWNGARVPYGWDWDDEKKCPVHSKTEAKYVKQMYEDYLNGGSSVSIAKSYNANKIPTKRGGEWTSKTIADVIRNPMNKGDYRYNYRESARGRKKPQEEVIYIKGIFEPLVSINDWEKANKLMDGRGLKMNSSGQTIMNKRCNVFTGLIFCGKCGERYNVRSKDSRQGSGFRPSSYACGKRSRKGTCDNPNVSDVAIAPIIINYIAAMVDITKHKRHIKTTKELEQMILKRISFSDIAGIAEDSLKDTLDLLYGKNGTQLWSANTVSQEDKSENKQKLTELQAKLEKTERAIERLKKAFLFDDDGLDEKEFLEMKSALEIDRVKIENEIKGMETESISVNVNQVEFIKTASQYLLMHELNKDEIINYKELAIADEDSIKNLFNSVLDHITVMDKRITEIVFKNGLTHKLLYK

SEQ ID NO: 1496 - protein, 567 aa, Unknown
  Description of Unknown: Integrase B1497 sequence
  PTHR30461:SF3,cd00338,SM00857,G3DSA:1.10.10.2600,IPR036162, PS51737,G3DSA:3.40.50.1390,IPR006119,IPR038109,PF07508, IPR011109,SSF53041,PTHR30461,PS51736,Coil, PF00239
MKRKVAIYARVSTEHEAQINALENQIQYYDNILAQHPEWELVGRYVDEGITGTSVKKRKNFLRMMEDAKNGMFSLILTREVSRFARNTVDTLQETRKLKSYGVEVYFTEDNIRTSDDTDGELRLALMATLAQNESKKTSVRVKAGQKISFENGVLYGNGNILGYDRVGRELVVNPEQAETVKMIFNMYHDGMGCKQIAYELEKRGRVTSTGLTHWQPGTISRLLRNSFYCGKIVYRKQYVPDYLEQKRINNYDEVDKIEITGKHEPIVSEELFNDCQRRLDAKTVNRLRGKHAINPPKSAYARILKCQCGSNFERRKWHKYKDGRIRYGFECYKQKNHGSYRTRLKKGLDTTGCCTTKMFPEWKLKIVAHWLFNDLWKERDKIINRAIEMLNATIKDENVVDYTDEVKELNKKRKKYEEKLSNLVELRVEGDISKEVYEEKKGVFKKQIEYIDSELLKRDVKNSAIVSNVKTQIQLLTDLLEKKYDVISGDIPEDIVETFIDQIVVHDDYFEWRLRTSTEPVLCKVEGNEKDNTIIFLENDSHKVATQYRQLSLTSNTLISEKNIIT

SEQ ID NO: 1497 - protein, 567 aa, Unknown
  Description of Unknown: Integrase B1498 sequence
  PTHR30461:SF3,IPR036162,PS51737,IPR011109,PTHR30461, PS00397,PF00239,G3DSA:1.10.10.2600,IPR006119,SSF53041, SM00857,IPR025827,IPR038109,PS51736,mobidb-lite, cd03768,IPR006118,PF13408,G3DSA:3.40.50.1390,PF07508,Coil
MSEDKRIVALYVRVSTGYQVDKDSLPFQKKELKAYCEHVLHIDKKRIEIFEDAGKSGKNTKRPAFERMMEKVKHGQVSHVIVYKIDRISRNLVDFSLMYDDFKYNKVTFISLNEQFDTSSAIGEAILKIILVFAELERKLTSERVTDVMIGRAQSGLWNGARVPYGWDWDDENKCPVHSKTEAKYVKQMYEDYLNGGSSVSIAKSYNANKIPTKRGGEWTSKTIADVIRNPMNKGDYRYNYRESARGRKKPQEEVIYIKGIFEPLVSINDWEKANKLMDGRGLKMNSSGQTIMNKRCNVFTGLIFCGKCGERYNVRSKDSRQGSGFRPSSYACGKRSRKGTCDNPNVSDVAIAPIIINYIAAMVDITKHKRHIKTTKELEQIILKRISFSDIVGISEDSLKDTLDLLYGKNGTQLWSANTVSQEDKSENKQKLTELQAKLEKTERAIERLKKAFLFDDDGLDEKEFLEMKSALEIDRVKIENEIKGMETESISVNVNQVEFIKTASQYLLMHELNKDEIINYKELAIADEDSIKNLFNSVLDHITVMDKRITEIVFKNGLTHKLLYK

SEQ ID NO: 1498 - protein, 567 aa, Unknown
  Description of Unknown: Integrase B1499 sequence
  PTHR30461:SF3,IPR036162,PS51737,IPR011109,PTHR30461, PS00397,PF00239,G3DSA:1.10.10.2600,IPR006119,SSF53041, SM00857,IPR025827,IPR038109,mobidb-lite,PS51736, cd03768,IPR006118,PF13408,G3DSA:3.40.50.1390,PF07508,Coil
MSEDKRIVALYVRVSTGYQVDKDSLPFQKKELKAYCEHVLHIDKKRIEIFEDAGKSGKNTKRPAFERMMEKVKHGQVSHVIVYKIDRISRNLVDFSLMYDDFKYNKVTFISLNEQFDTSSAIGEAILKIILVFAELERKLTSERVTDVMIGRAQSGLWNGARVPYGWDWDDENKCPVHSKTEAKYVKQMYEDYLNGGSSVSIAKSYNANKIPTKRGGEWTSKTIADVIRNPMNKGDYRYNYRESARGRKKPQEEVIYIKGIFEPLVSINDWEKANKLMDERGLKMNSSGQTIMNKRCNVFTGLIFCGKCGERYNVRSKDSRQGSGFRPSSYACGKRSRKGTCDNKNVSDVAIAPIIINYIAAMADIAKHKRHIKTTKELEQMILKRISFSDIAGISEDSLKDTLDLLYGKNGTQLWSANTVSQEDKSENKQKLTELQAKLEKTERAIGRLKKAFLFDDDGLDEKEFLEMKSALEIDRVKIENEIKGMETESISVNVNQVEFIKTASQYLLMHELNKDEIINYKELAIADEDSIKNLFNSVLDHITVIDKHITEIVFKNGLTHKLLYK

SEQ ID NO: 1499 - protein, 567 aa, Unknown
  Description of Unknown: Integrase B1500 sequence
  PTHR30461:SF3,IPR036162,PS51737,IPR011109,PTHR30461, PS00397,PF00239,G3DSA:1.10.10.2600,IPR006119,SSF53041, SM00857,IPR025827,IPR038109,PS51736,cd03768, IPR006118,PF13408,G3DSA:3.40.50.1390,PF07508,Coil
MKEDNRIVALYVRVSTGYQVDKDSLPFQKKELKAYCEHVLHIDKDRIEIFEDAGKSGKNTKRPAFERMMDKVKAGQVSHVVVYKIDRISRNLIDFSIMYNEFKYHRVAFISLNEQFDTSSAMGEAMLKIVLVFAEMERKLTSERVTDVMIGRAQSGLWNGARVPYGWDWDDEKKCPVHSKVEAKYVKQMYEDYLNGGSSVSIAKNYNANKIPTKRGGEWTSKTIADVIRNPMNKGDYRYNYRESARGRKKPQEEVIYIKGVFEPLVSINDWEKANKLMDGRGFKMNSSGQIIMNKRCNVFTGLIFCGKCGERYNVRSKDCRQGSGFRPSSYACGKKSRKGTCDNQNISDVIIAPIMINYIAAMVDVSKHKKQIKTTKELEQVILKRINFSDVAGISEDSLQATLDLLYGKTGTQLWSAVTVSKEQDSKNKQRLVELQEKLKKTDRAIERLKKAFLFDDDGLDEKEFLEMKSRLEIDRVKIENEIKGMEAESISVNVNQVEFIKTASQYLLMHELNKDEIINYKELAITDEDSIKTLFNSVLDHITVIDKHITEIVFKNGLTHKLLYK

SEQ ID NO: 1500 - protein, 567 aa, Unknown
  Description of Unknown: Integrase B1501 sequence
  cd00338,SM00857,G3DSA:1.10.10.2600,IPR036162,PS51737, G3DSA:3.40.50.1390,IPR006119,IPR038109,PF07508,IPR011109, SSF53041,PTHR30461,Coil,PF00239
MKIIKDAVGYVRFSSAIQEQGTSIRRQRKLIKDWCDHQPQIIYHSTYQDIGKSAWKKHEHDERKAFLQMLEDRKLQRFPEPCYLLVEDASRLSRLDYDDAIAQMKDLFSLGFVVVFLATGRIYDADNFKDMGGRISFMVDAETHHKASEQKSHHSRKNWSQLRADAITTGKLISKSCARWVIPVPTGEGLPNHEGRNTTFIYNNHAQTIKRIFEMRLAGVSMSVIAQTLNSEDVPTLTNQSKTWNQSSVNGLLNNRAVIGDYVPSKKTVNVDEAQIIPGYYPRLISLADFQTVQAMREGKGRSSNSDNPTNVNLFKGILKCKCGSAVISSSVTPERYGYYVCSMYRLKRCSCHPEQRYEGGKGKGKRGKGNAISRSLVDSVLVEGLLSNLPLLLSGNNTDNNQLQTLESEHRAIEQTLTNFESMIARTGGSDRLAKLYQQAESELTSKQSEIDKLRLRMLTSVNVETVHQLDLSRRADRIELNLIAKKHISEIRLDMKKQTCDVWLHSGFTFYDLPLNREGFDIGGWIHFFIQLNEKEYRFTGKEPLNSGQEGRVTDYVDVKPDSDA

SEQ ID NO: 1501 - protein, 567 aa, Unknown
  Description of Unknown: Integrase B1502 sequence
  PTHR30461:SF3,cd16857,IPR036162,PS51737, IPR011109,PTHR30461,PS00397,PF00239, G3DSA:1.10.10.2600,IPR006119,SSF53041,SM00857,IPR038109 ,PS51736,cd03768,IPR006118,G3DSA:3.40.50.1390,PF07508,Coil
MRMKLHREEEHRKAALYIRVSTMYQIDKESLPHQREELTRYAEYALHISDYEIFEDAGFSGKNTDRPAYQEMMARIRQHEFTHLIVDKIDRISRNLLDFAAMYDELKKLDVTFISRNEQFDTSSAMGEAMLKIILVFAELERHMTSERVSAIMVDRAKKGKWNGANIPLGYDWSEKAGYPVENPQEVKIVQMMFDMYEKGYSSNRLTQYLNDHGIRGKRNGLWTTASVRQVLTNPFYKGTLRYNYRHKARGCIKKESEWIVIEHNHPNIISEEQWEHVNEILKSHSVTRIRKKHDHAFSGLLTCLCGGTGGARLDKPRQNGVRPSYYECNTHWRVSKTLCNNNLAMSDMLIGTFVFNYLKNMIRVQQHMGELETPEAMEAELLKGDCFHDISGIEKASLQKIYAVFCKNSNVAYQESEALRYDDPAVIAGNQVKELEKKRQAHERALERLNKAYLYAEIGLSEKEYLQNRQEIMQAIQDIDQKIQVIQPDSNSEDDIAFLEASSNFIIKQELLSDEPIQWLDFALHVSAATIHQFLCAIVTKIVFYQRRILSIEFKNGVVHRFLYRE

SEQ ID NO: 1502 - protein, 567 aa, Unknown
  Description of Unknown: Integrase B1503 sequence
  PTHR30461:SF3,IPR036162,PS51737,IPR011109,PTHR30461, PS00397,PF00239,G3DSA:1.10.10.2600,IPR006119,SSF53041, SM00857,IPR025827,IPR038109,PS51736,cd03768, IPR006118,PF13408,G3DSA:3.40.50.1390,PF07508,Coil
MSATATKNRVAIYVRVSTLYQADKDSLPMQKQDLISYAKLMLNTDDFVIFEDAGYSGKNTDRPKFQEMMFQVRTGAFTHLLVWKIDRISRNLLDFSAMYKELKDLGVIFVSKNEQFDTSTAMGEAMLKIILVFAELERNMTAERVTATMINRASNGLWNGGRIPYGYCYNHETQKFTLNNSESKIVNLIHDKYEETRSLIQETRWLNENGYRTRAGNEWNPVSIAIILRNVFYCGDYQYNRLKEGNRQRQKNKSEWITVENHHIAIVTREQKQRILNILESNARLCKTRNMYISTKHVHIFSGLLYCGSCGNPMGSSPASAKKDWQYSKYSCSTRRKSTTACSGKSVSDPIVGEFVFNYILNMLNAQKSFSTISSPSILQQRLLMGDTFQSIAFIESDGLNDLYNMLLSGSISGEIYGNDANFKVSDSGLSNLQSKKQKLERALDRLTSLYLYSDTAISEREYIVQKAKLTDSLDEINEQIGFIDSDSYRQAISDNLLIERASQFIIAQKLSDRNYISYKRLAMSVDAEVLQSFVRGIIDNIIIDCGHVKQITFRNGLSHIFVYKEH

SEQ ID NO: 1503 - protein, 567 aa, Unknown
  Description of Unknown: Integrase B1504 sequence
  PTHR30461:SF3,IPR036162,PS51737,IPR011109,PTHR30461, PS00397,PF00239,G3DSA:1.10.10.2600,IPR006119,SSF53041, SM00857,IPR025827,IPR038109,PS51736,mobidb-lite, cd03768,IPR006118,PF13408,G3DSA:3.40.50.1390,PF07508,Coil
MSEDKRIVALYVRVSTGYQVDKDSLPFQKKELKAYCEHVLHIDKKRIEIFEDAGKSGKNTKRPAFERMMDKVKAGQVSHVIVYKIDRISRNLVDFSLMYDDFKYNKVTFISLNEQFDTSSAIGEAILKIILVFAELERKLTSERVTDVMIGRAQSGQWNGARVPYGWDWDDEKKCPVHSKTEAKYVRQMYSDYLNGGSSVSIAKSYNANKIPTKRGGEWTSKTIADVIRNPMNKGDYRYNYRESARGRKKPQEEVIYIKGIFEPLVSINDWEKANKLMDGRGLKMNSSGQTIMNKRCNVFTGLIFCGKCGERYNVRSKDSRQGSGFRPSSYACGKRSRKGTCDNQNVSDVAIAPIIINYIAAMVDIAKHKRHIKTTKELEQIILKRISFSDIVGISEDSLKDTLELLYGKSSTQLWSANIVSREQDSENKQKLTELQAKLEKTERAIGRLKKAFLFDDDGLDEKEFLEMKSALEIDRVKIENEIKGMETESISVNVNQVEFIKTASQYLLMHELNKDEIINYKELAIADEDSIKNLFNSVLDHITVMDKRITEIVFKNGLTHKLLYK

SEQ ID NO: 1504 - protein, 567 aa, Unknown
  Description of Unknown: Integrase B1505 sequence
  PTHR30461:SF3,IPR036162,PS51737,IPR011109,PTHR30461, PF00239,G3DSA:1.10.10.2600,IPR006119,PF14287,SSF53041, IPR025378,SM00857,IPR025827,cd03770,IPR038109, PS51736,PF13408,G3DSA:3.40.50.1390,PF07508,Coil
MQSKNKNQIGITALYCRLSRDDGTESESNSIGNQKKLLSQKAKEMGLTDTKYYVDDGYTGTNFNRPGFQQLIDDIEIGLVSAVMVKDLSRLGRDYVSVGNYTDSYFPEHNIRFIAVNDAIDSDEGESEIAPFKNILNEMYARDISKKIRSSHRLRGSMGEPLSQPPYGYMKSPENKKKWIIDPEAATVVKSIFKMCLDGKGNETIARELQENEVLIPMAYWRSKGLNRGGKKTQTNPYKWCKTTVQKILSQQEYCGDIINFKTYSKSFKNKTRYENSKENWAVFKNVNEPIIDRETFETVQKFISKTKRRAPKKENGERSIFNGLIYCGDCHSKMRYHTSTSNKEIHYFTCSDNKVDYRGKCPGRHYVRADALEEVVKLELRRLVEMLEIDESYFAQLLLRKNDEEREKDKKFLESELQKAIARSNTVSQLYEKLYEDNVIGKVSDEWFVELSHKYEKERMDLKAKIADTRHQIEELKNTNSEYGKFISAIRRFMQMDNLTSPLLRELIDHIDIFETEGTGKSRTQRIVIYYRFIGYIELPNATKQTHIADTRKGVAVEYITEQFTA

SEQ ID NO: 1505 - protein, 567 aa, Unknown
  Description of Unknown: Integrase B1506 sequence
  PTHR30461:SF3,IPR036162,PS51737,IPR011109,PTHR30461, PS00397,PF00239,G3DSA:1.10.10.2600,IPR006119,SSF53041, SM00857,IPR025827,IPR038109,PS51736,mobidb-lite, cd03768,IPR006118,PF13408,G3DSA:3.40.50.1390,PF07508,Coil
MSEDKRIVALYVRVSTGYQVDKDSLPFQKKELKAYCEHVLHIDKKRIEIFEDAGKSGKNTKRPAFERMMEKVKHGQVSHVIVYKIDRISRNLVDFSLMYDDFKYNKVTFISLNEQFDTSSAIGEAILKIILVFAELERKLTSERVTDVMIGRAQSGLWNGARVPYGWDWDDENKCPVHSKTEAKYVKQMYADYLNGGSSVSIAKSYNANNIPTKRGGEWTSKTIADVIRNPMNKGDYRYNYRESARGRKKPQEEVIYIKGIFEPLVSINDWEKANKLMDGRGLKMNSSGQTIMNKRCNVFTGLIFCGKCGERYNVRSKDSRQGSGFRPSSYACGKRSRKGTCDNQNVSDVAIAPIIINYIAAMADIAKHKRHIKTTKELEQMILKRISFSDIAGISEDSLKDTLDLLYGKNGTQLWSANTVSQEDKSENKQKLTELQAKFEKTERAIERLKKAFLFDDDGLDEKEFLEMKSKLEIDRVKIENEIKGMEAESISVNVNQVEFIKTASQYLLMHELNKDEIINYKELAITDEDSIKNLFNSVLDHITVMDKRITEIIFKNGLTHKLLYK

SEQ ID NO: 1506 - protein, 567 aa, Unknown
  Description of Unknown: Integrase B1507 sequence
  PTHR30461:SF3,cd00338,SM00857,G3DSA:1.10.10.2600,IPR036162, PF13408,PS51737,G3DSA:3.40.50.1390,IPR025827,IPR006119, IPR038109,PF07508,IPR011109,SSF53041,PTHR30461, PS51736,Coil,PF00239
MDTIDPTIVLYHLAGRIANPKGDTMKKKQPNTRHGRAAIYARYSSHNQREASIEQQVKACRELAVRLGLDVVETYEDKAISGKSDRRPSFQRLLRDAEKGYFDCVLAWKSNRMGRNMLQAMTNEARLKDWGVRTFYAEEDFDDTAAGRFALRNMMNVNQFYSENMAEDITRGMMDNASKCLSNGALPLGYKAGENGRIVLDKAQAAVVQEIYTRVACREPFVDIAADLNRRGIKTKRGGPWTKSSFYTICRNERYRGIYIYDDVRVEGGVPRIVSDGLFYRVQEVLKVKKTPQSARHHTGAEDYLLTGKLFCGKCGRPMTGVSGTSRSGEMHYYYTCQKRRREHACDKKSVIREQIEKSVAQAIKQYMLTDEMIQHMADATMAYNARQEKDLHLQDLQGQLAAVKTSAANLLKAIEMGVITETTKARMVELEQEQGRLNAQIENARAELVPITRDNFVSLLHIYRNGDINDSKYLASLFETFLVRVDLYDDHFLIWFNPLGQKTPADIPITSIENGDTDEFFDECRSKNVFDWGGKWSTINHQDEHTTFITMIGNVFVLLCPFPGLK

SEQ ID NO: 1507 - protein, 567 aa, Unknown
  Description of Unknown: Integrase B1508 sequence
  PTHR30461:SF3,IPR036162,PS51737,IPR011109,PTHR30461, PS00397,PF00239,G3DSA:1.10.10.2600,IPR006119,SSF53041, SM00857,IPR025827,IPR038109,mobidb-lite,PS51736, cd03768,IPR006118,PF13408,G3DSA:3.40.50.1390,PF07508,Coil
MSEDKRIVALYVRVSTGYQVDKDSLPFQKKELKAYCEHVLHIDKKRIEIFEDAGKSGKNTKRPAFERMMEKVKHGQVSHVIVYKIDRISRNLVDFSLMYDDFKYNKVTFISLNEQFDTSSAIGEAILKIILVFAELERKLTSERVTDVMIGRAQSGLWNGARVPYGWDWDDENKCPVHSKTEAKYVKQMYEDYLNGGSSVSIAKSYNANKIPTKRGGEWTSKTIADVIRNPMNKGDYRYNYRESARGRKKPQEEVIYIKGIFEPLVSINDWEKANKLMDGRGLKMNSSGQTIMNKRCNVFTGLIFCGKCGERYNVRSKDSRQGSGFRPSSYACGKRSRKGTCDNPNVSDVAIAPIIINYIAAMVDITKHKRYIKTTKELEQMILKRISFSDIVGISEDSLKDTLDLLYGKNGTQLWSANTVSQEDKSENKQKLTELQAKLEKTERAIERLKKAFLFDDDGLDEKEFLEMKSALEIDRVKIENEIKGMETESISVNVNQVEFIKTASQYLLMHELNKDEIINYKELAIADEDSIKNLFNSVLDHITVMDKRITEIVFKNGLTHKLLYK

SEQ ID NO: 1508 - protein, 566 aa, Unknown
  Description of Unknown: Integrase B1509 sequence
  PTHR30461:SF3,SM00857,G3DSA:1.10.10.2600,IPR036162,PF13408, IPR025827,PS51737,G3DSA:3.40.50.1390,IPR006119,IPR038109, PF07508,IPR011109,SSF53041,PTHR30461,Coil, PS51736,cd00338,PF00239
MQNYTAPAPLQAPRAFGYCRKSTNEQREESLEAQQRAIVTFAATAGYELVQVYKDHGNSGRRGERPEFQRMLADAAAAGVQYIIVHKLDRFFRNADQQTVVEMQLRRQGIQVISAAEHFDTTPQGQFMRNVTKAINQWYSANLAQEVAKGLRENALTARTTGGPPPLGYTVDKTTGQYSIVPREAEAVQLIFKLYQQGAGYTEIIDALNAGGYVTRRGQPFGKNSLYDILRNEKYTGLYIWNRLAPADVDGRTSRRRLKPRDEWVCVENGMPQIIPTEQWQAVQDEMDKRKHRNAQYKAKAFYLLSGLVYCGGCGGAMAGEMHRYSSHGKAVEYRYYRCTAQHRQHDGGVHAHRVNADRLENAVIDYIQRIVLDPVNMDALCVAVLEALTPDGRNAERAKELKQEAGVIQQKVDRLYQAIENGLDAAGAIERINTLQKQRMTLLAQANDLDVSAESAVASVDELRRVWSGINLRELQPEKMRAIVRDLIYKIVVFDDGPRGSRLRIILNPARLNPSAIPKSIETAPLSELQDFSHTTGSGLPLPSIRETVMILDYGLIAAELSIAR

SEQ ID NO: 1509 - protein, 566 aa, Unknown
  Description of Unknown: Integrase B1510 sequence
  SM00857,G3DSA:1.10.10.2600,IPR036162,PF13408,PS51737, G3DSA:3.40.50.1390,IPR025827,IPR006119,IPR038109,PF07508, SSF53041,IPR011109,PF00239,PTHR30461,Coil, cd00338
MAEKIMQGIKQISELIGQAVKKRVVCLYRVSTVGQVEKDDIPMQKQYCREFCRGQSGWEIVKEFSEKGVSGFKVSAKDRDAIQEIQKMALKGEFDILLVFMFDRLGRRDDETPFVVEWFVKQGIEVWSAMEGQQRFDTHVDKLLNYIRYWQASGESIKTSLRVKTRLEQLTQEGYYTGGRVPFGYQAVKRGRINKKNHEVRDLAIEPGEAEVMKIIFQKYVYEGYGALRLHRYLMDQGLRTKDGKTITMGIINRVIKNPICIGIIQKGESQSSVLPELKIIDEEVFARAQEIVRERVVPQSEVPLTTRGQSLLVGNVYCGHCGARLSLATAGRNYKKKDGTVVKKTYSCYKCYNKAMAAEKCDGQTTYGVSKLDNLVDQIIHIQLQRIQKAPPQALIEKQRDREAEQVKAKAKLLREQYQQKQRDYQDLKEETLKVVRGTSRLNVDLLNNLIEETTVQMAELEGQIRTAEAELREVLSGAEQVRQEYAQLMDWAGLYDNCSFEAKKMIAAQFVKAVRVKRGYEVDIEFNVSFEEFQTLYLEPESEEDRRSRSATYLSLVEKSGQAG

SEQ ID NO: 1510 - protein, 566 aa, Unknown
  Description of Unknown: Integrase B1511 sequence
  PTHR30461:SF3,IPR036162,PS51737,IPR011109,PTHR30461, PS00397,PF00239,G3DSA:1.10.10.2600,IPR006119,SSF53041, SM00857,IPR025827,IPR038109,PS51736,cd03768, IPR006118,PF13408,G3DSA:3.40.50.1390,PF07508,Coil
MTEKKEKIAALYVRVSTGYQVDKDSLPFQKKELKNYCEHVLHIDKKRIEIFEDAGKSGKNTKRPAFERMMDKVKAGQVSHVIVYKIDRITRNLVDFSLMYDNFKYNNVTFISLNEQFDTSSAIGEAILKIILVFAELERKLTSERVTDVMIGRAQNGQWNGARVPYGWDWDEEKQMPVHSKKEAQYGIDMYHRYLNGYSTLRIARYNNEHSIPTKRGGEWSSKTVGDFLRNPINKGDYRYNYRNSARGKRKAKEEVVYIKNVFPPLIDPPIFDEVNRRLDENYKKQNTNYMFPIRKQCNIFSGLIICGKCGAHYQVCRKDERRLDGFRPSNYVCTRKRQKAICDSLNVSEVKIGPFMINYIAAMVDISQKRKKLKDKKELEQLILSHMQFTDLAGIADDSLQETMDLLYGRSTNIWSSSPIEKESQDNENKKNKLKENLQKTDRALERLKKAYLFDDDGMDEKEFLEMKSKLEIDRVKIENEIKDIDNDAIANNVNQIDFIKTASQFLIIHKINSGEFIDYRSLAILDEESMKAFMNSVIDHIVVLNRQITEIVFKNGLSHKLLYR

SEQ ID NO: 1511 - protein, 566 aa, Unknown
  Description of Unknown: Integrase B1512 sequence
  SM00857,G3DSA:1.10.10.2600,IPR036162,PF13408,IPR025827, G3DSA:3.40.50.1390,PS51737,IPR006119,IPR038109,PF07508, SSF53041,IPR011109,PTHR30461,Coil,cd00338, PF00239
MAYRKITDIRDTIGMRAVFYARVSTAEEEQLNAIELQIEENRGCIKDHGWKLVGEYIDRSKSGTMVKGRDDYQRLYEDLYEDLFDIVVIKDQERLQRNTLDWYLFINRVVQTGKLLFMYMDGKFYSPDDALITGVRAIIAEEFSRNLSKKLHNYHDHRIEKARQGQEIALQGSGNVYGWDKKDGKYYINPEQAKVRRLMCEGIMARKGSTLIAKELNDAGYRNTVGKPWKPMDIPKFVYDCKNVGTMIINKERHDFESKQTIKLPKEEWVYVENALPPIVTQEEWDLICKIHEERVIATGSDRRGKKTSGYSFSGKLVCGICGAPYWRKQRVSKDEYWVCSTKQTKGRRTRKRDSTMGKSGEINPLGCDNENISYNSLMEIMGVVSERLQANTDTIKHDMINWLTKLRKQLLEANGGHTEADLQRELSRKSKLLDAYLDGILNKQEYQKKAEELDERIIQLKAETEKNKANSGDIAEIDKVLANIDEEVSRYVDGNEKLKVEYLLEHLEQVQIFPDKVIVIVPILSEGIVVEKTQYISREKWSWKNHNYENAAKPHRTDIRFHTYF

SEQ ID NO: 1512 - protein, 566 aa, Unknown
  Description of Unknown: Integrase B1513 sequence
  PTHR30461:SF3,SM00857,G3DSA:1.10.10.2600,IPR036162,PF13408, IPR025827,G3DSA:3.40.50.1390,PS51737,IPR006119,IPR038109, PF07508,IPR011109,SSF53041,PTHR30461,cd00338, PF00239
MPTSKNTARKYAAGGSSDNSCGVEPLRAVIYARYSSSGQREESIEGQLRDCYEFAKKHGIIVIGEYIDKAMTGRVDRRPDFQRMMKDSEKGRFNCVLLWKMDRFARNRYDSAMYKYKLKKNGIRIFYAKETIPDGPEGIILESVMEGYAEYYSENLAQNVKRGNYDSALELKTLGKTCLGLKTGPDGRYMIDQAEATIVRRIFEEYAEGERAKDIYERLNSEGYRTSRGGKFNKNSLRRILSNKKYIGVYEYEDIYVENGIPAIITDRDLFERVQKMLKINHDAPARGKAQNFLLTTKLFCGLCGSPMIGDGGTSHTGKAYAYYSCTKRKRGRSCKKESVPKDWIEDLVVGELVKIVHNDELIEQIADRVMEYQKREKDQSGLHALEIRQKENEKAISNMLAAIEAGIITPSTKTRLMELEADRADIEKGIAHELLAEPEFERDQIIYFLERFRSGDIKDEAYRIMLVDTFLNSVYLYDDDHLVLVMNYSGENCKVDLKLVEGAVNGDGCKGSAFAPSSALKTPCENHRGFFCAGRDLESGFKVSAPLRSVHYHRPPDDVHPVIRT

SEQ ID NO: 1513 - protein, 566 aa, Unknown
  Description of Unknown: Integrase B1514 sequence
  PTHR30461:SF3,IPR036162,PS51737,IPR011109,PTHR30461, PS00397,PF00239,G3DSA:1.10.10.2600,IPR006119,SSF53041, SM00857,IPR025827,IPR038109,PS51736,cd03768, IPR006118,PF13408,G3DSA:3.40.50.1390,PF07508,Coil
MTEKKEKIAALYVRVSTGYQVDKDSLPFQKKELKNYCEHVLHIDKKRIEIFEDAGKSGKNTKRPAFERMMDKVKAGQVSHVIVYKIDRITRNLVDFSLMYDNFKYNNVTFISLNEQFDTSSAIGEAILKIILVFAELERKLTSERVTDVMIGRAQNGQWNGARVPYGWDWDEEKQMPVHSKKEAQYGIDMYHRYLNGYSTLRIARYNNEHSIPTKRGGEWSSKTVGDFLRNPINKGDYRYNYRNSARGKKKAKEEVVYIKNVFPPLIDPPIFDEVNRRLDENYKKQNTNYMFPIRKQCNIFSGLIICGKCGAHYQVCRKDERRLDGFRPSNYVCTRKRQKAICDSLNVSEVKIGPFMINYIAAMVDISQKRKKLKDKKELEQLILSHMQFTDLAGIADDSLQETMDLLYGRSTNIWSSSPIEKESQDNENKKNKLKENLQKTDRALERLKKAYLFDDDGMDEKEFLEMKSKLEIDRVKIENEIKDIDNDAIANNVNQIDFIKTASQFLIIHKINSGEFIDYRSLAILDEESMKAFMNSVIDHIVVLNRQITEIVFKNGLSHKLLYR

SEQ ID NO: 1514 - protein, 566 aa, Unknown
  Description of Unknown: Integrase B1515 sequence
  PTHR30461:SF3,SM00857,G3DSA:1.10.10.2600,IPR036162,PF13408, PS51737,IPR025827,G3DSA:3.40.50.1390,IPR006119,IPR038109, PF07508,IPR011109,SSF53041,PTHR30461,Coil, cd00338,PF00239
MKYSKRGSLGMKRVVAYCRVSTKSDDQQNSYENQNHYFEHYINECESYENIGIYADRGISGTSLKRPQFNKMLTDAGLDIENSYSIVAEPKFDLILVSNTSRFARSVSVDVILKALASNHVYVHFLDLDKTTENPDDITYIQLFSVFDERESRDKSRKVLFGIEQGIKNGNIHSHGNIYGYKYYPKPENRLEIVEHEAEIVRLIFDLYVNQGLGLYRIANYLKQSGIKTKKGKDFSDRGIRLILSNITYTGCGVRKKYTEGLVFEKHARRETDEPVVFDTDKVPAIIDRELYDKAQQILQGRIQHQRQKGIYSGKTDYAGKIICGSCGNKYIAGNSDYLVSEGRNVRCYSCASKRERRYDENGNKIYPCSNPNIYETVLDSQVTGAVYIFRTLTQVVNAMELLKKLRGILESQIDTRDDKAIISAQSELEEAKARRERLLDLYEDAAFDKDELNSRVEPINDRITELRERIKALSKTNDDLRRDIGEINNTIALLSEQKKLRENEWGVARKMYSKEAVLSYIESITVRPNKALVVKYKSFEQINRLVRKHRQLIPDSLMTLFQNYL

SEQ ID NO: 1515 - protein, 566 aa, Unknown
  Description of Unknown: Integrase B1516 sequence
  PTHR30461:SF3,SM00857,G3DSA:1.10.10.2600,IPR036162,PF13408, PS51737,G3DSA:3.40.50.1390,IPR025827,IPR006119,IPR038109, PF07508,IPR011109,SSF53041,PTHR30461,Coil, PS51736,cd00338,PF00239
MKKSNELPKSIIYSRYSSTNQREESIDSQIRIINTFAKSKYNIIKTYIDSAQSATTDNRESFQQMINDVKSGNLPDVKFLLVSKRDRFARNRYDMAYYKNILAKAGISIVSATEHLDDSPESVILESVLDGMSEYYSLNLGRECIKGLKENAYTCRTTGSTPPLGLKVNKDTLKFEIDEPNADAIRLLFKRFVEDGWSYQLICDELNAKGFRTTRGNLFNSKSTLIDYLNNEKYVGRLTYLKSKKDPLTGKRTCKRNYNRDEIIVVENAIPAIIDEETFNRAQEILKYRKRNASSFRTTNKMNMLVGKVICGKCGSHMNINTRKSGKNKEYYSTYRCSAKKEKMAKRCDNRELSATHLERYVISQLMFYLKQDTIVDRITDMLNEVLEHEFDSHDSEISQVNQQLMNVDVKIKNTTNAIAEGGVSLPSLVESLRALEDDKAMLKKRLHEINSAVPVFKKIDRNEVLELIEKAKEYMLSENDELIRSVINLFIEKINVGENGVEIIYYLHPFSYISHELWKTYVTRQELISYKGFSPKIMKGRWSRKAIISLSESKPTLARLISLVA

SEQ ID NO: 1516 - protein, 566 aa, Unknown
  Description of Unknown: Integrase B1517 sequence
  PTHR30461:SF3,IPR036162,PS51737,IPR011109,PTHR30461, PF00239,G3DSA:1.10.10.2600,IPR006119,PF14287,SSF53041, IPR025378,SM00857,IPR025827,cd03770,IPR038109, mobidb-lite,PS51736,PF13408,G3DSA:3.40.50.1390,PF07508,Coil
MNQSNQIRKTALYCRLSQDDGIEGDSNSIQNQKAILQKFAEDHHFPSPCFYVDDGFSGGTFQRPAFQQMISDMENGEIGIIVTKDLSRLGRNQLHTGLYIEERFPMFGVRYIAINDNVDTDSSESNDLMPFKNLFNEWFIRDTSRKIRAVLKAKAERGERLGTRTPYGYRKDPDTKKLIVDDEAAAIVRRIFAMCASGSGPSQIARILKKEQILTPTMYAYTRYGITHTCLDTAHPYNWSDSAIANLLENEIYLGNTINMKHSSRSYKDKRRVEHPREECLVFENTHPALITREVWDVVQRVRKNKRRLTKMEEQNKYSGLVFCADCGSNMVLHRAHTMSASYNHFTCRTYKKDGEACTGHYIRECVLDEVVLEDLRRVTAMAREHPEKFAAYIGSKQSAELQREIRRQERELAAMRKRKAELDAIFKKLYEDSVLGRITTEQFQMLSGSYTEEQNLITVGIPQKESEIQHLRETVSGTDSFLDKAKRYTDITELTPELLRLFIEKIVVHEKEVKWSKHAPQTVEIYYNGIGYVGSGQQDVEEALEAPEALEVPQTQDTEKPRQAS

SEQ ID NO: 1517 - protein, 566 aa, Unknown
  Description of Unknown: Integrase B1518 sequence
  SM00857,G3DSA:1.10.10.2600,IPR036162,PF13408,PS51737, IPR025827,G3DSA:3.40.50.1390,IPR006119,IPR038109,PF07508, SSF53041,IPR011109,PTHR30461,Coil,cd00338, PF00239
MAYRKITDIRDTIGMRAVFYARVSTAEEEQLNAIELQIEENRGCIKDHGWKLVGEYIDRSKSGTMVKGRDDYQRLYEDLYEDLFDIVVIKDQERLQRNTLDWYLFINRVVQTGKLLFMYMDGKFYSPDDALITGVRAIIAEEFSRNLSKKLHNYHDHRIEKARQGQEIALQGSGNVYGWDKKDGKYYINPEQAKVRRLMCEGIMARKGSTLIAKELNEAGYRNTVGKLWKPMDIPKFVYDCKNVGTMIINKERHDFESKQTIKLPKEEWVYVENALPPIVTQEEWDLICKIHEERVIATGSDRRGKKTSGYSFSGKLVCGICGAPYWRKQRVSKDEYWVCSTKQTKGRRTRKRDSTMGKAGEINPLGCDNENISYNSLMEIMGVVSERLQANTDTIKQDMINWLTKLRKQLLEANGGHTEADLQRELSRKSKLLDAYLDGILNKQEYQTKAEELDERIIQLKAETEKNKANSGDIAEIDKVLANIDEEVSRYVDGNEKLKVEYLLEHLEQVQIFPDKVIVIVPILSEGIVVEKTRYVSREKWCGKNNINEIDLWCFAANGGKYLLR

SEQ ID NO: 1518 - protein, 565 aa, Unknown
  Description of Unknown: Integrase B1519 sequence
  cd03768,PTHR30461:SF3,SM00857,IPR036162,PF13408, IPR025827,G3DSA:3.40.50.1390,PS51737,IPR006119,PF07508, SSF53041,IPR011109,PTHR30461,PS51736,Coil, PF00239
MLRTPGDLFFLAEAVNSTNKFYSVSDKSARVYFLYSFLEGETMRFFSYGRKSVFSDKSDSIDNQFRMNREYCESKFSGQVDSWQQFSDEDFTGANTSRPDLQRMLSFIKGGFCDVLVVYQLDRLSRDVRDFANIYALLEEHGVMFISIKENIDTTTPIGRAMMYVTVVFAQMERETIAARVTDNMLGLAKKGYWTGGNPPVGYVRKHIVVNGKKHCSIEVDPDGARYVTQIFDTFLAYNCSLQGMETRFKNQGIRTQSGKFFSTTQLHKMLTMPYCVEATPEVYDFYAAKGCIMDPGSPREMWDGSVGVIIYGRSTEKNKKHQAQPPEKWTVCLGKHKPFMPAEKWLAVQSRFTQNKCIKDAKWPVPLLKGVLRCKCGNLMQVSRKKKVDGTCSSWYYCRKRMRQGVDACDMGQIKCDLLDEEVLELFRGITADPALIQKFVKAEAPADVTDLKAAQARVSACERKIGRLAASLALAEDSAASKYIIAEMERLDVELGALKREASLAEMESHRAAASAKDAKATAAEIAKLIHGLDGFDDKEKNAIARAVIQECTWDGERLFITL

SEQ ID NO: 1519 - protein, 565 aa, Unknown
  Description of Unknown: Integrase B1520 sequence
  PTHR30461:SF3,cd00338,SM00857,G3DSA:1.10.10.2600,IPR036162, PF13408,IPR025827,G3DSA:3.40.50.1390,PS51737,IPR006119, IPR038109,PF07508,IPR011109,SSF53041,PTHR30461, PS51736,Coil,PF00239
MSATIPSLMQAPRAFGYCRKSTNEQREESLEAQQRAIVTFAATAGYELVQVYKDHGNSGRRGERPEFQRMLADAAAAGVQYIIVHKLDRFFRNADQQTVVEMQLRRQGIQVISAAEHFDATPQGQFMRNVTKAINQWYSANLAQEVAKGLRENALTARTTGGPPPLGYTVDKSTGQYAIVPREAEAVQLIFKLYQQGAGYTEIIDALNAGGYVTRRGQPFGKNSLYDILRNEKYTGLYIWNRLAPADVDGRTSRRRLKPRDEWVCVENGMPQIIPTEQWQAVQDEMDKRKHRNAQYKAKSFYLLSGLVYCGGCGGTMAGETHRYNSHGKAVEYRYYRCAAQHRQHDGGVHAHRVNADRLENAVIDYIQHIVLDPVNMDALCVAVLEALQPDGRNAERAKELKQEAGIIQQKVDRLYQAIENGLDAAGAIERINALQKQRMTLLAQANDLDISAESAAASVDELRRVWSGINLRELQPEKMRVIVRDLIYKIVVFDDGPRGSRLRIILNPARLNPSAIPKAIETMPFSELQNFSHTGGSGLPLPSICETITVLDYGLIAAELSIVR

SEQ ID NO: 1520 - protein, 565 aa, Unknown
  Description of Unknown: Integrase B1521 sequence
  PTHR30461:SF3,SM00857,G3DSA:1.10.10.2600,IPR036162,PF13408, IPR025827,G3DSA:3.40.50.1390,PS51737,IPR006119,IPR038109, PF07508,SSF53041,IPR011109,PF00239,PTHR30461, PS51736,Coil,cd00338
MKKFPIDLSMLTEEEIDQFRQDPSTLFEGDTDVSLYLRFSSERQREQSIEGQLRDCRSFCKVNRYRIAAIYVDRATTARKDVEKRIHFQEMIRDSEKKPWKYVVVWKLDRFARNRTDSALFKFRLRKNGVRVISATEAISEKPEGIILEAVLEGMAEFYSADLSQKITRGMRESALKCHSIGGHVPLGYKIEDHKLVVDPNTAYIVQEAFRLYANGETVAEICRMFNTKGYRTAKGAEFNRNSFKSMFRNERYIGVYTYRDIRIEGGVPAIIDKELFETVSHRLSVNAEAPARGKAKVDYLLAGKLFCGHCGGSMNGESGTSKTGAIHNYYTCYSRKRHHSCDKRPLKKEWIEQVVAQDAMELMTDEVIEELADMAMAQTDQDLKENTRIPELTERKKEIESGIANITKAIEKGIASDSLMERLVELEKDKKKILRLLEEEEKYVCRIDREQIIFWLEKFKGGNLEDEGFRRIIIDLIVNSVTVWDEPDGFRITTAYNLTSCKNKTYRVSPSSEKGFGFEGSESTNWTLHEHLLFQRRLCRKGVAVMSKQKARVKILCLDPRFYN

SEQ ID NO: 1521 - protein, 565 aa, Unknown
  Description of Unknown: Integrase B1522 sequence
  PTHR30461:SF3,IPR036162,PS51737,IPR011109,PTHR30461, PS00397,PF00239,G3DSA:1.10.10.2600,IPR006119,SSF53041, SM00857,IPR025827,IPR038109,PS51736,cd03768, IPR006118,PF13408,G3DSA:3.40.50.1390,PF07508,Coil
MPEKEKVVALYVRVSTGYQVDKDSLPFQKKELKNYCEHVLHINKNRIEVFEDAGKSGKNTKRPAFERMMEKVKSGQVSHVIVYKIDRISRNLVDFSLMYDDFKYNNVTFISLNEQFDTSSAIGEAILKIILVFAELERKLTSERVTDVMIGRAQNGQWNGARVPYGWDWDEEKQMPVHSKKEAQYGIDMYHRYLNGYSTLRIARYNNEHSIPTKRGGEWSSKTVGDFLRNPMNKGDYRYNYRNSARGKKKAKEEVVYIKNVFPPLIDPPIFDEVNRRLDENYKKQNTNYMFPIRKQCNIFSGLIICGKCGAHYQVCRKDERRLDGFRPSNYVCTRKRQKAICDSLNVSEVKIGPFMINYIAAMVDISQKRKKLKDKKELEQLILSHMQFTDLAGIADDSLQETMDLLYGRSTNIWSSSPIEKESQDNENKKNKLKENLQKTDRALERLKKAYLFDDDAMDEKEFLEMKSKLEIDRVKIENEIKDIDNDAIANNVNQIDFIKTAAQFLIIHKINSGEFIDYRSLAILDEESMKTFMNSVIDHIVVLNRQITEIVFKNGLSHKLLYR

SEQ ID NO: 1522 - protein, 565 aa, Unknown
  Description of Unknown: Integrase B1523 sequence
  PTHR30461:SF3,IPR036162,PS51737,IPR011109,PTHR30461, PF00239,G3DSA:1.10.10.2600,IPR006119,SSF53041,cd00338, SM00857,IPR025827,IPR038109,mobidb-lite,PS51736, PF13408,G3DSA:3.40.50.1390,PF07508,Coil
MRKKSNLNAATRAVIYARYSSANQRDCSIEQQVAKCRELAARLGLTVIDVYEDRAISGKTDRRPNFQRMMKDADLRQFDVVLAWKSNRMGRNMLQAMTNEERLRDNGIRTVYAEEDFDDTAAGRFALRNMMNVNQFYSENMAEDITRGLMDNAAKCLSNGSLPLGYKPGDDRHVVLDEAEAAIVQEIFTRVSCYEPFIDIARDLNRRGIKTKKGSEWGRSSFHTICRNERYRGIYIYRDVRIEGGMPRIVSDELFYKVQEVLKVKKNPQGRRKRSGYEEYLLTGKLFCGHCGSPMTGIAGTSKTGAMHYYYTCQKRRIDHSCDKKAVRRDQIERAVGVAIQQQLLTDENIQMMADKLMEYNARTETKYRLQGLQDQLNANKTATANILKAIEMGIITDATKARLLELEKEQGQLLVKIDEAKAEMVPISRNDFVKLLYIYKEGEPTDKKYLAALFDNFLVRVDLYDDHLKITFDPTGGRQPIDMPIGAEDSPESPGDSSESSDFEASSQDAEKFVLALHNCTKEKDLRTFVLRSFLFAVPNFYRTAIQKMLGTQSVPPSTPQILY

SEQ ID NO: 1523 - protein, 565 aa, Unknown
  Description of Unknown: Integrase B1524 sequence
  cd00338,SM00857,IPR036162,PS51737,G3DSA:3.40.50.1390, IPR006119,IPR011109,SSF53041,PTHR30461,PS51736, Coil,PF00239
MKVIGYTRVSTNNQDLKRQKDLIKDYCKQKGYMLSQILEDNGISGAVDDREGYKALLSITKDDADLVIVSELSRISRSEDVQTTLYNIHSLLAKGIKLIMLDEPEHIYEGKLDLTQFILLAVKAYGAAEERLKTRTRMNTGKETRLITNPMADLDAHKPYGFVSAINPKYGLSGEPKRIWVIDEEKMAQVKEIFELVASGMSLSKTAEYMNIRYHDRDFLKQSIFALIHRTEYKGIRKRAGKLYKLPVCPIPVEIWEAANKGLEDRTAIKDNHRVYFNPLKGIGKCVCGRNLGVQLESTKLSYSCTDRMINRGTKVKCHVPTTNYNLVNLVIWNISRQMVLDKNYEAKSNEAILKLEADNQRLEESKVEYHNSISEFDEEINTTAVKFASSTDLNPAILNALNARVNKLDAQKKELENRVIDIDKEIALNNRRIQEERKIQTQKELSDVSLESKSKFFHQILDSVYTYSARAKSGVIVVNFKNGLQVIALWKNHFKTSVWYLPVGFQFDIEKRMVYVKTMPKTEGFDFTISELETKYYEYRDLFKHFDLTKYQVEIPKEELEQKF

SEQ ID NO: 1524 - protein, 565 aa, Unknown
  Description of Unknown: Integrase B1525 sequence
  PTHR30461:SF3,IPR036162,PS51737,IPR011109, PTHR30461,PS00397,PF00239,G3DSA:1.10.10.2600, IPR006119,SSF53041,cd00338,SM00857,IPR025827,IPR038109 ,PS51736,IPR006118,PF13408,G3DSA:3.40.50.1390,PF07508,Coil
MGFNDLISATEDRNNIKNIAIYCRVSTIEQAEEGYSIDEQERLLRDWCNRMNYSVYKVYSDRGISGKDIKNRPALKELLNDAEDKKFEMVISWKINRISRKLSDVLKIVDVLEQNNIAFNSYSEQFDNSTPAGKMQFQMMALIGEFERGTIAQNVKMGMCAKAKAGEWCGGRVLGYDLVPVENQEGSKRRKTKLTINEIEARSVRLIFNEYSNGKGYKAITNQLNKLGYKTKKGNDFSVGSIREILTNPVYIGKVRYNVRQNWSEKRRRNINANPIITDGIHEPIIEEGLWDKVQAIMESKKGKPSRIYDGEYPLTGILKCPKCGAGMVISRTTNKLADGTKKRIAYYCCGAWKNKGTSVCNSNTIRVDKANEYVFNKLSELLSNEKMVETIVRNVNKERHNKINPAKKELERIDKELEKIDRKKTKLFEAYEEELISKEEFKERKDELNKRAKSLQEEKEPLLVTLSDDVSEEIPYEFIKSILENFSKVLTESATREQQKKLLHMIISEIAINEAREIDSIKLKINDSLVDYINKEEGVSIKGIPSSFMLRNVGISMLNLDIAI

SEQ ID NO: 1525 - protein, 565 aa, Unknown
  Description of Unknown: Integrase B1526 sequence
  SM00857,G3DSA:1.10.10.2600,IPR036162,PF13408,PS51737, G3DSA:3.40.50.1390,IPR025827,IPR006119,IPR038109,PF07508, SSF53041,IPR011109,PTHR30461,Coil,cd00338, PF00239
MAYRKITDIKDTIGMRAVFYARVSTAEEEQLNAIELQIEENRGCIKDHGWKLVGEYIDRSKSGTMVKGRDDYQRLYEDLYEDLFDIVVIKDQERLQRNTLDWYLFINRVVQTGKLLFMYMDGKFYSPDDALITGVRAIIAEEFSRNLSKKLHNYHDHRIEKARQGQEIALQGSGNVYGWDKKDGKYYINPEQAKVRRLMCEGIMARKGSTLIAKELNDAGYRNTVGKPWKPMDIPKFVYDCKNVGTMIINKERHDFESKQTIKLPKEEWVYVENALPPIVTQEEWDLICKIHEERVIATGSDRRGKKTSGYSFSGKLVCGICGAPYWRKQRVSKDEYWVCSTKQTKGRRTRKRDSTMGKAGEINPLGCDNENISYNSLMEIMGVVSERLQANTDTIKQDMINWLTKLRKQLLEANGGHTEADLQREISRKSKLLDAYLDGILNKQEYQKKAEELDERIIQLKAETEKNKANSGDIAEIDKVLANIDEEVARYIDGNEKLKVEYLLEHLEQVQIFPDKVIVIVPILSEGIVVEKTQYVSREKRRRKKYLFADGSRYFKAGRRKHYG

SEQ ID NO: 1526 - protein, 565 aa, Unknown
  Description of Unknown: Integrase B1527 sequence
  SM00857,IPR036162,PS51737,G3DSA:3.40.50.1390,IPR006119, IPR011109,SSF53041,PTHR30461,Coil,PS51736, cd00338,PF00239
MKVIGYTRVSTNNQDLKRQKDLIKDYCKQKGYMLSQILEDNGISGAVDDREGYKALLSVTKDDADLVIVSELSRISRSEDVQNTLYNIHSLLAKGIKLIMLDEPEHIYEGKLDLSQFLLLAIKAYGAAEERLKTRTRMNTGKETRMITNPMADLDAHKPYGFVSAPNPKHGLSGEPKKVWAIDEEKMAQVKEIFELVASGMSLFKTAEYMNIRYHDRGFLMKSIFEIIHRTEYKGIRKRAGKLYQLPVCPIPVELWEAANKGLKDRTAIKDNHRLYFNPLKGIGKCVCGRNLGVNQESKKLSYQCADKMINRGDKRKCHVPTTNYNLVNLVVWNICRQMVLDKDYEAKSNEAILKLEADNQRLEESKVEYHNSISELDEEINTTAEKFASSTDLNPAILNALNVRVNKLDAQKKELENRVVDIDREIALNNRRIQEERKIQTQKELSDVSLESKSKFFHQILDSVYTYSARAKSGVIAVNFKNGLQVIALWKNHFKTSVWYLPVGFQFDIEKRMIYVKTMPKTEGLDFTISEPETKFYEYRDLFKHFDLTKYQVEIPKEELERKD

SEQ ID NO: 1527 - protein, 565 aa, Unknown
  Description of Unknown: Integrase B1528 sequence
  PTHR30461:SF3,IPR036162,PS51737,IPR011109, PTHR30461,PS00397,PF00239,G3DSA:1.10.10.2600, IPR006119,SSF53041,SM00857,IPR025827,IPR038109,PS51736 ,cd03768,IPR006118,PF13408,G3DSA:3.40.50.1390,PF07508,Coil
MPEKEKIVALYVRVSTGYQVDKDSLPFQKKELKAYCEHVLHIDKKRIEIFEDAGKSGKNTKRPAFERMMEKVKSGQVSHVIVYKIDRISRNLVDFSLMYDDFKYNNVTFISLNEQFDTSSAIGEAILKIILVFAELERKLTSERVTDVMIGRAQNGQWNGARVPYGWDWNEEKQMPVHSKKEAQYGIDMYHRYLEGYSTLRIARYNNEHNIPTKRGGEWSSKTVGDFLRNPINKGDYRYNYRNSARGKKKAKEEVVYIKNVFPPLIDPPIFDEVNRRLDENYKKQNTNYMFPIRKQCNIFSGLIICGKCGAHYQVCRKDERRLDGFRPSNYVCTRKRQKAICDSLNVSEVKIGPFMINYIAAMVDISQKRKKLKDKKELEQLILSHMQFTDLAGIADDSLQETMDLLYGRSTNIWSPSPIAKESQDNENKKSKLKENLQKTDRALERLKKAYLFDDDGMDEKEFLEMKSKLEIDRVKIENEIKDIDNDAIANNVNQIDFIKTASQFLIIHKINSGEFIDYRSLAILDEESLKAFMNSVIDHIVVLNRQITEIVFKNGLSHKLLYR

SEQ ID NO: 1528 - protein, 565 aa, Unknown
  Description of Unknown: Integrase B1529 sequence
  SM00857,IPR036162,PS51737,G3DSA:3.40.50.1390,IPR006119, IPR011109,SSF53041,PTHR30461,Coil,PS51736, cd00338,PF00239
MKVIGYTRVSTNNQDLKRQKDLIKDYCKQKGYMLSQILEDNGISGAVDDREGYKALLSVTKDDADLVIVSELSRISRSEDVQNTLYNIHSLLAKGIKLIMLDEPEHIYEGKLDLSQFLLLAIKAYGAAEERLKTRTRMNTGKETRMITNPMADLDAHKPYGFVSAPNPKYGLSGEPKKVWAIDEEKMAQVKEIFELVASGMSLFKTAEYMNIRYHDRGFLMKSIFEIIHRTEYKGIRKRAGKLYQLPVCPIPVELWEAANKGLKDRTAIKDNHRLYFNPLKGIGKCVCGRNLGVNQESKKLSYQCADKMINRGDKRKCHVPTTNYNLVNLVVWNICRQMVLDKDYEAKSNEAILKLEADNQRLEESKVEYHNSISELDEEINTTAEKFASSTDLNPAILNALNVRVNKLDAQKKELENRVVDIDREIALNNRRIQEERKIQTQKELSDVSLESKSKFFHQILDSVYTYSARAKSGVIVVNFKNGLQVIALWKNHFKTSVWYLPVGFQFDIEKRMIYVKTMPKTEGFDFTISEPETKFYEYRDLFKHFDLTKYQVEIPKEELERKD

SEQ ID NO: 1529 - protein, 565 aa, Unknown
  Description of Unknown: Integrase B1530 sequence
  PTHR30461:SF3,cd00338,SM00857,G3DSA:1.10.10.2600, IPR036162,PF13408,PS51737,G3DSA:3.40.50.1390, IPR025827,IPR006119,IPR038109,PF07508, IPR011109,SSF53041,PTHR30461,PS51736,Coil,PF00239
MARSKKTECLPLERIGVIYARYSSHNQKEESIEQQVEECMNFASLNGIKIVHVYADRALSGRTDKRPQFQRLMRDAEKRSFSVVVAYKSNRIARDMLNALKYEDRLGKYGIETLYAKEEFGNTAAGRFALRTMMNVNQFYSENMAEDIKRGMLDNAENCKVNGALPLGYVSGSDKRYAIEPKEAEIVRGIYDKVLEGVSLADIASDLNARGVRTKHGSLWNKCSFHRILTNDVYIGVYRHSGVVKEGGVPPILEREVFVAMQKYLETKKNPRGRHRENGDYLLTGKLRCGYCESFMVGVSGTSKTGDKHYYYTCNGRHAGSGCKKENVRRDTIEYTVAALTQQVVFKEDIIEWIATAAVKLAKEASGQNEIDAMEAELAEDRKATKNIMAAIEQGIFTATTKSRLLELEADIASLEQSIRDAKAISEDKLLEKERVVYFLTSLRDGNLHSKTYQKRLIDTFVRAVYLWDDYIGIDYYYAGKDSMVKYSLSEIEADIGENIREVLKDSLTGHHSEMTFGCQAAAQGAPASTAKVFLRSKSWPLTLGHDFVFEAIDLRCSSTDFVSR

SEQ ID NO: 1530 - protein, 565 aa, Unknown
  Description of Unknown: Integrase B1531 sequence
  SM00857,G3DSA:1.10.10.2600,IPR036162,PF13408,PS51737, G3DSA:3.40.50.1390,IPR025827,IPR006119,IPR038109,PF07508, IPR011109,SSF53041,PTHR30461,Coil,PS51736, cd00338,PF00239
MAYRKITDIKDTIGMRAVFYARVSTAEEEQLNAIELQIEENIGCIKDHGWKLAGEYIDRSKSGTMVKGRDDYQRLYEDLYEDLFDIVVIKDQERLQRNTLDWYLFINRVVQTGKLLFMYMDGKFYSPDDALITGVRAIIAEEFSRNLSKKLHNYHDHRIEKARQGQEIALQGSGNVYGWDKKDGKYYINPEQAKVRRLMCEGIMARKGSTLIAKELNDAGYRNTVGKPWKPMDIPKFVYDCKNVGTMIINKERHDFESKQTIKLPKEEWVYVENALPPIVTQEEWDLICKIHEERVIATGSDRRGKKTSGYSFSGKLVCGICGAPYWRKQRVSKDEYWVCSTKQTKGRRTRKRDSTMGKAGEINPLGCDNENISYNSLMEIMGVVSERLQANTDTIKQDMINWLTKLRKQLLEANGGHTEADLQRELSRKSKLLDAYLDGILNKQEYQKKAEELDERIIQLKAETEKNKANSGDIAEIDKVLANIDEEVSRYVDGNEKLKVEYLLEHLEQVQIFPDKVIVIVPILSEGIVVEKAQYVSREKWCRKNHFDEGSYNCFKTNGRNGFP

SEQ ID NO: 1531 - protein, 565 aa, Unknown
  Description of Unknown: Integrase B1532 sequence
  PTHR30461:SF3,cd00338,SM00857,G3DSA:1.10.10.2600,IPR036162, PF13408,PS51737,G3DSA:3.40.50.1390,IPR025827,IPR006119, IPR038109,PF07508,IPR011109,SSF53041,PTHR30461, PS51736,Coil,PF00239
MSATIPSLMQAPRAFGYCRKSTNEQREESLEAQQRAIVTFAATAGYELVQVYKDHGNSGRRGERPEFQRMLADAAAAGVQYIIVHKLDRFFRNADQQTVVEMQLRRQGIQVISAAEHFDATPQGQFMRNVTKAINQWYSANLAQEVAKGLRENALTARTTGGPPPLGYTVDKSTGQYAIVPREAEAVQLIFKLYQQGAGYTEIIDALNAGGYVTRRGQPFGKNSLYDILRNEKYTGLYIWNRLAPADVDGRTSRRRLKPRDEWVCVENGMPQIIPTEQWQAVQDEMDKRKHRNAQYKAKAFYLLSGLVYCGGCGGVMSGEMHRYNSHGKAVEYRYYRCTAQHRQHDGGAHAHRVNADRLENAVIDYIQHIVLDPVNMDALCVAVLEALQPDGRNAERAKELKQEAGIIQQKVDRLYQAIENGLDAAGAIERINALQKQRMTLLAQANDLDVSAESAAASVDELRRVWSGINLRELQPEKMRAIVRDLIYKIVVFDDGPRGSRLRIILNPARLNPAAIPKAIETMPFSELQNFSHTGGSGLPLPSICETITVLDYGLIAAELSIVR

SEQ ID NO: 1532 - protein, 565 aa, Unknown
  Description of Unknown: Integrase B1533 sequence
  PTHR30461:SF3,IPR036162,PS51737,IPR011109,PTHR30461, PS00397,PF00239,G3DSA:1.10.10.2600,IPR006119,SSF53041, cd00338,SM00857,IPR025827,IPR038109,PS51736, IPR006118,PF13408,G3DSA:3.40.50.1390,PF07508,Coil
MDENKKIVALYVRVSTGYQVDKDSLPFQKKELRAYCEHMLHINKKQVEVFEDAGRSGKNTKRPAFERMMEKVKSGQVSHVIVYKIDRITRNLVDFSLMYDDFKYNNVTFISLNEQFDTSSAIGEAILKIILVFAELERKLTSERVKDVMIGRAQNKQWNGARVPYGWDWDAEKKCPVHSKKEAPYAKAMYQMYLDGGSSVTICDYNNSHNIPTKRGGEWTSKTVADFLRNPINKGDYRYNYRESARGKKKSDDEVIYIKGVFPPLIDPNIWDEVNRRMDANSQNRNTSVFHPIRKRCNVFAGLMICGKCGSGYQVKGKDSRKGDGFRPSSYACTGKYQKKNCDNLNVSDVKIGPFMLNYIAAMVDASKSRRFIKDSESLERVILSHISFSDVAGISVSSLQDTLDLLFGRSGSELLSGKPISSGATDESKTTELKEKLQRTDRALERLKKAYLFDDDGMDEKEFLEMKSKLEVDRIKLENSIKGLESSSISENVDQAAFLKSASQFLISHKINSGDYIDYSRLAALDEESMKAFVNSIVDHIVVLDKRITEIVFKNGLTHTLLYR

SEQ ID NO: 1533 - protein, 565 aa, Unknown
  Description of Unknown: Integrase B1534 sequence
  PTHR30461:SF3,IPR036162,PS51737,IPR011109,PTHR30461, PS00397,PF00239,G3DSA:1.10.10.2600,IPR006119,SSF53041, SM00857,IPR025827,IPR038109,PS51736,cd03768, IPR006118,PF13408,G3DSA:3.40.50.1390,PF07508,Coil
MPEKEKVVALYVRVSTGYQVDKDSLPFQKKELKNYCEHVLHINKNRIEVFEDAGKSGKNTKRPAFERMMEKVKSGQVSHVIVYKIDRISRNLVDFSLMYDDFKYNNVTFISLNEQFDTSSAIGEAILKIILVFAELERKLTSERVTDVMIGRAQNGQWNGARVPYGWDWDEEKQMPVHSKKEAQYGIDMYHRYLNGYSTLRIARYNNEHSIPTKRGGEWSSKTVGDFLRNPMNKGDYRYNYRNSARGKKKAKEEVVYIKNVFPPLIDPTIFDEVNRRLDENYKKQNTNYMFPIRKQCNIFSGLIICGKCGAHYQVCRKDERRLDGFRPSNYVCTRKRQKAICDSLNVSEVKIGPFMINYIAAMVDISQKRKKLKDKKELEQLILSHMQFTDLAGIADDSLQETMDLLYGRSTNIWSSSPIEKESQDNENKKNKLKENLQKTDRALERLKKVYLFDDDGMDEKEFLEMKSKLEIDRVKIENEIKDIDNDAIANNVNQIDFIKTASQFLIIHKINSGEFIDYRSLAILDEESMKAFMNSVIDHIVVLNRQITEIVFKNGLSHKLLYR

SEQ ID NO: 1534 - protein, 565 aa, Unknown
  Description of Unknown: Integrase B1535 sequence
  PTHR30461:SF3,cd00338,SM00857,G3DSA:1.10.10.2600,IPR036162, PF13408,PS51737,G3DSA:3.40.50.1390,IPR025827,IPR006119, IPR038109,PF07508,SSF53041,IPR011109,PTHR30461, PS51736,Coil,PF00239
MAKKKKPAGGIAVIYARYSSHNQRDVSIEQQIEACRKHAAELGLTIIATYEDRAISGRTDNRPAFQRMMHDAENGKFSYVLAWKSNRMGRNMMQAMVNESRLMDCGIKVYYAEEDFDDSAAGRFALRSMMNVNQFYSDNLAEDVRRGLMDNANKCMVNGRQPLGYKRGKDGKVVVDEPAAAIVREVYARVASGELFTDIARDLNRRGIKTADKGEWNKNSFHRLCSNEKYRGIYIYGDVRIEGGIPTIIDDTLWYKVQEALRVKKLKRNGRHRPGDEDYLLTGKLRCGKCGGYMIGMSGRSKTGDIHYYYACQNRRVGRTCDKKNIRRDVIEPAVAQAIKEYCLTDDAIEWIADKTVEYWEKADRNLQLDSIEGDLAAVQSSISNVMKAIEMGVVTETTRDRLIELEKQRTDLKSKLSLAKEEVVHVDRKKLISSLLLFRNGDIHDRQYQEDLFKTFLISVYVYDDDDNGHLKIVFNAFGDNNTVDLPIDFGETDNQSAFSDGAEKFDYSLHRSTKKTSEHSGCLFLSYPGYGVHSALAHERSIGHGKHQEKLRFWLYAPALEGW

SEQ ID NO: 1535 - protein, 565 aa, Unknown
  Description of Unknown: Integrase B1536 sequence
  PTHR30461:SF3,IPR036162,PS51737,IPR011109,PTHR30461, PS00397,PF00239,G3DSA:1.10.10.2600,IPR006119,SSF53041, SM00857,IPR025827,IPR038109,PS51736,cd03768, IPR006118,PF13408,G3DSA:3.40.50.1390,PF07508
MTKLKKAALYIRVSTRYQIDKDSLPFQKQKLIDYCEFIGIKDYEVYADEGFSGKNTDRPSFQRMMSELRNGDISHIIVWKVDRISRNLLDFAAMYTELKKYRVTFVSMNEQFDTSSAIGEAMLKIILVFAELERNMTSERVTSIMLNRAEHGQWNGARMPMGYKWDDKIKFPVPDEEESKTVQFIFDKYEEVHSCLTVSRYLNNNNINTKRGGKWTSKTVNDIIKNPFYIGTYRYNVRESARGKMKPKSEWIVKENNHTPIIEKDQFERCAAIIQSNLKRDTSEYRRTNYVHIFSHLLKCGKCGSGFCSQKDKMRSNGYRPSMYRCAKRMHMKDCEQKIINDTTIGNFVFNYVSNVVRVQKDFSKINSLDKFEKALLKGPAFEDIAKIEEAGLQQMYNAILYNSATSNSLSFDFLSTTQADNNTAEIILLTKEKEKYAKAVDRLLDIYLYDSEAISKDEFTKKQRDLQSKIDVIDEKIENLKISEANNKNLNLLDTSFIKKATAFLVSQKILSAKYIDFVDLALNSDPQILKDFVSQIIEYITVDENKVTKIKFINGIEHSFICK

SEQ ID NO: 1536 - protein, 565 aa, Unknown
  Description of Unknown: Integrase B1537 sequence
  PTHR30461:SF3,IPR036162,PS51737,IPR011109,PTHR30461, PS00397,PF00239,G3DSA:1.10.10.2600,IPR006119,SSF53041, SM00857,IPR025827,IPR038109,PS51736,cd03768, IPR006118,PF13408,G3DSA:3.40.50.1390,PF07508,Coil
MSEKEKIVALYVRVSTGYQVDKDSLPFQKKELKNYCEHVLHINKNRIEVFEDAGKSGKNTKRPAFERMMEKVKSGQVSHVIVYKIDRISRNLVDFSLMYDDFKYNNVTFISLNEQFDTSSAIGEAILKIILVFAELERKLTSERVTDVMIGRAQNGQWNGARVPYGWDWDEEKQMPVHSKKEAQYGIDMYHRYLNGYSTLRIARYNNEHSIPTKRGGEWSSKTVGDFLRNPMNKGDYRYNYRNSARGKKKAKEEVVYIKNVFPPLIDPTIFDEVNRRLDENYKKQNTNYMFPIRKQCNIFSGLIICGKCGAHYQVCRKDERRLDGFRPSNYVCTRKRQKAICDSLNVSEVKIGPFMINYIAAMVDISQKRKKLKDKKELEQLILSHMQFTDLAGIADDSLQETMDLLYGRSTNIWSSSPIEKESQDNENKKNKLKENLQKTDRALERLKKVYLFDDDGMDEKEFLEMKSKLEIDRVKIENEIKDIDNDAIANNVNQIDFIKTASQFLIIHKINSGEFIDYRSLAILDEESMKAFMNSVIDHIVVLNRQITEIVFKNGLSHKLLYR

SEQ ID NO: 1537 - protein, 565 aa, Unknown
  Description of Unknown: Integrase B1538 sequence
  SM00857,IPR036162,PS51737,G3DSA:3.40.50.1390,IPR006119, IPR011109,SSF53041,PTHR30461,Coil,PS51736, cd00338,PF00239
MKVIGYTRVSTNNQDLKRQKDLIKDYCKQKGYMLSQILEDNGISGAVDDREGYKALLSVTKDDADLVIVSELSRISRSEDVQNTLYNIHSLLAKGIKLIMLDEPEHIYEGKLDLSQFLLLAIKAYGAAEERLKTRTRMNTGKETRMITNPMADLDAHKPYGFVSAPNPKHGLSGEPKKIWAIDEEKMAQVKEIFELVASGMSLFKTAEYMNIRYHDRGFLMKSIFEIIHRTEYKGIRKRAGKLYQLPVCPIPVELWEAANKGLKDRTAIKDNHRLYFNPLKGIGKCVCGRNLGVNQESKKLSYQCADKMINRGDKRKCHVPTTNYNLVNLVVWNICRQMVLDKDYEAKSNEAILKLEADNQRLEESKVEYHNSISELDEEINTTAEKFASSTDLNPAILNALNVRVNKLDAQKKELENRVVDIDREIALNNRRIQEERKIQTQKELSDVSLESKSKFFHQILDSVYTYSARAKSGVIAVNFKNGLQVIALWKNHFKTSVWYLPVGFQFDIEKRMIYVKTMPKTEGLDFTISEPETKFYEYRDLFKHFDLTKYQVEIPKEELERKD

SEQ ID NO: 1538 - protein, 565 aa, Unknown
  Description of Unknown: Integrase B1539 sequence
  PTHR30461:SF3,IPR036162,PS51737,IPR011109, PTHR30461,PS00397,PF00239,G3DSA:1.10.10.2600, IPR006119,SSF53041,SM00857,IPR025827,IPR038109, PS51736,cd03768,IPR006118,PF13408,G3DSA:3.40.50.1390,PF07508,Coil
MTKLKKAALYIRVSTRYQIDKDSLPFQKQKLIDYCEFMGIKDYEVYADEGFSGKNTDRPSFQRMMSELRNGDISHIIVWKVDRISRNLLDFAAMYTELKKYRVTFVSMNEQFDTSSAIGEAMLKIILVFAELERNMTSERVTSIMLNRAEHGQWNGARMPMGYKWDDKIKFPVPDEEESKTVQFIFDKYEEVHSCLTVSRYLNNNNINTKRGGKWTSKTVNDIIKNPFYIGTYRYNVRESARGKMKPKSEWIVKENNHTPIIEKDQFERCAAIIQSNLKRDTSEYRRTNYVHIFSHLLKCGKCGSGFCSQKDKMRSNGYRPSMYRCAKRMHMKDCEQKIINDTTIGNFVFNYVSNVVRVQKDFSKINSLDKFEKALLKGPAFEDIAKIEEAGLQQMYNAILYNSATSNSLSFDFLSTTQADNNTAEIILLTKEKEKYAKAVDRLLDIYLYDSEAVSKEEFAKKQKDLQSKIDVIDEKIENLKTSEANNKNLNPLDTSFIKKATAFLVSQKILSARYIDFVDLALNSDPQILKDFVSQIIEYITVDENKVTKIKFINGIEHSFIRK

SEQ ID NO: 1539 - protein, 565 aa, Unknown
  Description of Unknown: Integrase B1540 sequence
  SM00857,G3DSA:1.10.10.2600,IPR036162,PF13408,IPR025827, PS51737,G3DSA:3.40.50.1390,IPR006119,IPR038109,PF07508, SSF53041,IPR011109,PTHR30461,Coil,cd00338, PF00239
MAYRKITDIRDTIGMRAVFYARVSTAEEEQLNAIELQIEENRGCIKDHGWKLVGEYIDRSKSGTMVKGRDDYQRLYEDLYEDLFDIVVIKDQERLQRNTLDWYLFINRVVQTGKLLFMYMDGKFYSPDDALITGVRAIIAEEFSRNLSKKLHNYHDHRIEKARQGQEIALQGSGNVYGWDKKDGKYYINPEQAKVRRLMCEGIMARKGSTLIAKELNDAGYRNTVGKPWKPMDIPKFVYDCKNVGTMIINKERHDFESKQTIKLPKEEWVYVENALPPIVTQEEWDLICKIHEERVIATGSDRRGKKTSGYSFSGKLVCGICGAPYWRKQRVSKDEYWVCSTKQTKGRKTRKRDSTMGKAGEINPLGCDNENISYNSLMEIMGVVSERLQANTDTIKQDMINWLTKLRKQLLEANGGHTEADLQRELSRKSKLLDAYLDGILNKQEYQKKAEELDERIIQLKAETEKNKANSGDIAEIDKVLANIDEEVSRYVDGNEKLKVEYLLEHLEQVQIFPDKVIVIVPILSEGIVVEKAQYVSREKWCRKDYNYKNYYGCISCQFRRNIS

SEQ ID NO: 1540 - protein, 565 aa, Unknown
  Description of Unknown: Integrase B1541 sequence
  SM00857,G3DSA:1.10.10.2600,IPR036162,PF13408,IPR025827, G3DSA:3.40.50.1390,PS51737,IPR006119,IPR038109,PF07508, SSF53041,IPR011109,PTHR30461,Coil,cd00338, PF00239
MAYRKITDIKDTIGMRAVFYARVSTAEEEQLNAIELQIEENRGCIKDHGWKLVGEYIDRSKSGTMVKGRDDYQRLYEDLYEDLFDIVVIKDQERLQRNTLDWYLFINRVVQTGKLLFMYMDGKFYSPDDALITGVRAIIAEEFSRNLSKKLHNYHDHRIEKARQGQEIALQGSGNVYGWDKKDGKYYINPEQAKVRRLMCEGIMARKGSTLIAKELNEAGYRNTVGKPWKPMDIPKFVYDCKNVGTMIINKERHDFESKQTIKLPKEEWVYVENALPPIVTQEEWDLICKIHEERVIATGSDRRGKKTSGYSFSGKLVCGICGAPYWRKQRVSKDEYWVCSTKQTKGRRTRKRDSTMGKAGEINPLGCDNENISYNSLIEIMGVVSERLQANTDTIKQDMINWLTKLRKQLLEANGGHTEADLQRELSRKSKLLDAYLDGILNKQEYQKKAEELDERIIQLKAETEKNKANSGDIAEIDKVLANIDEEVARYVDGNEKLKVEYLLEHLEQVQIFPDKVIVIVPILSEGIVVEKTQYVSREKWCWKNHFDESAYNCFKTNGRNGFP

SEQ ID NO: 1541 - protein, 565 aa, Unknown
  Description of Unknown: Integrase B1542 sequence
  PTHR30461:SF3,IPR036162,PS51737,IPR011109,PTHR30461, PS00397,PF00239,G3DSA:1.10.10.2600,IPR006119,SSF53041, SM00857,IPR025827,IPR038109,PS51736,mobidb-lite, cd03768,IPR006118,PF13408,G3DSA:3.40.50.1390,PF07508,Coil
MDEDRKIVALYVRVSTGYQVDKDSLPFQKKELRAYCEHVLHIDKKRIEIFEDAGRSGKNTKRPAFERMMENVKAGLVSHVIVYKIDRITRNLVDFSLMYDDFKYNNVTFISLNEQFDTSSAIGEAILKIILVFAELERKLTSERVKDVMIGRAQNKQWNGARVPYGWDWDAEKKCPVHSKKEAPYARAMYQMYLDGGSSVTICDYNNSHNIPTKRGGEWTSKTVADFLRNPINKGDYRYNYRESARGKKKSDDEVVYIKDVFPPLIDPKIWDEVNRRMDANSQNRNTSVFHPIRKRCNVFAGLMICGKCGSGYQVKGKDSRKGDGFRPSSYACTGKYQKKNCDNLNVSDVKIGPFVLNYIAAMVDASKSRRFIKDCESLEQVILSHISFSDVAGISASSLQDTLNLLFGRSGSELLSGKPVSSETADGSKTEELKEKLQRTDRALERLKKAYLFDDDGMDEKEFLEMKSKLEVDRIKLENSIKGLESSSISENVDQAAFLKSASQFLISHKINSGDYIDYSRLAALDEDSMKAFVNSIIDHIVVLDKRITEIVFKNGLTHTLLYR

SEQ ID NO: 1542 - protein, 565 aa, Unknown
  Description of Unknown: Integrase B1543 sequence
  PTHR30461:SF3,IPR036162,PS51737,IPR011109,PTHR30461, PF00239,G3DSA:1.10.10.2600,IPR006119,PF14287,SSF53041, IPR025378,SM00857,IPR025827,cd03770,IPR038109, PS51736,PF13408,G3DSA:3.40.50.1390,PF07508,Coil
MTCNPIRFDSTEPERLGKDEKIMKSNQQKITALYCRLSQEDELEGESNSIKNQKSMLEKYAADNGFGNCRFYIDDGYSGVSFERPDFKRMIADMEKGEIGTVITKDLSRLGRDYLKTGTYIEIIFPQNDVRYIAVNDGVDSEKGCNEFIGIRNYFNDFFAADTSKKIRAVQRAKAERGERIGSKLPYGYMKSEDNRLVPDPDTAPVVKRIFDMYVNGVGTRTIAMTLERDKIMSPSAYAYYKYGRKENGLKLNNPYLWSDVTLRGMLVNEVYIGTTANYKTTTKSNKLKKQIHNDRKDWLVFENTHEPIVDKSTFEMVQKWFAGRRKPNKSGKTDVFAGLVYCADCKSRMYLRRVLKYPKENNYLCKTYQRYGNNHCTAHRISEQDLHAVILQKLREVTAYVRENPEEFYEIASRNARAEAEREMKTYLREKEAAEQRIAELESIIRCLYEDRVLGRISVERYESLSAGYETEQSELKTKLNEMNAFLDENEKREQLIQDFIENAKKYIDIQKLTPEILRAFISRIEVHEKAKWHSTVCGNDIVIYFTVERKEQLNIQHKDIKTA

SEQ ID NO: 1543 - protein, 565 aa, Unknown
  Description of Unknown: Integrase B1544 sequence
  PTHR30461:SF3,IPR036162,PS51737,IPR011109,PTHR30461, PS00397,PF00239,G3DSA:1.10.10.2600,IPR006119,SSF53041, SM00857,IPR025827,IPR038109,PS51736,cd03768, IPR006118,PF13408,G3DSA:3.40.50.1390,PF07508,Coil
MPEKEKIVALYVRVSTGYQVDKDSLPFQKKELKNYCEHVLHINKNRIEVFEDAGKSGKNTKRPAFERMMEKVKSGQVSHVIVYKIDRISRNLVDFSLMYDDFKYNNVTFISLNEQFDTSSAIGEAILKIILVFAELERKLTSERVTDVMIGRAQNGQWNGARVPYGWDWDEEKQMPVHSKKEAQYGIDMYHRYLEGYSTLRIARYNNEHNIPTKRGGEWSSKTVGDFLRNPINKGDYRYNYRNSARGKKKAKEEVVYIKNVFPPLIDPPIFDEVNRRLDENYKKQNTNYMFPIRKQCNIFSGLIICGKCGAHYQVCRKDERRLDGFRPSNYVCTRKRQKAICDSLNVSEVKIGPFMINYIAAMVDISQKRKKLKDKKELEQLILSHMQFTDLAGIADDSLQETMDLLYGRSTNIWSPSPIAKESQDNENKKSKLKENLQKTDRALERLKKAYLFDDDGMDEKEFLEMKSKLEIDRVKIENEIKDIDNDAIANNVNQIDFIKTASQFLIIHKINSGEFIDYRSLAILDEESLKAFMNSVIDHIVVLNRQITEIVFKNGLSHKLLYR

SEQ ID NO: 1544 - protein, 565 aa, Unknown
  Description of Unknown: Integrase B1545 sequence
  PTHR30461:SF3,IPR036162,PS51737,IPR011109,PTHR30461, PS00397,PF00239,G3DSA:1.10.10.2600,IPR006119,SSF53041, SM00857,IPR025827,IPR038109,PS51736,cd03768, IPR006118,PF13408,G3DSA:3.40.50.1390,PF07508,Coil
MPEKKKIVALYVRVSTGYQVDKDSLPFQKKELKNYCEHVLHIDKKRIEVFEDAGKSGKNTKRPAFERMMEKVKSGQVSHVIVYKIDRISRNLVDFSLMYDDFKYNNVTFISLNEQFDTSSAIGEAILKIILVFAELERKLTSERVTDVMIGRAQNGQWNGARVPYGWDWDEEKQMPVHSKKEAQYGIDMYHRYLNGYSTLRIARYNNEHSIPTKRGGEWSSKTVGDFLRNPMNKGDYRYNYRNSARGKKKAKEEVVYIKNVFPPLIDPQIFDEVNRRLDENYKKQNTNYMFPIRKQCNIFSGLIICGKCGAHYQVCRKDERRLDGFRPSNYVCTRKRQKAICDSLNVSEVKIGPFMINYIAAMVDISQKRKKLKDKKELEQLILSHMQFADLAGIADDSLQETMDLLYGRSTNIWSSSPIEKESQDNENKKNKLKENLQKTDRALERLKKAYLFDDDAMDEKEFLEMKSKLEIDRVKIENEIKDIDNDAIANNVNQIDFIKTASQFLIIHKINSGEFIDYRSLAILDEESMKAFMNSVIDHIVVLNRQITEIVFKNGLSHKLLYR

SEQ ID NO: 1545 - protein, 565 aa, Unknown
  Description of Unknown: Integrase B1546 sequence
  PTHR30461:SF3,cd00338,SM00857,G3DSA:1.10.10.2600,IPR036162, PF13408,IPR025827,PS51737,G3DSA:3.40.50.1390,IPR006119, IPR038109,PF07508,IPR011109,SSF53041,PTHR30461, PS51736,Coil,PF00239
MAKKKKPAGGIAVIYARYSSHNQRDVSIEQQIEACRKHAAELGLTIIATYEDRAISGRTDNRPAFQRLMHDAEKGKFSYVLAWKSNRMGRNMMQAMVNESRLMDCGIKVYYAEEDFDDSAAGRFALRSMMNVNQFYSDNLAEDVRRGLMDNANKCMVNGRQPLGYKRGKDGKVVVDEPAAAIVREVYARVASGELFTDIARDLNRRGIKTADKGEWNKNSFHRLCSNEKYRGIYIYGDVRIEGGIPTIIDDTLWYKVQEALRVKKLKRNGRHRPGDEDYLLTGKLRCGKCGGYMIGMSGRSKTGDIHYYYACQNRRVGRTCDKKNIRRDVIEPAVAQAIKEYCLTDDAIEWIADKTVEYWEKADRNLQLDSIEGDLAAVQSSISNVMKAIEMGVVTETTRDRLIELEKQRTDLKSKLALAKEEVVHVDRKKLISSLLLFRNGDIHDRQYQEDLFKTFLISVYVYDDDDNGHLKIVFNAFGDNNTVDLPIDFGETDNQSAFSDGAEKFDYSLHRSTKKTSEHSGCLFLSYPGYGVHSALAHERSIGHGKHQEKLRFWLYAPALEGW

SEQ ID NO: 1546 - protein, 565 aa, Unknown
  Description of Unknown: Integrase B1547 sequence
  SM00857,G3DSA:1.10.10.2600,IPR036162,PF13408,IPR025827, G3DSA:3.40.50.1390,PS51737,IPR006119,IPR038109,PF07508, SSF53041,IPR011109,PTHR30461,Coil,cd00338, PF00239
MAYRKITDIRDTIGMRAVFYARVSTAEEEQLNAIELQIEENRGCIKDHGWKLVGEYIDRSKSGTMVKGRDDYQRLYEDLYEDLFDIVVIKDQERLQRNTLDWYLFINRVVQTGKLLFMYMDGKFYSPDDALITGVRAIIAEEFSRNLSKKLHNYHDHRIEKARQGQEIALQGSGNVYGWDKKDGKYYINPEQAKVRRLMCEGIMARKGSTLIAKELNDAGYRNTVGKPWKPMDIPKFVYDCKNVGTMIINKERHDFESKQTIKLPKEEWVYVENALPPIVTQEEWDLICKIHEERVIATGSDRRGKKTSGYSFSGKLVCGICGAPYWRKQRVSKDEYWVCSTKQTKGRKTRKRDSTMGKAGEINPLGCDNENISYNSLMEIMGVVSERLQANTDTIKQDMINWLTKLRKQLLEANGGHTEADLQRELSRKSKLLDAYLDGILNKQEYQKKAEELDERIIQLKTETEKNKANSGDIAEIDKVLANIDEEVARYVDGNEKLKVEYLLEHLEQVQIFPDKVIVIVPILSEGIVVEKTQYVSREKWCRKDYNYKNYYGCISCQFRRNIS

SEQ ID NO: 1547 - protein, 565 aa, Unknown
  Description of Unknown: Integrase B1548 sequence
  SM00857,G3DSA:1.10.10.2600,IPR036162,PF13408,IPR025827, PS51737,G3DSA:3.40.50.1390,IPR006119,IPR038109,PF07508, SSF53041,IPR011109,PTHR30461,Coil,cd00338, PF00239
MAYRKITDIKDTIGMRAVFYARVSTAEEEQLNAIELQIEENRGCIKDHGWKLVGEYIDRSKSGTMVKGRDDYQRLYEDLYEDLFDIVVIKDQERLQRNTLDWYLFINRVVQTGKLLFMYMDGKFYSPDDALITGVRAIIAEEFSRNLSKKLHNYHDHRIEKARQGQEIALQGSGNVYGWDKKDGKYYINPEQAKVRRLMCEGIMARKGSTLIAKELNDAGYRNTVGKPWKPMDIPKFVYDCKNVGTMIINKERHDFESKQTIKLPKEEWVYVENALPPIVTQEEWDLICKIHEERVIATGSDRRGKKTSGYSFSGKLVCGICGAPYWRKQRVSKDEYWVCSTKQTKGRRTRKRDSTMGKAGEINPLGCDNENISYNSLMEIMGVVSERLQANTDTIKQDMINWLTKLRKQLIEANGGHTEADLQRDLSRKSKLLDAYLDGILNKQEYQTKAEELDERIIQLKAETEKNKANSGDIAEIDKVLANIDEEVSRYVDGNEKLKVEYLLEHLEQVQIFPDKVIVIVPILSEGIVVEKAQYVSREKWCRKNHFDEGSYNCFKTNGRNGFP

SEQ ID NO: 1548 - protein, 565 aa, Unknown
  Description of Unknown: Integrase B1549 sequence
  SM00857,G3DSA:1.10.10.2600,IPR036162,PF13408,PS51737, G3DSA:3.40.50.1390,IPR025827,IPR006119,IPR038109,PF07508, SSF53041,IPR011109,PTHR30461,Coil,cd00338, PF00239
MAYRKITDIRDTIGMRAVFYARVSTAEEEQLNAIELQIEENRGCIKDHGWKLVGEYIDRSKSGTMVKGRDDYQRLYEDLYEDLFDIVVIKDQERLQRNTLDWYLFINRVVQTGKLLFMYMDGKFYSPDDALITGVRAIIAEEFSRNLSKKLHNYHDHRIEKARQGQEIALQGSGNVYGWDKKDGKYYINPEQAKVRRLMCEGIMARKGSTLIAKELNDAGYHNTVGKPWKPMDIPKFVYDCKNVGTMIINKERHDFESKQTIKLPKEEWVYVENALPPIVTQEEWDLICKIHEERVIATGSDRRGKKTSGYSFSGKLICGICGAPYWRKQRVSKDEYWVCSTKQTKGRRTRKRDSTMGKAGEINPLGCDNENISYNSLMEIMVVVSERLQANTDTIKQDMINWLTKLRKQLLEANGGHTEVDLQRELSRKSKLLDAYLDGILNKQEYQKKAEELDERIIQLKAETEKNKANSGDIAEIDKVLANIDEEVARYVDGNEKLKVEYLLEHLEQVQIFPDKVIVIVPILSEGIVVEKTQYVSREKWCGKIYHIENVDWYDETNCRKDLL

SEQ ID NO: 1549 - protein, 565 aa, Unknown
  Description of Unknown: Integrase B1550 sequence
  PTHR30461:SF3,SM00857,G3DSA:1.10.10.2600,IPR036162,PF13408, PS51737,G3DSA:3.40.50.1390,IPR025827,IPR006119,IPR038109, PF07508,IPR011109,SSF53041,PTHR30461,Coil, PS51736,cd00338,PF00239
MNKYERLNQERKLIDTKKRVAAYCRVSTDNDDQANSFESQQRYFKQYIERNPDWELFEIFADEGISGTNTKKRKEFNRMIACAKNGDFDLIITKEISRFARNTLDSIYYTRDLKKHGVGVIFMNDNINTLDGDAELRLAIMSSIAQEESRKTSERVKWGQKRQMEQGVVFGRSMLGYDVKDGKMYINEAGAKIVRLIFHKFVNEGKGTHVIARELREEGIKPMRVKEWQNTVILRVIRNEKYCGDLVQKKTYTPDYLSHEKKYNRGQEEFVIIKDHHEPIISRELFEEANRILDAKSLSPEGKAKHSNRYPFSGKLKCGRCGASYVARYKKRQDGSRYKAWRCLEAARHGSPHTDKAGNRVGCFGESIRNEDAIHIMYLVCQTLNLDRKKIISNLTKTIGAIISMDMTGTDTNALADKIADAERKRTNLIELYTGGDIDRAEFTALRAKYDAEIESLKSMAESIEKQQAMVKKQQEVMKDIRNTLEELIKGIEYEDEFYTQILDKMVINDRDNIDVYLNLLPLKWSYTVAKASKKALAPKRNILGASLPTSLSIPATSLYGMEQR

SEQ ID NO: 1550 - protein, 565 aa, Unknown
  Description of Unknown: Integrase B1551 sequence
  PTHR30461:SF3,IPR036162,PS51737,IPR011109,PTHR30461, PS00397,PF00239,G3DSA:1.10.10.2600,IPR006119,SSF53041, SM00857,IPR025827,IPR038109,PS51736,cd03768, IPR006118,PF13408,G3DSA:3.40.50.1390,PF07508,Coil
MPEKEKVVALYVRVSTGYQVDKDSLPFQKKELKNYCEHLLHINKNRIEVFEDAGKSGKNTKRPAFERMMEKVKSGQVSHVIVYKIDRISRNLVDFSLMYDDFKYNNVTFISLNEQFDTSSAIGEAILKIILVFAELERKLTSERVTDVMIGRAQNGQWNGARVPYGWDWDEEKQMPVHSKKEAQYGIDMYHRYLNGYSTLRIARYNNEHSIPTKRGGEWSSKTVGDFLRNPMNKGDYRYNYRNSARGKKKAKEEVVYIKNVFPPLIDPTIFDEVNRRLDENYKKQNTNYMFPIRKQCNIFSGLIICGKCGAHYQVCRKDERRLDGFRPSNYVCTRKRQKAICDSLNVSEVKIGPFMINYIAAMVDISQKRKKLKDKKELEQLILSHMQFTDLAGIADDSLQETMDLLYGRSTNIWSSSPIEKESQDNENKKNKLKENLQKTDRALERLKKVYLFDDDGMDEKEFLEMKSKLEIDRVKIENEIKDIDNDAIANNVNQIDFIKTASQFLIIHKINSGEFIDYRSLAILDEESMKAFMNSVIDHIVVLNRQITEIVFKNGLSHKLLYR

SEQ ID NO: 1551 - protein, 565 aa, Unknown
  Description of Unknown: Integrase B1552 sequence
  PTHR30461:SF3,SM00857,G3DSA:1.10.10.2600,IPR036162,PF13408, PS51737,IPR025827,G3DSA:3.40.50.1390,IPR006119,IPR038109, PF07508,SSF53041,IPR011109,PTHR30461,Coil, PS51736,cd00338,PF00239
MDVRRLDEMQAQGRSIFDTELAVAYYARVSTDKDEQINSLGNQKRYFEDYIAANPHWRFAGGYVDEGISGTSVEGREQFLKMIEDAKRGRFDLIVTKEISRFARNTLDSLRYTRELLRCGVGVYFQNDNINTFDKDAELRLTIMSSIAQDEVRKLSERTRFGFKRAQENSVLLGQNNLFGYNKVDGRLEIVEPEAAVVREVFERYAAGDLGLRAIANDLDSRGVRGRQGKPLTYSTLYGMIRNPKYKGCYAGRRYASRDYRDKRSYRLSADKWLVHKDDRVPAIVPEALWEQANRLLASRGKTMKAHAQASQNRYAYSGKLICAKHGTTFHRHVYKSKSRGESECWNCKLYREKGKQGGCDSPTVYSHELDRILERVFEQITDERSAAVQEYIDNLRAFAAQQDNAPALAQVEQEIETVTRRKDKLLDLALAGALSNDEFKQRNETCNEQLAALEQQRTELQNADKTLEERIRRVENLRRIIEERWQMSCGFSREMSKALVDHIVVDSDESKTRISLDIFLTTGAEPIVSETQTSNSQLQMSFQRTRSGYQGTYEVRYCVRWHLG

SEQ ID NO: 1552 - protein, 565 aa, Unknown
  Description of Unknown: Integrase B1553 sequence
  SM00857,G3DSA:1.10.10.2600,IPR036162,PF13408,PS51737, IPR025827,G3DSA:3.40.50.1390,IPR006119,IPR038109,PF07508, IPR011109,SSF53041,PTHR30461,Coil,cd00338, PF00239
MAYRKITDIRDTIGMRAVFYARVSTAEEEQLNAIELQIEENRGCIKDHGWKLVGEYIDRSKSGTMVKGRDDYQRLYEDLYEDLFDIVVIKDQERLQRNTLDWYLFINRVVQTGKLLFMYMDGKFYSPDDALITGVRAIIAEEFSRNLSKKLHNYHDHRIEKARQGQEIALQGSGNVYGWDKKDGKYYINPEQAKIRRLMCEGIMARKGSTLIAKELNDAGYRNTVGKPWKPMDIPKFVYDCKNVGTMIINKERHDFESKQTIKLPKEEWVYVENALPPIVTQEEWDLICKIHEERVIATGSDRRGKKTSGYSFSGKLVCGICGAPYWRKQRVSKDEYWVCSTKQTKGRRTRKRDSTMGKAGEINPLGCDNENISYNSLMEIMGVVSERLQANTDTIKHDMINWLTKLRKQLLEANGGHTEADLQRELSRKSKLLDAYLDGILNKQEYQKKAEELDERIIQLKAETEKNKANSGDIAEIDKVLANIDEEVSRYVDGNEKLKVEYLLEHLEQVQIFPDKVIVIVPILSEGIVVEKTQYVSREKRGRQIHNHENAVGVDQSHKRQLYH

SEQ ID NO: 1553 - protein, 565 aa, Unknown
  Description of Unknown: Integrase B1554 sequence
  SM00857,G3DSA:1.10.10.2600,IPR036162,PF13408,PS51737, G3DSA:3.40.50.1390,IPR025827,IPR006119,IPR038109,PF07508, IPR011109,SSF53041,PTHR30461,Coil,PS51736, cd00338,PF00239
MAYRKVRSLLDTIGLRAVFYARVSTAEEEQLNAIELQIEENRNCIYKNKWKKVDEYIDRSKSGTMVKGRDDYQRLYEDLLTDKFDIVVIKDQERLMRNTKDWYLFIDRLVQTGKLLYMYLDNKFYNPDDALITGIRAIIAEEFSRNLSKKLHNYHDGRIEKARQGKEIDLQGSGNVFGWDKKDGRYYINPEQAKIRRLMCEGIMARKGSTQIAKELNEAGYRNTVGKEWKPMDIPKFVYDCKNVGTMIINKERQDFESKQTIKLPKEEWVYVKNALPPIVTEEEWELICKIHEERVVATGSDKRGKGKKVSGYSFSGKLVCGVCGAPYWRKQRSTKEEYWVCSTKQQKGRRTRKRDSVNGKAGEINEAGCDNTNISYNSLMEIMGIVSERLQANTELVKADMISKLNSFKKRIIEANRGVTEEDLQKELSRKDKLLDALLDGILTKEEYTRKAESIENKIVELRQEIEDNKTQFEDIAEIDRVLANIDEEIAVYLNENKQLKVEYILEHLDRVEIYPDKVIVIVPLFDVGFIVDKSQYVSREKRSRKNDHYENATWIDKANFRRS

SEQ ID NO: 1554 - protein, 565 aa, Unknown
  Description of Unknown: Integrase B1555 sequence
  SM00857,G3DSA:1.10.10.2600,IPR036162,PF13408,PS51737, G3DSA:3.40.50.1390,IPR025827,IPR006119,IPR038109,PF07508, SSF53041,IPR011109,PTHR30461,Coil,cd00338, PF00239
MAYRKITDIKDTIGMRAVFYARVSTAEEEQLNAIELQIEENRGCIKDHGWKLVGEYIDRSKSGTMVKGRDDYQRLYEDLYEDLFDIVVIKDQERLQRNTLDWYLFINRVVQTGKLLFMYMAGKFYSPDDALITGVRAIIAEEFSRNLSKKLHNYHDHRIEKARQGQEIALQGSGNVYGWDKKDGKYYINPEQAKVRRLMCEGIMARKGSTLIAKELNDAGYRNTVGKPWKPMDIPKFVYDCKNVGTMIINKERHDFESKQTIKLPKEEWVYVENALPPIVTQEEWDLICKIHEERVIATGSDRRGKKTSGYSFSGKLVCGICGAPYWRKQRVSKDEYWVCSTKQTKGRRTRKRDSTMGKAGEINPLGCDNENISYNSLMEIMGVVSERLQANTDTIKQDMINWLTKLRKQLLEANGGHTEADLQRELSRKSKLLDAYLDGILNKQEYQKKAEELDERIIQLKTETEKNKANSGDIAEIDKVLANIDEEVARYVDGNEKLKVEYLLEHLEQVQIFPDKVIVIVPILSEGIVVEKTQYVSREKWSGKNNPYENDCRYYDTNQRNHLL

SEQ ID NO: 1555 - protein, 565 aa, Unknown
  Description of Unknown: Integrase B1556 sequence
  SM00857,G3DSA:1.10.10.2600,IPR036162,PF13408,PS51737, G3DSA:3.40.50.1390,IPR025827,IPR006119,IPR038109,PF07508, SSF53041,IPR011109,PTHR30461,Coil,cd00338, PF00239
MAYRKITDIRDTIGMRAVFYARVSTAEEEQLNAIELQIEENRGCIKDHGWKLVGEYIDRSKSGTMVKGRDDYQRLYEDLYEDLFDIVVIKDQERLQRNTLDWYLFINRVVQTGKLLFMYMDGKFYSPDDALITGVRAIIAEEFSRNLSKKLHNYHDHRIEKARQGQEIALQGSGNVYGWDKKDGKYYINPEQAKVRRLMCEGIMARKGSTLIAKELNDAGYRNTVGKPWKPMDIPKFVYDCKNVGTMIINKERHDFESKQTIKLPKEEWVYVENALPPIVTQEEWDLICKIHEERVIATGSDRRGKKTSGYSFSGKLVCGICGAPYWRKQRVSKDEYWVCSTKQTKGRRTRKRDSTMGKAGEINPLGCDNENISYNSLMEIMGVVSERLQANTDTIKHDMINWLTKLRKQLLEANGGHTEADLQRELSRKSKLLDAYLDGILNKQEYQKKAEELDERIIQLKAETEKNKANSGDIEEIDKVLANIDEEVSRYVDGNEKLKVEYLLEHLEQVQIFPDKVIVIVPILSEGIVVEKAQYVSREKWCGKIYHIENVDRYDETHCRKDLL

SEQ ID NO: 1556 - protein, 565 aa, Unknown
  Description of Unknown: Integrase B1557 sequence
  PTHR30461:SF3,SM00857,G3DSA:1.10.10.2600,IPR036162,PF13408, IPR025827,G3DSA:3.40.50.1390,PS51737,IPR006119,IPR038109, PF07508,SSF53041,IPR011109,PTHR30461,Coil, PS51736,cd00338,PF00239
MAVFAQAVRPDFNNDVADVVIYSRYSSIGQNDQSIDGQIDACMQYAAQRGFRVVGQYIDRAMSGTHADSRPEFQRLIRDGKKGIFKYVLVWKLDRFARNRYDSAIYKNELKKHGVKVLSVTEGIDAGSDSIILEAVLEAMAEEYSRQLSQNVRRGMRQNAEKQLTLGGNTPLGYRVEDKRLVVDKDEAEIVRFAFRSYADGMTKTEIAKECNRRGWRTRSGRPFTLSSFSVMLKNQTYIGTYTFKDELAVEDAVPAIVDRSTFDKVGAMLERNRRAPGRVKAKEDYELQGKVFCGYCGSPMVGESGRGKCGNTYHYYACATRKKVHTCQKKNEKKGFLEWYIVEQITTSILTDQRIHEIAAGVVAEYNRSFDAGNVRELEKKIRAMDKEMDTLVDTLIRTTAAPAVTKINERIDLLAIQKEEAEVDLAKLKVASRITLSEDEIIAWLQQFVHGDPMDPDFRQRVIDIFVNSIYLYDDKVVMYFNIKDASQVSYIEMQENLKDLEGSDLNGCGVPARSLCSLRTQASLFFSGPSPASSLPISRHRPVKFQATSTITISSSLLSGCR

SEQ ID NO: 1557 - protein, 565 aa, Unknown
  Description of Unknown: Integrase B1558 sequence
  PTHR30461:SF3,cd00338,SM00857,G3DSA:1.10.10.2600,IPR036162, PF13408,PS51737,IPR025827,G3DSA:3.40.50.1390,IPR006119, IPR038109,PF07508,SSF53041,IPR011109,PTHR30461, PS51736,Coil,PF00239
MKITKFPIDLSMLTEEEIDQFRQDPSTLFEGDTDVSLYLRFSSERQREQSIEGQLRDCRTFCKLNSYRITAIYVDRATTARKDVEKRVHFQEMIRDSEKKPWEYVVVWKLDRFARNRTDSALFKFRLRKNGVKVISATENISEKPEGIILEAVLEGMAEFYSADLSQKITRGMRESALKCHSIGGHIPLGYKIEDHKLVINPATAHIVQEAFELYANGETVADICRMFNAKGYRTAKGVEFNRNSFKSMFRNKRYIGVYTYKDIEMEGGVPAIIDKELFETVSRRLSKNAEAPARGKAKVDYLLAGKLFCGHCGGSMNGESGTSRTGAVHNYYTCYTRKRKHACEKKPLKKEWIEYIVAQDAMELLTDDTIQELADMAISQTEQDLRENTRIPELTERMKETESGIANITNAIEKGIASDALMNRLVELEKEKKNLFRLLAEEEKYVCKIERSQIVYWLTEFKGGRIEDERYRRIIIDLMVNSVTVWDEPDGFRITTAYNLTSCKSKTFRINPSGEKGFGFEGSKSTKTRNRCSFYCGDFSLDRPISSAGGAPRKKSFNIKHRVK

SEQ ID NO: 1558 - protein, 565 aa, Unknown
  Description of Unknown: Integrase B1559 sequence
  PTHR30461:SF3,cd00338,SM00857,G3DSA:1.10.10.2600,IPR036162, PF13408,PS51737,G3DSA:3.40.50.1390,IPR025827,IPR006119, IPR038109,PF07508,IPR011109,SSF53041,PTHR30461, PS51736,Coil,PF00239
MSATIPSLMQAPRAFGYCRKSTNEQREESLEAQQRAIVTFAATAGYELVQVYKDHGNSGRRGERPEFQRMLADAAAAGVQYIIVHKLDRFFRNADQQTVVEMQLRRQGIQVISAAEHFDATPQGQFMRNVTKAINQWYSANLAQEVAKGLRENALTARTTGGPPPLGYAVDKSTGQYAIVPREAEAVQLIFKLYQQGAGYTEIIDALNAGGYVTRRGQPFGKNSLYDILRNEKYTGLYIWNRLAPADVDGRTSRRRLKPRDEWVCVENGMPQIIPTEQWQAVQDEMDKRKHRNAQYKAKAFYLLSGLVYCGGCGGVMSGEMHRYNSHGKAVEYRYYRCTAQHRQHDGGAHAHRVNADRLENAVIDYIQHIVLDPVNMDALCVAVLEALQPDGRNAERAKELKQEAGIIQQKVDRLYQAIENGLDAAGAIERINALQKQRMTLLAQANDLDVSAESAAASVDELRRVWSGINLRELQPEKMRAIVRDLIYKIVVFDDGPRGSRLRIILNPARLNPAAIPKAIETMPFSELQNFSHTGGSGLPLPSICETITVLDYGLIAAELSIVR

SEQ ID NO: 1559 - protein, 565 aa, Unknown
  Description of Unknown: Integrase B1560 sequence
  PTHR30461:SF3,IPR036162,PS51737,IPR011109,PTHR30461, PS00397,PF00239,G3DSA:1.10.10.2600,IPR006119,SSF53041, SM00857,IPR025827,IPR038109,PS51736,cd03768, IPR006118,PF13408,G3DSA:3.40.50.1390,PF07508,Coil
MSGKDKIVALYVRVSTGYQVDKDSLPFQKKELKNYCEHVLHIDKKRIEIFEDAGKSGKNTKRPAFERMMDKVKAGQVSHVIVYKIDRITRNLVDFSLMYDNFKYNNVTFISLNEQFDTSSAIGEAILKIILVFAELERKLTSERVTDVMIGRAQNGQWNGARVPYGWDWDEEKQMPVHSKKEAQYGIDMYNRYLNGYSTLRIARYNNEHSIPTKRGGEWSSKTVGDFLRNPMNKGDYRYNYRNSARGKKKAKEEVVYIKNVFPPLIDPTIFDEVNRRLDENYKKQNTNYMFPIRKQCNIFSGLIICGKCGAHYQVCRKDERRLDGFRPSNYVCTRKRQKAICDSLNVSEVKIGPFMINYIAAMVDISQKRKKLKDKKELEQLILSHMQFTDLAGIADDSLQETMDLLYGRSTNIWSSSPIEKESQDNENKKNKLKENLQKTDRALERLKKAYLFDDDAMDEKEFLEMKSKLEIDRVKIENEIKDIDNDAIANNVNQIDFIKTASQFLIIHKINSGEFIDYRSLAILDEESMKAFMNSVIDHIVVLNRQITEIVFKNGLSHKLLYR

SEQ ID NO: 1560 - protein, 565 aa, Unknown
  Description of Unknown: Integrase B1561 sequence
  PTHR30461:SF3,cd00338,SM00857,G3DSA:1.10.10.2600,IPR036162, PF13408,IPR025827,G3DSA:3.40.50.1390,PS51737,IPR006119, IPR038109,PF07508,SSF53041,IPR011109,PTHR30461, PS51736,Coil,PF00239
MAKKKKPAGGIAVIYARYSSHNQRDVSIEQQIEACRKHAAELGLTIIATYEDRAISGRTDNRPAFQRLMHDAEKGKFSYVLAWKSNRMGRNMMQAMVNESRLMDCGIKVYYAEEDFDDSAAGRFALRSMMNVNQFYSDNLAEDVRRGLMDNANKCMVNGRQPLGYKRGKDGKVVVDEPAAAIVREVYARVASGELFTDIARDLNRRGIKTADKGEWNKNSFHRLCSNEKYRGIYIYGDVRIEGGIPTIIGDTLWYKVQEALRVKKLKRNGRHRPGDEDYLLTGKLRCGKCGGYMIGMSGRSKTGDIHYYYACQNRRVGRTCDKKNIRRDVIEPAVAQAIKEYCLTDDAIEWIADKTVEYWEKADRNLQLDSIEGDLAAVQSSISNVMKAIEMGVVTETTRDRLIELEKQRTDLKSKLALAKEEVVHVDRKKLISSLLLFRNGDIHDRQYQEDLFKTFLISVYVYDDDDNGHLKIVFNAFGDNNTVDLPIDFGETDNQSAFSDGAEKFDYSLHRSTKKTSEHSGCLFLSYPGYGVHSALAHERSIGHGKHQEKLRFWLYAPALEGW

SEQ ID NO: 1561 - protein, 564 aa, Unknown
  Description of Unknown: Integrase B1562 sequence
  IPR036162,PS51737,IPR011109,PTHR30461,PS00397, PF00239,G3DSA:1.10.10.2600,IPR006119,SSF53041,cd00338, SM00857,IPR025827,IPR038109,PS51736,IPR006118, PF13408,G3DSA:3.40.50.1390,PF07508,Coil
MPRAQKAAIYCRVSTLHQVDKDSLPMQRQDMINYARYALGIEDYEVFEDAGYSGKNTDRPAFQDMMERIEAGEFSHVLVWKIDRISRNLLDFATMYARCKKLGVTFVSKNEQFDTSTAMGEAMLKIILVFAELERNMTSERVSSTMNARAAEGKWNGGRVPFAYRYDRETDSFSIRDDEARIALELKDIYLRTHSLTYTARLLNEAGRRTRRGYAWTPATVAIILRSPFYRGTYRYNYRDESETTFSFKNKNDWIMCAKHHPPLFSEADCRQIDFWLTKNQRRHGKATHVQRKLVHVFAGLIRCGFCGSNYIASIDRVRASGYQPSMYNCGGRRQKGMCKNRYVTDIRIGGFIFNYISNVIRLRDAFRPQWSKARIQRFLLHGDDFCGASLSDDALRRVRAALLGSRLSTAEYQPADEQHDDSATQTRKANLQAELEKNRRALSRLMHLFLYAEDEMPQADFLREKKHLQDTIARLQAELEKARQSSVFASSLTDEEFLDKAARLLFQSAMVRGGIDFPELAMRVGNLELKNFVNAVIKQIVVLDGHVTQITFVNGETHTFLYH

SEQ ID NO: 1562 - protein, 564 aa, Unknown
  Description of Unknown: Integrase B1563 sequence
  PTHR30461:SF3,SM00857,G3DSA:1.10.10.2600,IPR036162,PF13408, IPR025827,G3DSA:3.40.50.1390,PS51737,IPR006119,IPR038109, PF07508,SSF53041,IPR011109,PTHR30461,Coil, PS51736,cd00338,PF00239
MREVEILKKKQLKCYLYTRVSTSMQVDGYSLDAQRDKLRKYAAYEDMIVAGEYSDEGFSGKNIQGRQEFQRMLNDIQDGKDDVSYVLVFKLSRFGRNAADVLNSLQLMQDFGVNLICVEDGIDSSKDAGKLMISVLSAVAEIERENIRTQTMAGREQKAREGKWNGGFAPYGYKLENGNLVIAEDEVEVIRVIYDRYIHTNEGVAGVAKYLNRNGYTKKLRQNNTIPGFSRDFVKNVLYNPVYMGKIAYGRRRTEKKQGTRNEMHVVEQSEFPVYEGQHEAIISEEDWYLAQEKRKINSFKREKVNNPDHAHILSGILKCPCCGKSMYGNIAKAHSKDKKTRYYYYCKNTVTPTGHECSFRLNIEQTEINKFVAKVISAMVNNPRFVEAIQAKIGTAVDTEDMERQIAVLQGRLKQAFGTKSRLERQMDTLDINDAHYDRKILDLQRRYDEQYDTIEEIEVQIGELQSQIRSIQQEKISGDNIYRLLLAFDEVYHSATEAEQKEFMKAFIERIEMFPEKRKDGSWIKKIVFNFPVPIDGEEVKELPLETETTVEVCSSYIRADK

SEQ ID NO: 1563 - protein, 564 aa, Unknown
  Description of Unknown: Integrase B1564 sequence
  SM00857,G3DSA:1.10.10.2600,IPR036162,PF13408,IPR025827, G3DSA:3.40.50.1390,PS51737,IPR006119,IPR038109,PF07508, IPR011109,SSF53041,PTHR30461,Coil,PS51736, cd00338,PF00239
MNIYHTRERLRTRSIYDLNLRVAFYARVSTDSEDQQVSIEHQTQYYKEFIKSNRNWKFAKGYIDNGISGIQTKHREQFKEMLEDAKNGKFDMLITKEITRFARNTLDSIQYTRQMLSWGVCVWFQNDNINTIDEDSELRLTIMAGVAQDEVRKLSNRVKFGHKQSIKNGVVLGNSRIYGYDKKDGKLTINESEAQMVRMIFEDYASGEWTTPQLEKKLYNMGYRNYKGGKIDRNVIRHIIRNPKYKGYYAGGKVKIVDMFTKKQEFLPESEWVMFKDDGSHVPQIVDEEVWKKANEYIDARGEIVKTRRTSIKKSENVFTGMLICGNDGASYWLKQRTLRGKEDVKWVCSKKIKEGAASCDSFYIDDRELREVIAKLICESSGDIEQIAEKFIKIYHSSMNQADASTEIKRLEKQINVAERKSDKLLEYNLDGAISDAVFIEKSQKLEAQIEEYKKQIEKLSTIQDDIVPIENQIRAIAHSVKQLDGISPDDITKTVVDSFLKKIVVNPIGEKEAKLVFYLKDGITTEMSFVSGKSMRCSVNLFKKMIEQQERQMSGSSQNEQY

SEQ ID NO: 1564 - protein, 564 aa, Unknown
  Description of Unknown: Integrase B1565 sequence
  PTHR30461:SF3,SM00857,G3DSA:1.10.10.2600,IPR036162,PF13408, IPR025827,G3DSA:3.40.50.1390,PS51737,IPR006119,IPR038109, PF07508,IPR011109,SSF53041,PTHR30461,PS51736, cd00338,PF00239
MARAAKQDNNSEIIDGVIYARYSEGPNQTEASIEGQVRECKEYAKRNGIRIINVYSDSKHTGTNDNRAEFQKMLRDSRRGGFSVVVVWKIDRFGRNRAEMAQNKALLKLQGVKVVSAKEYIPDSPEGIILESVLEGMAEYYSANLSQNIKRGMKENALHCKSNGSGKSLGYIVDKDGYFEIEPNEATIVKTIFQKYDEGMKIADIWREIVASGAKTKRGKDFTQYGISRVLSNRAYIGEYRYGDIVTPGGMPRIIDDDLFNRVQERRALRKKAPASRRSNSDVDFLLTGKVFCGHCKGTMRGMSGTSKTGRKFYYYACHDKIFKHNKCTKKNVKKEWLETEVTRITKDDILNKETIEFIADRVVEIQRQEQEDTSMLRYYEQQLRDTQSAINNIMKAIEAGIITSSTKSRLFELEEQKSIIEGEIEREKIITPVIEKEQVIFSLERFFGGDINNKEYQRNIIDMFVNKVILYDDKIIITYNISSQNEISVDVVEQAAFAALDECSSKLSLAPPAGACPCTRSALLYVRRFFYCRSSILSKTQPLFRRGRHFPSSFFCKHTKSPL

SEQ ID NO: 1565 - protein, 564 aa, Unknown
  Description of Unknown: Integrase B1566 sequence
  PTHR30461:SF3,SM00857,G3DSA:1.10.10.2600,IPR036162,PF13408, IPR025827,G3DSA:3.40.50.1390,PS51737,IPR006119,IPR038109, PF07508,IPR011109,SSF53041,PF00239,PTHR30461, PS51736,Coil,cd00338
MINRYERLNQELKMVETKRKVAAYCRVSTDNEDQANSFESQQRYFRQYIERNPDWELYEIFADEGISGTNTKKRKEFNRMIACAKNGDFDLIITKEISRFARNTLDSIYYTRELKKHGVGVIFMNDNINTLDGDAELRLAIMSSIAQEESRKTSERVKWGQKRQMEQGVVFGRSMLGYDVEGGKMTINEEGAKVVRLIFHKFVNEGKGTHVIARELREEGISPMRVKEWSNTVILRVIRNEKYCGDLVQKKTYTPDFLSHEKKYNRGQEEFVIIKDHHEPIISRELFDEANRILDAKSLSQEGKAKHSNRYPFSGKIKCGCCGSSYVARYKTRKDGSRYKAWRCNEAAKHGSPHIDKAGNQVGCTGLSIRNEDATHIMYLVTKSLKYNRNKIINNLTAVIQSIIAMDTTGTDVLKLQEQIKKIEGKRANLIDLYMSNLINKDEFTATRASCDAEIEELQSIIESVDKQREMIEQQQQLLKEIEDAIKEIVSGVEYEDEFYKHILDKMVVQDKDNIDVYLNLLPMKWSYTVAKASKKAVASEWNISEASLPISVKRPLSSGYGML

SEQ ID NO: 1566 - protein, 564 aa, Unknown
  Description of Unknown: Integrase B1567 sequence
  SM00857,G3DSA:1.10.10.2600,IPR036162,PF13408,IPR025827, PS51737,G3DSA:3.40.50.1390,cd03770,IPR006119,PF14287, IPR038109,IPR011109,SSF53041,PF07508,PTHR30461, PS51736,IPR025378,PF00239
MATANYIKGQNETKITALYCRLSQDDGREGESNSISNQKEILLAYAQQNNFPNPQFFTDDGFSGTTFDRPSFIQMENLVEQGVVDTIIVKDLSRFGRNYLDVGNYLEIKYPTLGVRFIAIQENVDTLKETGTEMMPFNNIFNEWYAAQTSKKIRAVWKNKAANGKRVSPSVPFGYVRNPQNKEDWLVDEPAAEVVRKIYALCLDGRGPSQIARQLEQEKVLIPTAYYASLGRKTRKQYTDPYAWDQKTVAGILVNQQYTGCTVNFMTTTISYKVHKTVYKPKDEWQIIPNTQPAIIDEDTWKRVQELREHRIRPTATGRTSLFSGKAFCADCGSKLHFCAAKSLNANQEYYRCSNYKSGRGSCQIHFIRNVVLEKIVLEAINSLADFVRCYEPVFLYLMVQKDIVSKRTETSKLKTAIESGKRRIQDLDKLIERIYEDQVLGNISAERYARMSVNYENEQRTLINKVAEDEKKLACIEQTSLDLKTLLKVLRSSTSFDELTPTLVNSLIRRIEVHNNDKSSGHCYVKVDIYFTAIGLIDIPTEDEIKSLMAKIKANPQEYRLTA

SEQ ID NO: 1567 - protein, 564 aa, Unknown
  Description of Unknown: Integrase B1568 sequence
  PTHR30461:SF3,SM00857,G3DSA:1.10.10.2600,IPR036162,PF13408, PS51737,IPR025827,G3DSA:3.40.50.1390,IPR006119,IPR038109, PF07508,IPR011109,SSF53041,PTHR30461,Coil, PS51736,cd00338,PF00239
MREVEILKKKQLKCYLYTRVSTSMQVDGYSLDAQRDKLRKYAAYEDMIIAGEYSDEGFSGKNIQGRQDFQRMLNDIQDGKDDVSYVLVFKLSRFGRNAADVLNSLQLMQDFGVNLICVEDGIDSSKDAGKLMISVLSAVAEIERENIRTQTMAGREQKAREGKWNGGFAPYGYKLENGNLVIAEDEVEVIRVIYDRYIHTNEGVAGVAKYLNRNGYTKKLRQNNTIPGFSRDFVKNVLYNPVYMGKIAYGRRRTEKKQGTRNEMHVVEQSEFPVYEGQHEAIISEEDWYLAQEKRKINSFKREKVNNPDHAHILSGILKCPCCGKSMYGNIAKAHSKDKKTRYYYYCKNTVTPTGHECSFRLNIEQTEINKFVAKIISAMVNNPRFVEAIQAKIGTAVDTEDMEKQIAVLQGQLKQAFGTKSRLERQMDTLDINDAHYDRKILDLQRRYDEQYDTIEEIEVQIGELQSQIRSIQQEKISGDNIYRLLLAFDEVYHSATEAEQKEFMKAFIERIEMFPEKRKDGSWIKKIVFNFPVPVDGEEVKELPLETETTVETVVLMSRKDK

SEQ ID NO: 1568 - protein, 564 aa, Unknown
  Description of Unknown: Integrase B1569 sequence
  PTHR30461:SF3,SM00857,G3DSA:1.10.10.2600,IPR036162,PF13408, IPR025827,G3DSA:3.40.50.1390,PS51737,IPR006119,IPR038109, PF07508,SSF53041,IPR011109,PF00239,PTHR30461, PS51736,Coil,cd00338
MINRYERLNQELKMVETKRKVAAYCRVSTDNEDQVNSFESQQRYFRQYIERNPDWELYEIFADEGISGTNTKKRKEFNRMIACAKNGDFDLIITKEISRFARNTLDSIYYTRELKKHGVGVIFMNDNINTLDGDAELRLAIMSSIAQEESRKTSERVKWGQKRQMEQGVVFGRSMLGYDVDGGKMTINEEGAKVVRLIFHKFVNEGKGTHVIARELREEGISPMRVKEWSNTVILRVIRNEKYCGDLVQKKTYTPDFLSHEKKYNRGQEEFVIIKDHHEPIISRELFDEANRILDAKSLSQEGKAKHSNRYPFSGKIKCGCCGSSYVARYKTRKDGSRYKAWRCNEAAKHGSPHIDKAGNQVGCTGLSIRNEDATHIMYLVTKSLKYNRNKIINNLTAVIQSIIAMDTTGTDVLKLQEQIKKIEGKRANLIDLYMSNLINKDEFTATRASCDAEIEELQSIIESVDKQREMIEQQQQLLKEIEDAIKEIVSGVEYEDEFYKHILDKMVVQDKDNIDVYLNLLPMKWSYTVAKASKKAVASEWNISEASLPISVKRPLSSGYGML

SEQ ID NO: 1569 - protein, 564 aa, Unknown
  Description of Unknown: Integrase B1570 sequence
  cd03768,PTHR30461:SF3,SM00857,IPR006118,G3DSA:1.10.10.2600, IPR036162,PS51737,G3DSA:3.40.50.1390,IPR006119,IPR038109, PF07508,IPR011109,SSF53041,PTHR30461,PS00397, PS51736,Coil,PF00239
MEKKQKSALYVRVSTTHQIDKDSLPLQRSDLINYTKYVLGINDFEIFEDAGYSGGTTDRPAYQDMMNRIKMGEFTHLIVWKIDRISRNLRDFSDMYDELKKYNVTFISRNEQFDTSTAMGEAMLKIILVFAELERKLTGERVFSVMISRAQKGLWNGATVPLGYEWDPETKFPRPCDKEAKIVQYIFDQYEEIKSTTKVAKKLNIENIPTKRNGTWTPRTVGSILTNPFYIGTYRYNTKTKKTRRWKDKSEWVVLENNHQAIVNTEQFERVSQIIQNNYKGDKNYQRSSTNVHILSGLASCHKCGKKMHSGLDRARKDGFTPSRYTCYAFNVNYTCANYSSDLAILPGLINYIANYMTLQERITARHSLRDMESILLRGKYFEDIDHIEKQDLKNTYDLLINNKMVTYNSFEEKNKEAIISQNVIYEAEKEKYEKALKRLDDLYLYDVNSMSQKDFVIKRKEISDKIENINKKIQEVKFNDTPFINNKDFNLLSKASFYLLTKNLSSVKNIDVISLLNNLDRQTIKDFINTIITDVSVEKGKIYNITFKNGIVHHFIYKNEHKI

SEQ ID NO: 1570 - protein, 564 aa, Unknown
  Description of Unknown: Integrase B1571 sequence
  PTHR30461:SF3,SM00857,G3DSA:1.10.10.2600,IPR036162,PF13408, PS51737,IPR025827,G3DSA:3.40.50.1390,IPR006119,IPR038109, PF07508,IPR011109,SSF53041,PF00239,PTHR30461, PS51736,Coil,cd00338
MKSMKFPIDLSMLTEEEIDQFRQDPSTLFEGDTDVSLYLRFSSERQREQSIEGQLRDCRSFCKVNRYRIAAIYVDRATTARKDVEKRIHFQEMIRDSEKKPWKYVIVWKLDRFARNRTDSALFKFRLRKNGVRVISATEAISEKPEGIILEAVLEGMAEFYSADLSQKITRGMRESALKCHSIGGHVPLGYKIEDHKLVVDPNTAHIVQEAFQLYANGETVAEICRMFNTKGYRTAKGAEFNRNSFKSMFRNERYIGVYTYRDIRIEGGVPAIIDKELFETVSHRLSVNAEAPARGKAKVDYLLAGKLFCGHCGGSMNGESGTSKTRAVHNYYTCYSRKRHHSCDKRPLKKEWIERIVAQDAMELMTDEVIEELADMAMAQTDQDLKENTRIPELTERKKEIESGIANITKAIEKGIASDSLMERLVELEKDKKKILRLLEEEEKYVCRIDREQIIFWLEKFKGGNLEDEGFRRIIIDLIVNSVTVWDEPDGFRITTAYNLTSCKNKTYRVSPSSGKGFGFEGSESTIKSREIKRFRGFLQLFGEIYMDANRAFPANFGDFREY

SEQ ID NO: 1571 - protein, 564 aa, Unknown
  Description of Unknown: Integrase B1572 sequence
  PTHR30461:SF3,SM00857,G3DSA:1.10.10.2600,IPR036162,PF13408, PS51737,IPR025827,G3DSA:3.40.50.1390,IPR006119,IPR038109, PF07508,IPR011109,SSF53041,PTHR30461,Coil, PS51736,cd00338,PF00239
MKKFPIDLSCLTEEEISQFQEDPYTLYNGDQDVALYLRYSSTGQSDQSIEGQLRDCRTFCKANHYRIVAIYVDRATTARKDVEKRVHLMEMVADSAKQNWEYVIVWKLDRFARNRNDSAIMKMRLRKNGVKVLSATEHLTDSPESIILESVLEGMAEFFSAELSQKVTRGMRESALKCHSVGGHIPLGYKVENHKLVVDPDTAHIVQEAFSLYANGESVADICRKFNSAGYKTAKNTEFNRSSFKAMFRNTRYIGTYTYKDIVIENGIPAIIDKELFETVQRRLSKTATAPARGKAKVDYLLSGKLFCGHCGASMNGESGAGRHGKVYHYYSCYTKKRKLGCDKRPLKKDYIEGIVARDALNLLTDQLIDEIADMAIRQSEQDLINDTHIPQLTAQLSEVEKSITNITAAIEKGIASETLMNRLVQLEHEKKTLNKEIKAEEKFVYRIDRGQIVFWLSQFKYGNIEDEDFRRRLIDLLVNSVTVWDEPDGYKITTAYNLTSCKTKTFRVEKNPAAEEATGFDFGESECAKKTRNRKASGLFACISCCFLPLLFSDPNADPNGSG

SEQ ID NO: 1572 - protein, 564 aa, Unknown
  Description of Unknown: Integrase B1573 sequence
  IPR036162,PS51737,IPR011109,PTHR30461,PS00397, PF00239,G3DSA:1.10.10.2600,IPR006119,SSF53041,cd00338, SM00857,IPR025827,IPR038109,PS51736,IPR006118, PF13408,G3DSA:3.40.50.1390,PF07508,Coil
MPRAQKAAIYCRVSTLHQVDKDSLPMQRQDMINYAKYVLGIEDYEVFEDAGYSGKNTDRPAFQEMMERIERGEFSHVLVWKIDRISRNLLDFATMYARCKKLGVTFVSKNEQFDTSTAMGEAMLKIILVFAELERNMTSERVSSTMNARAAEGKWNGGRVPFAYRYDRETDSFSIRNDEAKVALELKDTYLRTHSLTYTARLLNEAGRRTRRGYAWTPATVAIILRSPFYRGTYRYNYRDESETTFSFKGRNEWIMCAKHHPPLFSEADCRQIDFWLTKNRRQHGKATHVQRKLVHVFAGLIRCGFCGSNYIASIDRVRASGYQPSMYNCGGRRQKGMCKNRYVTDIRIGGFIFNYISNVIRLRDAFRPQWSKARIQRFLLHGDDFCGASLSDDTLRRVRAALLGSRLSTAEYQPADEQHDDSPTQTHKANLQAELEKNRRALSRLMHLFLYAEDEMPQADFLREKKHLQDTIARLQAELEKARQSSVFASSLTDEEFLDKAARLLFQSAMVRGGIDFPGLAMRVGNLELKNFVNAVIGQIIVLDGRVTQITFRNGEVHTFLYA

SEQ ID NO: 1573 - protein, 564 aa, Unknown
  Description of Unknown: Integrase B1574 sequence
  cd03768,PTHR30461:SF3,SM00857,IPR006118,G3DSA:1.10.10.2600, IPR036162,PS51737,G3DSA:3.40.50.1390,IPR006119,IPR038109, PF07508,IPR011109,SSF53041,PTHR30461,PS00397, PS51736,Coil,PF00239
MEKKQKSALYVRVSTTHQIDKDSLPLQRSDLINYTKYVLGINDFEIFEDAGYSGGTTDRPAYQDMMNRIKMGEFTHLIVWKIDRISRNLRDFSDMYDELKKYNVTFISRNEQFDTSTAMGEAMLKIILVFAELERKLTGERVFSVMISRAQKGLWNGATVPLGYEWDPETKFPRPCDKEAKIVQYIFDQYEEIKSTTKVAKKLNIENIPTKRNGTWTPRTVGSILTNPFYIGTYRYNTKTKKTRRWKDKSEWVVLENNHQAIVNTEQFERVSQIIQNNYKGDKNYQRSSTNVHILSGLASCHKCGKKMHSGLDRARKDGFTPSRYTCYAFNVNYTCANYSSDLAILPSLINYIANYMTLQERITARHSLRDMESILLRGKYFEDIDHIEKQDLKNTYDLLINNKMVTYNSFEEKNKEAIISQNVIYEAEKEKYEKALKRLDDLYLYDVNSMSQKDFVIKRKEISDKIETINKKIQEVKFNDTPFINNKDFNLLSKASFYLLTKNLSSVKNIDVISLLNNLDRQTIKDFINTIITDVSVEKGKIYNITFKNGIVHHFIYKNEHKI

SEQ ID NO: 1574 - protein, 564 aa, Unknown
  Description of Unknown: Integrase B1575 sequence
  IPR036162,PS51737,IPR011109,PTHR30461,PS00397, PF00239,G3DSA:1.10.10.2600,IPR006119,SSF53041,cd00338, SM00857,IPR025827,IPR038109,mobidb-lite,PS51736, IPR006118,PF13408,G3DSA:3.40.50.1390,PF07508,Coil
MPRAQKAAIYCRVSTLHQVDKDSLPMQRQDMINYAKYVLSIKDYEVFEDAGYSGKNTDRPAFQEMMERIERGEFSHVLVWKIDRISRNLLDFATMYAKCKKLGVTFISKNEQFDTSTAMGEAMLKIILVFAELERNMTSERVASTMNARAAEGKWNGGRVPFAYAYDRETDSFSIRDDEAKVALELKDTYLRTHSLTYTARLLNEAGRRTRRGYAWTPATVAIILRSPFYRGTYRYNYRDESEVTFSFKAQKEWILCAKHHPPLFSEADCRQVDYWLDKNRRHHGKATHVQRKHVHIFAGLIRCGVCGSNYAASVDRARPSGYQPSMYNCGGRRQKGTCRNRYVTDIRIGGFVFNYISNVIRLRDAFRLQWSKARIQRFLLHGDAFHGALLSDDTLRHVRAALLGSHAGTAEYHPADEQRDGSAEQARKSNLQAELEKNRRALSRLMHLFLYAEDELPQADFLREKRYLQDNISRLQGELEKEQQPSVFASSLTDEDFLRKAAHLLFQSAMTRGGIDFPELAMHVGNLELKNFINTIIKQIVVLDGHVTQITFANDEIHTFLYH

SEQ ID NO: 1575 - protein, 564 aa, Unknown
  Description of Unknown: Integrase B1576 sequence
  cd03768,PTHR30461:SF3,SM00857,IPR006118,G3DSA:1.10.10.2600, IPR036162,PS51737,G3DSA:3.40.50.1390,IPR006119,IPR038109, PF07508,IPR011109,SSF53041,PTHR30461,PS00397, PS51736,Coil,PF00239
MEKKQKSALYVRVSTTHQIDKDSLPLQRSDLINYTKYVLGINDFEIFEDAGYSGGTTDRPAYQDMMNRIKMGEFTHLIVWKIDRISRNLRDFSDMYDELKKYNVTFISRNEQFDTSTAMGEAMLKIILVFAELERKLTGERVFSVMISRAQKGLWNGATVPLGYEWDPETKFPRPCDKEAKIVQYIFDQYEEIKSTTKVAKKLNIENIPTKRNGTWTPRTVGSILTNPFYIGTYRYNTKTKKTRRWKDKSEWVVLENNHQAIVNTEQFERVSQIIQNNYKGDKNYQRSSTNVHILSGLASCHKCGKKMHSGLDRARKDGFTPSRYTCYAFNVNYTCANYSSDLAILPGLINYIANYMTLQERITARHSLRDMESILLRGKYFEDIDHIEKQDLKNTYDLLINNKMVTYNSFEEKNKEAIISQNVIYEAEKEKYEKALKRLDDLYLYDVNSMSQKDFVIKRKEISDKIETINKKIQEVKFNDTPFINNKDFNLLSKASFYLLTKNLSSVKNIDVISLLNNLDRQTIKDFINTIITDVSVEKGKIYNITFKNGIVHHFIYKNEHKI

SEQ ID NO: 1576 - protein, 564 aa, Unknown
  Description of Unknown: Integrase B1577 sequence
  PTHR30461:SF3,SM00857,G3DSA:1.10.10.2600,IPR036162,PF13408, PS51737,IPR025827,G3DSA:3.40.50.1390,IPR006119,IPR038109, PF07508,IPR011109,SSF53041,PF00239,PTHR30461, PS51736,Coil,cd00338
MEVIKYVVAYMRYSSEGQRDGYSIEAQKAAIEEFCKRLGYIIVHFYTDEAKTGTLDNREAFQQMIADSASGNFQAVIVHKFDRFSRDKYDNAIYKRELRNNGVRVISVLEPLDDSPESLILETLLEGMAQYYSENLAREVKKGQTQKALLAQHCGGIVPYGYSVNPDTSEYEIVPSEAEVVRKIYELYNNGTPTQEIAGHLNALGLKTRLNKTKGGVPFTSQMVRGIIANEKYNGTFIYRKTKRIRAKGRYKTVKQNDDEVIVCEDKVPRIVDNETWVTANKRLRSRTYNTTRAKVEYLLTGLMFCGECGSPFVGGGSVPRYDKEGNEVARYNYYICSKKRKTHDCKCSQVSKERIEDAVIKGIIDYCYNDKSIKIFADDFSQWLETHNNADKAEIARYKSELKKLEQQKGRLVSLALEGVLTPVETKDRKRELEAKITSLQAKLQSMEKTNLPSKKDIMRFMEDTRRDIVNGTFDDYAGLIRQHLARIDVYNGYQIITLKKVPYLTEPDENDGISAYHSPAKSISDSECKPLHYHSVSLMDLPKELTITLRLEKGSHEAVFVA

SEQ ID NO: 1577 - protein, 564 aa, Unknown
  Description of Unknown: Integrase B1578 sequence
  PTHR30461:SF3,SM00857,G3DSA:1.10.10.2600,IPR036162,PF13408, IPR025827,PS51737,G3DSA:3.40.50.1390,IPR006119,IPR038109, PF07508,SSF53041,IPR011109,PF00239,PTHR30461, PS51736,Coil,cd00338
MKKFPIDLSCLTEEEISQFQEDPYTLYNGDQEVALYLRYSSTGQSDQSIEGQLRDCRAFCKANHYRIVAIYVDRATTARKDVEKRVHLMEMVADSAKQNWEYVIVWKLDRFARNRNDSAIMKMRLRKNGVKVLSATEHLTDSPESIILESVLEGMAEFFSAELSQKVTRGMRESALKCHSVGGHIPLGYKVENHKLVVDPDTAHIVQEAFSLYANGESVADICRKFNSAGYKTAKNTEFNRSSFKAMFRNTRYIGTYTYKDIVIENGIPAIIDKKLFETVQQRLSKTATAPARGKAKVDYLLSGKLFCGHCGASMNGESGAGRHGKVYHYYSCYTKKRKLGCDKRPLKKDYIEGIVARDTLNLLTDQLIDEIADMAIRQSEQDLINDTHIPQLTAQLSEVEKSIMNITAAIEKGIASETLMNRLVQLEHEKKTLNKEIKAEEKFVYRIDRDQIVFWLSQFKHGNIEDEDFRRRLIDLLVNSVTVWDEPDGYKITTAYNLTSCKTKTFRVDKNPAAEEATGFDFGESKCTKSHRNRLISMTFAFHKFRFLVLLFSDPNADPNGSG

SEQ ID NO: 1578 - protein, 564 aa, Unknown
  Description of Unknown: Integrase B1579 sequence
  SM00857,G3DSA:1.10.10.2600,IPR036162,PF13408,IPR025827, G3DSA:3.40.50.1390,PS51737,cd03770,IPR038109,IPR006119, PF07508,IPR011109,SSF53041,PF14287,PTHR30461, PS51736,IPR025378,PF00239
MATANYIKGQNEAKITALYCRLSQDDGREGESNSISNQKEILLAYAQRNNFPNPQFFTDDGFSGTTFDRPSFIQMENLVEQGVVDTIIVKDLSRFGRNYLDVGNYLEIKYPTLGVRFIAIQENVDTLKETGTEMMPFNNIFNEWYAAQTSKKIRAVWKNKAANGKRVSSSVPFGYVRNPQDKEEWLVDGAAAEVVRKIYALCLDGRGPSQIARQLEQEKVLIPTAYYASLGRKTRKQYTDPYAWDQKTVAGILVNQQYTGCTVNFMTTTVSYKVHKTVYKPKDEWQIIPNTQPAIIDEDTWKRVQELREHRIRPTATGRTSLFSGKVFCADCGSKLHFCAAKSLNTNQEHYRCANYKSGRGSCQIHFIRNVVLEKIVLEAINSLADFVRCYEPVFLYLMAQKDIVSKRTETSKLRTAIESGKRRIQDLDKLIERIYEDQVLGNISAERYARMSVNYENEQRTLINKVAEGEKKLACIEQTSLDLKTLLKVLRSSTSFEELTPTLVNSLIRRIEVHNNDKSSGHCYVKVDIYFTAIGLIDIPTEDEIKSLMAKIKANPQEYRLTA

SEQ ID NO: 1579 - protein, 564 aa, Unknown
  Description of Unknown: Integrase B1580 sequence
  PTHR30461:SF3,SM00857,G3DSA:1.10.10.2600,IPR036162,PF13408, PS51737,IPR025827,G3DSA:3.40.50.1390,IPR006119,IPR038109, PF07508,IPR011109,SSF53041,PF00239,PTHR30461, PS51736,Coil,cd00338
MRVSVNLNAQKPDTTTNAVIYARYSSHGQTEQSIEGQLAKGHEYAAAQGYTVVHEYIDRAMTGRNDNREAFQKMLSDTGKHQFQVVIVWKVDRFGRNREEIAFNKHTCKKNGVRVEYVAESLPNSPEAVILESVLEGMAEYYSIQLSQNIRRGQLESAKKCQCVGGSVPLGYTLDSDKHFVIDPQTAPVVKKIFDLYAEGATISEITGQLNEQGIRTARKQLFTKNSLTKLLKNEKYIGVYTYKDIVRVEGGVPAIVDESTFDRVQELLKINRRAPSHTWTKVEYLLTDKLFCGHCGSPMVGESGFSHTGAKYSYYGCIKRRREKACDKKPVRQDWIEALVLDETVKLLHDDELMEYIIDRTWEYYQVTDKVQEEKAVLEAQLAEVDKAINNLVRAIEAGIFNAATKSRMDELDAQKAALTASLADLELTSGIRITRDHIEYFLLRLRDLDVKDRECQKRLVQTFVNAVFIYDDGRVKITYNYSGQSSTITLNQIASAEKGKGFVCCLPCSTSSPRFPRGVAALFLFWGKSGVNRLPISAVLCNNGSEPLRGWCWMCRAAIAPG

SEQ ID NO: 1580 - protein, 564 aa, Unknown
  Description of Unknown: Integrase B1581 sequence
  PTHR30461:SF3,SM00857,G3DSA:1.10.10.2600,IPR036162,PF13408, PS51737,G3DSA:3.40.50.1390,IPR025827,IPR006119,IPR038109, PF07508,IPR011109,SSF53041,PF00239,PTHR30461, PS51736,Coil,cd00338
MKKFPIDLSCLTEEEISQFQEDPYTLYNGDQNVAIYLRYSSTGQSDQSIEGQLRDCRTFCKANHYRIVAIYVDRATTARKDVEKRVHLMEMISDSAKQNWEYVIVWKLDRFARNRNDSAIMKMRLRKNGVKVLSATEHLTDSPESIILESVLEGMAEFFSAELSQKVTRGMRESALKCHSVGGHIPLGYKVENHKLVVDPDTAHIVQEAFSLYANGESVADICRKFNSAGYKTAKNTEFNRSSFKAMFRNTRYIGTYTYKDIVIENGIPAIIDKELFETVQRRLSKTATAPARGKAKVNYLLSGKLFCGHCGASMNGESGAGRHGKVYHYYSCYTKKRKLGCNKRPLKKDYIEGIVARDALNLLTDQLIDEIADMAIRQSEQDLINDTHIPQLTAQLTEVEKSITNITAAIEKGIASETLMNRLVQLEHEKKTLNKEIKAEEKFVYRIDRDQIVFWLSQFKYGNIEDEDFRRRLIDLLVNSVTVWDEPDGYKITTAYNLTSCKAKTFRVEKNPAAEEATGFDFGESECTTRRKRRIACDEFFRFITKLIAHSLCCSSLPNRSPA

SEQ ID NO: 1581 - protein, 564 aa, Unknown
  Description of Unknown: Integrase B1582 sequence
  PTHR30461:SF3,IPR036162,PS51737,IPR011109,PTHR30461, PS00397,PF00239,G3DSA:1.10.10.2600,IPR006119,SSF53041, cd00338,SM00857,IPR025827,IPR038109,PS51736, IPR006118,PF13408,G3DSA:3.40.50.1390,PF07508,Coil
MPRAQKAAIYCRVSTLHQVDKDSLPMQRQDMINYAKYVLSIEDYEVFEDAGYSGKNTDRPAFQEMMERIEHGEFSHVLVWKIDRISRNLLDFATMYAKCKKLGVTFISKNEQFDTSTAMGEAMLKIILVFAELERNMTSERVTATMIARAADKQWNGGRVPYGYHYDKASKTFSIREDEAVVVRQIYDLYAKLKSLQYTADALNRDGLKTRRGYEWSAATCHIILSSPFYLGTLRYNYRDESEKTFSFKDKSEWVLVPNHHDPLVTQEQYDYCQYWLAKNAKRNGHQHAQRAHIHIFAGLIHCGYCGALMVASQGARHANDYRPSIYVCGSKRQHKNCPNKFTYDPEVGNFVFRYISNMIHLKAIFKPSMREQRIERVLTDGLPGLHIRDASSLSALRRMLLAQSDARTYSSTQEAPQKQNQKLMKEKTALLAEIRKQQRALSRLDELFLFADSPMPQKDYLLKKQQILDKIVACQEQLHRLRQDSIFTSTLSDEQFVFQASSLLLQKALQEQRIDIQQLTADVGRPALKDFVGFVITSIVSKDGKVMEITFRNGMTHTFQYDA

SEQ ID NO: 1582 - protein, 564 aa, Unknown
  Description of Unknown: Integrase B1583 sequence
  SM00857,G3DSA:1.10.10.2600,IPR036162,PF13408,PS51737, IPR025827,G3DSA:3.40.50.1390,IPR006119,IPR038109,PF07508, IPR011109,SSF53041,PF00239,PTHR30461,PS51736, Coil,cd00338
MNIYHTRERLRTRSIYDLNLRVAFYARVSTDSEDQQVSIEHQTQYYKEFIKSNRNWKFAKGYIDNGISGIQTKHREQFKEMLEDAKNGKFDMLITKEITRFARNTLDSIQYTRQMLSWGVCVWFQNDNINTIDEDSELRLTIMAGVAQDEVRKLSNRVKFGHKQSIKNGVVLGNSRIYGYDKKDGKLTINESEAQMVRMIFEDYASGEWTTPQLEKKLYNMGYRNYKGGKIDRNVIRHIIRNPKYKGYYAGGKVKIVDMFTKKQEFLPESEWVMFKDDGSHVPQIVDEEVWKKANEYIDARGEIVKTRRTSIKKSENVFTGMLICGNDGASYWLKQRTLRGKEDVKWVCSKKIKEGAASCDSFYIDDRELREVIAKLIRESSGDIEQIAEKFIKIYHSSMNQADASTEIKRLEKQINVAERKSDKLLEYNLDGAISDAVFIEKSQKLEAQIEEYKKQIEKLSTIQDDIVPIENQIRAIAHSIKQLDGISPDDITKTVVDSFLKKIVVNPIGEKEAKLVFYLKDGITTEMSFVSGKSMRCSVNLFKKMIEQQERQMSGSSQNEQY

SEQ ID NO: 1583 - protein, 564 aa, Unknown
  Description of Unknown: Integrase B1584 sequence
  PTHR30461:SF3,SM00857,G3DSA:1.10.10.2600,IPR036162,PF13408, IPR025827,G3DSA:3.40.50.1390,PS51737,IPR006119,IPR038109, PF07508,IPR011109,SSF53041,PTHR30461,PS51736, cd00338,PF00239
MARAAKQDSNSEIIDGVIYARYSEGPNQTEASIEGQVRECKEYAKRNGIRIINVYSDSKHTGTNDNRAEFQKMLRDSRRGGFSVVVVWKIDRFGRNRAEMAQNKALLKLQGVKVVSAKEYIPDSPEGIILESVLEGMAEYYSANLSQNIKRGMKENALHCKSNGSGKSLGYIVDKDGYFEIEPNEATIVKTIFQKYDEGMKIADIWREIVASGAKTKRGKDFTQYGISRVLSNRAYIGEYRYGDIVTPGGMPRIIDDDLFNRVQERRALSKKAPASRRSNSDVDFLLTGKVFCGHCKGTMRGMSGTSKTGRKFYYYACHDKIFKHNKCTKKNVKKEWLETEVTRITRDDILNKETIEFIADRVVEIQRQEQEDKSMLHYYEQQLRDTQSAINNIMKAIEAGIITSSTKSRLFELEEQKSIIEGEIEREKIITPVIEKEQVIFSLERFFGGDINNKEYQRNIIDMFVNKVILYDDKIIITYNISSQNEISVDVVEQAAFAALDECSSKFSLAPPAGACPCTQSALLYVGRFFYCRSSILTKIQPLFLRGGHFPSSFFCKHTKSPL

SEQ ID NO: 1584 - protein, 563 aa, Unknown
  Description of Unknown: Integrase B1585 sequence
  PTHR30461:SF3,IPR036162,PS51737,IPR011109,PTHR30461, PS00397,PF00239,G3DSA:1.10.10.2600,IPR006119,SSF53041, SM00857,IPR025827,IPR038109,PS51736,cd03768, IPR006118,PF13408,G3DSA:3.40.50.1390,PF07508,Coil
MDEKIVALYVRVSTGYQVDKDSLPFQKKELRGYCEHVLHIDKKRIEIFEDAGRSGKNTKRPAFERMMEKVKSGQVSHVIVYKIDRITRNLVDFSLMYDDFKYNNVTFISLNEQFDTSSAIGEAILKIILVFAELERKLTSERVKDVMIGRAQNKQWNGARVPYGWDWDAEKKCPVHSEKEAPYAKAMYRMYLDGGSSVTICDYNNSHNIPTKRGGEWTSKTVADFLRNPINKGDYRYNYRESARGKKKSDDEVIYIKGVFPPLIDPKIWDEVNRRMDANSQNRNTSVFHPIRKRCNVFAGLMICGKCGSGYQVKGKDSRKGDGFRPSSYACTGKYQKKNCDNLNVSDVKIGPFVLNYIAAMVDASKSRRFIKDCDSLEQVILSHISFSDVAGISASSLQDTLDLLFGRSGSELLSGKPVSSETADGSKTEELKEKLQRTDRALERLKKAYLFDDDGMDEKEFLEMKSKLEVDRIKLENSIKGLESSSISENVDQAAFLKSASQFLISHKINSGDYIDYSRLAALDEESMKAFVNSIIDHIVVLDKRITEIVFKNGLTHTLLYR

SEQ ID NO: 1585 - protein, 563 aa, Unknown
  Description of Unknown: Integrase B1586 sequence
  PTHR30461:SF3,IPR036162,PS51737,IPR011109,PTHR30461, PS00397,PF00239,G3DSA:1.10.10.2600,IPR006119,SSF53041, SM00857,IPR025827,IPR038109,PS51736,cd03768, IPR006118,PF13408,G3DSA:3.40.50.1390,PF07508,Coil
MDEKIVALYVRVSTGYQVDKDSLPFQKKELRAYCEHVLHINKKRIEVFEDAGRSGKNTKRPAFERMMEKVKSGQVSHVIVYKIDRITRNLVDFSLMYDDFKYNNVTFISLNEQFDTSSAIGEAILKIILVFAELERKLTSERVKDVMIGRAQNKQWNGARVPYGWDWDAEKKCPVHSKKEAPYAKAMYQMYLDGGSSVTICDYNNSHNIPTKRGGEWTSKTVADFLRNPINKGDYRYNYRESARGKKKSDDEVIYIKGVFPPLIDPNIWDEVNRRMDANSQNRNTSVFHPIRKRCNVFAGLMICGKCGSGYQVKGKDSRKGDGFRPSSYACTGKYQKKNCDNLNVSDVKIGPFMLNYIAAMVDASKSRRFIKDSESLERVILSHISFSDVAGISVSSLQDTLDLLFGRSGSELLSGKPISSGATDESKTTELKEKLQRTDRALERLKKAYLFDDDGMDEKEFLEMKSKLEVDRIKLENSIKGLESSSISENVDQAAFLKSASQFLISHKINSGDYIDYSRLAALDEESMKAFVNSIVDHIVVLDKRITEIVFKNGLTHTLLYR

SEQ ID NO: 1586 - protein, 563 aa, Unknown
  Description of Unknown: Integrase B1587 sequence
  PTHR30461:SF3,SM00857,G3DSA:1.10.10.2600,IPR036162,PF13408, IPR025827,G3DSA:3.40.50.1390,PS51737,IPR006119,IPR038109, PF07508,IPR011109,SSF53041,PF00239,PTHR30461, PS51736,Coil,cd00338
MEGKPDMNIIPIDLSALTDAEKALFFEYRDVLSASWTEVVCFYLRYSSDRQTEQSIEGQLRDLLMYCRLHAYRVAAIYVDRAISAHASMEKRPAFQMMLADSATSVWKTVLVYKLDRFARNREDSMVARIRLRKNGCRVESAKENISKNPEGIILESVLEGINEYYSEELRQKVMRGNRESAMKGQTLGGVTPFGYKTENKRLVPDPMTAPVVQEIFTRYAAGDRLVSIARDLNQRGYRTTKGHPFGKSSFKTIFRNTRYIGVYKYMDITKEDPSLRIVSDEQWEAVQSKLSDTASAPGRGKARNPYLLSGKLFCGHCGAPMVGECGRGRHGQTYYYYSCANRKGKKSCDKKPVPKEWIEHIVAEDAAALLTDDFIEDVAEKAAQQSEADFRANTRIPALESQIADIDSRIRNLTKAIETSGSALDVLVSRLQELTTQKSALEAELRSESAGVIHLTKEMVIFFLEGVRDKIIQPENRDAILIRMFVNSVMLYDDGPGFFKFETAYNLTGIPQKTYKIPINSASAELQKCSDFGRSGVPLDANSNQIQVVGLIFIQTKRHALP

SEQ ID NO: 1587 - protein, 563 aa, Unknown
  Description of Unknown: Integrase B1588 sequence
  PTHR30461:SF3,IPR036162,PS51737,IPR011109,PTHR30461, PF00239,G3DSA:1.10.10.2600,IPR006119,PF14287,SSF53041, IPR025378,SM00857,IPR025827,cd03770,IPR038109, PS51736,mobidb-lite,PF13408,G3DSA:3.40.50.1390,PF07508,Coil
MNQSNQIRKTALYCRLSQDDGIEGDSNSIQNQKAILQKFAEDHHFPSPCFYVDDGFSGGTFQRPAFQQMISDMENGEIGIIVTKDLSRLGRNQLHTGLYIEERFPMFGVRYIAINDNVDTDSSESNNLMPFKNLFNEWFIRDTSRKIRAVLKAKAERGERLGTRTPYGYRKDPDTKKLIVDEEAAAIVRRIFAMCAGGSGPSQIARILKKEQILTPTMYAYTRYGITHTCLDTAHPYNWSDSAIANLLENEIYLGNTVNMKYSTKSYKDKRRVEHPREECMVFENTHPALITREVWDMVQRVRKNKRRLTKMEEQSKYSGLVFCADCGSNMVLHRAHTMSASYNHFTCRTYKKDGEACTGHYIRECVLDEIVLEDLRRVTSAAREHPEKFAAYIGSKQSTELQREIRRQEKELAAMRKRKMELDTIFKKLYEDSVLGRITTEQFQMLSGSYTEEQSRITAGIPQKESEIQCLRETVSGTDSFLDKAKRYTDITELTPELLRLFIEKIVVHEKEVKWSKHAPQTVEIYYNGIGYVGSGQQDVEEALEAPESLQTQDTEKPRQAS

SEQ ID NO: 1588 - protein, 563 aa, Unknown
  Description of Unknown: Integrase B1589 sequence
  PTHR30461:SF3,SM00857,G3DSA:1.10.10.2600,IPR036162,PF13408, IPR025827,G3DSA:3.40.50.1390,PS51737,IPR006119,IPR038109, PF07508,IPR011109,SSF53041,PTHR30461,Coil, PS51736,cd00338,PF00239
MRKKFNIDLSMLTPEEQQQFRDDPTTLTKGEVNVALYLRFSSERQKEQSIEGQLRDCIAYCKRKSFRIVAIYVDRATTARKDVEKRVHFQEMISDSAHHLWNFVVVWKLDRFARNREDSAVFKMRLRKNGVRVKSATETISDNPEGIILESVLEGIAEYYSADLSQKITRGLRESAMKGHCVGGHVPLGYKIEDHRLVINPETAHIVQEAFQLYANGESMAEICRIFNGKGYRTAKNSEFNRSSFKSMFRNVRYIGTYIYKDIKKENAIPAIIDKGLFETVQRRLSLAADAPARGKAKVDYLLSGKLFCGHCGATMNGESGTSKTGAIHNYYTCYSRKRRKGCDKKPLKKDFIERIVAQDAMALLTNDVIEELADMAMSQADRDLKENTRIPELSIRLTEIEQGINNITKAIEKGIASDTLLNRLTELEKEKKDLTSQLREEEKYICRIDRDQIIFWLTKFQGGDIEDEDCRRRIIDLLVNSVTVWDEPDGYKITTAYNLTSCKTKTFRVSNNADSPSGEGFGFGELSSTKKRTCFSAGPFSMKFISAQRTKYLRPEIFAPQM

SEQ ID NO: 1589 - protein, 563 aa, Unknown
  Description of Unknown: Integrase B1590 sequence
  PTHR30461:SF3,IPR036162,PS51737,IPR011109,PTHR30461, PS00397,PF00239,G3DSA:1.10.10.2600,IPR006119,SSF53041, cd00338,SM00857,IPR025827,IPR038109,PS51736, IPR006118,PF13408,G3DSA:3.40.50.1390,PF07508
MESSKAKKAVLYVRVSTQHQVDKDSLPMQKQDLTSYCKYVLGINDFVILEDAGYSAKNTDRPAFQEMMSRIRTGEFTHILVWKIDRISRNLLDFASMYAELKELGITFISKNEQFDTSSAIGEAMLKIILVFAELERNMVSERVSAVMLDRAKNGAWNGGRSPTGYRIENGKYVIHEEEAAIVRMLFDECEHGKSLIQLAKVINGMGVKPRYGKIWHESAIRKILTNKTYYGALEYSTKKGGEVLIENHHQPLITYEQYEKCRSIMSSRSRKKGFAAKSYTRKHTHIFAGLVTCGYCGGHLVAQLDKARREGDYRPSYYICTGRRNLKICKNKLVPDMIIGQFVLRYLSNLLRAYRHFNENTTLEDVRQTILSGLEAFGVIGISEKGLSETFNAYLNSDGTQNAFTYRPKLELGGDQNSEASALVNTISKESRALERLTQLYLYSESPISESEYSKERKALEKRIYDAKVRLERIQVAEVQCNKLKDEWRTQASYLILTKELMDEQQTDFSLLLRALDKQVLKDFVQATIQNIVIKDRRIEQITLMSGITHEFVYCNETKKEG

SEQ ID NO: 1590 - protein, 563 aa, Unknown
  Description of Unknown: Integrase B1591 sequence
  PTHR30461:SF3,SM00857,G3DSA:1.10.10.2600,IPR036162,PF13408, IPR025827,G3DSA:3.40.50.1390,PS51737,IPR006119,IPR038109, PF07508,IPR011109,SSF53041,PTHR30461,Coil, PS51736,cd00338,PF00239
MRKKFNIDLSMLTPEEQQQFRDDPTTLTKGEVNVALYLRFSSERQKEQSIEGQLRDCIAYCKRKSFRIVAIYVDRATTARKDVEKRVHFQEMISDSAHHLWNFVVVWKLDRFARNREDSAVFKMRLRKNGVRVKSATETISDNPEGIILESVLEGIAEYYSADLSQKITRGLRESAMKGHCVGGHVPLGYKIEDHRLVINPETAHIVQEAFQLYANGESMAEICRIFNGKGYRTAKNSEFNRSSFKSMFRNVRYIGTYIYKDIKKENAIPAIIDKGLFETVQRRLSLAADAPARGKAKVDYLLSGKLFCGHCGATMNGESGTSKTGAIHNYYTCYSRKRRKGCDKKPLKKDFIERIVAQDAMALLTNDVIEELADMAMSQADRDLKENTRIPELSIRLTEIEQGINNITKAIEKGIASDTLLNRLTELEKEKKDLTSQLREEEKYICRIDRDQIIFWLTKFQGGDIEDEDCRRRIIDLLVNSVTVWDEPDGYKITTAYNLTSCKTKTFRVSNNADSPSGEGFGFGELSSTKSKIRTFVRRDRGSDFSCLQLVLSRNEFKKEDA

SEQ ID NO: 1591 - protein, 563 aa, Unknown
  Description of Unknown: Integrase B1592 sequence
  PTHR30461:SF3,SM00857,G3DSA:1.10.10.2600,IPR036162,PF13408, IPR025827,G3DSA:3.40.50.1390,PS51737,IPR006119,IPR038109, PF07508,SSF53041,IPR011109,PF00239,PTHR30461, PS51736,Coil,cd00338
MNREGKKCVLYPRVSTEMQVDGYSLEGQKNSLKRFADREEMEIVGIYEDAGKSGKSIDGRPAFKKMLSDIKNGLEIDYILVYKLSRFGRNAADILNSLEFVQSYGINLICIEEGIDSSQTSGKLLISVLSAVAEIERENIIEQTMNGRREKARQGGWNGGFAPYGYYLKDNQLLIEETEAEAIRIIFDKFANSDVGLGGVAKYLNLQGIKKIPRQNGTLETWSSHFIRLILDNPVYCGKIAYGRRTREKVKGTKNEYKQVHTDDYILEDGQHEGIVSEELWQKAHTKRMATGIKQPSKIGKDRSHLLTGILKCPICGSSMYTNKHAWTNKDGTYKEVYYYICGRNKQERGHHCDYKASLRKTDIEPLVIEAVKELVSDKYFAKEIEKRIGVQTDTTAIDKELANYESKLKEVDLNKARLEREIDNLPIDARFRERKIHDMTLRLDGLYDTIVELEERIEDAKLRKSSIEMETITLDNIYKLMLNFGKLYDIISDEEKKSLITYLIKEIQIYPNGESEQPLKSIEFNFPIYRDGQEVRRLLWEKGNTVETVVKLVRKIKDSEEM

SEQ ID NO: 1592 - protein, 563 aa, Unknown
  Description of Unknown: Integrase B1593 sequence
  PTHR30461:SF3,IPR036162,PS51737,IPR011109,PTHR30461, PS00397,PF00239,G3DSA:1.10.10.2600,IPR006119,SSF53041, cd00338,SM00857,IPR025827,IPR038109,PS51736, IPR006118,PF13408,G3DSA:3.40.50.1390,PF07508,Coil
MESSKAKKAVLYVRVSTQHQVDKDSLPMQKQDLTSYCKYVLGINDFVILEDAGYSAKNTDRPAFQEMMSRIRTGEFTHILVWKIDRISRNLLDFASMYAELKELGITFISKNEQFDTSSAIGEAMLKIILVFAELERNMVSERVSAVMLDRAKNGAWNGGRSPTGYRIENGKYVIHEEEAAIVRMLFDECEHGKSLIQLAKVINGMGVKPRYGKVWHESAIRKILTNKTYYGALEYSTKKGGEVLIENHHQPLITYEQYEKCRSIMSSRSRKKGFAAKSYTRKHTHIFAGLVTCGYCGGHLVAQLDKARREGDYRPSYYICTGRRNLKICKNKLVPDMIIGQFVLRYLSNLLRAYRHFNENTTLEDVRQTILSGLEAFGVIGISENGLSETFNAYLNSDGTQNAFTYRPKLELGGDQNSEASALVNTISKESRALERLTQLYLYSESPISESEYSKERKELEKRIYDAKVRLERIQVAEVQCNKLKDEWRTQASYLILTKELMDEQQTDFSLLLRALDKQVLKDFVQATIQNIVIKDRRIEQITLMSGITHEFVYGNETKKEG

SEQ ID NO: 1593 - protein, 563 aa, Unknown
  Description of Unknown: Integrase B1594 sequence
  PTHR30461:SF3,SM00857,G3DSA:1.10.10.2600,IPR036162,PF13408, IPR025827,PS51737,G3DSA:3.40.50.1390,IPR006119,IPR038109, PF07508,IPR011109,SSF53041,PF00239,PTHR30461, PS51736,Coil,cd00338
MKKTKTKCYLYTRVSTSMQVDGYSLDAQRDKLRKYAEYEDMVVAGEYSDEGFSGKNIQGRHEFQRMLQDIQDCKDGVEYVLVFKLSRFGRNAADVLNSLQLMQDFGVNLICVEDGIDSSKDSGKLMISVLSAVAEIERENIRTQTMAGREQKAREGKWNGGFAPYGYRLEKGELLIAEDEVDVIRTIFDRYIHTNDGVSGVAKYLNRQGFVKKLRQNGTIPGFSASFVKSIIDNPVYMGKIAYGRRRTEKKIGTRNEMHVVEQSEFPVYEGKHEAIISEEDWNLAQEKRKINAYRRGKVNDPTHAHILSGILKCPCCGKSLYGNIAKAHSKDKKTRYYYYCKNTVTPTGHECTFRLNIEQMEMNRMVASIISAMVSDPRFADAIKAKIGSAVDTNDLEKQLEALQAQLRQTLGTKARLERQMDGLDVNDPYYDRKISDLQRRYDEQYGAIDEIEVQIDDVQSQIRSIRQEKISGDNIYRLLLAFDQVYEAASEVERKEFMRAFIERIELFPEKQPDGNWIRKIIFNFPVPVNGTEVKELPLENETIVEVIVCLSRDPGGSSNG

SEQ ID NO: 1594 - protein, 563 aa, Unknown
  Description of Unknown: Integrase B1595 sequence
  PTHR30461:SF3,IPR036162,PS51737,IPR011109,PTHR30461, PS00397,PF00239,G3DSA:1.10.10.2600,IPR006119,SSF53041, SM00857,IPR025827,IPR038109,PS51736,cd03768, IPR006118,PF13408,G3DSA:3.40.50.1390,PF07508,Coil
MDEKIVALYVRVSTGYQVDKDSLPFQKKELRAYCEHVLHINKKRIEVFEDAGRSGKNTKRPAFERMMEKVKSGQVSHVIVYKIDRITRNLVDFSLMYDDFKYNNVTFISLNEQFDTSSAIGEAILKIILVFAELERKLTSERVKDVMIGRAQNKQWNGARVPYGWDWDAEKKCPVHSKKEAPYAKAMYQMYLDGGSSVTICDYNNSHNIPTKRGGEWTSKTVADFLRNPINKGDYRYNYRESARGKKKSDDEVIYIKGVFPPLIDPNIWDEVNRRMDANSQNRNTSVFHPIRKRCNVFAGLMICGKCGSGYQVKGKDSRKGDGFRPSSYACTGKYQKKNCDNLNVSDVRIGPFVLNYIAAMVDASKSRRFIKDCESLERVILSHVSFSDVVGISASSLQDTLDLLFGRSGSELLSGKPISSGATDESKTTELKEKLQRTDRALERLKKAYLFDDDGMDEKEFLEMKSKLEVDRIKLENSIKGLESSSISENVDQAAFLKSASQFLISHKINSGDYIDYSRLAALDEESMKAFVNSIVDHIVVLDKRIAEIVFKNGLTHTLLYR

SEQ ID NO: 1595 - protein, 563 aa, Unknown
  Description of Unknown: Integrase B1596 sequence
  PTHR30461:SF3,cd00338,SM00857,G3DSA:1.10.10.2600,IPR036162, PF13408,PS51737,IPR025827,G3DSA:3.40.50.1390,IPR006119, IPR038109,PF07508,IPR011109,SSF53041,PTHR30461, PS51736,Coil,PF00239
MEIQVIEKTNGRINRVTGTTIRERLRVCAYCRVSTDNEEQLNSYQSQLKYYDEKINSKSEWQFAGIYADEAITGTLDFKRTEFMRMIADAMSGKIDMILTKSISRFARNTLDTLKYVRMLREKNIAILFEEENLNTTTGAGELMLTILSAMAQQESENISSHVLLGLKMKKDRGELIGYNGCYGYNYNIETKEITINEDEASIVRYMFERYVEGIGSSTIAKELTAKGIKTPKGGTKWCESTIRGILKSEKYIGDVLMGKTFTIDPISHKRLSNLGEVDKHYYKEHHEPIISKELFDRVQEIRTKRAGNRETGRRNDNYSKKYPFSSKLYCAFCGSLLTRRNWNANRSCEKAVWQCIKRAKQGKEECPHCKAIAEEIIEDCFVQGYRILCNDNRKIIETFLEKIENILKENTTETLVSKLEKDKEKINKKLNNLLELNLEGRINKEQYTLKFDELDTELIKINSKIENLLKETNRTESIKQRLNKFKSLFKNIDIIPKFDKDVFECLIDKVIIGEIQEEGTINPYTIRFICKNGSEINCKDEFTATSNKQHSNNTATREKQRM

SEQ ID NO: 1596 - protein, 563 aa, Unknown
  Description of Unknown: Integrase B1597 sequence
  PTHR30461:SF3,SM00857,G3DSA:1.10.10.2600,IPR036162,PF13408, IPR025827,G3DSA:3.40.50.1390,PS51737,IPR006119,IPR038109, PF07508,SSF53041,IPR011109,PF00239,PTHR30461, PS51736,Coil,cd00338
MKKFPIDLSCLTEEEISQFQEDPYMLYNGDQDVALYLRYSSTGQSDQSIEGQLRDCRAFCKANHYRIVAIYVDRATTAHKDVEKRVHLMEMVADSAKQNWEYVIVWKLDRFARNRNDSAIMKMRLRKNGVKVLSATEHLTDSPESIILESVLEGMAEFFSAELSQKVTRGMRESALKCHSVGGHIPLGYKVENHKLVVDPDTAHIVQEAFSLYANGESVADICRKFNSAGYKTAKNTEFNRSSFKAMFRNTRYIGTYTYKDIVIENGIPAIIDKELFETVQRRLSKTATAPARGKAKVDYLLSGKLFCGHCGASMNGESGAGRHGKVYHYYSCYTKKRKLGCDKRPLKKDYIEGIVARDALNLLTDQLIDEIADMAIRQSEQDLINDTHIPQLTAQLSEVEKSIMNITAAIEKGIASETLMNRLVQLEHEKKTLNKEIKAEEKFVYRIDRDQIVFWLSQFKYGNIEDENFRRRLIDLLVNSVTVWDEPDGYKITTAYNLTSCKTKTFRVDKNPAAEEATGFDFGESECANNRITDGDPVIFLCAGHPTAHKALVPCGAACRMV

SEQ ID NO: 1597 - protein, 563 aa, Unknown
  Description of Unknown: Integrase B1598 sequence
  PTHR30461:SF3,SM00857,G3DSA:1.10.10.2600,IPR036162,PF13408, IPR025827,PS51737,G3DSA:3.40.50.1390,IPR006119,IPR038109, PF07508,IPR011109,SSF53041,PF00239,PTHR30461, PS51736,Coil,cd00338
MKKTKTKCYLYTRVSTSMQVDGYSLDAQRDKLRKYAEYEDMVVAGEYSDEGFSGKNIQGRHEFQRMLQDIQDCKDGVEYVLVFKLSRFGRNAADVLNSLQLMQDFGVNLICVEDGIDSSKDSGKLMISVLSAVAEIERENIRTQTMAGREQKAREGKWNGGFAPYGYRLEKGELLIAEDEVDVIRTIFDRYIHTNDGVSGVAKYLNRQGFVKKLRQNGTIPGFSASFVKSIIDNPVYMGKIAYGRRRTEKKIGTRNEMHVVEQSEFPVYEGKHEAIISEEDWNLAQEKRKINAYRREKVNDPTHAHILSGILKCPCCGKSLYGNIAKAHSKDKKTRYYYYCKNTVTPTGHECTFRLNIEQTEMNRMVASIISAMVSDPRFANAIKAKIGSAVDTNDLEKQLEALQAQLRQTLGTKARLERQMDGLDVNDPYYDRKISDLQRRYDEQYGRIDEIEVQIDDVQSQIRNIRQEKISGDNIYRLLLAFDQVYEAASEVERKEFMRAFIERIELFPEKQLDGNWIRKIIFNFPVPVNGTEVKELPLENETMVEVIVCLSRDPGGSSNG

SEQ ID NO: 1598 - protein, 563 aa, Unknown
  Description of Unknown: Integrase B1599 sequence
  SM00857,G3DSA:1.10.10.2600,IPR036162,PS51737,G3DSA:3.40.50.1390, IPR006119,IPR038109,PF07508,SSF53041,IPR011109, PF00239,PTHR30461,PS51736,Coil,cd00338
MKSACPSHPESYVENPSLSKIHPKLRVCAYARVSTDKDDQANSYESQVKYFTDYIRTHEDWVLVGIYSDEGISGTSVKKRKEFNRMISDAENGFVDLILTKEVSRFARNTVDTLSITRNLKKHGVYVFFVNDNINTKDNDGELRLSIMATIAQEESRKTSERVKWGQKRQMEKGVVFGRDMLGYSVKNGKLYLKEDEAEIVKLIFHKFTNEGKGTTVIAWELVEEGIRPMRVKEWSNTEILRLLRNEKYVGDLCQKKTYTPDYLSHEKKYNRGEEDKVYIRDHHPEIAIIDRELWDRTQEELDRRSLAPEQKARYSNRYWCSGKIVCGACGGKFVGRKKHLKCGTVYQSWWCLAAIRHGSAKLDPYGDPIGCDGGSIGDRTLRALTAYAINLVSVHKEEIVKKLSKTMQDVLFSVPESNSKDKIQKKIEALRRKKINIIDLAAEGLISKEDMREQNAMYTKELEELSLQLIEDEKRAATNLDRAKRIEFYISRIQELTHVEPDNEEALHNLLKKAVVYRDKFVDLYLNFTSFYFRMWYQTSGRSDNFTVNVLGYKIIDIDTQF

SEQ ID NO: 1599 - protein, 563 aa, Unknown
  Description of Unknown: Integrase B1600 sequence
  PTHR30461:SF3,SM00857,G3DSA:1.10.10.2600,IPR036162,PF13408, IPR025827,G3DSA:3.40.50.1390,PS51737,IPR006119,IPR038109, PF07508,IPR011109,SSF53041,PTHR30461, Coil,PS51736,cd00338,PF00239
MPRKKKLQEVGGLRLVAYYRYSNGGQQTEQSIEGQRRDCEAYAKAHGYKIVHEYIDRHISGKSDSRPAFQQMISDSDSHLFDAVICWKTDRLARSRYDSIIYKTRLRRNGVKILYAAETVVDGPEGIIIEGLMESLAEYYSAELAQKLRRGQRESALKCIALGGNRSFGYDIGPDKHYCINEKQAPAVRYIFEQYAAGATAADIVRELTARGYRTSRGNPFNKNSICRIITNEMYLGVYKYADIRIEGGVPAMIDRELFNRCQTQLAFNRAHGGGKGAPRADYVLVGKLDCGLCGHAMKGASATGHTGSKHYYYTCTQHVEKKCPKTSIEKNYLEQVIVDGVAKYVLTPEKISQIVDCMMELQAKEQEPKGNPERDALEAELAECRRKQNNIIEAIEEGGSARLAARLRALEEQEAQLTFALGEINNAPAPPQFSREALTFMFEQFRREEDEVDEEYRRRILDTFVSSILLYEDRAEVKFNITDQKTGDFERVILPISANKKPPEDDDIPSNSEGSTALRLVEPACCRTLGLAFSKTASSVVSQTLLEYLSSTRQRKETPKIK

SEQ ID NO: 1600 - protein, 563 aa, Unknown
  Description of Unknown: Integrase B1601 sequence
  SM00857,G3DSA:1.10.10.2600,IPR036162,PF13408,PS51737, G3DSA:3.40.50.1390,IPR025827,IPR006119,IPR038109,PF07508, SSF53041,IPR011109,PTHR30461,Coil,cd00338, PF00239
MAYRKITDIKDTIGMRAVFYARVSTAEEEQLNAIELQIEENRGCIKDHGWKLVGEYIDRSKSGTMVKGRDDYQRLYEDLYEDLFDIVVIKDQERLQRNTLDWYLFINRVVQTGKLLFMYMDGKFYSPDDALITGVRAIIAEEFSRNLSKKLHNYHDHRIEKARQGQEIALQGSGNVYGWDKKDGKYYINPEQAKVRRLMCEGIMARKGSTLIAKELNDAGYRNTVGKPWKPMDIPKFVYDCKNVGTMIINKERHDFESKQTIKLPKEEWVYVENALPPIVTQEEWDLICKIHEERVIATGSDRRGKKTSGYSFSGKLVCGICGAPYWRKQRVSKDEYWVCSTKQTKGRRTRKRDSTMGKAGEINPLGCDNENISYNSLMEIMGVVSERLQANTDTIKHDMINWLTKLRKQLLEANGGHTEADLQRELSRKSKLLDAYLDGILNKQEYQKKAEELDERIIQLKAETEKNKANSGDIAEIDKVLANIDEEVSRYVDGNEKLKVEYLLEHLEQVQIFPDKVIVIVPILSEGIVVEKAQYVSREKWCRKDDNRKIAYRSPEPVWRIM

SEQ ID NO: 1601 - protein, 563 aa, Unknown
  Description of Unknown: Integrase B1602 sequence
  PTHR30461:SF3,IPR036162,PS51737,IPR011109,PTHR30461, PS00397,PF00239,G3DSA:1.10.10.2600,IPR006119,SSF53041, cd00338,SM00857,IPR025827,IPR038109,PS51736, IPR006118,PF13408,G3DSA:3.40.50.1390,PF07508,Coil
MEPSKAKKEVLYVRVSTQHQVDKDSLPMQKQDLTSYCKYVLGIDDFVILEDAGYSAKNTDRPAFQEMMSRIRTGEFTHILVWKIDRISRNLLDFASMYAELKELGITFISKNEQFDTSSAIGEAMLKIILVFAELERNMVSERVSAVMLDRAKNGAWNGGRSPTGYRIENGKYVIHEEEAAIVRMLFDECEHGKSLIQLAKVINGMGVKPRYGKVWHESAIRKILTNKTYYGALEYSTKKGGEVLIENHHQPLITHEQYEKCRSIMSSRSRKKGFAAKSYTRKHTHIFAGLVTCGYCGGHLVAQLDKARREGDYRPSYYICTGRRNLKICKNKLVPDMIIGRFVLRYLSNLLRAYRHFNENTTLEDVRQTILSGLEAFGVIGISENGLSETFNAYLNSDGTQNAFTYRPKLEFGDDQNSEASALVNTISKESRALERLTQLYLYSESPISESEYSKERKELEKRIYDAKVRLERIQVAEVQYNKLKDEWQTQASYLILTKELMDEQQTDFSLLLRALDKQVLKDFVQATIQNIVIKDRRIEQITLMSGITHEFVYGNETKKEG

SEQ ID NO: 1602 - protein, 563 aa, Unknown
  Description of Unknown: Integrase B1603 sequence
  SM00857,G3DSA:1.10.10.2600,IPR036162,PF13408,PS51737, G3DSA:3.40.50.1390,IPR025827,IPR006119,IPR038109,PF07508, SSF53041,IPR011109,PTHR30461,Coil,mobidb-lite, cd00338,PF00239
MAYRKITDIRDTIGMRAVFYARVSTAEEEQLNAIELQIEENRGCIKDHGWKLVGEYIDRSKSGTMVKGRDDYQRLYEDLYEDLFDIVVIKDQERLQRNTLDWYLFINRVVQTGKLLFMYMDGKFYSPDDALITGVRAIIAEEFSRNLSKKLHNYHDHRIEKARQGQEIALQGSGNVYGWDKKDGKYYINPEQAKVRRLMCEGIMARKGSTLIAKELNEAGYRNTVGKLWKPMDIPKFVYDCKNVGTMIINKERHDFESKQTIKLPKEEWVYVENALPPIVTQEEWDLICKIHEERVIATGSDRRGKKTSGYSFSGKLVCGICGAPYWRKQRVSKDEYWVCSTKQTKGRRTRKRDSTMGKAGEINPLGCDNENISYNSLMEIMGVVSERLQANTDTIKHDMINWLTKLRKQLLEANGGHTEADLQRELSRKSKLLDAYLDGILNKQEYQKKAEELDERIIQLKAETEKNKANSGDIAEIDKVLANIDEEVSRYVDGNEKLKVEYLLEHLEQVQIFPDKVIVIVPILSEGIVVEKTQYVSREKRCGKDDLPEDDQWTCKTDSRRD

SEQ ID NO: 1603 - protein, 563 aa, Unknown
  Description of Unknown: Integrase B1604 sequence
  PTHR30461:SF3,IPR036162,PS51737,IPR011109,PTHR30461, PS00397,PF00239,G3DSA:1.10.10.2600,IPR006119,SSF53041, cd00338,SM00857,IPR025827,IPR038109,PS51736, IPR006118,PF13408,G3DSA:3.40.50.1390,PF07508,Coil
MESSKAKKAVLYVRVSTQHQVDKDSLPMQKQDLTSYCKYVLGINDFVILEDAGYSAKNTDRPAFQEMMSRIRTGEFTHILVWKIDRISRNLLDFASMYAELKELGITFISKNEQFDTSSAIGEAMLKIILVFAELERNMVSERVSAVMLDRAKNGAWNGGRSPTGYRIENGKYVIHEEEAAIVRMLFDECEHGKSLIQLAKVINGMGVKPRYGKVWHESAIRKILTNKTYYGALEYSTKKGGEVLIENHHQPLITYEQYEKCRSIMSSRSKKKGFAAKSYTRKHTHIFAGLVTCGYCGGHLVAQLDKARREGDYRPSYYICTGRRNLKICKNKLVPDMIIGQFVLRYLSNLLRAYRHFNENTTLEDVRQTILSGLEAFGVIGISEKGLSETFNAYLNSDGTQNAFTYRPKLELGGDQNSEASALVNTISKESRALERLTQLYLYSESPISESEYSKERKELEKRIYDAKVRLERIQVAEVQCNKLKDEWRTQASYLILTKELMDEQQTDFSLLLRALDKQVLKDFVQATIQNIVIKDRRIEQITLMSGITHEFVYCNETKKEG

SEQ ID NO: 1604 - protein, 563 aa, Unknown
  Description of Unknown: Integrase B1605 sequence
  SM00857,G3DSA:1.10.10.2600,IPR036162,PF13408,IPR025827, G3DSA:3.40.50.1390,PS51737,IPR006119,IPR038109,PF07508, SSF53041,IPR011109,PTHR30461,Coil,cd00338, PF00239
MAYRKITDIRDTIGMRAVFYARVSTAEEEQLNAIELQIEENRGCIKDHGWKLVGEYIDRSKSGTMVKGRDDYQRLYEDLYEDLFDIVVIKDQERLQRNTLDWYLFINRVVQTGKLLFMYMDGKFYSPDDALITGVRAIIAEEFSRNLSKKLHNYHDHRIEKARQGQEIALQGSGNVYGWDKKDGKYYINPEQAKVRRLMCEGIMARKGSTLIAKELNDAGYRNTVGKPWKPMDIPKFVYDCKNVGTMIINKERHDFESKQTIKLPKEEWVYVENALPPIVTQEEWDLICKIHEERVIATGSDRRGKKTSGYSFSGKLVCGICGAPYWRKQRVSKDEYWVCSTKQTKGRRTRKRDSTMGKAGEINPLGCDNENISYNSLMEIMGVVSERLQANTDTIKQDMINWLTKLRKQLLEANGGHTEADLQRELSRKSKLLDAYLDGILNKQEYQKKAEELDDRIIQLKAETEKNKANSGDIAEIDKVLANIDEEVSRYVDGNEKLKVEYLLEHLEQVQIFPDKVIVIVPILSEGIVVEKAQYVSREKRSRKNDHYENATWIDKANFRRS

SEQ ID NO: 1605 - protein, 563 aa, Unknown
  Description of Unknown: Integrase B1606 sequence
  PTHR30461:SF3,SM00857,G3DSA:1.10.10.2600,IPR036162,PF13408, IPR025827,PS51737,G3DSA:3.40.50.1390,IPR006119,IPR038109, PF07508,IPR011109,SSF53041,PTHR30461,Coil, PS51736,cd00338,PF00239
MAEVEVIKAVDGPILRKRDYEGNPVVITRQRVAAYVRVSTDGDEQLESFQSQKQYYQDKISENRDWVMVGIYADEAITGTKVDKREQFQRMIQDCMDGKIDVIMTKSVSRFSRNTVDILQYVRLLKGKGIAVIFEKENINTLTEQGEMMLTLMGTLAQNEVESTSKNVKLGIKMKMKRGELMGFNGCLGYDYHPEDKTITVNEAEAETVRLIFELYLQGYGTYTIAKRLEALGKVNKKGVVKWTDSGVRGIIKNEKYKGDLLLQKTITTDPISKRRIENFGEEEQYYVHDHHEPIVSREVWEQAKEIRLSRNHPSDTKADGKREKYTKKYAFSSMCECGFCGTKLTRRTLHSGSKYETPVWYCRNAANKGKHNCPNSKSMRESILENAFLEAYKLLAGSFDDVIDSVIDTIDGISTNNEDIGRLKKEQKALDNLEQRRKRLTDLYLDEGISKEAYDEKYEELTMKIQKTKESIRILQDNVSNQKDVSKRMSCLKKALADGDILDKFDRVVFESIVEKVIVGETNDDGTVDPFKLTFVMKGNGNSVVPNAKAWFKSEKSTTKTA

SEQ ID NO: 1606 - protein, 563 aa, Unknown
  Description of Unknown: Integrase B1607 sequence
  PTHR30461:SF3,IPR036162,PS51737,IPR011109,PTHR30461, PS00397,PF00239,G3DSA:1.10.10.2600,IPR006119,SSF53041, cd00338,SM00857,IPR025827,IPR038109,PS51736, IPR006118,PF13408,G3DSA:3.40.50.1390,PF07508,Coil
MESSKAKKAVLYVRVSTQHQVDKDSLPMQKQDLTSYCKYVLGINDFVILEDAGYSAKNTDRPAFQEMMSRIRTGEFTHILVWKIDRISRNLLDFASMYAELKELGITFISKNEQFDTSSAIGEAMLKIILVFAELERNMVSERVSAVMLDRAKNGAWNGGRSPTGYRIENGKYVIHEEEAAIVRMLFDECEHGKSLIQLAKVINGMGVKPRYGKVWHESAIRKILTNKTYYGALEYSTKKGGEVLIENHHQPLITYEQYEKCRSIMSSRSRKKGFAAKSYTRKHTHIFAGLVTCGYCGGHLVAQLDKARREGDYRPSYYICTGRRNLKICKNKLVPDMIIGQFVLRYLSNLLRAYRHFNENTTLEDVRQTILSGLEAFGVIGISENGLSETFNAYLNSDGTQNAFTYRPKLELGGDQNSEASALVNTISKESRALERLTQLYLYSESPISESEYSKERKELEKRIYDAKVRLERIQVAEVQCNKLKDEWRTQASYLILTKELMDEQQTDFSLLLRALDKQVLKDFVQATIQNIVIKDRRIEQITLMSGITHEFVYCNETKKEG

SEQ ID NO: 1607 - protein, 563 aa, Unknown
  Description of Unknown: Integrase B1608 sequence
  PTHR30461:SF3,SM00857,G3DSA:1.10.10.2600,IPR036162,PS51737, G3DSA:3.40.50.1390,IPR006119,IPR038109,PF07508,IPR011109, SSF53041,PTHR30461,Coil,PS51736,cd00338, PF00239
MRVVYYGRVSSEKDEQINALGNQIESYKTYLEQHPEYELVDEYIDEGITGTSMSKRPSFCQMMEDAQQNKFDLIITREVSRFARNTVDTLSCTRFLKKYGIGVYFMLDNINTLDSDGELRLTIMATMAQDESRKISNRVKAGLSVCVDKAQVLGSGNILGYDKVNKSYVINEEQAKTVRMIFDWYLEGKGIKEIRFLLEKNHRLTANGKTRWYSSVVLKILKRTTYCGYITYGQSYVTNFLEQERTYDKSKQVVKKCDFEPIISLEDFQKVQSMIASKSKVIENGKSVGVKPSKSVWTDILLCGNCNSKFLRLKWGRNKNGYRYGYQCGNQKSMGAIQTRINKGLPIEGCCDAPMIPEWKLQVIAKYVFTQFLSDKEQVLNEAKQILKEITPKAVEENTNSQQIEELTQQLDKVNNKIDGLIDMRAEGEITKEQFKKKKEQFDTQLIEIQQQLDELITIPQPTNIDDKITILQGVLDSYQEDMFSEDGIIPDNLIKAYIKQVVVNKDNFDIYLQNLSPDPNDTGKGNKVKTVPVCVQIKGNSRNYSLETKSPKIVNDCSGCNR

SEQ ID NO: 1608 - protein, 563 aa, Unknown
  Description of Unknown: Integrase B1609 sequence
  PTHR30461:SF3,IPR036162,PS51737,IPR011109,PTHR30461, PS00397,PF00239,G3DSA:1.10.10.2600,IPR006119,SSF53041, cd00338,SM00857,IPR025827,IPR038109,PS51736, IPR006118,PF13408,G3DSA:3.40.50.1390,PF07508,Coil
MEPSKAKKAVLYVRVSTQHQVDKDSLPMQKQDLASYCKYVLGIDDFVILEDAGYSAKNTDRPAFQEMMSRIRTGEFTHILVWKIDRISRNLLDFASMYAELKELGITFISKNEQFDTSSAIGEAMLKIILVFAELERNMVSERVSAVMLDRAKNGAWNGGRSPTGYRIENGKYVIHEEEAAIVRMLFDECEHGKSLIQLAKVINGMGVKPRYGKVWHESAIRKILTNKTYYGALEYSTKKGGEVLIENHHQPLITYEQYEKCRSIMSSRSRKKGFAAKSYTRKHTHIFAGLVTCGYCGGHLVAQLDKARREGDYRPSYYICTGRRNLKICKNKLVPDMIIGQFVLRYLSNLLRAYRHFNENTTLEDVRQTILSGLEAFGVIGISENGLSETFNAYLNSDGTQNAFTYRPKLELGGDQNSEASALVNTISKESRALERLTQLYLYSESPISESEYSKERKELEKRIYDAKVRLERIQVAEVQCNKLKDEWRTQASYLILTKELMDEQQTDFSLLLRALDKQVLKDFVQATIQNIVIKDRRIEQITLISGITHEFVYCNETKKEG

SEQ ID NO: 1609 - protein, 563 aa, Unknown
  Description of Unknown: Integrase B1610 sequence
  PTHR30461:SF3,IPR036162,PS51737,IPR011109,PTHR30461, PF00239,G3DSA:1.10.10.2600,IPR006119,PF14287,SSF53041, IPR025378,SM00857,IPR025827,cd03770,IPR038109, mobidb-lite,PS51736,PF13408,G3DSA:3.40.50.1390,PF07508,Coil
MNQSNQIRKTALYCRLSQDDGIEGDSNSIQNQKAILQKFAENHHFPSPCFYVDDGFSGGNFQRPAFQQMISDMENGEIGIIVTKDLSRLGRNQLHTGLYIEERFPMFGVRYIAINDNVDTDSSESNDLMPFKNLFNEWFIRDTSRKIRAVLKAKAERGERLGTRTPYGYRKDPDTKKLIVDEEAAAIVRRIFAMCAGGSGPSQIARILKKEQILTPTMYAYTRYGITHTCLDTAHPYNWSDSAIANLLENEIYLGNTVNMKHSSRSYKDKRRVEHPREECLVFENTHPALITREVWDMVQRVRKNKRRLTKMEEQNKYSGLVFCADCGSNMVLHRAHTMSASYNHFTCRTYKKDGEACTGHYIRECVLDEIVLEDLRRVTSAAREHPEKFAAYIGSRQSAEIQREIRRQEKELAAMRKRKMELDTIFKKLYEDSVLGRITTEQFQMLSGSYTEEQSRITAGIPQKESEIQCLRETVSGTDSFLDKAKRYTDITELTPELLRLFIEKIVVHEKEVKWSKHAPQTVEIYYNGIGYVGSGQQDVEEALEAPESLQTQDTEKPRQAS

SEQ ID NO: 1610 - protein, 563 aa, Unknown
  Description of Unknown: Integrase B1611 sequence
  PTHR30461:SF3,SM00857,G3DSA:1.10.10.2600,IPR036162,PF13408, PS51737,G3DSA:3.40.50.1390,IPR025827,IPR006119,IPR038109, PF07508,SSF53041,IPR011109,PTHR30461,Coil, PS51736,cd00338,PF00239
MAEVEVIKAVEGPILRKRDYEGKPLVITRQRVAAYVRVSTDGDEQLESFQSQKQYYQDKISENRDWVMVGIYADEAITGTKVDKREQFQRMIQDCMDGKIDVIMTKSVSRFSRNTVDILQYVRLLKERGIAVIFEKENINTLTEQGEMMLTLMGTLAQNEVESTSKNVKLGIKMKMKRGELMGFNGCLGYDYHPEDKTITVNEAEAETVRLIFELYLQGYGTYTIAKRLEALGKLNKKGVAKWTDSGVRGIIKNEKYKGDLLLQKTITTDPISKRRIENFGEEEQYYVRDHHEPIVSREVWEQAKEIRLSRNHQSDKKADGKREKYTKKYAFSSMCECGFCGTKLTRRTLHSSSKYETPVWYCRNAANRGKHNCPNSKSVHESILENAFLEAYKLLAGSFDDVIDSVIGTIESIGANNDDIARLKKEQKTLDNLEQRRKKLTDIYLDDGLTKEAYDEKYEELTVKIQKSKDSIELLQNNVSNQKDVGKRMASLKKALADGDILDEFDRVVFESIVEKVIVGETNEDGTVDPYKLTFVMKGNGNSVVPNAKEWFKAEKSAIQPA

SEQ ID NO: 1611 - protein, 563 aa, Unknown
  Description of Unknown: Integrase B1612 sequence
  PTHR30461:SF3,IPR036162,PS51737,IPR011109,PTHR30461, PF00239,G3DSA:1.10.10.2600,IPR006119,SSF53041,cd00338, SM00857,IPR025827,IPR038109,PS51736,mobidb-lite, PF13408,G3DSA:3.40.50.1390,PF07508,Coil
MREVQVLQATKTAPNSRGRNSNYAVQIDRIRVAAYCRVSTDGDEQLGSFESQKLYYEEKIRKNKEWAMAGIFADEAITGTKIDKREGFQEMIRKCLNGEIDMILTKSISRFSRNTPDTIKYVRMLRDKNIAIMFEKENINTLDMNGEMLLTILSSLAQEEVESLSSNVKMGLQMKMKRGELVGFNGCFGYDYHQDTKTITVNETEAETVRLIYDMYLQGNGCGTIAKRLVELGIKNKRGTVEWHDHGVMGMIKNEKYKGDVLLGKTFTVDPISKRRLANMGEENQYYIRDHHEAIVSREIWDKAEEIRLKRAKPKLMQTTGNRERYTRQFTFSSMLECGYCGHKLSRRTRHQTTTTKKPVWQCMNATKNGIDNCPNCKAVDEVIIENAFLEAFRLLADSFDDVLQSVLNTIEDILKDDTELKRVKQLEKDISTIESKKSRLTDLLIDGKIEQEDYDEKKLSFQRKLHKITEEKAYLEENIGQQKNISRRMSQLRQTLENENALDEFDRIVFESIVEKVIVGGYDAEGNPTPYKLTFVLKCNQTLKVDNAKADYRANQKGKKVS

SEQ ID NO: 1612 - protein, 563 aa, Unknown
  Description of Unknown: Integrase B1613 sequence
  PTHR30461:SF3,SM00857,G3DSA:1.10.10.2600,IPR036162,PF13408, PS51737,IPR025827,G3DSA:3.40.50.1390,IPR006119,IPR038109, PF07508,IPR011109,SSF53041,PF00239,PTHR30461, PS51736,Coil,cd00338
MAKKKKPAGGNAIIYARYSSHNQRDVSIEQQIEACRKHAAELGLTIIATYEDRAISGRTDNRPAFQRMMHDAENGKFSYVLAWKSNRMGRNMMQAMVNESRLMDCGIKVYYAEEDFDDSAAGRFALRSMMNVNQFYSDNLAEDVRRGLMDNASKCMANGKQPLGYKRGEDGKVAVDEPAAAIVREVYTRVASGELFTDIARDLNRRGIKTADKGEWNKNSFHRLCSNEKYRGIYIYGDVRIEGGIPTIIDDTLWYKVQEALRVKKLKRNGRHRPGDEDYLLTGKLRCGKCGGYMIGMSGRSKTGEIHYYYTCQNRRVGRTCDKKNIRRDVIEPAVAQAIKDYCLTDDAIEWIADKTVEYWEKADRNLQLDSIEGDLAAVQSSISNVMKAIEMGVVTETTRDRLIELEKQRTDLKSKLALAKEEVVHVDRKKLISSLLLFRNGNIHDRQYQEDLFKTFLISVYVYDDDDNGHLKIVFNAFGDNNTVDLPIDFGETDNQSGFSDGVEKFDYALHRSTKKEPAEHVRLVLFSLCFPYEQKCSAFKIYSICTDAANRDSGALYFMVL

SEQ ID NO: 1613 - protein, 562 aa, Unknown
  Description of Unknown: Integrase B1614 sequence
  cd00338,SM00857,G3DSA:1.10.10.2600,IPR036162,PF13408, IPR025827,PS51737,G3DSA:3.40.50.1390,IPR006119,IPR038109, PF07508,SSF53041,IPR011109,PTHR30461,Coil, PF00239
MAYRKITDIKDTIGMRAVFYARVSTAEEEQLNAIELQIEENRGCIKDHGWKLVGEYIDRSKSGTMVKGRDDYQRLYEDLYEDLFDIVVIKDQERLQRNTLDWYLFINRVVQTGKLLFMYMDGKFYSPDDALITGVRAIIAEEFSRNLSKKLHNYHDHRIEKARQGQEIALQGSGNVYGWDKKDGKYYINPEQAKVRRLMCEGIMARKGSTLIAKELNDAGYRNTVGKPWKPMDIPKFVYDCKNVGTMIINKERHDFESKQTIKLPKEEWVYVENALPPIVTQEEWDLICKIHEERVIATGSDRRGKKTSGYSFSGKLVCGICGAPYWRKQRVSKDEYWVCSTKQTKGRRTRKRDSTMGKAGEINPLGCDNENISYNSLMEIMGVVSERLQANTDTIKHDMINWLTKLRKQLLEANGGHTEADLQRELSRKSKLLDAYLDGILNKQEYQKKAEELDERIIQLKAETEKNKANSGDIAEIDKVLANIDEEVSRYVDGNEKLKVEYLLEHLEQVQIFPDKVIVIVPILSEGIVVEKAQYVSREKWKRKNNFFKSAREKRVYTDIA

SEQ ID NO: 1614 - protein, 562 aa, Unknown
  Description of Unknown: Integrase B1615 sequence
  PTHR30461:SF3,cd00338,SM00857,IPR006118,G3DSA:1.10.10.2600, IPR036162,PS51737,G3DSA:3.40.50.1390,IPR006119,IPR038109, PF07508,IPR011109,SSF53041,PTHR30461,PS00397, PS51736,Coil,PF00239
MKNKIAVYIRVSTTHQIDKESLPFQRRELENYAKYVLNIDDMEFFEDAGYSGKNIMRPAFQSMMSRIRLGEFSHILVWKIDRISRNIIDFANMFEELKKLNVTFVSKNEQFDTSSAIGEAILKIILVFAELERNLTAERVSDVMISRASTGQWNGGRVPLGYNYDKENHTFTVNQQEAEIVKFIFDYYIDNGSMVSLVNALKDKEIKTRTNGVFSLSAVATVLNNIFYTGKYRYNYRKQGDRQQVKPKSEWIVIDNHHPAIISEEVFKRAEEIKQTNLRLKNEKGKIVKKNNIHLFANLLECDVCHNNFSSSLDRPRVNQGGYRHSMYNCYGRRIGACKSKYVSDVYLGKFVFNYIANLYKAYCSFGKSTTFETFKKKMLRGNIFSDIKEVTNLEGIYNIFCSKYNDKATANIINYKNTQQDLGNELRIALSEKGKYERALARLKDAYLFSDDAMTQNEYISQKHSIEVKLSATNKKLDKLQSKDDTPFDDVEFLNILSYFILNQNLQDKREIDFVDFITSVDKKIISDFVHKMFVKFIISKGKIKSMTFRNGITNTFVYDD

SEQ ID NO: 1615 - protein, 562 aa, Unknown
  Description of Unknown: Integrase B1616 sequence
  PTHR30461:SF3,IPR036162,PS51737,IPR011109,PTHR30461, PS00397,PF00239,G3DSA:1.10.10.2600,IPR006119,SSF53041, SM00857,IPR025827,IPR038109,PS51736,cd03768, IPR006118,PF13408,G3DSA:3.40.50.1390,PF07508,Coil
MKAALYIRVSTTYQIDKDSLPVQRQDLINYAKYAFNIDDYEIFEDAGFSGKNTNRPAFQEMMERIRNKEFSHLFVWKIDRVSRNLLDFCDMYEELKKYDCTFISKNEQFDTSSAMGEAMLKIILVFAELERKLTSERVTSIMLARAERGMWNGANVPLGYDYDEETKYPVINESEAKTIHLIFDMYEDVKSTVKISNFLNDNNIATKRGGTWTSKTVGDILHNPFYYGTLRYNYRESGRGKKKSKDEWVIKEDNHIGIISKDQWNRCNKIIEFNSKRNSARWRQKNYVQHIFGGLLVCKDCGRKFEACLDRARSDGYRPTRYVCGARTKGGACHNKMSVSDVSIGDFVLHYVLNFIKSFNVVCISSEALESLLLSGDLFEDVLLTEDSIRDTFIAINYFQKTKQDITYEYNNEKEDNVNNTFIKHEHEKITSSLNNLERAKERLINLYLYSDHDMDENMYYEKKNDIDKKIKELKNKLETLEIKNNLSCDTDFLFIDNMNDFLFNLNINLDNNTVRELTLDGGRKILKDFFSNIIDKIIISNARVDSIVFKNGLTHTFIYKK

SEQ ID NO: 1616 - protein, 562 aa, Unknown
  Description of Unknown: Integrase B1617 sequence
  PTHR30461:SF3,IPR036162,PS51737,IPR011109,PTHR30461, PS00397,PF00239,G3DSA:1.10.10.2600,IPR006119,SSF53041, SM00857,IPR025827,IPR038109,PS51736,cd03768, IPR006118,PF13408,G3DSA:3.40.50.1390,PF07508,Coil
MTNPRVAIYIRVSTTHQVDKDSLPMQRQDLIAYAKLMLHTTDCVIFEDAGYSGKNMDRPRFQSMMKQIRQGLFTHVLVWKIDRISRNLLDFASMYEELKSLGVTFVSKNEQFDTSTAMGEAMLKIILVFAELERNMTSERVTATMISRASNGQWNGGRVPFGYSYDSEKKEFYINEKEAPIVRLIHDTYEQNSSLLNLTRILNDSGYKTRAGNEWSPISVRIILKNFWYTGCYQYNRLKDGCRQKEKDQSEWVTIPNHHPALISLKQKERIVEMLRSNYKLIAANNIYYTSNNVHVFGGLVTCAYCGRRYIATTDTKKGWKMGRYGCPTRRYSKTKCLNKSISDLTLGDFVFNYFVNLLKVQKHAKEITTTDELQRQLLSGYTFSSVKGLSPQSLLDTLRLIHTLNPSEKIYGKTKAIKKIAKPDKQLFTLRAKQSKLKRALDRLTTLYLYSESSMSEADFVAKKAEITDNIAKTEAEISELVKTDIHSDITDSEFLRKASEFVISQQLASRNYISYERLARTVDVNITREFIVGTIEQITVRDGHIDSILFRNGLYHKFIY

SEQ ID NO: 1617 - protein, 562 aa, Unknown
  Description of Unknown: Integrase B1618 sequence
  PTHR30461:SF3,cd00338,SM00857,IPR006118,G3DSA:1.10.10.2600, IPR036162,PS51737,G3DSA:3.40.50.1390,IPR006119,IPR038109, PF07508,IPR011109,SSF53041,PTHR30461,PS00397, PS51736,Coil,PF00239
MKNKIAVYIRVSTTHQIDKESLPFQRRELENYAKYVLNIDDMEFFEDAGYSGKNIMRPAFQSMMSRIRLGEFSHILVWKIDRISRNIIDFANMFEELKKLNVTFVSKNEQFDTSSAIGEAILKIILVFAELERNLTAERVSDVMISRASTGQWNGGRVPLGYNYDKENHTFTVNQQEAEIVKFIFDYYIDNGSMVSLVNALKDKEIKTRTNGAFSLSAVATVLNNIFYTGKYRYNYRKQGDRQQVKPESEWIVIDNHHPAIISEEVFKRAEEIKQTNLRLKNEKGKIVKKNNIHLFANLLECDVCHNNFSSSLDRPRVNQGGYRHSMYNCYGRRIGACKSKYVSDVYLGKFVFNYIANLYKAYCSFGKSTTFETFKKKMLRGNIFSDIKEVTNLEGIYNIFCSKYNDKATANIINYKNTQQDLGNELRIALSEKGKYERALARLKDAYLFSDDAMTQNEYISQKHSIEVKLSATNKKLDKLQSKDDTPFDDVEFLNILSYFILNQNLQDKREIDFVDFITSVDKKIISDFVHKMFVKFIISKGKIKSMTFRNGITNTFVYDD

SEQ ID NO: 1618 - protein, 562 aa, Unknown
  Description of Unknown: Integrase B1619 sequence
  PTHR30461:SF3,SM00857,G3DSA:1.10.10.2600,IPR036162,PF13408, IPR025827,G3DSA:3.40.50.1390,PS51737,IPR006119,IPR038109, PF07508,SSF53041,IPR011109,PTHR30461,Coil, PS51736,cd00338,PF00239
MRKKFNIDLSMLTPEEQQQFHDDPTTLTKGEVDVALYLRFSSERQTEQSIEGQLRDCIAYCKRKSFRIVAIYVDRATTARKDVEKRVHFQEMISDSAHHLWNFVVVWKLDRFARNREDSAVFKMRLRKNGVRVKSATETISDNPEGIILESVLEGIAEYYSADLSQKITRGLRESAMKGHSVGGHVPLGYKIEDHKLVINPATAHIVQEAFQLYANGESMAEICRIFNGKGYRTAKNSEFNRSSFKSMFRNVRYIGTYIYKDIKKENAIPAIIDKDLFETVQRRLSLAADAPARGKAKVDYLLSGKLFCGHCGATMNGESGTSKTGAIHNYYTCYSRKRRKGCDKKPLKKDFIERIVAQDAMALLTNDVIEELADMAMSQADRDLKENTRIPELSARLTEIEQGINNITKAVEKGIASDTLLNRLTELEKEKKDLTSQLREEEKYICRIDRDQIIFWLTKFQGGDIEDEDCRRRIIDLLVNSVTVWDEPDGYKITTAYNLTSCKTKTFRVSTAGSPSSEGFGFGELSSTKKRTCFSAGPFSMKFISAQRTKYLRPEIFAPQM

SEQ ID NO: 1619 - protein, 562 aa, Unknown
  Description of Unknown: Integrase B1620 sequence
  PTHR30461:SF3,IPR036162,PS51737,IPR011109,PTHR30461, PS00397,PF00239,G3DSA:1.10.10.2600,IPR006119,SSF53041, SM00857,IPR025827,IPR038109,PS51736,cd03768, IPR006118,PF13408,G3DSA:3.40.50.1390,PF07508,Coil
MTDPRVAIYIRVSTTHQIDKDSLPMQRQDLIAYTKLMLHTTNYVIFEDAGYSGKNMDRPRFQSMMKQIRQGLFTHVLVWKIDRISRNLLDFASMYEELKSLGVTFVSKNEQFDTSTAMGEAMLKIILVFAELERNMTSERVTATMISRASNGQWNGGRVPFGYSYNSEKKEFYINEKEAPIVRLIHDTYEQNSSLLNLTRILNDSGYKTRAGNEWSPISVRIILKNFWYTGCYQYNRLKDGCRQKEKDQSEWVTIPNHHPALISLKQKERIVEMLRSNYKLIAANNIYYTSNNVHVFGGLVTCAYCGRRYIATTDTKKGWKMGRYGCPTRRYSKTKCTNNSVSDLTLGDFVFNYFVNLLKVQKHAKDITTTDELQRQLLSGYTFSSVKGLSPQSLLDTLRLIHTLNPSEKIYGKTKAIKKIAKPDKQLFTLRAKQSKLKRALDRLTTLYLYSESSMSEADFVAKKAEITDNIAKTEAEISELVKTDIHSDITDSEFLRKASEFVISQQLASRNYISYERLARTVDVNITREFIVGTIEQITVRDGHIDSILFRNGLYHKFIY

SEQ ID NO: 1620 - protein, 562 aa, Unknown
  Description of Unknown: Integrase B1621 sequence
  PTHR30461:SF3,SM00857,G3DSA:1.10.10.2600,IPR036162,PF13408, PS51737,G3DSA:3.40.50.1390,IPR025827,IPR006119,IPR038109, PF07508,IPR011109,SSF53041,PTHR30461,Coil, PS51736,cd00338,PF00239
MRKKFNIDLSMLTPEEQQQFHDDPTTLTKGEVDVALYLRFSSERQKEQSIEGQLRDCIAYCKRKSFRIVAIYVDRATTARKDVEKRVHFQEMISDSAHHLWNFVVVWKLDRFARNREDSAVFKMRLRKNGVRVKSATETISENPEGIILESVLEGIAEYYSADLSQKITRGLRESAMKGHSVGGHVPLGYKIEDHRLVINPATAHIVQEAFQLYANGESMAEICRIFNSKGYRTAKNSEFNRSSFKSMFKNVRYIGTYIYKDIKKENAIPAIIDKDLFETVQRRLSLAADAPARGKAKVDYLLSGKLFCGHCGATMNGESGTSKTGAIHNYYTCYSRKRRKGCDKKPLKKDFIERIVAQDAMALLTNDVIEELADMAMSQANRDLKENTRIPELSTRLTEIEQGINNITKAIEKGIASDTLLNRLTELEKEKKDLTSQLREEEKYICRIDRDQIIFWLTKFQGGDIEDEDCRRRIIDLLVNSVTVWDEPDGYKITTAYNLTSCKTKTFRVSTAGSPSSEGFGFGELSSTKSKIRTFVRRDRGSDFSCLQLVLSRNEFKKEDA

SEQ ID NO: 1621 - protein, 562 aa, Unknown
  Description of Unknown: Integrase B1622 sequence
  PTHR30461:SF3,cd00338,SM00857,G3DSA:1.10.10.2600,IPR036162, PF13408,PS51737,IPR025827,G3DSA:3.40.50.1390,IPR006119, IPR038109,PF07508,IPR011109,SSF53041,PTHR30461, PS51736,Coil,PF00239
MARKKNIAAGQNAVIYARYSSHNQREVSIEQQVRECMKHAAELGLHVVGTYEDRAISGKTDKRPNFQRMMRDAEKGKFQAVVAWKSNRIGRNMLQAMVNEAKLEDCGVKVFYAEEDFDDTAAGRFALRNMMNVNQFYSENMAEDITRGLYDNASKCMANGRQPLGYKRGEDGRVVLDEANAAVVREIFTRVAAGDLFVDIARDLNAQGIKTSKGANWNKGSFQSICQNERYRGIYIYGDVRVADGIPRIVSDDLWYRVQEAMRMKKNPVGTRHRVGAEDYLLTGKLRCGHCGSYMTGVSGTSRNGELHYYYTCQKRRTEHACDKKNIRRDVIEPAVAQAIKMYCLTDDVIEWMADRTVEYWEKHDNDLQIEALEQQLEENKKATSNMLKAIEMGIITEATRTRMVELETEQSRLSVQLNAAKEDVVKIDREQIISYLELLQQGDIHDRDFQMELFKNFLVAVYVYDDNRMKLVFSCMGDQNSVEIPLETGEDPPDGGLSPDAKMFVLTPDSSTIQFVLEPDSLRKRVRVRFLFIGSSAEGLHRALNEQRQGITMTVVSCLLL

SEQ ID NO: 1622 - protein, 562 aa, Unknown
  Description of Unknown: Integrase B1623 sequence
  PTHR30461:SF3,IPR036162,PS51737,IPR011109,PTHR30461, PF00239,G3DSA:1.10.10.2600,IPR006119,PF14287,SSF53041, IPR025378,SM00857,IPR025827,cd03770,IPR038109, mobidb-lite,PF13408,G3DSA:3.40.50.1390,PF07508,Coil
MAGQENQQYTVLYGRLSQEDERAGESNSIQHQRTLLEKYAKEEGFENTIFLADDGYSGTNFERPSWKKIVEMIEAGQVANLIVKDASRLGREYLQVGYYMEIYFPQKNVRFIAVNDGVDSTVESSNDFNPIRNWANELHAKDTSRKVRAVMKMKAEQGERLGGRPPYGYRKSDGDANTLVPDEDTAPVVKRIFSLCAAGNGPKRIATILTKEQVVNPSNAYYRKTGKSHRGLDTTRPCLWSSNSVTSILNNEVYLGHSVGLRTTTISYKNKQRVERPESERFVVKNTHEALVTQEQWDIVQEVRQHKKRVPKHMDEPNIFSGLVFCADCGKPLVLHRASTMKRAEYNFKCYTYGKKGKTVCTPHHIREFELKAVVLEDLRRVTHFARMKEKQFAAYISSKNTLELRREMNTIQKDLDTMRRRREELSKLFKRLYEDNVLGRVTDEQYRMLAGDYTIEQKALEEQIPKKEARLEKLKAASANVNTFVEKAKQYTAIDELTPELLRLFIQRIEVGERTEKYSRSSHQSIRIVYRDIGTVDSAMEQGEAQPHIAPPLSEVFELPA

SEQ ID NO: 1623 - protein, 562 aa, Unknown
  Description of Unknown: Integrase B1624 sequence
  PTHR30461:SF3,cd00338,SM00857,G3DSA:1.10.10.2600,IPR036162, PF13408,IPR025827,PS51737,G3DSA:3.40.50.1390,IPR006119, IPR038109,PF07508,SSF53041,IPR011109,PTHR30461, PS51736,Coil,PF00239
MKLPIDLSCLTEEEISQFQEDPYTLYNGDQNVTLYLRYSSAGQSDQSIEGQLRDCRAFCKANHYRIVAIYVDRATTARKDVEKRVHLMEMIADSAKQNWEYVIVWKLDRFARNRNDSAIMKMRLRKNGVKVLSATEHLSDNPEGILLESVLEGMAEFFSAELSQKVTRGMRESALKCHSVGGHVPLGYKIENHKLVINPDTAHIVREAFSLYANGESVADIARKFNAAGYRTAKNTEFNRSSFKVMFRNVRYIGTYTYKDIEIENGVPAIIDKELFEAVQRRLSKAAEAPARGKAKVDYLLSGKLFCGHCGASMNGESGIGRGGKVYHYYSCYTKKRKLGCKKRPLKKDYIEEVVARDALNLLTDQLIDEIADMAIRQSEQDLIDDTRIPQLTAQLSEVEKSIMNITAAIEKGIASETLMNRLVQLEHEKKTLNKEIKSEEKFAYRIDRDQIVFWLSQFKYGNIEDEDFRRRLIDLLINSVTVWDEPDGYKITTAYNLTSCETKTFRIKKNPAAGEATGFGFGELECANNRITDGDPVIFLCAGHPTARKALVPCGAACRMA

SEQ ID NO: 1624 - protein, 562 aa, Unknown
  Description of Unknown: Integrase B1625 sequence
  PTHR30461:SF3,cd00338,SM00857,G3DSA:1.10.10.2600,IPR036162, PF13408,PS51737,G3DSA:3.40.50.1390,IPR025827,IPR006119, IPR038109,PF07508,IPR011109,SSF53041,PTHR30461, Coil,PF00239
MAEQIIQLAKNVLKRVVCLYRVSTVGQVEKDDIPMQKQFCREFVQRQPGWEIVKEFSEKGVSGFKVSAKKRDAVQEIQRMALQGEFDILLVFMFDRLGRKDDETPFVVEWFVKNGIEVWSAMEGQQRFDNHVDKLLNYIRYWQASGESIKTSVRVKTRISQLTEEGYYTGGIVPYGYRLENRGRTNKRNKEVCDLAIDLDEAEVVKVIFQKYVYEGYGSQRISRYLAEQGFRNRKGGNIPTTSINRIIKNPLYIGILCNGESRSENVLTELQIIDVDLFERAQKMIESRAKPRTAHKEIPLNTRGQSLLVGNVYCGHCGKRLTLATSGRKYQKKDGTVVNKTYARYQCSYNIQHPGGCDGPSGYGAAKLDDLVDQIIRIQFERIKTAPPQALIREQQSREVEIAKAKLNLLNGQYQQKQRDYQDLRAETLRVIRGDSRLNVDFLNSIVDETITQLKELGQQVKEAEAELRELVSGAEQVKEEYAQLMNWAELYDKCTFEAKKMIAAQFVKAVHVKRDYEIDVEFNVAFDEFQSIYLEPEKEDEKKRGASTLLALGENVGQAV

SEQ ID NO: 1625 - protein, 562 aa, Unknown
  Description of Unknown: Integrase B1626 sequence
  PTHR30461:SF3,SM00857,G3DSA:1.10.10.2600,IPR036162,PF13408, IPR025827,G3DSA:3.40.50.1390,PS51737,IPR006119,IPR038109, PF07508,SSF53041,IPR011109,PF00239,PTHR30461, PS51736,Coil,cd00338
MNEVQVLHATKTAPNSRGRSSYAVQLDRIRVAAYCRVSTDGDEQLGSFESQKLYYEEKIRQNKEWAMAGIFADEAITGTKIDKREGFQEMIRKCQNGEIDMILTKSISRFSRNTQDTIKYVRMLRDKNIAIMFEKENINTLDMKGEMLLTILSSLAQEEVESLSSNVKMGLQMKMKRGELIGFNGCFGYDYHQDTKTITVNETEAETVRMIFDMYLQGYGCATIAKRLEEKGIKNKRGIVKWHDNGVLGMIKNEKYKGDILLGKTFTVDPISKRRLANMGEENQYYIKDHHEAIVSREVWDEAQETRLKRARPQTMHTTGNRERYTRQYTFSSMLVCGFCGHKLTRRTRHQTTTTKKFVWQCANAVKNGIDVCPNCKAIDEVIIEKAFLESFHLLADNYDDVLQSVLDTIKDSLKGDSDLKRVRQVEKDISTIESRKNKLTDLLIDGIIEQKDYDTKKLAFQRKLQKLEEEKKYLATNIEKKKNINRRMELLKRTLENEEILDEFDRVVFDSIVEKVIVGGYDEDGNPSPYKLAFIFKCNQSLKVENAKKDYKANQKGKKVS

SEQ ID NO: 1626 - protein, 562 aa, Unknown
  Description of Unknown: Integrase B1627 sequence
  PTHR30461:SF3,cd00338,SM00857,IPR006118,G3DSA:1.10.10.2600, IPR036162,PS51737,G3DSA:3.40.50.1390,IPR006119,IPR038109, PF07508,IPR011109,SSF53041,PTHR30461,PS00397, PS51736,Coil,PF00239
MKNKIAVYIRVSTTHQIDKESLPFQRRELENYAKYVLNIDDMEFFEDAGYSGKNIMRPAFQSMMSRIRLGEFSHILVWKIDRISRNIIDFANMFEELKKLNVTFVSKNEQFDTSSAIGEAILKIILVFAELERNLTAERVSDVMISRASTGQWNGGRVPLGYNYDKENHTFTVNQQEAEIVKFIFDYYIDNGSMVSLVNALKDKEIKTRTNGAFSLSAVATVLNNIFYTGKYRYNYRKQGDRQQVKPESEWIVIDNHHPAIISEEVFKKAEEIKQTNLRLKNEKGKIVKKNNIHLFANLLECDVCHNNFSSSLDRPRVNQGGYRHSMYNCYGRRIGACKSKYVSDVYLGKFVFNYIANLYKAYCSFGKSTTFETFKKKMLRGNIFSDIKEVTNLEGIYNIFCSKYNDKATANIINYKNTQQDLGNELRIALSEKGKYERALARLKDAYLFSDDAMTQNEYISQKHSIEIKLSATNKKLDKLQSKDDTPFDDVEFLNVLSYFILNQNLQDKREIDFVDFITSVDKKIISDFVHKMFVKFIISKGKIKSMTFRNGITNTFVYDD

SEQ ID NO: 1627 - protein, 562 aa, Unknown
  Description of Unknown: Integrase B1628 sequence
  PTHR30461:SF3,SM00857,G3DSA:1.10.10.2600,IPR036162,PF13408, PS51737,IPR025827,G3DSA:3.40.50.1390,IPR006119,IPR038109, PF07508,SSF53041,IPR011109,PTHR30461,Coil, PS51736,cd00338,PF00239
MRQKFKIDLSMLTPEEQQQFRDDPTTLTKGEVDVALYLRFSSERQKEQSIEGQLRDCIAYCKRKSFRIVAIYVDRATTARKDVEKRVHFQEMISDSIHHLWDFVVVWKLDRFARNREDSAVFKMRLRKNGVRVKSATETISENPEGIILESVLEGIAEYYSADLSQKITRGLRESAMKGHSVGGHVPLGYKIEDHRLVINPATAHIVQEAFQLYANGESMAEICRIFNSKGYRTAKNSEFNRSSFKSMFKNVRYIGTYIYKDIKKENAIPAIIDKDLFETVQRRLSLAADAPARGKAKVDYLLSGKLFCGHCGATMNGESGTSKTGAIHNYYTCYSRKRRKGCDKKPLKKDFIERIVAQDAMALLTDDVIEELADMAMSQADRDLKENTRIPELSTRLTEIEQGINNITKAVEKGIASDALLNRLTELEKEKKDLTSQLLEEEKYICRIDRDQIIFWLTKFQGGDIEDEDCRRRIIDLLVNSVTVWDEPDGYKITTAYNLTSCKTKTFRVSNTGSPSSEGFGFEELSSTKSKIRTFVRRDRGSDFSCLQLVLSRNEFKKEDA

SEQ ID NO: 1628 - protein, 562 aa, Unknown
  Description of Unknown: Integrase B1629 sequence
  PTHR30461:SF3,SM00857,G3DSA:1.10.10.2600,IPR036162,PF13408, PS51737,IPR025827,G3DSA:3.40.50.1390,IPR006119,IPR038109, PF07508,IPR011109,SSF53041,PTHR30461,Coil, cd00338,PF00239
MARTATKHPAKPKRGKKLEAEEPGVLYGRYSSHNQKDISVEQQFEKGYGLAGEYGIRIVETYADRAVSGRTDKRKDFQRMMADAAKGKFRYVIAWKSNRMGRNMLEALVNEAKLQELGVRVLYVEEDFDDTAAGRFAARSMMNVNQFYSENMAEDIKRGLYDNASNCMVANGHLPYGYKRDDTLHYVIDEAKAAVIREIFVRVSCGEPLVDIYDSLNARGIKTSYGRPWGRSSFQKILSNERYRGIYIYGDVRKEGGIPRIVSDELYFKVQEVLKTKKNPQGRHRVNGDYLLTGKLFCGNCKSPMIGISGTGRTGKLHYYYVCQKKRSEKTCDKKNVRRDEVEYQIAKAIFDNALQDQVIEWIADSTIAYNDRKEAEGHIGILEDQLADVQRSLKNIMSAIEQGIVTETTKSRLLELESERSEIEGKIAAAKADIVPVNREQLIEWLLSLREGDIHDKKYQARLFDTFLIAAYLYDDGTAKLVFSFAGDKNTVTVPLAEAVDSVEENTAEGSFKLCLAPPKRLIFFEYQAFLQLFLLFCFCKKSAFLSIYAAGFPLKMSVLF

SEQ ID NO: 1629 - protein, 562 aa, Unknown
  Description of Unknown: Integrase B1630 sequence
  PTHR30461:SF3,SM00857,G3DSA:1.10.10.2600,IPR036162,PF13408, IPR025827,G3DSA:3.40.50.1390,PS51737,IPR006119,IPR038109, PF07508,IPR011109,SSF53041,PF00239,PTHR30461, PS51736,Coil,cd00338
MTTLPIDLSALTAEERKQFDAAPAVLSPDCDAVCCLYMRYSSDRQTEQSIEGQLRDLISHCKQHRYRIAAVYVDRAISAHAAMEKRPAFQQMLLDSARAPWKTVLVWKLDRFARNREDSAIARMRLRKNGCNVESAKEGISKNPEGVILESLLEGMAEYYSLELSQKVKRGMSETARKGQSTGGPIPLGYTVSNKRLTADPATAPLVVEAFTRYAAGETVAAICKSFNARGLRTARGTQFNKSSFQNVFRNEKYIGVYKYDGIQTENAVPRLIDDDLWAAVQSRLKTNAQAPARGKAKVPYLLAGKIFCGHCGAPMIGECGRGKAGRTYNYYSCSTRRRAHTCDKKPVPKDWIEDIVARDALDVLTDEVIDYVSTVAARQSEKEIQETTQIPVLRQQLKDTDVKLRNLLKALESSASAPDIIVTRIAELESQKKALTAQLSAESRSVLPLTKEMVTCFLETVRARAIPLETQKPMLLDLLVNSVTLYDDTPGFLTIKTAYNLTNLPPKTFRLPTSECSDINQIGSPNRKRADAKASASFFTQCAAGFPAAFAYRCSCCFNAA

SEQ ID NO: 1630 - protein, 562 aa, Unknown
  Description of Unknown: Integrase B1631 sequence
  PTHR30461:SF3,SM00857,G3DSA:1.10.10.2600,IPR036162,PF13408, IPR025827,PS51737,G3DSA:3.40.50.1390,IPR006119,IPR038109, PF07508,IPR011109,SSF53041,PF00239,PTHR30461, PS51736,Coil,cd00338
MKRVNCLYRVSSKQQLHGDDIPVQREECMAYLGEHTDWEFNREYVEKAVSGFKTSVKDRDILQEILTDAREKTFDVLLVFMSDRIGRKEDESPAFVTTLNDLGIEVWSVKEGQLKTAEHVDKLMNYIRFWQAEGESRKTSMRVKAAQETFVRDGKFVGGKAPFGYRLEYSGAISNHGRALKHLVIDKEKAKIVQQIYDYAYYYHYGALKIAKTLNEQNIQAPVDTWKACTISQILQNPVYMGYIAYNRRQHSKCGGSFERTPMEQWIMSDEQNTELVIVSREKWEKVQEIRESRKKNMKDARDDKQGKYVYTSSGQLVLMGLVYCGYCGKRLTNGSKYDYWETKEGERRKKFVGRYRCTQMANGSLTCSGKAYYRAEEIEPIVYTVVTSYLNSLKEADTYDDILKLQEEQRILVKHELEQLQKEIKAIKKDIETLEQNIPSALRGEGNFSPVQLSALMDKNKQQLIELEHRLEIKNKEYKEMECKKKDIKNIGNMISNWGELFMECSIPERKVMLSKLIERIDVKENDIKIKFKISLEEYIGEKDGRKGIGSPTTLYTPCSA

SEQ ID NO: 1631 - protein, 562 aa, Unknown
  Description of Unknown: Integrase B1632 sequence
  PTHR30461:SF3,IPR036162,PS51737,IPR011109,PTHR30461, PF00239,G3DSA:1.10.10.2600,IPR006119,PF14287,SSF53041, IPR025378,SM00857,IPR025827,cd03770,IPR038109, PS51736,PF13408,G3DSA:3.40.50.1390,PF07508,Coil
MLELQTANKNKRTKNGGDGITALYCRLSVDDNGSEGESNSIKNQRDILGRYAKQHGYRNIEYYIDDGYSGTNFNRPDFQRMMSDVDEGKVKTIIVKDMSRLGRDYLKVGYLTEFTFAEKNIHFIAINDNVDSENGSDNELIPFKNVFNEWLARDTSKKIRAVIRNKGESGKPLTNTPSLGYMKDPNDKNKWLIDERCAPTIREIFRLSVNGYNALAIAKILTEKGYDTPKAFYLKQGRNMYRNDTTAPYFWHRSTVYKILRNPNYIGYLVNFKTTRKSYKNKRFIYRDPSEWKIIENHHEAIVDKETFDLAQKLTQVKRVVKNHFDDINIFAGLLYCADCGFPITLRRVAKNRNYDFYACSKYNRRTKIQCTAHSILKRVLNELVLEDIKRVMNEVKTHESEFIEKYRKCSVKEMRSVRLSAQTKITKAENRIKTLDDIIANLYEDNVTGKISDERFDLLAKKYEAEQTALKSEVVELKKALDVVNDEESNIREFLKVVNSYTEIEELTPEILNNFIDRIYIGEKYADGSAHKQEIRIIYKFIGAESTHGYKVKGSRVAEIF

SEQ ID NO: 1632 - protein, 562 aa, Unknown
  Description of Unknown: Integrase B1633 sequence
  PTHR30461:SF3,IPR036162,PS51737,IPR011109,PTHR30461, PF00239,G3DSA:1.10.10.2600,PF14287,IPR006119,SSF53041, IPR025378,SM00857,IPR025827,cd03770,IPR038109, mobidb-lite,PF13408,G3DSA:3.40.50.1390,PF07508,Coil
MAGQENQQYTVLYGRLSQEDERAGESNSIQHQRTLLEKYAKEKGFENTIFLADDGYSGTNFERPSWKKIVEMIEAGQVANLIVKDASRLGREYLQVGYYMEIYFPQKNVRFIAVNDGVDSTVESSNDFNPIRNWANELHAKDTSRKVRAVMKMKAEQGERLGGRPPYGYRKSDGDANTLVPDEDTAPVVKRIFSLCAAGNGPKRIATILTKEQVVNPSNAYYRKTGKSHRGLDTTRPCLWSSNSVTSILNNEVYLGHSVGLRTTTISYKNKQRVERPESERFVVKNTHEALVTQEQWDIVQEVRQHKKRVPKHMDEPNIFSGLVFCADCGKPLVLHRASTMKRTEYNFKCYTYGKKGKTVCTPHHIREFELKAIVLEDLRRVTHFARMKEKQFAAYIGSKNTLELRREMNTIQKDLDTMRRRREELSKLFKRLYEDNVLGRVTDEQYRMLAGDYTVEQKALEEQIPEKEARLEKLKAASANVNTFVEKAKQYTAIDELTPELLRLFIQRIEVGERTEKYSRSSHQSIRIVYRDIGTVDSAMEQGEAQPHIAPPLSEVFQLPA

SEQ ID NO: 1633 - protein, 562 aa, Unknown
  Description of Unknown: Integrase B1634 sequence
  PTHR30461:SF3,IPR036162,PS51737,IPR011109,PTHR30461, PF00239,G3DSA:1.10.10.2600,IPR006119,SSF53041,cd00338, SM00857,IPR025827,IPR038109,PS51736,mobidb-lite, PF13408,G3DSA:3.40.50.1390,PF07508,Coil
MRAKKKPAMLEPDMQDAVIYTRYSSHNQRDCSIEQQVADCEIFARQNNLRVVKVYADRHLSGTTDNRPQFQQMLKDAAHGHWAYVICWKIDRFARNRYDSATYKFRLKKAGVRVLYAKESIPDGPEGILLESVLEGSAEYYSAALAQNIRRGMKYNAEQCKVNSGSIPFGYCKGPDGRFAIHEANAEVVREIFRKAAAGMPFVDIANDLNSRGLKTSRGGRWNKGSFRLLMNEAYIGVYHFSDTRIEGGMPALIDQGTFWAANERLKANSSVRGRHQDGGDYLLTGKLKCAHCGSYMIGFSGTGKSGELHYYYGCQKRRRERACKKANVPREWIERVVVKAALDYVLRPDVMEWIADAVMEYQEREAASAQLAALTAELEENQKATDNVMKAIEAGIITSTTKQRLLDLEAKAQDLKRAIELEKLSHVRLERDQVLFWLDRFRGGSLQSQEFRRKVIDAFVSVVYLSDDHLRIAFNYSGGSNAEADFDLVMDAEAAAGELSKKFAQGHVASTSKKTTRKLTFSGGFFYTCYSVTPTPDLAGYPTTEPAPAARHQSSSPDTFC

SEQ ID NO: 1634 - protein, 562 aa, Unknown
  Description of Unknown: Integrase B1635 sequence
  PTHR30461:SF3,SM00857,G3DSA:1.10.10.2600,IPR036162,PS51737, G3DSA:3.40.50.1390,IPR006119,IPR038109,PF07508,IPR011109, SSF53041,PF00239,PTHR30461,PS51736,Coil, cd00338
MDLYAIRNMLGQGKSIYDLPLRVTFYARVSTDRYEQLNSLENQVTYFSNFIKEQENWTFVEGYVDEGISGTSVKKREDFLRMVDDAKKKKFDLILTKEISRFSRNTLDSIKYTQELLSNGVGVHFLSDSINTFQPDSELRLTIMSSIAQEEIRKLSERVRFGYKRSVEKGIVPGSNNIYGYTKNKGKLVIDEEQAKFIRLIFETYVSENIGVYRLGFKLFDEYGVTNYSGKPIAGTVIKNIIRNPKYKGYFCAHKETTVDYHDRKRKRFKRDEWIVYKDNETCPPIVSEELWDKANEILDVRSKKHDQINKNNKYNKFPFSGLMHCYFDGATFVRGTYQIGKGDRSRRRKFWACNNYRIHGKKKTEGCNSPVLYYEELVEVCKKILNMILVCQDDLISEINDMISDIRTKKDYKKEIKLIDEKLFKTNNEKKELIMMRMRKEIDLKEYNSLKDDLDDKINSLEENKRKLIEEEQNEQSSEKNYEDFKKKINDMVLNDDEKILEIAQLFFEDIRVESIKDDETDQKVILHAKLNVSNSKDDTFDFNKFLLLFCSRQGCGCCDC

SEQ ID NO: 1635 - protein, 562 aa, Unknown
  Description of Unknown: Integrase B1636 sequence
  PTHR30461:SF3,IPR036162,PS51737,IPR011109,PTHR30461, PF00239,G3DSA:1.10.10.2600,IPR006119,PF14287,SSF53041, IPR025378,SM00857,IPR025827,cd03770,IPR038109, mobidb-lite,PF13408,G3DSA:3.40.50.1390,PF07508,Coil
MAGQENQQYTVLYGRLSQEDERAGESNSIQHQRTLLEKYAKEKGFENTIFLADDGYSGTNFERPSWKKIVEMIEAGQVANLIVKDASRLGREYLQVGYYMEIYFPQKNVRFIAVNDGVDSTVESSNDFNPIRNWANELHAKDTSRKVRAVMKMKAEQGERLGGRPPYGYRKSDGDANTLVPDEDTAPVVKRIFSLCAAGNGPKRIATILTKEQVVNPSNAYYRKTGKSHRGLDTTRPCLWSSNSVTSILNNEVYLGHSVGLRTTTISYKNKQRVERPESERFVVKNTHEALVTQEQWDIVQEVRQHKKRVPKHMDEPNIFSGLVFCADCGKPLVLHRASTMKRTEYNFKCYTYGKKGKTVCTPHHIREFELKAVVLEDLRRVTHFARMKEKQFAAYIGSKNTLELRREMNTIQKDLDTMRRRREELSKLFKRLYEDNVLGRVTDEQYRMLAGDYTVEQKALEEQIPEKEARLEKLKAASANVNTFVEKAKQYTAIDELTPELLRLFIQRIEVGERTEKYSRSSHQSIRIVYRDIGTVDSAMEQGEAQPRIAPPLSEVFQLPA

SEQ ID NO: 1636 - protein, 562 aa, Unknown
  Description of Unknown: Integrase B1637 sequence
  PTHR30461:SF3,IPR036162,PS51737,IPR011109,PTHR30461, PF00239,G3DSA:1.10.10.2600,PF14287,IPR006119,SSF53041, IPR025378,SM00857,IPR025827,cd03770,IPR038109, PS51736,PF13408,G3DSA:3.40.50.1390,PF07508,Coil
MATNKNIQGQEVKITALYCRLSQDDNLEGESNSISNQKKILMTYAKKNGYLHPQFFVDDGISGTTFNRPGFQEMESLIEAGKVSTVIVKDLSRFGREHLLCGHYTEIVYPTLGVNFIAIQENVDTTKGMGTEMMPFHNIFNEWYAAQTSKKIRAVNEMKASKGMRISSTVPYGYKKVEGNKEQWYIDEPAAEIVRKIFSLCISGKGPSQIARQLEAEKVLTPTAYFNSVGKKTSNPMPVNIYHWRENSIVHILENRQYTGCTVNGKSTTVSYKVHKTVERPVEDYQVIPNTQEAIISENTWLRVQELRKNKRRNTATGRKSLFSGLVYCADCGFKLHFCASKSLKKNQEFWRCSSYKDGRGTCTIHFIRDVVLETIVKEAISELADFVRCYNSAFLYLISEKKGAESVCREKSLRVKTESAKQRISDLDKLFSRIYEDNILGKLSDERYSRMANEYEAEQKRLISEVEENEKSLIELQKQTVDMKMLYQGLMEFTEMKQLTPTVVNKLIERIEIHNNEKKHSHNNVKVDIYFTAVGLFDIPTEQQLIDTMERVKQKNAEKSA

SEQ ID NO: 1637 - protein, 562 aa, Unknown
  Description of Unknown: Integrase B1638 sequence
  PTHR30461:SF3,IPR036162,PS51737,IPR011109,PTHR30461, PS00397,PF00239,G3DSA:1.10.10.2600,IPR006119,SSF53041, SM00857,IPR025827,IPR038109,PS51736,cd03768, IPR006118,PF13408,G3DSA:3.40.50.1390,PF07508,Coil
MTDPRVAIYIRVSTTHQIDKDSLPMQRQDLIAYTKLMLHTTNYVIFEDAGYSGKNMDRPRFQSMMKQIRQGLFTHVLVWKIDRISRNLLDFASMYEELKSLGVTFVSKNEQFDTSTAMGEAMLKIILVFAELERNMTSERVTATMISRASNGQWNGGRVPFGYSYNSEKKEFYINEKEAPIVRLIHDTYEQNSSLLNLTRILNDSGYKTRAGNEWSPISVRIILKNFWYTGCYQYNRLKDGCRQKEKDQSEWVTIPNHHPALISLKQKERIVEMLRSNYKLIAANNIYYTSNNVHVFGGLVTCAYCGRRYIATTDTKKGWKMGRYGCPTRRYSKTKCTNNSVSDLTLGDFVFNYFVNLLKVQKHAKDITTTDELQRQLLSGYTFSSVKGLSPQSLLDTLRLIHTLNPSEKIYGKTKAIKKIAKPDKQLFTLRAKQSKLKRALDRLTTLYLYSESSMSEADFVAKKAEITDNITKTEAEISELVKTDIHSDITDSEFLRKASEFVISQQLASRNYISYERLARTVDVNITREFIVGTIEQITVRDGHIDSILFRNGLYHKFIY

SEQ ID NO: 1638 - protein, 562 aa, Unknown
  Description of Unknown: Integrase B1639 sequence
  PTHR30461:SF3,IPR036162,PS51737,IPR011109,PTHR30461, PS00397,PF00239,G3DSA:1.10.10.2600,IPR006119,SSF53041, SM00857,IPR025827,IPR038109,PS51736,cd03768, IPR006118,PF13408,G3DSA:3.40.50.1390,PF07508,Coil
MTSARVAIYIRVSTTHQVDKDSLPMQRQDLIAYAKLMLHTTDCVIFEDAGYSGKNMDRPRFQSMMKQIRQGLFTHVLVWKIDRISRNLLDFASMYEELKSLGVTFVSKNEQFDTSTAMGEAMLKIILVFAELERNMTSERVTATMISRASNGQWNGGRVPFGYSYDSEKKEFYINEKEAPIVRLIHDTYEQNSSLLNLTRILNDSGYKTRAGNEWSPISVRIILKNFWYTGCYQYNRLKDGCRQKEKDQSEWVTIPNHHPALISLKQKERIVEMLRSNYKLIAANNIYYTSNNVHVFGGLITCAFCGRRYIATTDTKKGWKMGRYGCPTRRYSKTKCLNKSISDLTLGDFVFNYFVNLLKVQKHAKEITTTEELQRQLLSGYTFSSVKGLSPQSLLDTLRLIHTLNPSEKIYGKTKAIKKIAKPDKQLFTLRAKQSKLKRALDRLTTLYLYSESSMSEADFVAKKAEITDNIAKTEAEISELVKTDIHSDITDSEFLRKASEFVISQQLVSRNHISYERLARTVDVNITREFIVGTIEQITVRDGHIDSILFRNGLYHKFIY

SEQ ID NO: 1639 - protein, 562 aa, Unknown
  Description of Unknown: Integrase B1640 sequence
  PTHR30461:SF3,cd00338,SM00857,IPR006118,G3DSA:1.10.10.2600, IPR036162,PS51737,G3DSA:3.40.50.1390,IPR006119,IPR038109, PF07508,IPR011109,SSF53041,PTHR30461,PS00397, PS51736,Coil,PF00239
MKNKIAVYIRVSTTHQIDKESLPFQRRELENYAKYVLNIDDMEFFEDAGYSGKNIMRPAFQSMMSRVRLGEFSHILVWKIDRISRNIIDFANMFEELKKLNVTFVSKNEQFDTSSAIGEAILKIILVFAELERNLTAERVSDVMISRASTGQWNGGRVPLGYNYDKENHTFTVNQQEAEIVKFIFDYYIDNGSMVSLVNALKDKEIKTRTNGAFSLSAVATVLNNIFYTGKYRYNYRKQGDRQQVKPESEWIVIDNHHPAIISEEVFKRAEEIKQTNLRLKNEKGKIVKKNNIHLFANLLECDVCHNNFSSSLDRPRVNQGGYRHSMYNCYGRRIGACKSKYVSDVYLGKFVFNYIANLYKAYCSFGKSTTFETFKKKMLRGNIFSDIKEVTNLEGIYNIFCSKYNDKATANIINYKNTQQDLGNELRIALSEKGKYERALARLKDAYLFSDDAMTQNEYISQKHSIEVKLSATNKKLDKLQSKDDTPFDDVEFLNILSYFILNQNLQDKREIDFVDFITSVDKKIISDFVHKMFVKFIISKGKIKSMTFRNGITNTFVYDD

SEQ ID NO: 1640 - protein, 562 aa, Unknown
  Description of Unknown: Integrase B1641 sequence
  PTHR30461:SF3,IPR036162,PS51737,IPR011109,PTHR30461, PS00397,PF00239,G3DSA:1.10.10.2600,IPR006119,SSF53041, SM00857,IPR025827,IPR038109,PS51736,cd03768, IPR006118,PF13408,G3DSA:3.40.50.1390,PF07508,Coil
MTSARVAIYIRVSTTHQVDKDSLPMQRQDLIAYAKLMLHTTDCVIFEDAGYSGKNMDRPRFQSMMKQIRQGLFTHVLVWKIDRISRNLLDFASMYEELKSLGVTFVSKNEQFDTSTAMGEAMLKIILVFAELERNMTSERVTATMISRASNGQWNGGRVPFGYSYDSEKKEFYINEKEAPIVRLIHDTYEQNSSLLNLTRILNDSGYKTRAGNEWSPISVRIILKNFWYTGCYQYNRLKDGCRQKEKDQSEWVTIPNHHPALISLKQKERIVEMLRSNYKLIAANNIYYTSNNVHVFGGLITCAFCGRRYIATTDTKKGWKMGRYGCPTRRYSKTKCLNKSISDLTLGDFVFNYFVNLLKVQKHAKEITTTEELQRQLLSGYTFSSVKGLSPQSLLDTLRLIHTLNPSEKIYGKTKAIKKIAKPDKQLFTLRAKQSKLKRALDRLTTLYLYSESSMSEADFVAKKAEITDNIAKTEAEISELVKTDIHSDITDSEFLRKASEFVISQQLVSRNYISYERLARTVDVNITREFIVGTIEQITVRDGHIDSILFRNGLYHKFIY

SEQ ID NO: 1641 - protein, 562 aa, Unknown
  Description of Unknown: Integrase B1642 sequence
  PTHR30461:SF3,cd00338,SM00857,G3DSA:1.10.10.2600,IPR036162, PF13408,PS51737,IPR025827,G3DSA:3.40.50.1390,IPR006119, IPR038109,PF07508,IPR011109,SSF53041,PTHR30461, PS51736,Coil,PF00239
MARKKVTESEGNAVAYARYATRKQVELPQEDAAIYARYSSHMQNDASIEQQVEECREYARTHNLRIVEVYADRALSGRNDKRPEFQKMLRHAEAGKFRVVLSYKSNRIARNMLHALSYEDKLAQMGVRVVYAKEEFGDNAAGRFALRTMMNVNQFYSENMAEDIKRGLMDAAMQCKVVSMIPLGYRKGADGKYEIDENEAAIVREIFQRVAAGESYAAIADDLNARKISTKHGKTWGKNSFRVLLSNERYIGVYLYGDLRIENGMPVIIEKELFNTVQHIVAKKPTKVNGRRRDNGDYLLTGKLFCGYCESPMVGVSGTSKTGILHHYYACQKQRLEKACHKKIVRRDWAERMVTEALMAYVLNDESIEWIADMVMSFKKKFIEEDSQIDYLEERLSESMKASENIMKAIEAGIFNNKTQERMLELEAEQRDLNSQLTAERALIPNVNREQIVYWLQSLRNGNAESRTFQAKLFDIFLLRVYLYDDHVKFIFNWDKENSGVEIPMEATSDDDPGACDDASCVRIESPRLHFFTAIPKRGRGTFFVLGQIGCESTTNFNCFVL

SEQ ID NO: 1642 - protein, 562 aa, Unknown
  Description of Unknown: Integrase B1643 sequence
  cd00338,SM00857,G3DSA:1.10.10.2600,IPR036162,PF13408, PS51737,IPR025827,G3DSA:3.40.50.1390,IPR006119,IPR038109, PF07508,IPR011109,SSF53041,PTHR30461,Coil, PF00239
MAYRKITDIRDTIGMRAVFYARVSTAEEEQLNAIELQIEENRGCIKDHGWKLVGEYIDRSKSGTMVKGRDDYQRLYEDLYEDLFDIVVIKDQERLQRNTLDWYLFINRVVQTGKLLFMYMDGKFYSPDDALITGVRAIIAEEFSRNLSKKLHNYHDHRIEKARQGQEIALQGSGNVYGWDKKDGKYYINPEQAKVRRLMCEGIMARKGSTLIAKELNDAGYRNTVGKPWKPMDIPKFVYDCKNVGTMIINKERHDFESKQTIKLPKEEWVYVENALPPIVTQEEWDLICKIHEERVIATGSDRRGKKTSGYSFSGKLVCGICGAPYWRKQRVSKDEYWVCSTKQTKGRRTRKRDSTMGKAGEINPLGCDNENISYNSLMEIMGVVSERLQANTDTIKHDMINWLTKLRKQLLEANGGHTEADLQRELSRKSKLLDAYLDGILNKQEYQKKAEELDERIIQLKAETEKNKANSGDIAEIDKVLANIDEEVSRYVDGNEKLKVEYLLEHLEQVQIFPDKVIVIVPILSEGIVVEKAQYVSREKWKRKNDFFKSVRQKRVYSDIA

SEQ ID NO: 1643 - protein, 562 aa, Unknown
  Description of Unknown: Integrase B1644 sequence
  PTHR30461:SF3,SM00857,IPR006118,G3DSA:1.10.10.2600,IPR036162, PS51737,G3DSA:3.40.50.1390,IPR006119,IPR038109,PF07508, IPR011109,SSF53041,PF00239,PTHR30461,PS00397, PS51736,Coil,cd00338
MKNKIAVYIRVSTTHQIDKESLPFQRRELENYAKYVLNIDDMEFFEDAGYSGKNIMRPAFQSMMSRIRLGEFSHILVWKIDRISRNIIDFANMFEELKKLNVTFVSKNEQFDTSSAIGEAILKIILVFAELERNLTAERVSDVMISRASTGQWNGGRVPLGYNYDKENHTFTVNQQEAEIVKFIFDYYIDNGSMVSIVNALKDKEIKTRTNGAFSLSAVATVLNNIFYTGKYRYNYRKQGDRQQVKPESEWIVIDNHHPAIISEEVFKRAEEIKQTNLRLKNEKGKIVKKNNIHLFANLLECDVCHNNFSSSLDRPRVNQGGYRHSMYNCYGRRIGSCKSKYVSDVYLGKFVFNYIANLYKAYCSFGKSTTFETFKKKMLRGNIFSDIKEVTNLEGIYNIFCSKYNDKATANIINYKNTQQDLGNELRIALSEKGKYERALARLKDAYLFSDDAMTQNEYISQKHSIEVKLSATNKKLDKLQSKDDTPFDDVEFLNILSYFILNQNLQDKREIDFVDFITSVDKKIISDFVHKMFVKFIISKGKIKSMTFRNGITNTFVYDD

SEQ ID NO: 1644 - protein, 562 aa, Unknown
  Description of Unknown: Integrase B1645 sequence
  PTHR30461:SF3,SM00857,G3DSA:1.10.10.2600,IPR036162,PF13408, IPR025827,G3DSA:3.40.50.1390,PS51737,IPR006119,IPR038109, PF07508,SSF53041,IPR011109,PTHR30461,Coil, PS51736,cd00338,PF00239
MRKKFNIDLSMLTPEEQQQFHDDPTTLTKGEVDVALYLRFSSERQKEQSIEGQLRDCIAYCKRKSFRIVAIYVDRATTARKDVEKRVHFQEMISDSIHHLWDFVVVWKLDRFARNREDSAVFKMRLRKNGVRVKSATETISENPEGIILESVLEGIAEYYSADLSQKITRGLRESAMKGHSVGGHVPLGYKIEDHKLVINPATAHIVQEAFQLYANGESMAEICRIFNGKGYRTAKNSEFNRSSFKSMFRNVRYIGTYIYKDIKKENAIPAIIDKDLFETVQRRLSLAADAPARGKAKVDYLLSGKLFCGHCGATMNGESGTSKTGAIHNYYTCYSRKRRKGCDKKPLKKDFIERIVAQDAMALLTNDVIEELADMAMSQADRDLKENTRIPELSTRLTEVEQGINNITKAIEKGIASDTLLNRLTELEKEKKDLTSQLREEEKYICRIDRDQIIFWLTKFQGGDIEDEDCRRRIIDLLVNSVTVWDEPDGYKITTAYNLTSCKTKTFRVSNTGSPSSEGFGFGELSSTKSKIRTFVRRDRGSDFSCLQLVLSRNEFKKEDA

SEQ ID NO: 1645 - protein, 562 aa, Unknown
  Description of Unknown: Integrase B1646 sequence
  PTHR30461:SF3,IPR036162,PS51737,IPR011109,PTHR30461, PF00239,G3DSA:1.10.10.2600,IPR006119,SSF53041,cd00338, SM00857,SSF57997,IPR025827,IPR038109,PS51736, PF13408,G3DSA:3.40.50.1390,PF07508,Coil
MENAYIYTRVSTLIQVDGFSLEAQEAEIRAFAEARKINIVGKYTDEGKSGKNAEHRPAFTQMMEDIRSKKDNIRYVLVFKLSRFARNTSDTAKYLQELSSYGIGLLGIKDGIDTSTVTGKMIANIMGAVAEVELENIHEQTLAGRQQKARNGLWNGAQAPFGYSLKDKKLMIYQKEAETVKEIFRLYTEEGQSISYIAKKLNDENIQREQRGNVKISGFTDRTVRIILSNPVYAGMISYGRRHTVKVEGKNNETKVVKQDDESKIILVDGVHEPIVSKETFAKAAERLKKNVAHRKTRSDSTTVYPLTGLIRCPDCGKNIFGYTAPPRKKKNGKEGYYPRYISYRCISGRDRNGISCSLANKYYSGTKLETEVKEVISSMVTIPEFVELISQKIDIQTDVNSLRKKQTAIRNEITKYSGNLFQTEKRLTELDIADRHYQSKVDSLNRILDDLYEKIEDAQTRLDEVDQEIAMVEKSAMTKKSIFEMLEGFSKYYDVMSPEDKKALLQAMVSFIELYPEKRDDKHLIKTIHFTFPVTYDGESGALFVRTNELQVECVVKLTRG

SEQ ID NO: 1646 - protein, 562 aa, Unknown
  Description of Unknown: Integrase B1647 sequence
  PTHR30461:SF3,cd00338,SM00857,IPR006118,G3DSA:1.10.10.2600, IPR036162,PS51737,G3DSA:3.40.50.1390,IPR006119,IPR038109, PF07508,IPR011109,SSF53041,PTHR30461,PS00397, PS51736,Coil,PF00239
MKNKIAIYIRVSTTHQIDKESLPFQRRELENYAKYVLNIDDMEFFEDAGYSGKNIMRPAFQSMMSRVRLGEFSHILVWKIDRISRNIIDFANMFEELKKLNVTFVSKNEQFDTSSAIGEAILKIILVFAELERNLTAERVSDVMISRASTGQWNGGRVPLGYNYDKENHTFTVNQQEAEIVKFIFDYYIDNGSMVSLVNALKDKEIKTKTNGAFSLSAVATVLNNIFYTGKYRYNYRKQGDRQQVKPKSEWIVIDNHHPAIISEEVFKRAEEIKQTNLRLKNEKGKIVKKNNIHLFSNLLECDVCHNNFSSSLDRPRVNQGGYRHSMYNCYGRRIGACKSKYVSDVYLGKFVFNYIANLYKAYCSFGKSTTFETFKKKMLRGNIFSDIKEVTNLEGIYNIFCSKYNDKATANIINYKNTKQDFGNELRIALSEKGKYERALARLKDAYLFSDDAMTQNEYISQKHSIEVKLSATNKKLDKLQSKDDTPFDDVEFLNVLSYFILNQNLQDKREIDFVDFITSVDKKIISDFVHKMFIKFIISNGKIKSMTFRNGITNTFVYDD

SEQ ID NO: 1647 - protein, 562 aa, Unknown
  Description of Unknown: Integrase B1648 sequence
  PTHR30461:SF3,SM00857,G3DSA:1.10.10.2600,IPR036162,PF13408, IPR025827,G3DSA:3.40.50.1390,PS51737,IPR006119,IPR038109, PF07508,IPR011109,SSF53041,PTHR30461,cd00338, PF00239
MPTGKNTARKYAAGGGSDNSCGVEPLRAVIYARYSSSGQREESIEGQLRDCYEFAKKHGIIVIGEYIDKAMTGRVDRRPDFQRMMKDSEKGRFNCVLLWKMDRFARNRYDSAMYKYKLKKNGIRIFYAKETIPDGPEGIILESVMEGYAEYYSENLAQNVKRGNYDSALELKTLGKTCLGLKTGPDGRYMIDQAEAVIIRRIFEEYAEGERAKDIYERLNSEGYRTSRGGKFNKNSLRRILSNKKYIGVYEYEDIYVENGIPAIITDRDLFERVQKMLKINHDAPARGKAQNFLLTTKLFCGLCGSPMIGDGGTSHTGKAYAYYSCTKRKRGRSCKKESVPKDWIEDLVVGELVKIVHNDELIEQIADRVMEYQKREKDQSGLHALEIRQKENEKAISNMLAAIEAGIITPSTKTRLMELEADRADIEKGIAHELLAEPEFERDQIIYFLERFRSGDINDEAYRIMLVDTFLNSVYLYDDDHLVLVMNYSGENCKVDLKLVEGAVSGDGCKGSAFAPSSAVEQEKSGRQDLNLFKLLLPAVEQETERRIRREVFGFYGRFRE

SEQ ID NO: 1648 - protein, 562 aa, Unknown
  Description of Unknown: Integrase B1649 sequence
  cd03768,PTHR30461:SF3,SM00857,IPR006118,G3DSA:1.10.10.2600, IPR036162,PS51737,G3DSA:3.40.50.1390,IPR006119,IPR038109, PF07508,IPR011109,SSF53041,PTHR30461,PS00397, PS51736,Coil,PF00239
MKNKIAVYIRVSTTHQIDKESLPFQCRELENYAKYVLNIDDMEFFEDAGYSGKNIMRPAFQSMMSRIRLGEFSHILVWKIDRISRNIIDFANMFEELKKLNVTFVSKNEQFDTSSAIGEAILKIILVFAELERNLTAERVSDVMISRASTGQWNGGRVPLGYNYDKENHTFTVNQQESEIVKFIFDYYIDNGSMVSLVNALKDKEIKTKTNGAFSLSAVATVLNNIFYTGKYRYNYRKQGDRQQVKPKSEWIVIDNHHPAIISEEVFKKAEEIKQTNLRLKNEKGKIVKKNNIHLFANLLECDVCHNNFSSSLDRPRVNQGGYRHSMYNCYGRRIGACKSKYVSDVYLGKFVFNYIANLYKAYCSFGKSTTFETFKKKMLRGNIFSDIKEVTNLEGIYNIFCSKYNDKATANIINYKNTQQDLGNELRIALSEKGKYERALARLKDAYLFSDDAMTQNEYISQKHSIEVKLSATNKKLDKLQSKDDTPFDDVEFLNVLSYFILNQNLQDKREIDFVDFITSVDKKIISDFVHKMFVKFIISKGKIKSMTFRNGITNTFVYDD

SEQ ID NO: 1649 - protein, 562 aa, Unknown
  Description of Unknown: Integrase B1650 sequence
  PTHR30461:SF3,SM00857,G3DSA:1.10.10.2600,IPR036162,PF13408, IPR025827,PS51737,G3DSA:3.40.50.1390,IPR006119,IPR038109, PF07508,IPR011109,SSF53041,PTHR30461,Coil, PS51736,cd00338,PF00239
MRKKFNIDLSMLTPEEQQQFHDDPTTLTKGEVDVALYLRFSSERQTEQSIEGQLRDCIAYCKRKSFRIVAIYVDRATTARKDVEKRVHFQEMISDSAHHLWNFVVVWKLDRFARNREDSAVFKMRLRKNGVRVKSATETISENPEGIILESVLEGIAEYYSADLSQKITRGLRESAMKGHSVGGHVPLGYKIEDHRLVINPATAHIVQEAFQLYANGESMAEICRIFNSKGYRTAKNSEFNRSSFKSMFKNVRYIGTYIYKDIKKENAIPAIIDKGLFETVQRRLSLAADAPARGKAKVDYLLSGKLFCGHCGATMNGESGTSKTGAIHNYYTCYSRKRRKGCNKKPLKKDFIERVVAQDAMALLTDDVIEELADMAMSQADRDLKENTRIPELSARLTEIEQGINNITKAVEKGIASDALLNRLTELEKEKKDLTSQLREEEKYIYRIDRDQVVFWLTKFQGGDIEDEDCRRRIIDLLVNSVTVWDEPDGYKITTAYNLTSCKTKTFRVSTAGSPSSEGFGFGELSSTKSKIRTFVRRDRGSDFSCLQLVLSRNEFKKEDA

SEQ ID NO: 1650 - protein, 562 aa, Unknown
  Description of Unknown: Integrase B1651 sequence
  PTHR30461:SF3,IPR036162,PS51737,IPR011109,PTHR30461, PF00239,G3DSA:1.10.10.2600,IPR006119,PF14287,SSF53041, IPR025378,SM00857,IPR025827,cd03770,IPR038109, PS51736,PF13408,G3DSA:3.40.50.1390,PF07508,Coil
MATNKNIQGQEEKITALYCRLSQDDNLEGESNSISNQKEILMTYAKKNGYLHPQFFVDDGISGTTFNRPGFQEMESLIEAGKVSTVIVKDLSRFGREHLLCGHYTEIVYPTLGVNFIAIQENVDTTKGIGTEMMPFHNIFNEWYAAQTSKKIRAVNEMKASKGMRISSTVPYGYKKIEGDKEQWYIDEPAAEIVRKIFNLCISGKGPSQIARQLEAEKVLTPTAYFNSVGKKTSNLMPTNIYAWRSNSIVHILENRQYTGCTVNGKSTTVSYKVHKKIEKSQEDYQIISNTQDAIISENTWLRAQELRRNKRRNTATGRRSLFSGLVYCADCGSKLHFCASKSLKKNQEFWRCSSYKDGRGTCTIHFIRDVVLEAIVKEAISELADFVRCYNSVFLYLISENKGAESINREKSLRAKTESAKQRISDLDKLFSRIYEDNILGKLSDERYSRMANEYEAEQKRLISEVEENEKVLIELQKQTVDMKMLYQGLMEFTEMKQLTPTVVNKLIERIEIHNNEKKHSHNNVKVDIYFTAAGLFDIPTEQQLIDTMERVKQKKAEKSA

SEQ ID NO: 1651 - protein, 562 aa, Unknown
  Description of Unknown: Integrase B1652 sequence
  PTHR30461:SF3,SM00857,G3DSA:1.10.10.2600,IPR036162,PF13408, IPR025827,G3DSA:3.40.50.1390,PS51737,IPR006119,IPR038109, PF07508,IPR011109,SSF53041,PTHR30461,Coil, PS51736,cd00338,PF00239
MKKQQKCYIYTRVSTSMQVEGYSLDAQKDKLKKYADYQEMYIVGEYSDEGKFGKSVEGRPQFKQMLADVESGKDNVDYVLVFKLSRFGRNAADVLSSLQKMQDYGVNLICVEDGIDSSKDVGKLMISVLSAVAEIERENILVQTMEGRRQKAREGRWNGGFAPYGYQLINGELIIAEDEAEIIRIIYDKFVNTTMGMAAIAAFLNNSGYKKKLRQNNTIEGFSTSFVKGVLDNPIYCGKLAFGRRKNEKIPGTRNEYHIVKQKDYLLSDGVHEAIISEEMWNQAHRKRQETGVLQVKTHSLEHEHILSGIIKCPVCGSGMYGNVNRKKHPDGGYYKDYFYYACKHRKLVDGHRCTYKRQWNEDRINAAVEEIIRKFVKNPKFEQEIRKQIGSSIDTSELDKEYDGLKDRLSQTTGAKNRLADQMDHLSVSDKNYDKKYNDMQERLDKLYDEITDIEDAMEEVETRLYNIRQDKISEDNVYQFLLFFDKLYDKFTDLEKKTFLKSFLSDVFIYEEEQKDGRILKGLRFKFPIYMNGRNVLGVDWDNESTDETVCQIIPQKRYT

SEQ ID NO: 1652 - protein, 562 aa, Unknown
  Description of Unknown: Integrase B1653 sequence
  PTHR30461:SF3,SM00857,G3DSA:1.10.10.2600,IPR036162,PF13408, IPR025827,G3DSA:3.40.50.1390,PS51737,IPR006119,IPR038109, PF07508,SSF53041,IPR011109,PTHR30461,Coil, PS51736,cd00338,PF00239
MRKKFNIDLSMLTPEEQQQFHDDPTTLTKGEVDVALYLRFSSERQKEQSIEGQLRDCIAYCKRKSFRIVAIYVDRATTARKDVEKRIHFQEMISDSAHHLWNFVVVWKLDRFARNREDSAVFKMRLRKNGVRVKSATETISENPEGIILESVLEGIAEYYSADLSQKITRGLRESAMKGHSVGGHVPLGYKIEDHKLVINPATAHIVQEAFQLYANGESMAEICRIFNGKGYRTAKNSEFNRSSFKSMFRNVRYIGTYIYKDIKKENAIPAIIDKDLFETVQRRLSLAADAPARGKAKVDYLLSGKLFCGHCGATMNGESGTSKTGAIHNYYTCYSRKRRKGCDKKPLKKDFIERIVAQDAMALLTNDVIEELADMAMSQADRDLKENTCIPELSTRLTEVEQGINNITKAIEKGIASDTLLNRLTELEKEKKDLTSQLREEEKYICRIDRDQIIFWLTKFQGGDIEDEDCRRRIIDLLVNSVTVWDEPDGYKITTAYNLTSCKTKTFRVSTAGSPSSEGFGFGELSSTKSKIRTFVRRDRGSDFSCLQLVLSRNEFKKEDA

SEQ ID NO: 1653 - protein, 562 aa, Unknown
  Description of Unknown: Integrase B1654 sequence
  PTHR30461:SF3,SM00857,G3DSA:1.10.10.2600,IPR036162,PF13408, IPR025827,PS51737,G3DSA:3.40.50.1390,IPR006119,IPR038109, PF07508,IPR011109,SSF53041,PTHR30461,cd00338, PF00239
MPTSKNTARKYAAGGSSDNSCGVEPLRAVIYARYSSSGQREESIEGQLRDCYEFAKKHGIIVIGEYIDKAMTGRVDRRPDFQRMMKDSEKGRFNCVLLWKMDRFARNRYDSAMYKYKLKKNGIRIFYAKETIPDGPEGIILESVMEGYAEYYSENLAQNVKRGNYDSALELKTLGKTCLGLKTGPDGRYMIDQAEATIVRRIFEEYAEGERAKDIYERLNSEGYRTSRGGKFNKNSLRRILSNKKYIGVYEYEDIYVENGIPAIITDRDLFERVQKMLKINHDAPARGKAQNFLLTTKLFCGLCGSPMIGDGGTSHTGKAYAYYSCTKRKRGRSCKKESVPKDWIEDLVVGELVKIVHNDELIEQIADRVMEYQKREKDQSGLHALEIRQKENEKAISNMLAAIEAGIITPSTKTRLMELEADRADIEKGIAHELLAEPEFERDQIIYFLERFRSGDINDEAYRIMLVDTFLNSVYLYDDDHLVLVMNYSGENCKVDLKLVEGAVSGDGCKGSAFAPSSAVEQEKSGRQDLNLFKLLLPAVEQETERRIRREVFGFYGRFRE

SEQ ID NO: 1654 - protein, 561 aa, Unknown
  Description of Unknown: Integrase B1655 sequence
  cd03768,PTHR30461:SF3,SM00857,IPR006118,G3DSA:1.10.10.2600, IPR036162,PS51737,G3DSA:3.40.50.1390,IPR006119,IPR038109, PF07508,IPR011109,SSF53041,PTHR30461,PS00397, PS51736,Coil,PF00239
MDKKKKSALYVRVSTTHQIDKDSLPLQRSDLTNYTKYVLGIEDFEIFEDAGYSGGTTDRPAYQDMMNRIKKGEFTHLIVWKIDRISRNLRDFSEMYDELKKYNVTFISKNEQFDTSTAMGEAMLKIILVFAELERKLTGERVFSVMISRAQKGLWNGATVPLGYEWDAETKFPRPYDSEAKVVQYIYDQYEIIKSTTKLAKKLNIEKIPTKRNGTWTPRTVGSILTNPFYIGTYRYNTKTRKTRRWKNKSEWVVVEDNHQAIINKEQFERVVNIIQSNYKGDKNYQRTNNKVHILSGIASCHKCGKKMHSGLDRARKEGFTPSRYTCYAFNVNYTCANYSSDLAILPGLINYIANYITLQERITPKHSLRDMESILLRGKYFEDIDHIEKQDLKNTYNLLINNTLVTYNSLEDEKKEAIVSQNAIYEAEKEKYIKALKRLDDLYLYDINSMSQKDFVIKRKEISDKIESVNKKIQEVKLNDTPFINNDDFGVLSKASFYLLTKNLSSVKNIDVISLLNNLDKQTVKDFINAIITDVSVERGKIYNITFKNGIVHHFIYKNQ

SEQ ID NO: 1655 - protein, 561 aa, Unknown
  Description of Unknown: Integrase B1656 sequence
  PTHR30461:SF3,cd00338,SM00857,G3DSA:1.10.10.2600,IPR036162, PF13408,PS51737,IPR025827,G3DSA:3.40.50.1390,IPR006119, IPR038109,PF07508,IPR011109,SSF53041,PTHR30461, PS51736,Coil,PF00239
MKKEKIKVYTYTRVSTAMQIDGYSLDAQKSRMKAFAEFNDYEIAHEYEDAGKSGKSIEGRTQFNQMMEDIKTGKDGVSFVLVFKLSRFGRNAADVLSTLQVMQDFGVNLICVEDGIDSSKDAGKLMISVLSAVAEIERENIRVQTMEGRIQKAREGKWNGGFAPYGYKLVDGKLEINEEEAPAIRTIYEQYVTTDSGANGIAKYLENHGISKVQRQNGKNPLFDARLIRMILKNPVYCGKIAYGRRKTEKVHGTRNEYRLVEQENFLLVDGLHEAIIPEDVWQAAQVKLAAQAKRYEHVNKGKNECTHLLSGIVKCPICGVGMYGNKCVKRKADGSKYKDFYYYGCKHRSMTRGHKCDYKKQIRKELLDDAVAEVICKLVSNPKFAAMMQEKINMKVDTTAIEQEISNYEKRLRQAYSTKSKLIEEIDSLDPDDRHYSRRKSDLDDRLYGMYDKIEELESLLIAARAKKQAIEAEKLTGDNIYKVLIYFDQLYGKMNDREKRQLIEELISEIQIYPERQPNGQWLKSIKFRLPIIEEDMNISLDNEQQVETVVELSRKIKD

SEQ ID NO: 1656 - protein, 561 aa, Unknown
  Description of Unknown: Integrase B1657 sequence
  PTHR30461:SF3,cd00338,SM00857,G3DSA:1.10.10.2600,IPR036162, PF13408,PS51737,G3DSA:3.40.50.1390,IPR025827,IPR006119, IPR038109,PF07508,IPR011109,SSF53041,PTHR30461, PS51736,Coil,PF00239
MKNKKIKCDIYTRVSTTMQVDGYSLDAQKEKLKRYAEFQNMEIVNEYSDEGKSGKSVEGRPEFQRMLDNIENGTDEVQFVLVFKLSRFGRNAADVLNSLQRMQDFGVNLICVEDGIDSSKDSGKLMISVLSAVAEIERENILVQTMEGRKQKAREGKWNGGFAPYGYELVNGELQIAEDEAEIIRLIYDKFIHTNMGISAIAAWLNQHGYKKKKRQNNTLDAFASSFIKGVLDNPVYCGKLAYGRRKNEKVSGTRNEYRIVKQENYMLHDGIHEGIISETDWELAHQKREKTGVKYEKTHSLDHEHILSGILRCPLCGSGMYGNVNRKKKKDGTLYKDYFYYACKHRRLVDGHKCGYRKQWSEEKINNAVEEVIRKLVKNPKFEEAILNKIGSRIDTEEIEKEIEGLEKQHKQLTGAKARLGQQMDSLDIMDKFYEKKYQDMETRLYRLYDEIEGVENSIEEVKNRLLNIQQQKISEENVYQFLLYFDKLYDKFTDLEKKEFLNSFVEQVDIYEQEQPDGRFLKHIKFRFPVYFGDRETQELCWDNESTVETVCLLARKDK

SEQ ID NO: 1657 - protein, 561 aa, Unknown
  Description of Unknown: Integrase B1658 sequence
  cd03768,PTHR30461:SF3,SM00857,IPR006118,G3DSA:1.10.10.2600, IPR036162,PS51737,G3DSA:3.40.50.1390,IPR006119,IPR038109, PF07508,IPR011109,SSF53041,PTHR30461,PS00397, PS51736,Coil,PF00239
MDKKKKSALYVRVSTTHQIDKDSLPLQRSDLTNYTKYVLGIEDFEIFEDAGYSGGTTDRPAYQDMMNRIKKGEFTHLIVWKIDRISRNLRDFSEMYDELKKYNVTFISKNEQFDTSTAMGEAMLKIILVFAELERKLTGERVFSVMISRAQKGLWNGATVPLGYEWDAETKFPRPCDSEAKVVQYIYDQYEIIKSTTKLAKKLNIEKIPTKRNGTWTPRTVGSILTNPFYIGTYRYNTKTRKTRRWKNKSEWVVVEDNHQAIINKEQFERVVNIIQSNYKGDKNYQRTNNKVHILSGIASCHKCGKKMHSGLDRARKEGFTPSRYTCYAFNVNYTCANYSSDLAILPGLINYIANYITLQERITPKHSLRDMESILLRGKYFEDIDHIEKQDLKNTYNLLINNTLVTYNSLEDEKKEAIVSQNAIYEAEKEKYIKALKRLDDLYLYDINSMSQKDFVIKRKEISDKIESVNKKIQEVKLNDTPFINNDDFGVLSKASFYLLTKNLSSVKNIDVISLLNNLDKQTVKDFINAIITDVSVERGKIYNITFKNGIVHHFNYKNQ

SEQ ID NO: 1658 - protein, 561 aa, Unknown
  Description of Unknown: Integrase B1659 sequence
  SM00857,G3DSA:1.10.10.2600,IPR036162,PF13408,PS51737, IPR025827,G3DSA:3.40.50.1390,IPR006119,IPR038109,PF07508, SSF53041,IPR011109,PTHR30461,Coil,cd00338, PF00239
MAYRKITDIKDTIGMRAVFYARVSTAEEEQLNAIELQIEENRGCIKDHGWKLVGEYIDRSKSGTMVKGRDDYQRLYEDLYEDLFDIVVIKDQERLQRNTLDWYLFINRVVQTGKLLFMYMDGKFYSPDDALITGVRAIIAEEFSRNLSKKLHNYHDHRIEKARQGQEIALQGSGNVYGWDKKDGKYYINPEQAKVRRLMCEGIMARKGSTLIAKELNEAGYRNTVGKPWKPMDIPKFVYDCKNVGTMIINKERHDFESKQTIKLPKEEWVYVENALPPIVTQEEWDLICKIHEERVIATGSDRRGKKTSGYSFSGKLVCGICGAPYWRKQRVSKDEYWVCSTKQTKGRRTRKRDSTMGKAGEINPLGCDNENISYNSLMEIMGVVSERLQANTDTIKHDMINWLTKLRKQLLEANGGHTEADLQRELSRKSKLLDAYLDGILNKQEYQKKAEELDERIIQLKAETEKNKANSGDIAEIDKVLANIDEEVSRYVDGNKKLKVEYLLEHLEQIQIFPDKVIVIVPILSEGIVVEKTQYVSREKWRGKKYVIKDYCRSLKTNCW

SEQ ID NO: 1659 - protein, 561 aa, Unknown
  Description of Unknown: Integrase B1660 sequence
  PTHR30461:SF3,cd00338,SM00857,G3DSA:1.10.10.2600,IPR036162, PF13408,PS51737,IPR025827,G3DSA:3.40.50.1390,IPR006119, IPR038109,PF07508,IPR011109,SSF53041,PTHR30461, mobidb-lite,Coil,PF00239
MPRKPAKHPAKPKRGKKLEVEEPGVLYGRYSSHNQKDISVEQQFEKGYELAAEYGIRIIDTYADRAVSGRTDKRRDFQRMMTDAAKGKFRYVIAWKSNRMGRNMLEALINEARLQDLGVRVLYVEEDFDDTAAGRFAARSMMNVNQFYSENMAEDIKRGLYDNAANCMVANGHLPYGYKADETLHYAIDEPKAAVIREIFTRVSCGEAFVDIMASLNARGIKTSYGRPWGRSSFQKILSNERYRGIYIYGDVRKEGGIPRIISDELYFKVQEVITTKKNPQGRHRVNGDYLLTGKLFCGHCKSPMTGISGTSRSGNLHYYYVCQKRRTEKTCEKKNLRRDDIELQVAKAIKRRTLDDDTINWIADSVVEYSQHQESASGIGLLEDQLKDTQRSIKNLMAAIEQGIITPTTKARLMELEKEQSDIDRKITMAKADVIPVNRDQLVGWLKKLQAGDVHDKKYQAELFDTFLIAVYVYDNPDGQDYMKVVFNYAGSKNTVEIPLDPSVIDNVENIETGAVRLSSAQVHQSRARRTERSPGSAPISAIYMVGGVFVLVCPLDAEE

SEQ ID NO: 1660 - protein, 561 aa, Unknown
  Description of Unknown: Integrase B1661 sequence
  PTHR30461:SF3,cd00338,SM00857,G3DSA:1.10.10.2600,IPR036162, PF13408,PS51737,G3DSA:3.40.50.1390,IPR025827,IPR006119, IPR038109,PF07508,IPR011109,SSF53041,PTHR30461, Coil,PF00239
MYEEIKTACLYLRYSSSNQTEQSIEGQMHVCQDFCQRHNIRIVEMYIDRATSASKDIEKRVEFLKMIKDSEKGNFNAVIVYKLDRFARSRYDSATYKYRLKRNGVQLISATENITQDPEGIILESVLEGMAEFYSAELSQKINRGMRESAMKHNSIGGAIPLGYKTVDKKLVIDETTAPIVREAFQMYADGESVAEICRTFNNRGYKTSKGTRFGKSSFTKIFRNEKYIGVYKYHDYRAEDVIPPIIDKDLWDRVQVRVGKIKKAPARNKARHTYLLTGKLFCGHCGSAMNADGNSQGYLYYRCYGKKNLDKQCNKRNMEKNLIERLVAQDAMSFLTDEYIEKIATIACDRNKQEIESDSPIPVIRDRIRQVDVSLNNLLKAIETGSAPDMLVKRMGELETEKKDMEVQLKKEMAHQVYIDKEQVIFWLEKFREGDINDEEFCQTVIDLFVNSVTVWDEPDDKFKITIAYNLTSIPQKTYRLSKDGRLSDYASNTPQKRSHKKIFSFCGTDFSVFVLVFAIIPSPSEPDTDTAADGSFPRLPRRCHSYSEVLLRLYRQTAV

SEQ ID NO: 1661 - protein, 561 aa, Unknown
  Description of Unknown: Integrase B1662 sequence
  PTHR30461:SF3,SM00857,G3DSA:1.10.10.2600,IPR036162,PF13408, IPR025827,G3DSA:3.40.50.1390,PS51737,IPR006119,IPR038109, PF07508,SSF53041,IPR011109,PTHR30461,Coil, PS51736,cd00338,PF00239
MREVEILKKKQLKCYLYTRVSTSMQVDGYSLDAQRDKLRKYAAYEDMIVAGEYSDEGFSGKNIQGRQDFQRMLNDIQDGKDDVSYVLVFKLSRFGRNAADVLNSLQLMQDFGVNLICVEDGIDSSKDAGKLMISVLSAVAEIERENIRTQTMAGREQKAREGKWNGGFAPYGYKLEDGNLVIAEDEVEVIRVIYDRYIHTNEGVAGVAKYLNRNGYVKKLRQNNTIPGFSRDFVKNVLYNPVYMGKIAYGRRRTEKKQGTRNEMHVVEQSEFPVYEGQHEAIISEEDWHLAQEKRKINSFKREKVNNPDHAHILSGILKCPCCGKSMYGNIAKAHSKDKKTRYYYYCKNTVTPTGHECSFRLNIEQTEINKFVAKIISAMVNNPRFVEAIQAKIGTAVDTEDMEKQIAVLQGQLKQAFGTKSRLERQMDTLDINDVHYDRKILDLQRRYDEQYDTIEEIEVQIGELQSQIRNIQQEKISGDNIYRLLLAFDEVYHSATEAEQKEFMKAFIERIEMFPEKRKDGSWIKKIVFNFPVPVDGEEVKELPLETETTVETVCLLVK

SEQ ID NO: 1662 - protein, 561 aa, Unknown
  Description of Unknown: Integrase B1663 sequence
  PTHR30461:SF3,SM00857,G3DSA:1.10.10.2600,IPR036162,PF13408, IPR025827,G3DSA:3.40.50.1390,PS51737,IPR006119,IPR038109, PF07508,SSF53041,IPR011109,PTHR30461,Coil, PS51736,cd00338,PF00239
MAKPEVSELAVVYARYSSHSQGEQSIEGQLSNARDYAAAHGYTIVHEYVDRAKSGRTDNRAEFQQMLKDTAKRQFSVIILWKVDRFGRNREEIAINKMKCRKNGVRVEYVAETIPDSPEGVILESVLEGFAEYYSLQLSQNIRRGRAESAEKCQSLGGNRPLGYKTGPDKKFVIDENTAPTVKMIFTMYADGKTVTEIVDKLNELGLRTLRGGPFTKNSLHSILKNKKYIGIYEYQGREIKDGVPRIIEDDVFNKVQEMLKINKRAPAKTWSRADYILTDKLFCGKCGALMFGESGTSKTGAKHNYYICSNKKRFRSCDKKAVRQADIEDTVLNATHELLQDDELLDYIVDRTWEYYLAQDNSQEELRNLQRQLAQTDTAISNLIRAIEAGILTEETKKRMDELTQQKADLKASIADREIARGFHLQKSHIAFYLRSLRDADWSDKEAQKRLIQTFVNAVFVYDDHITLTYNFSGDKNTITLRDMQRFEDGEEFGCRASRSTTYEKSELIPHRECVRIFHFYQGYFLLMFIPGGFFILRVFLLFAHSIPDRSPATMIAENH

SEQ ID NO: 1663 - protein, 561 aa, Unknown
  Description of Unknown: Integrase B1664 sequence
  cd00338,SM00857,G3DSA:1.10.10.2600,IPR036162,PF13408, PS51737,G3DSA:3.40.50.1390,IPR025827,IPR006119,IPR038109, PF07508,SSF53041,IPR011109,PTHR30461,PS51736, Coil,PF00239
MKAKIVRMLLRVSSDQQLEADGDLSVQRDILKEYINRHPDWILDEKEYFEGSNSAYKNTAEERDTLQEILQDAKNNEFDILVPYKDDRVGRLMMNTPEYILELKKNNVDVYSAKDGCISPKSADDIEGMMMLVFRYFNAQKSSKDTGMRVKDTMKKLVERGRFVGGKAPYGYSLEPSGEISKHGRVLKCLVVIPEKAKVVQYIYDLSLNKEYGSSKIASILNENDYWKSLAPNDYWKGGTITSILTNPIYTGRVAYNRRERIDGHYRTTDSKNWLISPVVNEKIIIIDEATWNMVQLKRSKRNFKYSKSLEERGINVIKRNDGMLSLVDVLHCGYCGSKMVNGSKYNYWEIKGTGEKRASKTPVYRCQAAKEGIPHDSTKQFRADKIEPIIFESLTTYIEFLQKNTTVLDVIQNKQIGEKKAKEKELLQAKRELQKIQHKISSMEDKMPDAIVGDYDLTPKQLNLYIQKEKDKERDQKNIIKFKQEALDKFSITNEEWSKLCENIPTWKEVFMNGDNFSKRVLVNSLVERIDIKSDSIKIRFKINLDDYLPESRMTNNDMV

SEQ ID NO: 1664 - protein, 561 aa, Unknown
  Description of Unknown: Integrase B1665 sequence
  PTHR30461:SF3,SM00857,G3DSA:1.10.10.2600,IPR036162,PF13408, PS51737,G3DSA:3.40.50.1390,IPR025827,IPR006119,IPR038109, PF07508,SSF53041,IPR011109,PF00239,PTHR30461, PS51736,Coil,cd00338
MRKKNKFPIDLSMLTDLEIQQFVDDPSTLYDGDIDVCLYLRFSSERQGEQSIEGQLRDCREYCKRNSFRIVAIYVDRAKTARQKVEKRVFFQQMVQDSAKRAWKMVVVWKLDRFSRNRTDSAIYKSRLRKNGVRVMSATESITDSPEGIILESVLEGMAEFYSAELSQKITRGMRESALKHQNVGGHVPLGYRIESKKLVINPVTAPIVLEAFTRYADGESVADICARFNDLGYKTAKGAEFNKNSFHAMFRNERYIGTYTYKDIREEGVIPAIVPQEVWERVQDRLKENSLAPARGKALVDYMLVGKLFCGHCDSMMVGESGTGKSGKKYNYYTCAGRKRKKNCRKRPLKKDWFETLVAEDTKALLTDELINELADMAIQQSEKDLQNNTIIPELEAKLSETSSGISNIISMVEKGVASETLARRLTELEKEKRDLERRLVKEKKNIVVLEKPHIVHWLKQFQSGNIDDPDFRRKLIDLLVNSVTVWDGPDDDELTITYVYNLTEGNRKTVRVKNGGNPSDARTCGGSNMALISPPLKGYPNTMFMIGMLFGYTAKHRHP

SEQ ID NO: 1665 - protein, 561 aa, Unknown
  Description of Unknown: Integrase B1666 sequence
  SM00857,G3DSA:1.10.10.2600,IPR036162,PF13408,IPR025827, G3DSA:3.40.50.1390,IPR006119,IPR038109,SSF53041,PF00239, PTHR30461,Coil,cd00338
MKAIIYARQSSGSDDISESVENQIANCKKQAEKENYQVIGIFSDLNTSGKTYPEGAESIAENDSAFLNWYDQQTGTKKYRHGLGEVIKLLDQADVLIIDEMTRLYRPVTRSFLESYVNQKITEANVKIIQVKGGKLDLSQFDQSLIQMLKNAIQDEAIANQKAKAKQQFQKLRDNGYLCNGARAFGLKYLGNKRIEVDSEAAKCIKFVFESIAAYRPYNQIIKEANQRFRHLFPKCFYSSNLYHIAENPLYCGLLRNTEGQLVKAVQLEGQEVVSYDLWQTVQRIINRNREQQPRRAKKHWLPFSGKLHCGNCGSRLVCINDKGKIIYWCKSGYYTSNSQCSSSRIRFIGTDKEFGLYQCSFPFFIIAMIERQKKAIAIWEDRKQYDSIKMQIDQIETNEQSLIDLVFDGIISADELKERLKKHKVKKLELQEKLRSLEMTTDDQWEDYKNLALAEELDSITECHLPNQWYEQYLNQVIDKITINYDCITYSTIYGECSIPRLRYKNRNFLPQWEVSLLKELNHSISDYNLIDSQTKFLITFKTGTKQTLADWGRLIIQTL

SEQ ID NO: 1666 - protein, 561 aa, Unknown
  Description of Unknown: Integrase B1667 sequence
  SM00857,G3DSA:1.10.10.2600,IPR036162,PF13408, IPR025827,G3DSA:3.40.50.1390,PS51737,IPR006119, IPR038109,PF07508,SSF53041,IPR011109, PTHR30461,Coil,cd00338,PF00239
MAYRKITDIKDTIGMRAVFYARVSTAEEEQLNAIELQIEENRGCIKDHGWKLVGEYIDRSKSGTMVKGRDDYQRLYEDLYEDLFDIVVIKDQERLQRNTLDWYLFINRVVQTGKLLFMYMDGKFYSPDDALITGVRAIIAEEFSRNLSKKLHNYHDHRIEKARQGQEIALQGSGNVYGWDKKDGKYYINPEQAKVRRLMCEGIMARKGSTLIAKELNDAGYRNTVGKLWKPMDIPKFVYDCKNVGTMIINKERHDFESKQTIKLPKEEWVYVENALPPIVTQEEWDLICKIHEERVIATGSDRRGKKTSGYSFSGKLVCGICGAPYWRKQRVSKDEYWVCSTKQTKGRRTRKRDSTMGKAGEINPLGCDNENISYNSLMEIMEVVSERLQANTDTIKQDMINWLTKLRKQLLEANGGHTEADLQRELSRKSKLLDAYLDGILNKQEYQKKAEELDERIIQLKTETEKNKANSGDIAEIDKVLANIDEEVARYVDGNEKLKVEYLLEHLEQVQIFPDKVIVIVPILSEGIVVEKTQYVSREKRSRKNHNYENAVGFNEAYFR

SEQ ID NO: 1667 - protein, 561 aa, Unknown
  Description of Unknown: Integrase B1668 sequence
  PTHR30461:SF3,SM00857,IPR036162,PF13408,PS51737, IPR025827,G3DSA:3.40.50.1390,PF14287,cd03770,PF07508, IPR006119,SSF53041,IPR011109,PTHR30461,Coil, IPR025378,PF00239
MFHQSNTAAALQFPYNAMSVEAITALYCRLSRDDELQGDSNSIINQKKILQKYALEHGYTNFRFYIDDGISGTTFNRPGFQEMIADVEAGIVKRVIIKDMSRFGRDYLQVGMYTEIMFPEHDVHFIAVNDGVDSTQGDNEFTPFRNIINEWYAKDTSKKIRAVMKVKGNAGEHLTTSAPYGYMKDPEDSKHWIPDREAADVVYEIGLYVMDGFGPSQIARKLRERKILTPAAYYESKGIPCNVKKQGDPYGWDNTTIAGIMDRWREYLGHTVNFKTTKKSYKSKKKIKNPESEWVIFENTHEPIWTEAIAEAVKQARQSRRRPTKMGEMGMFSGMMYCADCGSILYQCRATGFRKDQEYYICSGYRKGKQVCNTPHSIRTVILEELILQNLREIVSFARSHENRFAQMVMDMDVKERNKGLAQKRRLLSESKKRITELDMIFKRLYEDNISGKLTDERFHKLSTDYEAEQAGLQAQAAMLREEIEEAESKSANVDRFLSVVRQYTDIPELTPRILHEFVEKIVIHAATDPHSKINRRQEVDIYYKGIGILEMSKVFDSRQK

SEQ ID NO: 1668 - protein, 561 aa, Unknown
  Description of Unknown: Integrase B1669 sequence
  SM00857,G3DSA:1.10.10.2600,IPR036162,PF13408,IPR025827, G3DSA:3.40.50.1390,PS51737,IPR006119,IPR038109,PF07508, SSF53041,IPR011109,PTHR30461,Coil,cd00338, PF00239
MAYRKITDIKDTIGMRAVFYARVSTAEEEQLNAIELQIEENRGCIKDHGWKLVGEYIDRSKSGTMVKGRDDYQRLYEDLYEDLFDIVVIKDQERLQRNTLDWYLFINRVVQTGKLLFMYMDGKFYSPDDALITGVRAIIAEEFSRNLSKKLHNYHDHRIEKARQGQEIALQGSGNVYGWDKKDGKYYINPEQAKVRRLMCEGIMARKGSTLIAKELNEAGYRNTVGKPWKPMDIPKFVYDCKNVGTMIINKERHDFESKQTIKLPKEEWVYVENALPPIVTQEEWDLICKIHEERVIATGSDKRGKKTSGYSFSGKLVCGICGAPYWRKQRVSKDEYWVCSTKQTKGRKTRKRDSTMGKAGEINPLGCDNENISYNSLMEIMGVVSERLQANTDTIKQDMINWLTKLRKQLLEANGGHTEADLQRELSRKSKLLDAYLDGILNKQEYQKKAEELDERIIQLKAETEKNKANSGDIAEIDKVLANIDEEVARYVDGNEKLKVEYLLEHLKQVQIFPDKVIVIVPILSEGIVVEKTQYVSREKRSRKDNTVQLHQFRYYQGCR

SEQ ID NO: 1669 - protein, 561 aa, Unknown
  Description of Unknown: Integrase B1670 sequence
  PTHR30461:SF3,cd00338,SM00857,G3DSA:1.10.10.2600,IPR036162, PF13408,PS51737,G3DSA:3.40.50.1390,IPR025827,IPR006119, IPR038109,PF07508,IPR011109,SSF53041,PTHR30461, PS51736,Coil,PF00239
MARSKKTECLPLERIGVIYARYSSHNQKEESIEQQVEECTSFALLNGIKIVHVYADKALSGRTDKRPQFQRLMRDAEKRSFSVVVAYKSNRIARDMLNALKYEDRLGKYGIETLYAKEEFGNTAAGRFALRTMMNVNQFYSENMAEDIKRGMLDNAENCKVNGALPLGYVSGPDKRYAIEPKEAEIVRGIYDKVLEGVSFADIANDLNACGVRTKHGSLWNKCSFHRILTNDVYIGVYRHSGVVKEGGVPPILEREVFIAMQKYLETKKNPRGRHRENGDYLLTGKLRCGYCESFMVGVSGTSKTGDKHYYYTCNSRHAGSGCKKENVRRDTIEYTVAALTQQVVFKEDIIEWIATAAVKLAKEASGQNEIDAMEAELAEDRKATKNIMAAIEQGIFTATTKSRLLELEADIASLEQSIRDAKAISEGKLLEKERVVYFLTSLREGNLHSKTYQKRLIDTFVRAVYLWDDRIGIDYYYAGKDSMVKYSLSEIEADIGENIREVLKDSLTGHHVAADCISFAATFYASHEKSLLTHFVAAPPKIAIADAGLRFCCSNLIIDP

SEQ ID NO: 1670 - protein, 561 aa, Unknown
  Description of Unknown: Integrase B1671 sequence
  SM00857,G3DSA:1.10.10.2600,IPR036162,PF13408,PS51737, IPR025827,G3DSA:3.40.50.1390,IPR006119,IPR038109,PF07508, SSF53041,IPR011109,PTHR30461,Coil,cd00338, PF00239
  MOD_RES (542)..(545): Any amino acid
MAYRKITDIKDTIGMRAVFYARVSTAEEEQLNAIELQIEENRGCIKDHGWKLVGEYIDRSKSGTMVKGRDDYQRLYEDLYEDLFDIVVIKDQERLQRNTLDWYLFINRVVQTGKLLFMYMDGKFYSPDDALITGVRAIIAEEFSRNLSKKLHNYHDHRIEKARQGQEIALQGSGNVYGWDKKDGKYYINPEQAKVRRLMCEGIMARKGSTLIAKELNDAGYRNTVGKPWKPMDIPKFVYDCKNVGTMIINKERHDFESKQTIKLPKEEWVYVENALPPIVTQEEWDLICKIHEERVIATGSDRRGKKTSGYSFSGKLVCGICGAPYWRKQRVSKDEYWVCSTKQTKGRRTRKRDSTMGKAGEINPLGCDNENISYNSLMEIMGVVSERLQANTDTIKQDMINWLTKLRKQLLEANGGHTEADLQREISRKSKLLDAYLDGILNKQEYQKKAEELDERIIQLKAETEKNKANSGDIAEIDKVLANIDEEVARYIDGNEKLKVEYLLEHLEQVQIFPDKVIVIVPILSEGIVVEKTQYVSREKXXXXKVRFTDLSEEMFQDTY

SEQ ID NO: 1671 - protein, 561 aa, Unknown
  Description of Unknown: Integrase B1672 sequence
  cd03768,PTHR30461:SF3,SM00857,IPR006118,G3DSA:1.10.10.2600, IPR036162,PS51737,G3DSA:3.40.50.1390,IPR006119,IPR038109, PF07508,IPR011109,SSF53041,PTHR30461,PS00397, PS51736,Coil,PF00239
MDKKKKSALYVRVSTTHQIDKDSLPLQRSDLTNYTKYVLGIEDFEIFEDAGYSGGTTDRPAYQDMMNRIKKGEFTHLIVWKIDRISRNLRDFSEMYDELKKYNVTFISKNEQFDTSTAMGEAMLKIILVFAELERKLTGERVFSVMISRAQKGLWNGATVPLGYEWDAETKFPRPCNSEAKVVQYIYDQYEIIKSTTKLAKKLNIEKIPTKRNGTWTPRTVGSILTNPFYIGTYRYNTKTRKTRRWKNKSEWVVVEDNHQAIINKEQFERVVNIIQSNYKGDKNYQRTNNKVHILSGIASCHKCGKKMHSGLDRARKEGFTPSRYTCYAFNVNYTCANYSSDLAILPGLINYIANYITLQERITPKHSLRDMESILLRGKYFEDIDHIEKQDLKNTYNLLINNTLVTYNSLEDEKKEAIVSQNAIYEAEKEKYIKALKRLDDLYLYDINSMSQKDFVIKRKEISDKIESVNKKIQEVKLNDTPFINNDDFGVLSKASFYLLTKNLSSVKNIDVISLLNNLDKQTVKDFINAIITDVSVERGKIYNITFKNGIVHHFNYKNQ

SEQ ID NO: 1672 - protein, 560 aa, Unknown
  Description of Unknown: Integrase B1673 sequence
  PTHR30461:SF3,IPR036162,PS51737,IPR011109,PTHR30461, PF00239,G3DSA:1.10.10.2600,IPR006119,PF14287,SSF53041, IPR025378,SM00857,IPR025827,cd03770,IPR038109, PF13408,G3DSA:3.40.50.1390,PF07508,Coil
MKEKQLQDITALYGRLSRDDEVGGESMSIQSQRAILGQYAKEHGFTNCQFFMDDGYSGTNFDRPAFTEMMELVEQRRVRTIIVKDLSRLGRNYLEVGRYTEVIFPENKVRFIAITDGVDSAAGDNEFAPFKNIINEWYAKDISRKVKSAFKAKALREEYTGAYPPYGYDRDPNDRHKLVPNQYAWVIKEIFQMALAGKSCSIIAKELGEKQVLRPQAYLHEKFGTFASDIVLTYPYAWDHSTVRAILMNQVYIGNMVHFRTGTQNFKSKKMIWKPETDWVVVEGTHEALVDAETFWTVQERIKVKQPGKKRSENNIFRGIMFCGECGKRMAFCSRKKDERRKSLGTFSCNANRRYGGKVCTTHYISLEQVKAIVLADIRRHAMLAAEDTDAYADYLMGLSQAGQLNEQKAMKKELDAAQRRLSELTTLVQRIYEDNVFGRLSDDLYQTLSAKYEAETKELKTRAAEIQALLTEATTKTQGIQDFADLVAPYADITELDEELVHTLIEKIIVHEKEIIDGETVMRIEIYYRFIGKTSDCLNRSVAPIKTKTESVVATDSIA

SEQ ID NO: 1673 - protein, 560 aa, Unknown
  Description of Unknown: Integrase B1674 sequence
  PTHR30461:SF3,SM00857,G3DSA:1.10.10.2600,IPR036162,PF13408, PS51737,G3DSA:3.40.50.1390,IPR025827,IPR006119,IPR038109, PF07508,IPR011109,SSF53041,PF00239,PTHR30461, PS51736,Coil,cd00338
MAKKKKPAGGIAVIYARYSSHNQRDVSIEQQIEACRKHAAELGLTIIATYEDRAISGRTDNRPAFQRLMHDAEKGKFSYVLAWKSNRMGRNMMQAMVNESRLMDCGIKVYYAEEDFDDSAAGRFALRSMMNVNQFYSDNLAEDVRRGLMDNANKCMVNGRQPLGYKRGKDGKVVVDEPAAAIVREVYTRVASGELFTDIARDLNRRGIKTADKGEWNKNSFHRLCSNEKYRGIYIYGDVRIEGGIPTIIDDTLWYKVQEALRVKKLKRNGRHRPGDEDYLLTGKLRCGKCGGYMIGMSGRSKTGDIHYYYACQNRRVGRTCDKKNIRRDVIEPAVAQAIKEYCLTDDAIEWIADKTVEYWEKADRNLQLDSIEGDLAAVQSSISNVMKAIEMGVVTETTRDRLIELEKQRTDLKSKLALAKEEVVHVDRKKLISSLLLFRNGDIHDRQYQEDLFKTFLISVYVYDDDDNDNGHLKIVFNAFGDNNTVDLPIDFGETDNQSAFSDGAEKFDYSLHRSTKKPSGLCRMVFLFYIVIQKQRTVFATVRPFLCSYYRMLMRPAP

SEQ ID NO: 1674 - protein, 560 aa, Unknown
  Description of Unknown: Integrase B1675 sequence
  PTHR30461:SF3,SM00857,IPR036162,PF13408,IPR025827, PS51737,G3DSA:3.40.50.1390,PF14287,IPR006119,PF07508, cd03770,IPR011109,SSF53041,PTHR30461,Coil, IPR025378,PF00239
MYYQSNTAAALQFPYTAMSSEELTALYCRLSRDDELQGDSNSIVNQKKILEKYAREHGYSNFKFYVDDGISGTTFNRPGFQQMITDIEAGLVKRVIIKDMSRFGRDYLQVGMYTEIMFPEHDIHFIAVNDGVDSTQGDNEFTPFRNIINEWYAKDTSKKIRAVMKVKGNAGEHLATMPPYGYMKSSDDKKQWVKDEEAAQVVYEIGLYIMDGLGPSQIARKLTERKILTPAAYYESKGRTTNVTKKGSPYAWDSSTIADIMDRWREYLGHTVNFKTRKKSYKSKKTLLNPETEWKIFENTHEAIWTEAIADAARLARQTRRRPTKMGEMGMFSGMMFCADCGSIMYQCRATNFRRDQEYYLCSGYRKSRDVCGQTHSIRTVILEELVLQNLREIVSFASQRKDDFVKMVMDADMRQRNRGLAKRKKTLADAERRIAELDTIFKRLYEDTISGKLSDERFQKLSTDYEKEQHQLQDVATALRDEIETEERKSANVERFLSVVERYTEIPELTPCILHEFVEKIVVHAASDPKGKNRTQEIDIYYKGIGALEVSKVTSSRQE

SEQ ID NO: 1675 - protein, 560 aa, Unknown
  Description of Unknown: Integrase B1676 sequence
  PTHR30461:SF3,SM00857,G3DSA:1.10.10.2600,IPR036162,PF13408, IPR025827,PS51737,G3DSA:3.40.50.1390,IPR006119,IPR038109, PF07508,SSF53041,IPR011109,PTHR30461,Coil, PS51736,cd00338,PF00239
MKKQQKCYIYTRVSISMQVDGYSLDAQKDKLRKYAEYQEMSIVGEYSDEGKSGKSVEGRPQFKQMLADVESGKDNVDYVLVFKLSRFGRNAADVLSSLQKMQDYGVNLICVEDGIDSSKDAGKLMISVLSAVAEIERENILVQTMEGRRQKAREGRWNGGFAPYGYQLVNGELIIAEDEAEIIRIIYDKFVNTTMGMAAIATFLNNSGYKKKLRQNNTIEDFSTSFVKGVLDNPIYCGKLAFGRRKNEKISGTRNEYHIVKQKEYMLSDGIHEAIISEEMWNQAHRKRQETGVLQVKTHSLEHEHILSGIIKCPVCGSGIYGNVNRKKHPYGGYYKDYFYYACKHRKLVDGHRCTYKRQWNEDRINAAVEEIIRKFVKNPKFEQEIRKQIGSSIDTSELDKEYDGLKDRLSQTTGAKNRLADQMDHLSVSDKNYDKKYNDMQERLDKLYDEITDIEDAMEEVETRLYNIRQDKISEDNVYQFLLFFDKLYDKFTDLEKKTFLRSFLSDVFIYEEEQKDGRILKGLRFKFPIYMNGRNVLGVDWDNESTDETEVGLHRKDM

SEQ ID NO: 1676 - protein, 560 aa, Unknown
  Description of Unknown: Integrase B1677 sequence
  PTHR30461:SF3,IPR036162,PS51737,IPR011109,PTHR30461, PF00239,G3DSA:1.10.10.2600,IPR006119,SSF53041,cd00338, SM00857,IPR025827,IPR038109,mobidb-lite,PS51736, PF13408,G3DSA:3.40.50.1390,PF07508,Coil
MLRGVVKPRKENFMNAVIYARYSSHSQTEQSIEGQLRDCYEYAKRYDINVVGEYIDRATSGTTDDRPDFQRMIADAPKKQFDRIIVWKLDRFARNRYDSALYKHKLKQYGIRVISAMENVGEGDESILLEALLEASAEYYSLDLKKKIKRGQRESIAKGKYCGGPIPYGYKLSDGKLLVDEKNAPVIRYLFEQYASGVPMKEIIDELTRRGVRGSRGGALTYNTFSRALTNTTYIGQYKYNGEVVPGLAEQMIDKELFDKVQVVVKANAHAPAANKAEVEYLLQGKAFCGNCGAHMVGECGRGNNGSVYYYYSCANRKKRHSCRKKNEKKDFIEWYVVEQTLQYVLTPPRIKQIAKAVVAEYDKEFAGSKIDDCEKSIRQLDHELNKLVDALVEAPKVAHKRIYERMESLEAQKTAMESDLVKLRIAHDIRFTEEEVRAWLKKFCTGDLFDPEFRRNIIDVFINSVYLYDDRVIIFYNIKGGKQVSYIDVAAALDAAPEAKVSDFITNAPPKPLAICKRFFVAVHSHDRLKDKTPAGRYLPRRKKVSSRSETDEGERSSR

SEQ ID NO: 1677 - protein, 560 aa, Unknown
  Description of Unknown: Integrase B1678 sequence
  PTHR30461:SF3,SM00857,G3DSA:1.10.10.2600,IPR036162,PF13408, IPR025827,PS51737,G3DSA:3.40.50.1390,IPR006119,IPR038109, PF07508,SSF53041,IPR011109,PTHR30461,Coil, PS51736,cd00338,PF00239
MKKQQKCYIYTRVSISMQVDGYSLDAQKDKLRKYAEYQEMSIVGEYSDEGKSGKSVEGRPQFKQMLADVESGKDNVDYVLVFKLSRFGRNAADVLSSLQKMQDYGVNLICVEDGIDSSKDAGKLMISVLSAVAEIERENILVQTMEGRRQKAREGRWNGGFAPYGYQLVNGELIIAEDEAEIIRIIYDKFVNTTMGMAAIATFLNNSGYKKKLRQNNTIEDFSTSFVKGVLDNPIYCGKLAFGRRKNEKISGTRNEYHIVKQKEYMLSDGIHEAIISEEMWNQAHRKRQETGVLQVKTHILEHEHILSGIIKCPVCGSGIYGNVNRKKHPYGGYYKDYFYYACKHRKLVDGHRCTYKRQWNEDRINAAVEEIIRKFVKNPKFEQEIRKQIGSSIDTSELDKEYDGLKDRLSQTTGAKNRLADQMDHLSVSDKNYDKKYNDMQERLDKLYDEITDIEDAMEEVETRLYNIRQDKISEDNVYQFLLFFDKLYDKFTDLEKKTFLRSFLSDVFIYEEEQKDGRILKGLRFKFPIYMNGRNVLGVDWDNESTDETEVGLHRKDM

SEQ ID NO: 1678 - protein, 560 aa, Unknown
  Description of Unknown: Integrase B1679 sequence
  PTHR30461:SF3,cd00338,SM00857,G3DSA:1.10.10.2600,IPR036162, PF13408,PS51737,IPR025827,G3DSA:3.40.50.1390,IPR006119, IPR038109,PF07508,IPR011109,SSF53041,PTHR30461, PS51736,Coil,PF00239
MARKKNIAAGLDAVIYARYSSHNQREVSIEQQVRECMKHAAELGLHVVGTYEDRAISGKTDKRPNFQRMMRDAEKGKFQAVVAWKSNRIGRNMLQAMVNEAKLEDCGVKVFYAEEDFDDTAAGRFALRNMMNVNQFYSENMAEDITRGLYDNASKCMANGRQPLGYKRGEDGRVVLDEANAAVVREIFTRVAAGDLFVDIARDLNAQGIKTSKGANWNKGSFQSICQNERYRGIYIYGDVRVADGIPRIVSDDLWYRVQEAMRMKKNPVGTRHRVGAEDYLLTGKLRCGHCGSYMTGVSGTSRNGELHYYYTCQKRRTEHACDKKNIRRDVIEPAVAQAIKMYCLTDDVIAWIADRTVEYWEKHDNDLQIEALEQQLEENKKATSNMLKAIEMGIITEATRTRMVELETEQSRLSVQLNVAKEDVVKIDREQIISYLELLQQGDIHDRDFQMELFKNFLVAVYVYDDNRMKLVFSCMGDQNSVEIPLETGEDPPDGGLSPDAKMFVLTPDSSTKKALYFVGSMVLFFLLKPILEGCIASPAYLLGFLRKTGMFPQISGSP

SEQ ID NO: 1679 - protein, 560 aa, Unknown
  Description of Unknown: Integrase B1680 sequence
  cd00338,SM00857,G3DSA:1.10.10.2600,IPR036162,PF13408, PS51737,G3DSA:3.40.50.1390,IPR025827,IPR006119,IPR038109, PF07508,SSF53041,IPR011109,PTHR30461,PS51736, Coil,PF00239
MVQEKLRAVFYARVSTEEERQLNALEKQVAECKDAVLQKGWKLVDQYVDEGKSGTQIKRRDEYRRLFEDLENDKFDIVVIKSQDRLQRNTLDWYIWIDRLTTHGKRLYMYLEDTFYSPDNALISGIKAILAEEYSRELSKKINNSYKRRIEAAKNGEKISIVNNSRSLGYDKVNGELVINEKEADVVRMIFNMYASGEGLRAISNTLYDMGYRNRSGNEIDPTTISRMLSSEKYKGVYVINQRHYDFDTKKTVLNPKSEWVHIPGAVPAIVEPELWDRVQEIKGSKVQSIKNEKRGRNCGKSIFSGKIYCAKCGAKYWRSLENGYVKFKCSSYSKYGKIPGKGCDNKSFSENALYSILQSLSEQIVEVNTAEVRKSLLNWLESLRERLRASQGDDTIKEEIRKQTARKEKLTDAYMDGIISKEDYSKRYKELEKTLEDLKDKLLTLEVNEDLQSIEEVIQNIDKEMEEYLQTQSFNESRVEFLNQHLTKVTVNKDSFLLEFDLIGGAILTGKDFYLFVDNPRRDGQCRGDLYCTLWCGRKQCEPDGTGKAGKRWQKEAEW

SEQ ID NO: 1680 - protein, 560 aa, Unknown
  Description of Unknown: Integrase B1681 sequence
  PTHR30461:SF3,SM00857,G3DSA:1.10.10.2600,IPR036162,PF13408, IPR025827,PS51737,G3DSA:3.40.50.1390,IPR006119,IPR038109, PF07508,SSF53041,IPR011109,PTHR30461,Coil, PS51736,cd00338,PF00239
MKKQQKCYIYTRVSISMQVDGYSLDAQKDKLRKYAEYQEMSIVGEYSDEGKSGKSVEGRPQFKQMLADVESGKDNVDYVLVFKLSRFGRNAADVLSSLQKMQDYGVNLICVEDGIDSSKDAGKLMISVLSAVAEIERENILVQTMEGRRQKAREGRWNGGFAPYGYQLVNGELIIAEDEAEIIRIIYDKFVNTTMGMAAIATFLNNSGYKKKLRQNNTIEDFSTSFVKGVLDNPIYCGKLAFGRRKNEKISGTRNEYHIVKQKEYMLSDGIHEAIISEEMWNQAHRKRQETGVLQVKTHILEHEHILSGIIKCPVCGSGIYGNVNRKKHPYGGYYKDYFYYACKHRKLVDGHRCTYKRQWNEDRINAAVEEIIRKFVKNPKFEQEIRKQIGSSIDTSELDKEYDGLKDRLSQTTGAKNRLADQMDHLSVSDKNYDKKYNDMQERLDKLYDEITDIEDAMEEVETRLYNIRQDKISEDNVYQFLLFFDKLYDKFTDLEKKTFLKSFLSDVFIYEEEQKDGRILKGLRFKFPIYMNGRNVLGVDWDNESTDETEVGLHRKDM

SEQ ID NO: 1681 - protein, 560 aa, Unknown
  Description of Unknown: Integrase B1682 sequence
  PTHR30461:SF3,SM00857,G3DSA:1.10.10.2600,IPR036162,PF13408, IPR025827,G3DSA:3.40.50.1390,PS51737,IPR006119,IPR038109, PF07508,SSF53041,IPR011109,PTHR30461,PS51736, cd00338,PF00239
MNTVIYARYSAGPRQTDQSIEGQLRVCTDFCKQRGLTVIDTYCDRHISGRTDERPEFQRLIADAKRKKFEAVVVYKTDRFARNKYDSAVYKRELKRNGIQIFYAAEAIPDGPEGIILESLMEGLAEYYSAELAQKIKRGMHESALKCQSTGSGRPLGYRVDEQKRFQIDPESAQTVQAIFERYIKGESNAAICELLNSRGLRTAQGKPFNKNSINRIIKNRKYIGEYRYHDIVVEGGMPAIISKDTFNLAQAEMERRRTRKAPKSPKAEYLLAGRLFCGHCKGPMQGVSGTGKSGNKWYYYYCGNTRGKNKTCDKKQVSRDRLERAVVDFTVRYILQEDILEELARKVHAAQEHQNDTASEIAFYEKKLADNKKSIANVLRAIESGAATQTLPARLQELENEQAVILGELSFLKGKHLAFTEDQILFALMKHLEPYPGESEQDYRRRIISDFVSEVYLYDDRLLIYFNISSEDGKLKSADLSNIEGGEFDEGLVSSTNDRKSRKPLSLRDFLCFQGVCEFLAVFKSVHYARFCALCARFKTPFCRRICRRNQSLPLTMLQ

SEQ ID NO: 1682 - protein, 560 aa, Unknown
  Description of Unknown: Integrase B1683 sequence
  SM00857,G3DSA:1.10.10.2600,IPR036162,PS51737,G3DSA:3.40.50.1390, IPR006119,IPR038109,PF07508,IPR011109,SSF53041, PF00239,PTHR30461,Coil,cd00338
MKNTVKVCAYCRVSTNKSEQKLSFENQKKYFESILTKDKGYELINIYADEGLSGTKFRKREQFNKMLFDAGLNMVTNSLKINEDRNKYISTDYVLSDREPLFNLIFVKDSSRFARNTEVNRILNRLKDKGVYVYFEDLCKTTENEADRIIIDFLFGMSYQESVDKSNKTKFGMKRSSENGKVRCGHELFGYTFNKDENTLRVISEEAEVIKLIFKLRLEGNGTRRIAKYLNDNGYRTRNNKQYCISRINTILKNATYTGKQVYNKTEMQNLGDGSSKKRKHIDDWIIKDTDKIDQIIDEDTFYKVQQLIADNTTSNKGVYNGASELCNYLYCGKCGAKYYKFNSRCRVYYRCKNKININAEVKCDNKNVKLDYIYSILNSYCDDYKNTCISYFNMVKNSVNKQIVNIKEDTDNEAVLAIKEQIRAKEAILEELLDNMLNNSSETVKKVFMKKQKLIDDELKELEGQLKQYTATDEEKQDKINYINNTLNQLDYHIKHIPDDLDLDKFIKTCLDRIIVYEDKIEISTIFDMLAKAICELLGISILDVIQEDISNNEGLRLL

SEQ ID NO: 1683 - protein, 560 aa, Unknown
  Description of Unknown: Integrase B1684 sequence
  PTHR30461:SF3,SM00857,G3DSA:1.10.10.2600,IPR036162, PF13408,IPR025827,PS51737,G3DSA:3.40.50.1390, IPR006119,IPR038109,PF07508,IPR011109, SSF53041,PF00239,PTHR30461,PS51736,Coil,cd00338
MKFPIDLSTLTKEEISQFEEDPFTLYNGDHDVALYLRYSSSGQSDQSIEGQLRDCRAFCKANHYRIVAIYIDRATTARKDVEKRIHLMEMIADSAKQRWDYVVVWKLDRFSRNRNDSAIMKMRLRKNGVKVLSATEHLSDNPESILLESVLEGMAEFFSAELSQKVTRGMRESALKCHSVGGHVPLGYKIENHKLVVNPDTAHIVQEAFALYANGVSVAEIARKFNAAGYKTAKNTEFNRSSFKVMFQNVRYIGTYTYKDIRIENGVPAIIDRELFDAVQRRLSKTATAPARGKAKVDYLLSGKLFCGHCGASMNGESGVGRSGKTYHYYSCYTKKRRLGCEKRPLRKDYIEEIVARSAFELLTDQLIDEIADMAIKQSEQDMVNETRIPQLTEQLSEIEKSIANITTAIEKGIASETLMNRLVQLEHEKKTINKEIKSEEKYVYRIDRDQIVFWLSQFKCGNIEDENFRRRLIDLLVNSVTVWDEPDGYKITTAYNLTSCKTKTFRVEKSPATENVTGFGFGESECTTKRKHPDWMLPFCCDERDFPFLRSMLGNFVLC

SEQ ID NO: 1684 - protein, 560 aa, Unknown
  Description of Unknown: Integrase B1685 sequence
  PTHR30461:SF3,SM00857,IPR036162,PF13408,IPR025827, PS51737,G3DSA:3.40.50.1390,cd03770,IPR006119,PF14287, PF07508,IPR011109,SSF53041,PTHR30461,PS51736, Coil,IPR025378,PF00239
MYHQSNTAAALQFPYSAMSVEAVTALYCRLSRDDELQGDSNSIINQKKILQRYALDHGYKNYRFYIDDGISGTTFNRPGFQQMIADIEAGLVKRVIIKDMSRLGRDYLQVGMYTEIMFPEHDIHFIAVNDGVDSTQGDNEFTPFRNIINEWYAKDTSKKIRAVMKVKGNAGEHLTTLPPYGYMKSPDNKKLWVRDEDAAAVVYEIGLYVMDGFGPSQIARKLTERRILTPAAYYASKGRKASNIKRGLPYAWDASTVADIMDRWREYLGHTVNFKTRKKSYKSKKVIHNPESEWMIFENTHDPIWTEAIADAARAARQTRRRPTKMGEMGMFSGMMFCADCGSVMYQCRATNFRREQEYYLCAGYRKSRDFCGQTHSIRTVILEELILENLREIVSFASRSKDEFVRLVMDSDLRQRDRDLAKRKRQLADSEKRITELDAIFKRLYEDNISGKLSDERFQKLSADYEKEEQELKVLASSLRKEVELEESKSADVDRFLSVVERYTDIPELTPCILHEFVEKIIVHAASDPKGKNRTQEIDIYYKGIGALEMSKVTASMEK

SEQ ID NO: 1685 - protein, 560 aa, Unknown
  Description of Unknown: Integrase B1686 sequence
  PTHR30461:SF3,SM00857,IPR036162,PF13408,PS51737, IPR025827,G3DSA:3.40.50.1390,PF14287,cd03770,PF07508, IPR006119,SSF53041,IPR011109,PTHR30461,PS51736, Coil,IPR025378,PF00239
MYYQSNTAAALQFPYTAMSSEELTALYCRLSRDDELQGDSNSIVNQKKILEKYAREHGYSNFKFYVDDGISGTTFNRPGFQQMIADIEAGLVKRVIIKDMSRFGRDYLQVGMYTEIMFPEHDIHFIAVNDGVDSTQGDNEFMPFRNIINEWYAKDTSKKIRAVMKVKGNAGEHLTVLPPYGYMKSSDDKKQWVKDEEAAQVVYEIGLYIMDGLGPSQIARKLTERKILTPAAYYASKGRTTNVTKKGSPYAWDSSTIADIMDRWREYLGHTVNFKTRKKSYKSKKTLHNPESEWKIFDNTHEAIWTEAIADAARLARQTRRRPTKMGEMGMFSGMMFCADCGSIMYQCRATNFRRDQEYYLCSGYRKSRDVCGQTHSIRTVILEELVLQNLREIVSFASQRKDDFVKMVMDADMRQRNQDLAKRQKTLADAEKRIAELDTIFKRLYEDTISGKLSDERFQKLSTDYEKEQHQLQDVAAALRDEIEAEEQKSANVERFLSVVERYTEIPELTPCILHEFVEKIVVHAASDPKGKNRTQEIDIYYKGIGALEVSKVTSSRQE

SEQ ID NO: 1686 - protein, 560 aa, Unknown
  Description of Unknown: Integrase B1687 sequence
  SM00857,G3DSA:1.10.10.2600,IPR036162,PF13408,PS51737, G3DSA:3.40.50.1390,IPR025827,PS51736,IPR006119,IPR038109, PF07508,SSF53041,IPR011109,PTHR30461,Coil, mobidb-lite,cd00338,PF00239
MENNKKLRVAAYVRVSEETKETQHSLQAQEEFYRRQIHEKVEWELAEIYKDNGISGTDIKRREGFVRLISDCKAGKIDLILVKSVSRFARNTLDLLRIVRYLKQLGVSVRFEEQNIDSLTEEGELMLTLIASVAQAESESISENIKWAIHKAFQNGIGNTRRRTLGYHWVDGKLTVIPEEAEVVKRIFTNFLAGGSHTKTAEELTGEGITSINGKPISVSAIGNILRNITYTGNTLLQKTFIQDPISKKKVMNTGELPQYFVQDTHEAIIDMDTFEQVQEKLARNKEMGRFPYNHTGKKYPFTMKVICGCCGRHYTRQLWNTSEKGKKRPTWVCTGKKAEKYRRCDSKNIPEAKLMEASAKVLGISEFDEDIFFDKVESITVQGTHELLFCLKDGAEVTQHWEHTAQKASWTPERKARHAANRTASPAKTKGASCMTGRIRCELCGMNYNKQTRKVARAGMVTFWKCRGIGNGGSCASEQITHDHLNSILAEALGVAQMTDEIFTGQIDHIGMCEPGKLIIYKKNDGTIPGSYELLPMEKRQKPYRPRNRKGNVRSQGDT

SEQ ID NO: 1687 - protein, 560 aa, Unknown
  Description of Unknown: Integrase B1688 sequence
  PTHR30461:SF3,SM00857,G3DSA:1.10.10.2600,IPR036162,PF13408, PS51737,G3DSA:3.40.50.1390,IPR025827,IPR006119,IPR038109, PF07508,IPR011109,SSF53041,PF00239,PTHR30461, PS51736,Coil,cd00338
MPRKKKLQEVGGLRLVAYYRYSNGGQQTEQSIEGQRRDCEAYAKAHGYKIVHEYIDRHISGKSDSRPAFQQMISDSDSHLFDAVICWKTDRLARSRYDSIIYKTRLRRNGVKILYAAETVVDGPEGIIIEGLMESLAEYYSAELAQKLRRGQRESALKCIALGGNRSFGYDIGPDKHYCINEKQAPAVRYIFEQYAAGATAADIVRELTARGYRTSRGNPFNKNSICRIITNEMYLGVYKYADIRIEGGVPAMIDRELFNRCQTQLAFNRAHGGGKGAPRADYVLVGKLDCGLCGHAMKGASATGHTGSKHYYYTCTQHVEKKCPKTSIEKNYLEQVIVDGVAKYVLTPEKISQIVDCMMELQAKEQEPKGNPERDALEAELAECRRKQNNILEAIEEGGSARLAARLRTLEEQEAQLTFALGEINNAPAPPQFSREALTFMFEQFRREEDEVDEEYRRRILDTFVSSILLYEDRAEVKFNITDQKTGDFERVILPISANKKPPEDDDIPSNSEGSTALRLVEAMGVEPMSEKSSVQVSPGAGDLQHSRRATPIVRLAHW

SEQ ID NO: 1688 - protein, 560 aa, Unknown
  Description of Unknown: Integrase B1689 sequence
  PTHR30461:SF3,cd00338,SM00857,G3DSA:1.10.10.2600,IPR036162, PF13408,PS51737,IPR025827,G3DSA:3.40.50.1390,IPR006119, IPR038109,PF07508,IPR011109,SSF53041,PTHR30461, PS51736,Coil,PF00239
MARKKNIAAGQNAVIYARYSSHNQREVSIEQQVRECMKHAAELGLHVVGTYEDRAISGKTDKRPNFQRMMRDAEKGKFQAVVAWKSNRIGRNMLQAMVNEAKLEDCGVKVFYAEEDFDDTAAGRFALRNMMNVNQFYSENMAEDITRGLYDNASKCIANGRQPLGYKRGEDGRVVLDEANAAVVREIFTRVAAGDLFVDIARDLNAQGIKTSKGANWNKGSFQSICQNERYRGIYIYGDVRVVDGIPRIVSDDLWYRVQEAMRMKKNPVGTRHRVGAEDYLLTGKLRCGHCGSYMTGVSGTSRNGELHYYYTCQKRRTEHACDKKNIRRDVIEPAVAQAIKMYCLTDDVIEWMADRTVEYWEKHDNDLQIEALEQQLEENKKATSNMLKAIEMGIITEATRTRMVELETEQSRLSVQLNAAKEDVVKIDREQIISYLELLQQGDIHDRDFQMELFKNFLVAVYVYDDNRMKLVFSCMGDQNSVEIPLETGEDPPDGGLSPDAKMFVLTPDSSTKKALYFVGSMVLFFLLKPILEGCIASPAYLLGFLRKTEMFPQISGPP

SEQ ID NO: 1689 - protein, 560 aa, Unknown
  Description of Unknown: Integrase B1690 sequence
  PTHR30461:SF3,SM00857,G3DSA:1.10.10.2600,IPR036162,PF13408, IPR025827,PS51737,G3DSA:3.40.50.1390,IPR006119,IPR038109, PF07508,SSF53041,IPR011109,PTHR30461,Coil, PS51736,cd00338,PF00239
MKKQQKCYIYTRVSISMQVDGYSLDAQKDKLRKYAEYQEMSIVGEYSDEGKSGKSVEGRPQFKQMLADVESGKDNVDYVLVFKLSRFGRNAADVLSSLQKMQDYGVNLICVEDGIDSSKDAGKLMISILSAVAEIERENILVQTMEGRRQKAREGRWNGGFAPYGYQLVNGELIIAEDEAEIIRIIYDKFVNTTMGMAAIATFLNNSGYKKKLRQNNTIEDFSTSFVKGVLDNPIYCGKLAFGRRKNEKISGTRNEYHIVKQKEYMLSDGIHEAIISEEMWNQAHRKRQETGVLQVKTHSLEHEHILSGIIKCPVCGSGIYGNVNRKKHPYGGYYKDYFYYACKHRKLVDGHRCTYKRQWNEDRINAAVEEIIRKFVKNPKFEQEIRKQIGSSIDTSELDKEYDGLKDRLSQTTGAKNRLADQMDHLSVSDKNYDKKYNDMQERLDKLYDEITDIEDAMEEVETRLYNIRQDKISEDNVYQFLLFFDKLYDKFTDLEKKTFLKSFLSDVFIYEEEQKDGRILKGLRFKFPIYMNGRNVLGVDWDNESTDETEVGLHRKDM

SEQ ID NO: 1690 - protein, 559 aa, Unknown
  Description of Unknown: Integrase B1691 sequence
  IPR036162,PS51737,IPR011109,PTHR30461,PS00397, PF00239,G3DSA:1.10.10.2600,IPR006119,SSF53041,cd00338, SM00857,IPR025827,IPR038109,PS51736,IPR006118, PF13408,G3DSA:3.40.50.1390,PF07508,Coil
MSKTVAIYVRVSTGKQADRDSIPFQIQECSNYVKHFLKTENFEVFKDAGRSGKNTHRPEYQRMIEKVKSGMISHVVVYKIDRISRNLVDFSIMYNDFKEHKVAFISLNEQFDTSSAIGEAVLKIILVFAELERKLTGERVRDIMMNRALEGKWNGARVPYGWDWDTKKQCPVHSDTEAEYARMMYRLYDESHSTCVVRDYCNAHDIPTKRGGEWTSKTVADFLRNPMNVGDYRYNYRKSARGKRNDPSEVVYVKDVFPPLIDRELYERVTHQMDLNTFGLGKDGRKVVSKKTHVFAGLIVCGLCGAFYHSDSDTPRADGFLPSQYRCGAHNRKIHCMAKGTSDVKLGPFIFNYVSNLVKASKSRRLLHSVSDLEHMLLTGPEFEQVAGIADTGLDVTFDTIIHGFKPKRYAAAPYTVIRSGDSDALTAKRDKTIRALERLKKLFLFEDDAMSEKEYLMSKRELESTLSDIENELSALEADTADTKYDDMSFISTASGFLIAHQIASGEHINYRELACAVDAKVLKDFVNSVVERIVLLDGRVASIEFKNGLIHEFLYRE

SEQ ID NO: 1691 - protein, 559 aa, Unknown
  Description of Unknown: Integrase B1692 sequence
  cd00338,SM00857,IPR006118,G3DSA:1.10.10.2600,IPR036162, PS51737,G3DSA:3.40.50.1390,IPR006119,IPR038109,PF07508, IPR011109,SSF53041,PTHR30461,PS00397,PS51736, Coil,PF00239
MSKTVAIYVRVSTGKQADRDSIPFQIQECSNYVKHFLKTENFEVFKDAGRSGKNTHRPEYQRMIEKVKSGMISHVVVYKIDRISRNLVDFSIMYNDFKEHKVAFISLNEQFDTSSAIGEAVLKIILVFAELERKLTGERVRDIMMNRALEGKWNGARVPYGWDWDAKKQCPVHSDAEAEYARMMYRLYDECHSTCVVRDYCNAHDIPTKRGGEWTSKTVADFLRNPMNVGDYRYNYRKSARGKRNDPSEVIYVKDVFPPLIDRELYERVTHQMDLNTFGLGKDGRKVVSKKTHVFGGLVVCGLCGAFYHSDADVVRADGFRPSNYRCGAHNKKIHCKAKGTSDVKLGPFIFNYISNLVKASKSKKLLHSVSDLEQILLTGPEFEQVAGIADAGLDVTFDTIMHGFKPKRYTAAPYTVIRSGDSDALTAKRDKTIRALERLKKLFLFEDDAMSEKEYLMSKRELEGTLSDIENELSALEADTADTKYDDMSFISTASGFLIAHQIASGEHINYRELACAVDAKVLKDFVNSVIERIVLLDGRVASIEFKNGLVHEFLYRE

SEQ ID NO: 1692 - protein, 559 aa, Unknown
  Description of Unknown: Integrase B1693 sequence
  cd00338,SM00857,IPR006118,G3DSA:1.10.10.2600,IPR036162, PS51737,G3DSA:3.40.50.1390,IPR006119,IPR038109,PF07508, SSF53041,IPR011109,PTHR30461,PS00397,PS51736, Coil,PF00239
MSKTVAIYVRVSTGKQADRDSIPFQIQECSNYVKHFLKTENYEIFKDAGRSGKNTHRPEYQRMIEKVKAGMISHVVVYKIDRISRNLVDFSIMYNDFKEHKVAFISLNEQFDTSSAIGEAVLKIILVFAELERKLTGERVHDIMMNRALEGKWNGARVPYGWDWDTKNRCPVHSETEAEYARMMYRLYDESHSTCVVRDYCNAHDIPTKRGGEWTSKTVADFLRNPMNVGDYRYNYRKSARGKRNDPSDVIYVKDVFPPLIDRELYERVTHQMDLNTFGLGKDGRKVVSKKTHVFGGLVVCGLCGAFYHSDADVVRADGFRPSNYRCGAHNKKIHCKAKGTSDVKLGPFIFNYISNLVKASKSKKLLHSVSDLEQILLTGPEFEQVAGIADIGLDVTFDTIMHGFKPKRYTAAPYTVIRSGDSDALTAKRDKTIRALERLKKLFLFEDDAMSEKEYLMSKRELEGTLSDIENELSALEADTADTKYDDMSFISTASGFLIAHQIASGEHINYRELACAVDAKVLKDFVNSVIERIVLLDGRVASIEFKNGLVHEFLYRE

SEQ ID NO: 1693 - protein, 559 aa, Unknown
  Description of Unknown: Integrase B1694 sequence
  SM00857,IPR006118,G3DSA:1.10.10.2600,IPR036162,PS51737, G3DSA:3.40.50.1390,IPR006119,IPR038109,PF07508,SSF53041, IPR011109,PF00239,PTHR30461,PS00397,PS51736, Coil,cd00338
MSKTVAIYVRVSTGKQADRDSIPFQIQECSNYVKHFLKTENFEVFKDAGRSGKNTHRPEYQRMIEKVKSGMISHVVVYKIDRISRNLVDFSIMYNDFKEHKVAFISLNEQFDTSSAIGEAVLKIILVFAELERKLTGERVRDIMMNRALEGKWNGARVPYGWDWDTKKQCPVHSDTEAEYARMMYRLYDECHSTCVVRDYCNAHDIPTKRGGEWTSKTVADFLRNPMNVGDYRYNYRKSARGKRNDPSEVIYVKDVFPPLIDRELYERVTHQMDLNTFGLGKDGRKVVSKKTHVFGGLVVCGLCGAFYHSDADVVRADGFRPSNYRCGAHNKKIHCKAKGTSDVKLGPFIFNYISNLVKASKSKKLLHSVSDLEQILLTGPEFEQVAGIADIGLDVTFDTIMHGFKPKRYTAAPYTVIRSGDSDALTAKRDKTIRALERLKKLFLFEDDAMSEKEYLMSKRELEGTLSDIENELSALETDATDTKYDDMSFISTASGFLIAHQIASGEHINYRELACAVDAKVLKDFANSVIERIVLLDGRVASIEFKNGLVHEFLYRE

SEQ ID NO: 1694 - protein, 559 aa, Unknown
  Description of Unknown: Integrase B1695 sequence
  IPR036162,PS51737,IPR011109,PTHR30461,PS00397, PF00239,G3DSA:1.10.10.2600,IPR006119,SSF53041,cd00338, SM00857,IPR025827,IPR038109,PS51736,IPR006118, PF13408,G3DSA:3.40.50.1390,PF07508,Coil
MSKIVAIYVRVSTGKQADRDSIPFQIQECSNYVKHFLKTENFEVFKDAGRSGKNTQRPEYQRMIEKVKSGMVSHVVVYKIDRISRNLVDFSIMYNDFKEHKVAFISLNEQFDTSSAIGEAVLKIILVFAELERKLTGERVHDIMMNRALEGKWNGARVPYGWDWDTKNRCPVHSETEAEYARMMYRLYDESHSTCVVRDYCNAHDIPTKRGGEWTSKTVADLLRNPMNVGDYRYNYRKSARGKRNDPSEVIYVKDVFPPLIDRELYERVTHQMDLNTLGLGKDGRKVVSKKTHVFGGLIVCGLCGAFYHSDSDTPRADGFLPTKYRCGAHNRKIHCKAKGISDVMLGPFIFNYISNLVKASKSRKLLHSVSDLEQILLTGPEFEQVAGIADVGLDVTFDTIMHGFRPKRYTAAPYTVIRSGDSDALNAKRDKTIRALERLKKLFLFEDDAMSEKEYLMSKRELEGTLSDIENELSALEADTADTKYDDMSFISTASGFLIAHQIASGEHINYRELACAVDAKVLKDFANSVIERIVLLDGRVASIEFKNGLVHEFLYRE

SEQ ID NO: 1695 - protein, 559 aa, Unknown
  Description of Unknown: Integrase B1696 sequence
  cd00338,SM00857,IPR006118,G3DSA:1.10.10.2600,IPR036162, PS51737,G3DSA:3.40.50.1390,IPR006119,IPR038109,PF07508, IPR011109,SSF53041,PTHR30461,PS00397,PS51736, Coil,PF00239
MSKTVAIYVRVSTGKQADRDSIPFQIQECSNYVKHFLKTENFEVFKDAGRSGKNTHRPEYQRMIEKVKAGMISHVVVYKIDRISRNLVDFSIMYNDFKEHKVAFISLNEQFDTSSAIGEAVLKIILVFAELERKLTGERVRDIMMNRALDGKWNGARVPYGWDWDTKKQCPVHSDTEAEYARMMYRLYDECHSTCVVRDYCNAHDIPTKRGGEWTSKTVADFLRNPMNVGDYRYNYRKSARGKRNDPSEVIYVKDVFPPLIDRELYERVTHQMDLNTFGLGKDGRKVVSKKTHVFGGLVVCGLCGAFYHSDADVVRADGFRPSNYRCGAHNKKIHCKAKGTSDVKLGPFIFNYISNLVKASKSKKLLHSVSDLEQILLTGPEFEQVAGIADIGLDVTFDTIMHGFKPKRYTAAPYTVIRSGDSDALTAKRDKTIRALERLKKLFLFEDDAMSEKEYLMSKRELEGTLSDIENELSALEADTADTKYDDMSFISTASGFLIAHQIASGEHINYRELSCAVDAKVLKDFVNSVIERIVLLDGRVASIEFKNGLVHEFLYRE

SEQ ID NO: 1696 - protein, 559 aa, Unknown
  Description of Unknown: Integrase B1697 sequence
  SM00857,IPR006118,G3DSA:1.10.10.2600,IPR036162,PS51737, G3DSA:3.40.50.1390,IPR006119,IPR038109,PF07508,IPR011109, SSF53041,PF00239,PTHR30461,PS00397,PS51736, Coil,cd00338
MSKTVAIYVRVSTGKQADRDSIPFQIQECSNYVKHFLKTENYEIFKDAGRSGKNTHRPEYQRMIEKVKAGMISHVVVYKIDRISRNLVDFSIMYNDFKEHKVAFISLNEQFDTSSAIGEAVLKIILVFAELERKLTGERVRDIMMNRALEGKWNGARVPYGWDWDAKKQCPVHSDTEAEYARMMYRLYDESHSTCVVRDYCNAHDIPTKRGGEWTSKTVADFLRNPMNVGDYRYNYRKSARGKRNDPSEVIYVKDVFPPLIDRELYERVTHQMDMNTFGLGKDGRKVVSKKTHVFGGLIVCGLCGAFYHSDADVVRADGFRPSNYRCGAHNKKIHCKAKGTSDVKLGPFIFNYISNLVKASKSKKLLHFVSDLEQILLTGPEFEQVAGIADIGLDVTFDTIMHGFKPKRYTAAPYTVIRSGDSDALTAKRDKTIRALERLKKLFLFEDDAMSEKEYLMSKRELEGTLSDIENELSALEADTADTKYDDMSFISTASGFLIAHQIASGEHINYRELSCAVDAKVLKDFVNSVIERIVLLDGRVASIEFKNGLVHEFLYRE

SEQ ID NO: 1697 - protein, 559 aa, Unknown
  Description of Unknown: Integrase B1698 sequence
  cd00338,SM00857,IPR006118,G3DSA:1.10.10.2600,IPR036162, PS51737,G3DSA:3.40.50.1390,IPR006119,IPR038109,PF07508, SSF53041,IPR011109,PTHR30461,PS00397,PS51736, Coil,PF00239
MSKTVAIYVRVSTGKQADRDSIPFQIQECSNYVKHFLKTENFEVFKDAGRSGKNTHRPEYQRMIEKVKSGMISHVVVYKIDRISRNLVDFSIMYNDFKEHKVAFISLNEQFDTSSAIGEAVLKIILVFAELERKLTGERVRDIMMNRALEGKWNGARVPYGWDWDTKKQCPVHSDTEAEYARMMYRLYDESHSTCVVRDYCNAHDIPTKRGGEWTSKTVADFLRNPMNVGDYRYNYRKSARGKRNDPSEVIYVKDVFPPLIDRELYERVTHQMDLNTFGLGKDGRKVVSKKTHVFGGLVVCGLCGAFYHSDADVVRADGFRPSNYRCGAHNKKIHCKAKGTSDVKLGPFIFNYISNLVKASKSKKLLHSVSDLEQILLTGPEFEQVAGIADIGLDVTFDTIMHGFKPKRYTAAPYTVIRSGDSDALTAKRDKTIRALERLKKLFLFEDDAMSEKEYLMSKRELEGTLSDIENELSALEADTADTKYDDMSFISTASGFLIAHQIASGEHINYRELACAVDAKVLKDFVNSVIERIVLLDGRVASIEFKNRLVHEFLYRE

SEQ ID NO: 1698 - protein, 559 aa, Unknown
  Description of Unknown: Integrase B1699 sequence
  IPR036162,PS51737,IPR011109,PTHR30461,PS00397, PF00239,G3DSA:1.10.10.2600,IPR006119,SSF53041,cd00338, SM00857,IPR025827,IPR038109,PS51736,IPR006118, PF13408,G3DSA:3.40.50.1390,PF07508,Coil
MSKTVAIYVRVSTGKQADRDSIPFQIQECSNYVKHFLKTENFEVFKDAGRSGKNTQRPEYQRMIEKVKSGMVSHVVVYKIDRISRNLVDFSIMYNDFKEHKVAFISLNEQFDTSSAIGEAVLKIILVFAELERKLTGERVHDIMMNRALEGKWNGARVPYGWDWDTKNRCPVHSETEAEYARMMYRLYDESHSTCVVRDYCNAHDIPTKRGGEWTSKTVADLLRNPMNVGDYRYNYRKSARGKRNDPSEVIYVKDVFPPLIDRELYERVTHQMDLNTLGLGKDGRKVVSKKTHVFGGLIVCGLCGAFYHSDSDTPRADGFLPTKYRCGAHNRKIHCKAKGISDVMLGPFIFNYISNLVKASKSRKLLHSVSDLEQILLTGPEFEQVAGIADVGLDVTFDTIMHGFRPKRYTAAPYTVIRSGDSDALNAKRDKTIRALERLKKLFLFEDDAMSEKEYLMSKRELEGTLSDIENELSALEADTADTKYDDMSFISTASGFLIAHQIASGEHINYRELACAVDAKVLKDFANSVIERIVLLDGRVASIEFKNGLVHEFLYRE

SEQ ID NO: 1699 - protein, 559 aa, Unknown
  Description of Unknown: Integrase B1700 sequence
  SM00857,IPR006118,G3DSA:1.10.10.2600,IPR036162,PS51737, G3DSA:3.40.50.1390,IPR006119,IPR038109,PF07508,IPR011109, SSF53041,PF00239,PTHR30461,PS00397,PS51736, Coil,cd00338
MSKTVAIYVRVSTGKQADRDSIPFQIQECSNYVKHFLKTENFEVFKDAGRSGKNTHRPEYQRMIEKVKSGMISHVVVYKIDRISRNLVDFSIMYNDFKEHKVAFISLNEQFDTSSALGEAVLKIILVFAELERKLTGERVRDIMMNRALEGKWNGARVPYGWDWDAKKQCPVHSDAEAEYARMMYRLYDECHSTCVVRDYCNAHDIPTKRGGEWTSKTVADFLRNPMNVGDYRYNYRKSARGKRNDPSEVIYVKDVFPPLIDRELYERVTHQMDLNTFGLGKDGRKVVSKKTHVFGGLVVCGLCGAFYHSDADVVRADGFRPSNYRCGAHNKKIHCKAKGTSDVKLGPFIFNYISNLVKASKSKKLLHSVSDLEQILLTGPEFEQVAGIADIGLDVTFDTIMHGFKPKRYTAAPYTVIRSGDSDALTAKRDKTIRALERLKKLFLFEDDAMSEKEYLMSKRELEGTLSDIENELSALEADTADTKYDDMSFISTASGFLIAHQIASGEHINYRELACAVDAKVLKDFVNSVIERIVLLDGRVASIEFKNGLVHEFLYRE

SEQ ID NO: 1700 - protein, 559 aa, Unknown
  Description of Unknown: Integrase B1701 sequence
  SM00857,G3DSA:1.10.10.2600,IPR036162,PF13408,PS51737, G3DSA:3.40.50.1390,IPR025827,IPR006119,IPR038109,PF07508, IPR011109,SSF53041,PF00239,PTHR30461,Coil, cd00338
MAYRKITDIRDTIGMRAVFYARVSTAEEEQLNAIELQIEENRGCIKDHGWKLVGEYIDRSKSGTMVKGRDDYQRLYEDLYEDLFDIVVIKDQERLQRNTLDWYLFINRVVQTGKLLFMYMDGKFYSPDDALITGVRAIIAEEFSRNLSKKLHNYHDHRIEKARQGQEIALQGSGNVYGWDKKDGKYYINPEQAKVRRLMCEGIMARKGSTLIAKELNDAGYRNTVGKPWKPMDIPKFVYDCKNVGTMIINKERHDFESKQTIKLPKEEWVYVENALPPIVTQEEWDLICKIHEERVIATGSDRRGKKTSGYSFSGKLVCGICGAPYWRKQRVSKDEYWVCSTKQTKGRRTRKRDSTMGKAGEINPLGCDNENISYNSLMEIMEVVSERLQANTDTIKQDMINWLTKLRKQLLEANGGHTEADLQRELSRKSKLLDAYLDGILNKQEYQTKAEELDERIIQLKAETEKNKANSGDIAEIDKVLANIDEEVSRYVDGNEKLKVEYLLEHLEQVQIFPDKVIVIVPILSEGIVVEKAQYVSREKWSGKDNNASHVSNADQTG

SEQ ID NO: 1701 - protein, 559 aa, Unknown
  Description of Unknown: Integrase B1702 sequence
  PTHR30461:SF3,cd00338,SM00857,IPR036162,PF13408, IPR025827,G3DSA:3.40.50.1390,IPR006119,PF07508,IPR011109, SSF53041,PTHR30461,PS51736,Coil,PF00239
MKTKLYSYIRFSSMRQNDGSSYERQIRMAREIAVKYDLELVNDYQDLGVSAFKGANSKTGALSRFLDAIGRSVPVGSWLFIENLDRLSRADIVSAQELFLSIIRRGITIVTGMDNKIYSLDTVTANPMDLMFSILLFIRGNEESQTKRNRTNSSALIKIKAHQENPQNPAVAIEEIGKNMWWTDTTSGYVLPHPVFFPIVQEVVELRRNGRSTAEILDHLNATYTPPPAASHKRHSNWSRAMIERLFHTRALIGIKEISVDGVKYELKDYYPRVLDDAEFYHLKKSIGVRACNFGDKEEAKPIPLLSGVGLLKCEHCGSAMVKVKGTNRRPNQYRYSCDAMRSSRIECVHTNWSFRGDQLEKAVLQLLADKIWIAEDKANPVPALKVQIDEISRKIDNLITLSAMTGATKELADQITTLNSERETLYNQLKMAEEEMYSVDSQGWEKLAEFDLEDVYNEDRIKVRFKIKQALKRIGCSRIDKYKNLFVLEYIDGKTQRVVIENSRGPRKGRIFVDLKTINDRQILESNGLVLHPCLDMLTDKNWKPEEEIPGPLQEFGI

SEQ ID NO: 1702 - protein, 559 aa, Unknown
  Description of Unknown: Integrase B1703 sequence
  SM00857,IPR006118,G3DSA:1.10.10.2600,IPR036162, PS51737,G3DSA:3.40.50.1390,Coil,IPR006119, IPR038109,PF07508,IPR011109,SSF53041, PTHR30461,PS00397,PS51736,cd00338,PF00239
MSKTVAIYVRVSTGKQADRDSIPFQIQECSNYVKHFLKTENFEVFKDAGRSGKNTHRPEYQRMIEKVKSGMISHVVVYKIDRISRNLVDFSIMYNDFKEHKVAFISLNEQFDTSSAIGEAVLKIILVFAELERKLTGERVRDIMMNRALEGKWNGARVPYGWDWDTKKQCPVHSDTEAEYARMMYRLYDECHSTCVVRDYCNAHDIPTKRGGEWTSKTVADFLRNPMNVGDYRYNYRKSARGKRNDPSEVIYVKDVFPPLIDRELYERVTHQMDLNTFGLGKDGRKVVSKKTHVFGGLIVCGLCGAFYHSDADVVRADGFRPSNYRCGAHNKKIHCKAKGTSDVKLGPFIFNYISNLVKASKSKKLLHFVSDLEQILLTGPEFEQVAGIADIGLDVTFDTIMHGFKPKRYTAAPYTVIRSGDSDALTAKRDKTIRALERLKKLFLFEDDAMSEKEYLMSKRELEGTLSDIENELSALEADTADTKYDDMSFISTASGFLIAHQIASGEHINYRELACAVDAKVLKDFVNSVIERIVLLDGRVASIEFKNGLVHEFLYRE

SEQ ID NO: 1703 - protein, 559 aa, Unknown
  Description of Unknown: Integrase B1704 sequence
  PTHR30461:SF3,cd00338,SM00857,IPR036162,PF13408, IPR025827,G3DSA:3.40.50.1390,IPR006119,PF07508,IPR011109, SSF53041,PTHR30461,PS51736,Coil,PF00239
MKTKLYSYIRFSSMRQNDGSSYERQIRMAREVAAKYDLELVNDYQDLGVSAFKGANSKTGALSRFLDAIGRSVPVGSWLFIENLDRLSRADIVSAQELFLSIIRRGITIVTGMDNKIYSLDTVTANPMDLMFSILLFIRGNEESQTKRNRTNSSALIKIKAHQENPQNPAVAIEEVGKNMWWTDTTSGYVLPHPVYFPVVQEIVELRKNGRSTAEILDHLNETYAPPPAVSNKKHSKWSRAMVERLFHTRALIGIKEISVDGVNYELKDYYPRVIDDPTFYHLKKNIGARAWNFGDKEEVKPIPLLSGIGLLKCDHCGCAMVKVKGTNKRSDQYRYTCDATRSRRLDCEHPNWSFRGDQLEKAVLQLLADKIWIAEDKANPVPALKVQVDEISRKIDNLIALSAMTGATKELADQITTLNSERETLYNQIKMAEEEMYSVDSQGWEKLAEFDLEDVYNEERLKVRFKIKQALKRIGCSRIDRNKNLFVLEYIDGKTQRVVIENSRGTRKGQIFVDLKTINDRQILESNGLVLHPCLDMLTDKNWKPEEEIPGPLQEFGI

SEQ ID NO: 1704 - protein, 559 aa, Unknown
  Description of Unknown: Integrase B1705 sequence
  SM00857,IPR006118,G3DSA:1.10.10.2600,IPR036162, PS51737,G3DSA:3.40.50.1390,IPR006119,IPR038109, PF07508,SSF53041,IPR011109,PF00239, PTHR30461,PS00397,PS51736,Coil,cd00338
MSKTVAIYVRVSTGKQADRDSIPFQIQECSNYVKHFLKTENFEVFKDAGRSGKNTHRPEYQRMIEKVKSGMISHVVVYKIDRISRNLVDFSIMYNDFKEHKVAFISLNEQFDTSSAIGEAVLKIILVFAELERKLTGERVRDIMMNRALEGKWNGARVPYGWDWDTKKQCPVHSDTEAEYARMMYRLYDECHSTCVVRDYCNAHDIPTKRGGEWTSKTVADFLRNPMNVGDYRYNYRKSARGKRNDPSEVIYVKDVFPPLIDRELYERVTHQMDLNTFGLGKDGRKVVSKKTHVFGGLVVCGLCGAFYHSDADVVRADGFRPSNYRCGAHNKKIHCKAKGTSDVKLGPFIFNYISNLVKASKSKKLLHSVSDLEQILLTGPEFEQVAGIADIGLDVTFDTIMHGFKPKRYTAAPYTVIRSGDSDALTAKRDKTIRALERLKKLFLFEDDAMSEKEYLMSKRELEGTLSDIENELSALEADTADTKYDDMSFISTASGFLIAHQIASGEHINYRELACAVDAKVLKDFVNSVIERIVLLDGRVASIEFKNGLVHEFLYRE

SEQ ID NO: 1705 - protein, 559 aa, Unknown
  Description of Unknown: Integrase B1706 sequence
  cd00338,SM00857,IPR006118,G3DSA:1.10.10.2600,IPR036162, PS51737,G3DSA:3.40.50.1390,IPR006119,IPR038109,PF07508, SSF53041,IPR011109,PTHR30461,PS00397,PS51736, Coil,PF00239
MSKTVAIYVRVSTGKQADRDSIPFQIQECSNYVKHFLKTENFEVFKDAGRSGKNTHRPEYQRMIEKVKSGMISHVVVYKIDRISRNLVDFSIMYNDFKEHKVAFISLNEQFDTSSAIGEAVLKIILVFAELERKLTGERVRDIMMNRALEGKWNGARVPYGWDWDTKKQCPVHSDTEAEYARMMYRLYDECHSTCVVRDYCNAHDIPTKRGGEWTSKTVADFLRNPMNVGDYRYNYRKSARGKRNDPSEVIYVKDVFPPLIDRELYERVTHQMDLNTFGLGKDGRKVVSKKTHVFGGLVVCGLCGAFYHSDADVVRADGFRPSNYRCGAHNKKIHCKAKGTSDVKLGPFIFNYISNLVKASKSKKLLHSVSNLEQILLTGPEFEQVAGIADIGLDVTFDTIMHGFKPKRYTAAPYTVIRSGDSDALTAKRDKTIRALERLKKLFLFEDDAMSEKEYLMSKRELEGTLSDIENELSALEADTADTKYDDMSFISTASGFLIAHQIASGEHINYRELACAVDAKVLKDFVNSVIERIVLLDGRVASIEFKNGLVHEFLYRE

SEQ ID NO: 1706 - protein, 559 aa, Unknown
  Description of Unknown: Integrase B1707 sequence
  cd00338,SM00857,IPR006118,G3DSA:1.10.10.2600,IPR036162, PS51737,G3DSA:3.40.50.1390,IPR006119,IPR038109,PF07508, SSF53041,IPR011109,PTHR30461,PS00397,PS51736, Coil,PF00239
MSKTVAIYVRVSTGKQADRDSIPFQIQECSNYVKHFLKTENFEVFKDAGRSGKNTHRPEYQRMIEKVKSGMISHVVVYKIDRISRNLVDFSIMYNDFKEHKVAFISLNEQFDTSSAIGEAVLKIILVFAELERKLTGERVRDIMMNRALEGKWNGARVPYGWDWDTKKQCPVHSDTEAEYARMMYRLYDECHSTCVVRDYCNAHDIPTKRGGEWTSKTVADFLRNPMNVGDYRYNYRKSARGKRNDPSEVIYVKDVFPPLIDRELYERVTHQMDLNTFGLGKDGRKVVSKKTHVFGGLVVCGLCGAFYHSDADVVRADGFRPSNYRCGAHNKKIHCKAKGTSDVKLGPFIFNYISNLVKASKSKKLLHSVSDLEQILLTGPEFEQVAGIADDGLDVTFDTIMHGFKPKRYTAAPYTVIRSGDSDALTAKRDKTIRALERLKKLFLFEDDAMSEKEYLMSKRKLEGTLSDIENELSALEADTADTKYDDMSFISTASGFLIAHQIASGEHINYRELARAVDAKVLKDFVNSVIERIVLLDGRVASIEFKNGLVHEFLYRE

SEQ ID NO: 1707 - protein, 559 aa, Unknown
  Description of Unknown: Integrase B1708 sequence
  cd00338,SM00857,IPR006118,G3DSA:1.10.10.2600,IPR036162, PS51737,G3DSA:3.40.50.1390,IPR006119,IPR038109,PF07508, SSF53041,IPR011109,PTHR30461,PS00397,PS51736, Coil,PF00239
MSKTVAIYVRVSTGKQADRDSIPFQIQECSNYVKHFLKTENFEVFKDAGRSGKNTHRPEYQRMIEKVKSGMISHVVVYKIDRISRNLVDFSIMYNDFKEHKVAFISLNEQFDTSSAIGEAVLKIILVFAELERKLTGERVRDIMMNRALEGKWNGARVPYGWDWDTKKQCPVHSDTEAEYARMMYRLYDESHSTCVVRDYCNAHDIPTKRGGEWTSKTVADFLRNPMNVGDYRYNYRKSARGKRNDPSEVIYVKDVFPPLIDRELYERVTHQMDLNTFGLGKDGRKVVSKKTHVFGGLVVCGLCGAFYHSDADVVRADGFRPSNYRCGAHNKKIHCKAKGTSDVKLGPFIFNYISNLVKASKSKKLLHSVSDLEQILLTGPEFEQVAGIADIGLDVTFDTIIHGFKPKRYTAAPYTVIRSGDSDALTAKRDKTIRALERLKKLFLFEDDAMSEKEYLMSKRELEGTLSDIENELSALEADTADTKYDDMSFISTASGFLIAHQIASGEHINYRELACAVDAKVLKDFVNSVIERIVLLDGRVASIEFKNGLVHEFLYRE

SEQ ID NO: 1708 - protein, 559 aa, Unknown
  Description of Unknown: Integrase B1709 sequence
  cd00338,SM00857,IPR006118,G3DSA:1.10.10.2600,IPR036162, PS51737,G3DSA:3.40.50.1390,IPR006119,IPR038109,PF07508, IPR011109,SSF53041,PTHR30461,PS00397,PS51736, Coil,PF00239
MSKTVAIYVRVSTGKQADRDSIPFQIQECSNYVKHFLKTENFEVFKDAGRSGKNTHRPEYQRMIEKVKAGMISHVVVYKIDRISRNLVDFSIMYNDFKEHKVAFISLNEQFDTSSAIGEAVLKIILVFAELERKLTGERVHDIMMNRALEGKWNGARVPYGWDWDTKNRCPVHSETEAEYARMMYRLYDESHSTCVVRDYCNAHDIPTKRGGEWTSKTVADFLRNPMNVGDYRYNYRKSARGKRNDPSDVIYVKDVFPPLIDRELYERVTHQMDLNTFGLGKDGRKVVSKKTHVFGGLVVCGLCGAFYHSDADVVRADGFRPSNYRCGAHNKKIHCKAKGTSDVKLGPFIFNYISNLVKASKSKKLLYSVSDLEQILLTGPEFEQVAGIADIGLDVTFDTIMHGFKPKRYTAAPYTVIRSGDSDALTAKRDKTIRALERLKKLFLFEDDAMSEKEYLMSKRELEGTLSDIENELSALEADTADTKYDDMSFISTASGFLIAHQIASGEHINYRELACAVDAKVLKDFVNSVIERIVLLDGRVASIEFKNGLVHEFLYRE

SEQ ID NO: 1709 - protein, 559 aa, Unknown
  Description of Unknown: Integrase B1710 sequence
  PTHR30461:SF3,SM00857,IPR036162,PF13408,IPR025827, G3DSA:3.40.50.1390,IPR006119,PF07508,IPR011109,SSF53041, PF00239,PTHR30461,PS51736,Coil,cd00338
MKTKLYSYIRFSSMRQNDGSSYERQIRMAREIAAKYDLELVNDYQDLGVSAFKGANSKTGALSRFLDAIGRSVPVGSWLFIENLDRLSRADIVSAQELFLSIIRRGITIVTGMDNKIYSLDTVTANPMDLMFSILLFIRGNEESQTKRNRTNSSALIKIKAHQENPQNPAVAIEEVGKNMWWTDTTSGYVLPHPVYFPVVQEIVELRKNGRSTAEILDHLNETYTPPPAVSNKKHSKWSRAMVERLFHTRALIGIKEVSVDGVNYELKDYYPRVIDDPTFYHLKKNIGARAWNFGDKEEVKPIPLLSGIGLLKCDHCGCAMVKVKGTNKRSDQYRYTCDATRSRRLDCEHPNWSFRGDQLEKAVLQLLADKIWIAEDKANPVPALKVQVDEISRKIDNLIALSAMTGATKELADQITTLNSERETLYNQIKMAEEEMYSVDSQGWEKLAEFDLEDVYNEERLKVRFKIKQALKRIGCSRIDRNKNLFVLEYIDGKTQRVVIENSRGTRKGQIFVDLKTINDRQILESNGLVLHPCLDMLTDKNWKPEEEIPGPLQEFGI

SEQ ID NO: 1710 - protein, 559 aa, Unknown
  Description of Unknown: Integrase B1711 sequence
  PTHR30461:SF3,SM00857,G3DSA:1.10.10.2600,IPR036162,PF13408, PS51737,G3DSA:3.40.50.1390,IPR025827,IPR006119,IPR038109, PF07508,IPR011109,SSF53041,PF00239, PTHR30461,PS51736,Coil,cd00338
MSEARTYEPTVTRVKTVRVIPPTIQPLSDIPAFSARPRRVAAYARVSTSSEEQLTSYEAQVKHYTEYIKSKETSDNWQFVDVYTDKGITGVSTKKREGFNRMIQDALAGRIDLIITKSVSRFARNTVDTLTAIRKLKEYGVEVYFEEQNIYTLDGKGELLLTIMSSIAQEESRNISENVTWGMRKRFADGKVTMPYGQFMGYRRGKDGTPEVVEAEADVVRTIFRRFLEGATPAMISRELNLAGVPCPSRKSLLSENEAEIAKARKKTSRWGTSTVENILTNEKYKGDAILQKTYCTDYLLKTFVVNDGSVVPKYYAQNSHPAIVSPEVFDLAQQELAWRRSLNGRYSGRSCFASRVVCGDCGAFYGSKVWHSTDEYRRTIWRCNNKYAGETKCATPHVTQEALEKAFVQVIQQMLSQKDRILTACREALDEAFDTMELDKAATRLQDQALGMAARVRQLVDENARVQRDQDEFKNDYEALLAEHARLSEKIRTIAEQKKDKAERRRRIEIFLHMLEEQKECADFEPGMFVALVDKVIIQHDGHMGFCFRNGMKCEYPQ

SEQ ID NO: 1711 - protein, 559 aa, Unknown
  Description of Unknown: Integrase B1712 sequence
  PTHR30461:SF3,SM00857,G3DSA:1.10.10.2600,IPR036162,PF13408, IPR025827,G3DSA:3.40.50.1390,PS51737,IPR006119,IPR038109, PF07508,SSF53041,IPR011109,PTHR30461,Coil, PS51736,cd00338,PF00239
MKTKKPARKRENLIGVNYCRYSSHSQRDASIEQQMAAAQAYAAANGITIIETYADRAITGRTDDRHEFQRMLRDAERGKFECVIAWKSDRLGRNMLQAMQNEARLNAYGVICVYVEENFDDSAAGRFALRNMMNVNQFYSESMAENVTRGMRYNAENCMVTNGQLPFGYKVDSSLHYELDHPKDDIVREIFTRIANGEPIVDIYTDLNNRNILTGRGKPWTKSGFHRLLHNERYKGIYIYDDIRIENGIPRIVSDELFDKVQKVLKMKNNPSGRHRSVAEYLLTGKLFCGYCKSPMTGMSGRSKTGDIHYYYACSYKRANGAASCKKKTVRKDKIEFEIASTIKQRLNDPEVQEWLIDRLMERQERYHRIPELEILKSRQAEVNTSIKNLLTAIEAGIVTSSTKSRLEELEAENANLSENIRVLSELKNKHFTREQILNWFSSLQNGKIEDKQYQKQIFQLFLKKAYLYDDKITIVFDTAEFSGTDSDELEFDLDDIDELVEEARIGKSVRLTSTLAHQKEKPPARRFFFLYFYLFTLLSSLFSTVSGRLFQIKDKREK

SEQ ID NO: 1712 - protein, 559 aa, Unknown
  Description of Unknown: Integrase B1713 sequence
  SM00857,IPR006118,G3DSA:1.10.10.2600,IPR036162,PS51737, G3DSA:3.40.50.1390,IPR006119,IPR038109,PF07508,SSF53041, IPR011109,PF00239,PTHR30461,PS00397,PS51736, Coil,cd00338
MSKTVAIYVRVSTGKQADRDSIPFQIQECSNYVKHFLKTENFEVFKDAGRSGKNTHRPEYQRMIEKVKSGMISHVVVYKIDRISRNLVDFSIMYNDFKEHKVAFISLNEQFDTSSAIGEAVLKIILVFAELERKLTGERVRDIMMNRALEGKWNGARVPYGWDWDTKKQCPVHSDTEAEYARMMYRLYDECHSTCVVRDYCNAHDIPTKRGGEWTSKTVADFLRNPMNVGDYRYNYRKSARGKRNDPSEVIYVKDVFPPLIDRELYERVTHQMDLNTFGLGKDGRKVVSKKTHVFGGLVVCGLCGAFYHSDADVVRADGFRPSNYRCGAHNKKIHCKAKGTSDVKLGPFIFNYISNLVKASKSKKLLHSVSDLEQILLTGPEFEQVAGIADDGLDVTFDTIMHGFKPKRYTAAPYTVIRSGDSDALTAKRDKTIRALERLKKLFLFEDDAMSEKEYLMSKRELEGTLSDIENELSALEADTADTKYDDMSFISTASGFLIAHQIASGEHINYRELACAVDAKVLKDFVNSVIERIVLLDGRVASIEFKNGLVHEFLYRE

SEQ ID NO: 1713 - protein, 559 aa, Unknown
  Description of Unknown: Integrase B1714 sequence
  PTHR30461:SF3,cd00338,SM00857,G3DSA:1.10.10.2600,IPR036162, PF13408,PS51737,G3DSA:3.40.50.1390,IPR025827,IPR006119, IPR038109,PF07508,IPR011109,SSF53041,PTHR30461, PS51736,Coil,PF00239
MLKTDDRVLRVAAYCRVSTDKTDQANSLESQQRYFNEYIKRNPLWELYDIYVDDGITGTSTKKRVAFNQMIEDAKGGKFDLIITKEISRFARNILDSIGYTRELKNLGVGVIFLNDNINTLDNDAEMRLAFFSTMAQEESRKTSERVKWGLRRQMEKGVVLGRDMLGYDVRNGQLIINEEGAETVRMIYHKFLDEGKGAHRIARELREEGVKTSTRMKDWSYTVILRILRNEKYCGDLVQQKTYTPDYLSHKKKRNYGEIETVEIHNHHEPIISRERFDAVQRELERRRPAESTVKAFANRYALSGKIVCGECGAGFVRRQKKRKDGSFNVKWVCAESQKNGSKHEEKDGTYTGCTTNSINDRDIKEILQSVVADTMEGRAEVTSYMLQTVEAVIEAVGKSNIIDHFEKEIERSKEKKKRLLDMCLNGYIEAKEYREACDEITMQIIDLEEKLNRGKSNQKIIEDKEKIINDIREFVENVSCGAEWNDTFYRNIVDKIVVYRDRKIDIHLKLIPGKWQAKILAGSGEINAYESEKSSCVCSTPMSVSNPLSSGYGIEYR

SEQ ID NO: 1714 - protein, 559 aa, Unknown
  Description of Unknown: Integrase B1715 sequence
  PTHR30461:SF3,SM00857,IPR036162,PF13408,IPR025827, G3DSA:3.40.50.1390,IPR006119,PF07508,IPR011109,SSF53041, PF00239,PTHR30461,PS51736,Coil,cd00338
MKTKLYSYIRFSSMRQSDGSSYERQIRMAREIAAKYDLELVNDYQDLGVSAFKGANSKTGALSRFLDAIGRSVPVGSWLFIENLDRLSRADIVSAQELFLSIIRRGITIVTGMDNKIYSLDTVTANPMDLMFSILLFIRGNEESQTKRNRTNSSALIKIKAHQENPQNPAVAIEEVGKNMWWTDTTSGYVLPHPVFFPVVQEIVELRKNGRSTAEILDHLNETYAPPPAVSNKKHSKWSRAMVERLFHTRALIGIKEVSVDGVNYELKDYYPRVIDDATFYHLKKNIGARAWNFGDKEEVKPIPLLSGIGLLKCDHCGCAMVKVKGTNKRSDQYRYTCDATRSRRLDCEHPNWSFRGDQLEKAVLQLLADKIWIAEDKANPVPALKVQVDEISRKIDNLIALSAMTGATKELADQITTLNSERETLYNQIKMAEEEMYSVDSQGWEKLAEFDLEDVYNEERLKVRFKIKQALKRIGCSRIDRNKNLFVLEYIDGKTQRVVIENSRGTRKGRIFIDLKTINDRQILESNGLVLHPCLDMLTDKNWKPEEEIPGPLQEFGI

SEQ ID NO: 1715 - protein, 559 aa, Unknown
  Description of Unknown: Integrase B1716 sequence
  IPR036162,PS51737,IPR011109,PTHR30461, PS00397,PF00239,G3DSA:1.10.10.2600,IPR006119, SSF53041,cd00338,SM00857,IPR025827,IPR038109 ,PS51736,IPR006118,PF13408,G3DSA:3.40.50.1390,PF07508,Coil
MSKIVAIYVRVSTGKQADRDSIPFQIQECSNYVKHFLKTENFEVFKDAGRSGKNTHRPEYQRMIEKVKSGMISHVVVYKIDRISRNLVDFSIMYNDFKEHKVAFISLNEQFDTSSAIGEAVLKIILVFAELERKLTGERVRDIMMNRALEGKWNGARVPYGWDWDAKKQCPVHSDAEAEYARMMYRLYDECHSTCVVRDYCNAHDIPTKRGGEWTSKTVADFLRNPMNVGDYRYNYRKSARGKRNDPSEVVYVKDVFPPLIDRELYERVTHQMDLNTFGLGKDGRKVVSKKTHVFGGLIVCGLCGAHYHSDSDAPRADGFLPSQYRCGAHNRKIHCKAKGTSDVKLGPFIFNYISNLVKASKSKKLLHSVSDLEQILLNGPEFEQVAGIADIGLDVTFDTIMHGFKPKRYTAAPYTVIRSGDSDALTAKRDKTIRALERLKKLFLFEDDAMSEKEYLMSKRELEGTLSDIENELSALEADTADTKYDDMSFISTASGFLIAHQIASGEHINYRELACAVDAKVLKDFANSVIERIVLLDGRVASIEFKNGLVHEFLYRE

SEQ ID NO: 1716 - protein, 559 aa, Unknown
  Description of Unknown: Integrase B1717 sequence
  IPR036162,PS51737,IPR011109,PTHR30461,PS00397, PF00239,G3DSA:1.10.10.2600,IPR006119,SSF53041,cd00338, SM00857,IPR025827,IPR038109,PS51736,IPR006118, PF13408,G3DSA:3.40.50.1390,PF07508,Coil
MSKTVAIYVRVSTGKQADRDSIPFQIQECSNYVKHFLKTENFEVFKDAGRSGKNTHRPEYQRMIEKVKSGMISHVVVYKIDRISRNLVDFSIMYNDFKEHKVAFISLNEQFDTSSAIGEAVLKIILVFAELERKLTGERVRDIMMNRALEGKWNGARVPYGWDWDTKKQCPVHSDTEAEYARMMYRLYDEFHSTCVVRDYCNAHDIPTKRGGEWTSKTVADFLRNPMNVGDYRYNYRKSARGKRNDPSEVIYVKDVFPPLIDRELYERVTHQMDLNTFGLGKDGRKVVSKKTHVFGGLIVCGLCGAFYHSDSDTPRADGFLPSQYRCGAHNRKIHCKAKGTSDVKLGPFIFNYISNLVKASKSKKLLHSVSDLEQILLTGPEFEQVAGIADIGLDVTFDTIMHGFKPKRYTAAPYTVIRSGDSDALTAKRDKTIRALERLKKLFLFEDDAMSEKEYLMSKRELEGTLSDIENELSVLEADTADTKYDDMSFISTASGFLIAHQIASGEHINYRELACAVDAKVLKDFANSVIERIVLLDGRVASIEFKNGLVHEFLYRE

SEQ ID NO: 1717 - protein, 559 aa, Unknown
  Description of Unknown: Integrase B1718 sequence
  SM00857,G3DSA:1.10.10.2600,IPR036162,PF13408,IPR025827, PS51737,G3DSA:3.40.50.1390,IPR006119,IPR038109,PF07508, IPR011109,SSF53041,PTHR30461,Coil,PS51736, cd00338,PF00239
MVKNRAAIYARFSSHNQRSESIEIQVENSRAYCEREGLQVVREYCDYAQTGRNIDRAEFQRMMSDARHGLFDYVVIYKVTRIMRNRDEMSLARIMLRKAGVEILYAGEDISSGSSGVLQLGMLEVLAEYESALDSERIRDGIQKNAQRCMANGRTLYGWDIVEGRYVINEREASVLRRMKNMLFAGSSVADIVRAVSTERSKRGAKFNQDTVTKLLKRVQNAGVYKYAGHEVQDGMPAIWSQVEQDMIDNILGDRHKPRRKINSTLEFPLSGKLYCAKCGAPMAGTSGTSCTGATYHYYKCRKCRRTVRRDLVEDVVCDMTLQAVAREDVRQRIASGMVAFQAEQPKEQSRSYAIKKELKRIDRTFERIWQAIEDGIAPPGGRERTEELKHRKSELEAELRIAEREETFNIGVDELMLWLDDAAENLTPEVILGTFVRFVEIDGKTLNVYFAFDHYGDDFRPKQKKAEPCPEGNSSTNSLMVEVRRIELRSTVENREVSTGLVAVRIGRPSGTPTSATSFRRFRLSSGHTDYVPEGNPLIMIPYSSQGFNRRLGGLDLN

SEQ ID NO: 1718 - protein, 559 aa, Unknown
  Description of Unknown: Integrase B1719 sequence
  SM00857,IPR006118,G3DSA:1.10.10.2600,IPR036162,PS51737, G3DSA:3.40.50.1390,IPR006119,IPR038109,PF07508,IPR011109, SSF53041,PF00239,PTHR30461,PS00397,PS51736, Coil,cd00338
MSKTVAIYVRVSTGKQADRDSIPFQIQECSNYVKHFLKTENYEIFKDAGRSGKNTHRPEYQRMIEKVKAGMISHVVVYKIDRISRNLVDFSIMYNDFKEHKVAFISLNEQFDTSSAIGEAVLKIILVFAELERKLTGERVRDIMMNRALEGKWNGARVPYGWDWDAKKQCPVHSDTEAEYARMMYRLYDESHSTCVVRDYCNAHDIPTKRGGEWTSKTVADFLRNPMNVGDYRYNYRKSARGKRNDPSEVIYVKDVFPPLIDRELYERVTHQMDMNTFGLGKDGRKVVSKKTHVFGGLIVCGLCGAFYHSDADVVRADGFRPSNYRCGAHNKKIHCKAKGTSDVKLGPFIFNYISNLVKASKSKKLLHFVSDLEQILLTGPEFEQVAGIADIGLDVTFDTIIHGFKPKRYTAAPYTVIRSGDSDALTAKRDKTIRALERLKKLFLFEDDAMSEKEYLMSKRELEGTLSDIENELSALEADTADTKYDDMSFISTASGFLIAHQIASGEHINYRELACAVDAKVLKDFVNSVIERIVLLDGRVASIEFKNGLVHEFLYRE

SEQ ID NO: 1719 - protein, 559 aa, Unknown
  Description of Unknown: Integrase B1720 sequence
  IPR036162,PS51737,IPR011109,PTHR30461,PS00397, PF00239,G3DSA:1.10.10.2600,IPR006119,SSF53041,cd00338, SM00857,IPR025827,IPR038109,PS51736,IPR006118, PF13408,G3DSA:3.40.50.1390,PF07508,Coil
MSKTVAIYVRVSTGKQADRDSIPFQIQECSNYVKHFLKTENFEVFKDAGRSGKNTHRPEYQRMIEKVKAGMISHVVVYKIDRISRNLVDFSIMYNDFKEHKVAFISLNEQFDTSSAIGEAVLKIILVFAELERKLTGERVRDIMMNRALDGKWNGARVPYGWDWDTKKQCPVHSDTEAEYARMMYRLYDESHSTCVVRDYCNAHDIPTKRGGEWTSKTVADFLRNPMNVGDYRYNYRKSARGKRNDPSEVIYVKDVFPPLIDRELYERVTHQMDLNTFGLGKDGRKVVSKKTHVFGGLIVCGLCGAFYHSDSDTPRADGFLPSQYRCGAHNRKIHCKAKGTSDVKLGPFIFNYISNLVKASKSKKLLHSVSDLEQILLTGPEFEQVAGIADIGLDVTFDTIMHGFKPKRYTAAPYTVIRSGDSDALTAKRDKTIRALERLKKLFLFEDDAMSEKEYLMSKRELEGTLSDIENELSVLEADTADTKYDDMSFISTASGFLIAHQIASGEHINYRELACAVDAKVLKDFANSVIERIVLLDGRVASIEFKNGLVHEFLYRE

SEQ ID NO: 1720 - protein, 559 aa, Unknown
  Description of Unknown: Integrase B1721 sequence
  IPR036162,PS51737,IPR011109,PTHR30461,PS00397, PF00239,G3DSA:1.10.10.2600,IPR006119,SSF53041,cd00338, SM00857,IPR025827,IPR038109,PS51736,IPR006118, PF13408,G3DSA:3.40.50.1390,PF07508,Coil
MSKTVAIYVRVSTGKQADRDSIPFQIQECSNYVKHFLKTENFEVFKDAGRSGKNTHRPEYQRMIEKVKAGMISHVVVYKIDRISRNLVDFSIMYNDFKEHKVAFISLNEQFDTSSAIGEAVLKIILVFAELERKLTGERVRDIMMNRALEGKWNGARVPYGWDWDTKKQCPVHSDTEAEYARMMYRLYDESHSTCVVRDYCNAHDIPTKRGGEWTSKTVADFLRNPMNVGDYRYNYRKSARGKRNDPSEVVYVKDVFPPLIDRELYERVTHQMDLNTFGLGKDGRKVVSKKTHVFGGLIVCGLCGAFYHSDSDTPRADGFLPSQYRCGAHNRKIHCKAKGTSDVKLGPFIFNYISNLVKASKSKKLLHSVSDLEQILLTGPEFEQVAGIADAGLDVTFDTIMHGFKPKRYTAAPYTVIRSGDSDALTAKRDKTIRALERLKKLFLFEDDAMSEKEYLMSKRELEGTLSDIENELSALEADTADTKYDDMSFISTASGFLIAHQIASGEHINYRELACAVDAKVLKDFANSVIERIVLLDGRVASIEFKNGLVHEFLYRE

SEQ ID NO: 1721 - protein, 559 aa, Unknown
  Description of Unknown: Integrase B1722 sequence
  IPR036162,PS51737,IPR011109,PTHR30461,PS00397, PF00239,G3DSA:1.10.10.2600,IPR006119,SSF53041,cd00338, SM00857,IPR025827,IPR038109,PS51736,IPR006118, PF13408,G3DSA:3.40.50.1390,PF07508,Coil
MSKTVAIYVRVSTGKQADRDSIPFQIQECSNYVKHFLKTENFEVFKDAGRSGKNTHRPEYQRMIEKVKSGMISHVVVYKIDRISRNLVDFSIMYNDFKEHKVAFISLNEQFDTSSAIGEAVLKIILVFAELERKLTGERVRDIMMNRALEGKWNGARVPYGWDWDSKKQCPVHSDTEAEYARMMYRLYDECHSTCVVRDYCNAHNIPTKRGGEWTSKTVADFLRNPMNVGDYRYNYRKSARGKRNDPSEVIYVKDVFPPLIDRELYERVTHQMDLNTFGLGKDGRKVVSKKTHVFGGLIVCGLCGAFYHSDSDTPRADGFLPSQYRCGAHNRKIHCKAKGTSDVKLGPFIFNYISNLVKASKSKKLLHSVSDLEQILLTGPEFEQVAGIADIGLDVTFDTIMHGFKPKRYTAAPYTVIRSGDSDALTAKRDKTIRALERLKKLFLFEDDAMSEKEYLMSKRELEGTLSDIENELSVLEADTADTKYDDMSFISTASGFLIAHQIASGEHINYRELACAVDAKVLKDFANSVIERIVLLDGRVASVEFKNGLVHEFLYRE

SEQ ID NO: 1722 - protein, 559 aa, Unknown
  Description of Unknown: Integrase B1723 sequence
  PTHR30461:SF3,cd00338,SM00857,IPR036162,PF13408, IPR025827,G3DSA:3.40.50.1390,IPR006119,PF07508,IPR011109, SSF53041,PTHR30461,PS51736,Coil,PF00239
MKTKLYSYIRFSSMRQSDGSSYERQIRMAREIAAKYDLELVNDYQDLGVSAFKGANSKTGALSRFLDAIGRSVPVGSWLFIENLDRLSRADIVSAQELFLSIIRRGITIVTGMDNKIYSLDTVTANPMDLMFSILLFIRGNEESQTKRNRTNSSALIKIKAHQENPQNPAVAIEEVGKNMWWTDTTSGYVLPHPVYFPVVQEIVELRKNGRSTAEILDHLNETYAPPPAVSNKKHSKWSRAMVERLFHTRALIGIKEISVDGVNYELNNYYPRVIDDPTFYHLKKNIGARAWNFGDKEEVKPIPLLSGIGLLKCDHCGCAMVKVKGTNKRSDQYRYTCDATRSRRLDCEHPNWSFRGDQLEKAVLQLLADKIWIAEDKANPVPALKVQVDEISRKIDNLIALSAMTGATKELADQITTLNSERETLYNQIKMAEEEMYSVDSQGWEKLAEFDLEDVYNEDRIKVRFKIKQALKRIGCSRIDRNKNLFVLEYVDGKTQRVVIENSRGTRKGRIFIDLKTINDRQILESNGLVLHPCLDMLTDKNWKPEEEIPGPLQEFGI

SEQ ID NO: 1723 - protein, 559 aa, Unknown
  Description of Unknown: Integrase B1724 sequence
  PTHR30461:SF3,cd00338,SM00857,G3DSA:1.10.10.2600,IPR036162, PF13408,PS51737,IPR025827,G3DSA:3.40.50.1390,IPR006119, IPR038109,PF07508,IPR011109,SSF53041, PTHR30461,PS51736,Coil,PF00239
MKNIKIKCNIYTRVSTTMQVDGYSLDAQKEKLRRYAEFQNMEIVNEYSDEGKSGKSVEGRPEFQRMLDNIENGTDEIQFVLVFKLSRFGRNAADVLNSLQRMQDFGVNLICVEDGIDSSKDSGKLMISVLSAVAEIERENILVQTMEGRKQKAREGKWNGGFAPYGYELVNGELQIAEDEAEVIRLIYDKFIHTNMGIAAIAIWLNQHGYKKKKRQNNTLDAFAASFIKGVLDNPVYCGKLAYGRRKNEKVAGTRNEYRIVKQENYMLYDGIHEGIISETDWELAHQKRVKNGVKYEKIHSLDHEHILSGILKCPLCGSGMYGNVNRKKKKDGTLYKDYFYYACKHRRLMNGHRCDYHKQWSEDKVNNAVEEVIRKLVQNPKFEEAIRKKIGSRIDTDEIEREIENLEKQHRQLTGAKARLGQQMDNLDIMDKFYEKKYQDMETRLYRLYDEIEGVENSIEEVKKRLLNIQQQKISEENVYQFLLYFDKLYDKFTDLEKKEFLNSFVERVDIYDQEQPDGRFLKHIKFRFPVYFGDRETQELCWDNESTVETVCKLVRK

SEQ ID NO: 1724 - protein, 559 aa, Unknown
  Description of Unknown: Integrase B1725 sequence
  SM00857,G3DSA:1.10.10.2600,IPR036162,PF13408,IPR025827, G3DSA:3.40.50.1390,PS51737,IPR006119,IPR038109,PF07508, SSF53041,IPR011109,PTHR30461,Coil,cd00338, PF00239
MAYRKITDIRDTIGMRAVFYARVSTAEEEQLNAIELQIEENRGCIKDHGWKLVGEYIDRSKSGTMVKGRDDYQRLYEDLYEDLFDIVVIKDQERLQRNTLDWYLFINRVVQTGKLLFMYMDGKFYSPDDALITGVRAIIAEEFSRNLSKKLHNYHDHRIEKARQGQEIALQGSGNVYGWDKKDGKYYINPEQAKVRRLMCEGIMARKGSTLIAKELNDAGYRNTVGKPWKPMDIPKFVYDCKNVGTMIINKERHDFESKQTIKLPKEEWVYVENALPPIVTQEEWDLICKIHEERVIATGSDRRGKKTSGYSFSGKLVCGICGAPYWRKQRVSKDEYWVCSTKQTKGRRTRKRDSTMGKAGEINPLGCDNENISYNSLMEIMGVVSERLQANTNTIKQDMINWITKLRKQLLEANGGHTEADLQRELSRKSKLLDAYLDGILNKQEYQKKAEELDERIIQLKAETEKNKANSGDIAEIDKVLANIDEEVSRYVDGNEKLKVEYLLEHLEQVQIFPDKVIVIVPILSEGIVVEKAQYVSREKRSRKDNTFKYLSRNQARL

SEQ ID NO: 1725 - protein, 559 aa, Unknown
  Description of Unknown: Integrase B1726 sequence
  cd00338,SM00857,IPR006118,G3DSA:1.10.10.2600,IPR036162, PS51737,G3DSA:3.40.50.1390,IPR006119,IPR038109,PF07508, SSF53041,IPR011109,PTHR30461,PS00397,PS51736, Coil,PF00239
MSKTVAIYVRVSTGKQADRDSIPFQIQECSNYVKHFLKTENFEVFKDAGRSGKNTHRPEYQRMIEKVKSGMISHVVVYKIDRISRNLVDFSIMYNDFKEHKVAFISLNEQFDTSSAIGEAVLKIILVFAELERKLTGERVRDIMMNRALEGKWNGARVPYGWDWDAKKQCPVHSDTEAEYARMMYRLYDESHSTCVVRDYCNAHDIPTKRGGEWTSKTVADFLRNPMNVGDYRYNYRKSARGKRNDPSEVIYVKDVFPPLIDRELYERVTHQMDMNTFGLGKDGRKVVSKKTHVFGGLIVCGLCGAFYHSDADVVRADGFRPSNYRCGAHNKKIHCKAKGTSDVKLGPFIFNYISNLVKASKSKKLLHFVSNLEQILLTGPEFEQVAGIADIGLDVTFDTIMHGFKPKRYTAAPYTVIRSGDSDALTAKRDKTIRALERLKKLFLFEDDAMSEKEYLMSKRELEGTLSDIENELSALEADTADTKYDDMSFISTASGFLIAHQIASGEHINYRELSCAVDAKVLKDFVNSVIERIVLLDGRVASIEFKNGLVHEFLYRE

SEQ ID NO: 1726 - protein, 559 aa, Unknown
  Description of Unknown: Integrase B1727 sequence
  IPR036162,PS51737,IPR011109,PTHR30461,PS00397, PF00239,G3DSA:1.10.10.2600,IPR006119,SSF53041,cd00338, SM00857,IPR025827,IPR038109,PS51736,IPR006118, PF13408,G3DSA:3.40.50.1390,PF07508,Coil
MSKTVAIYVRVSTGKQADRDSIPFQIQECSNYVKHFLKTENFEVFKDAGRSGKNTHRPEYQRMIEKVKSGMISHVVVYKIDRISRNLVDFSIMYNDFKEHKVAFISLNEQFDTSSAIGEAVLKIILVFAELERKLTGERVRDIMMNRALEGKWNGARVPYGWDWDTKKQCPVHSDTEAEYARMMYRLYDESHSTCVVRDYCNAHDIPTKRGGEWTSKTVADFLRNPMNVGDYRYNYRKSARGKRNDPSEVIYVKDVFPPLIDRELYERVTHQMDLNTFGLGKDGRKVVSKKTHVFGGLIVCGLCGAFYHSDSDTPRADGFLPSQYRCGAHNKKIHCKAKGTSDVKLGPFIFNYISNLVKASKSKKLLHSVSDLEQILLAGPEFEQVAGIADIGLDVTFDTIMHGFKPERYTAAPYTVIRSGDSDALTAKRDKTIRALERLKKLFLFEDDAMSEKEYLMSKRELEGTLSDIENELSALEADTADTKYDDMSFISTASGFLIAHQIASGEHINYRELACAVDAKVLKDFANSVIERIVLLDGRVASIEFKNGLVHEFLYRE

SEQ ID NO: 1727 - protein, 559 aa, Unknown
  Description of Unknown: Integrase B1728 sequence
  cd00338,SM00857,IPR006118,G3DSA:1.10.10.2600,IPR036162, PS51737,G3DSA:3.40.50.1390,IPR006119,IPR038109,PF07508, IPR011109,SSF53041,PTHR30461,PS00397,PS51736, Coil,PF00239
MSKTVAIYVRVSTGKQADRDSIPFQIQECSNYVKHFLKTENYEIFKDAGRSGKNTHRPEYQRMIEKVKAGMISHVVVYKIDRISRNLVDFSIMYNDFKEHKVAFISLNEQFDTSSAIGEAVLKIILVFAELERKLTGERVRDIMMNRALEGKWNGARVPYGWDWDAKKQCPVHSDTEAEYARMMYRLYDESHSTCVVRDYCNAHDIPTKRGGEWTSKTVADFLRNPMNVGDYRYNYRKSARGKRNDPSEVIYVKDVFPPLIDRELYERVTHQMDLNTFGLGKDGRKVVSKKTHVFGGLVVCGLCGAFYHSDADVVRADGFRPSNYRCGAHNKKIHCKAKGTSDVKLGPFIFNYISNLVKASNSKKLLHSVSDLEQILLTGPEFEQVAGIADAGLDVTFDTIMHGFKPKRYTAAPYTVIRSGDSDALTAKRDKTIRALERLKKLFLFEDDAMSEKEYLMSKRELEGTLSDIENELSALETDATDTKYDDMSFISTASGFLIAHQIASGEHINYRELACAVDAKVLKDFANSVIERIVLLDGRVASIEFKNGLVHEFLYRE

SEQ ID NO: 1728 - protein, 559 aa, Unknown
  Description of Unknown: Integrase B1729 sequence
  IPR036162,PS51737,IPR011109,PTHR30461,PS00397, PF00239,G3DSA:1.10.10.2600,IPR006119,SSF53041,cd00338, SM00857,IPR025827,IPR038109,PS51736,IPR006118, PF13408,G3DSA:3.40.50.1390,PF07508,Coil
MSKTVAIYVRVSTGKQADRDSIPFQIQECSNYVKHFLKTENFEVFKDAGRSGKNTHRPEYQRMIEKVKSGMISHVVVYKIDRISRNLVDFSIMYNDFKEHKVAFISLNEQFDTSSAIGEAVLKIILVFAELERKLTGERVRDIMMNRALEGKWNGARVPYGWDWDSKKQCPVHSDTEAEYARMMYRLYDECHSTCVVRDYNNSHNIPTKRGGEWTSKTVADFLRNPMNVGDYRYNYRKSARGKRNDPSEVIYVKDVFPPLIDRELYERVTHQMDLNTFGLGKDGRKVVSKKTHVFGGLIVCGLCGAFYHSDSDTPRADGFLPSQYRCGAHNRKIHCKAKGTSDVKLGPFIFNYISNLVKASKSKKLLHSVSDLEQILLTGPEFEQVAGIADIGLDVTFDTIMHGFKPKRYTAAPYTVIRSGDSDALTAKRDKTIRALERLKKLFLFEDDAMSEKEYLMSKRELEGTLSDIENELSVLEADTADTKYDDMSFISTASGFLIAHQIASGEHINYRELACAVDAKVLKDFANSVIERIVLLDGRVASVEFKNGLVHEFLYRE

SEQ ID NO: 1729 - protein, 559 aa, Unknown
  Description of Unknown: Integrase B1730 sequence
  SM00857,IPR006118,G3DSA:1.10.10.2600,IPR036162,PS51737, G3DSA:3.40.50.1390,IPR006119,IPR038109,PF07508,SSF53041, IPR011109,PF00239,PTHR30461,PS00397,PS51736, Coil,cd00338
MSKTVAIYVRVSTGKQADRDSIPFQIQECSNYVKHFLKTENFEVFKDAGRSGKNTHRPEYQRMIEKVKSGMISHVVVYKIDRISRNLVDFSIMYNDFKEHKVAFISLNEQFDTSSAIGEAVLKIILVFAELERKLTGERVRDIMMNRALEGKWNGARVPYGWDWDTKKQCPVHSDTEAEYARMMYRLYDECHSTCVVRDYCNAHDIPTKRGGEWTSKTVADFLRNPMNVGDYRYNYRKSARGKRNDPSEVIYVKDVFPPLIDRELYERVTHQMDLNTFGLGKDGRKVVSKKTHVFGGLVVCGLCGAFYHSDADVVRADGFRPSNYRCGAHNRKIHCKAKGTSDVKLGPFIFNYISNLVKASKSKKLLHSVSDLEQILLTGPEFEQVAGIADAGLDVTFDTIMHGFKPKRYTAAPYTVIRSGDSDALTAKRDKTIRALERLKKLFLFEDDAMSEKEYLMSKRELEGTLSDIENELSALEADTADTKYDDMSFISTASGFLIAHQIASGEHINYRELACAVDAKVLKDFANSVIERIVLLDGRVASIEFKNGLVHEFLYRE

SEQ ID NO: 1730 - protein, 559 aa, Unknown
  Description of Unknown: Integrase B1731 sequence
  PTHR30461:SF3,SM00857,G3DSA:1.10.10.2600,IPR036162,PF13408, PS51737,G3DSA:3.40.50.1390,IPR025827,IPR006119,IPR038109, PF07508,SSF53041,IPR011109,PTHR30461,Coil, PS51736,cd00338,PF00239
MPQKFKIDLSMLTPEEQQQFRDDPTTLTKGEVDVALYLRFSSERQKEQSIEGQLRDCIAYCKRKSFRIVAIYVDRATTARKDVEKRVHFQEMISDSAHHLWNFVVVWKLDRFARNREDSAVFKMRLRKNGVRVKSATETISDNPEGIILESVLEGIAEYYSADLSQKITRGLRESAMKGHCVGGHVPLGYKIEDHRLVINPETAHIVQEAFQLYANGESVAEICRIFNGKGYRTAKNSEFNRSSFKSIFKNVRYIGTYIYKDIEKENAIPAIIDKDLFETVQRRLSLAADAPARGKAKVDYLLSGKLFCGHCGAAMHGESGTSKTGAIHNYYTCYSRKRRKGCNKKPLKKDFIERVVAQDAMALLTDDVIEELADMAMSQADRDLKENTRIPELSARLTEIEQGINNITKAVEKGIASDALLNRLTELEKEKKDLTSQLREEEKYIYRIDRDQVVFWLTKFQGGDIEDEDCRRRIIDLLVNSVTVWDEPDGYKITTAYNLTSCKTKTFRVSNNADSPSGGGFGFGELSSTKTTLDELKSSMVTSEWLSCVLCRTVILSS

SEQ ID NO: 1731 - protein, 559 aa, Unknown
  Description of Unknown: Integrase B1732 sequence
  PTHR30461:SF3,SM00857,G3DSA:1.10.10.2600,IPR036162,PF13408, PS51737,G3DSA:3.40.50.1390,IPR025827,IPR006119,IPR038109, PF07508,IPR011109,SSF53041,PTHR30461,Coil, cd00338,PF00239
MARTATKHPAKPKRGKKLEAEEPGVLYGRYSSHNQKDISVEQQFEKGYGLAGEYGIRIVETYADRAVSGRTDKRKDFQRMMADAAKGKFRYVIAWKSNRMGRNMLEALVNEAKLQELGVRVLYVEEDFDDTAAGRFAARSMMNVNQFYSENMAEDIKRGLYDNASNCMVANGHLPYGYKRDDTLHYVIDEAKAAVIREIFVRVSCGEPLVDIYDSLNARGIKTSYGRPWGRSSFQKILSNERYRGIYIYGDVRKEGGIPRIVSDELYFKVQEVLKTKKNPQGRHRVNGDYLLTGKLFCGNCKSPMIGISGTGRTGKLHYYYVCQKKRSEKTCDKKNVRRDEVEYQIAKAIFDNALQDQVIEWIADSTIAYNDRKEAEGHIGILEDQLADVQRSLKNIMSAIEQGIVTETTKSRLLELESERSEIEGKIAAAKADIVPVNREQLIEWLLSLREGDIHDKKYQARLFDTFLIAAYLYDDGTAKLVFSFAGDKNTVTVPLAEAVDSVEENTAEGSFKLCLAPPCEKPPLVGGFSHGETEWREKSCGFDRMQSAAFTRPLREM

SEQ ID NO: 1732 - protein, 559 aa, Unknown
  Description of Unknown: Integrase B1733 sequence
  SM00857,IPR006118,G3DSA:1.10.10.2600,IPR036162,PS51737, G3DSA:3.40.50.1390,Coil,IPR006119,IPR038109,PF07508, SSF53041,IPR011109,PTHR30461,PS00397,PS51736, cd00338,PF00239
MSKTVAIYVRVSTGKQADRDSIPFQIQECSNYVKHFLKTENFEVFKDAGRSGKNTHRPEYQRMIEKVKSGMISHVVVYKIDRISRNLVDFSIMYNDFKEHKVAFISLNEQFDTSSAIGEAVLKIILVFAELERKLTGERVRDIMMNRALEGKWNGARVPYGWDWDSKKQCPVHSDTEAEYARMMYRLYDESHSTCVVRDYCNAHDIPTKRGGEWTSKTVADFLRNPMNVGDYRYNYRKSARGKRNDPSEVIYVKDVFPPLIDRELYERVTHQMDLNTFGLGKDGRKVVSKKTHVFGGLVVCGLCGAFYHSDADVVRADGFRPSNYRCGAHNKKIHCKAKGTSDVKLGPFIFNYISNLVKASKSKKLLHSVSDLEQILLTGPEFEQVAGIADIGLDVTFDTIMHGFKPKRYTAAPYTVIRSGDSDALTAKRDKTIRALERLKKLFLFEDDAMSEKEYLMSKRELEGTLSDIENELSALETDAADTKYDDMSFISTASGFLIAHQIASGEHINYRELACAVDAKVLKDFANSVIERIVLLDGRVASIEFKNGLVHEFLYRE

SEQ ID NO: 1733 - protein, 559 aa, Unknown
  Description of Unknown: Integrase B1734 sequence
  SM00857,IPR006118,G3DSA:1.10.10.2600,IPR036162,PS51737, G3DSA:3.40.50.1390,IPR006119,IPR038109,PF07508,SSF53041, IPR011109,PF00239,PTHR30461,PS00397,PS51736, Coil,cd00338
MSKTVAIYVRVSTGKQADRDSIPFQIQECSNYVKHFLKTENFEVFKDAGRSGKNTHRPEYQRMIEKVKSGMISHVVVYKIDRISRNLVDFSIMYNDFKEHKVAFISLNEQFDTSSAIGEAVLKIILVFAELERKLTGERVRDIMMNRALEGKWNGARVPYGWDWDAKKQCPVHSDTEAEYARMMYRLYDECHSTCVVRDYCNAHDIPTKRGGEWTSKTVADFLRNPMNVGDYRYNYRKSARGKRNDPSEVIYVKDVFPPLIDRELYERVTHQMDLNTFGLGKDGRKVVSKKTHVFGGLVVCGLCGAFYHSDADVVRADGFRPSNYRCGAHNKKIHCKAKGTSDVKLGPFIFNYISNLVKASKSKKLLHSVSDLEQILLTGPEFEQVAGIADIGLDVTFDTIMHGFKPKRYTAAPYTVIRSGDSDALTAKRDKTIRALERLKKLFLFEDDAMSEKEYLMSKRELEGTLSDIENELSALETDATDTKYDDMSFISTASGFLIAHQIASGEHINYRELACAVDAKVLKDFANSVIERIVLLDGRVASIEFKNGLVHEFLYRE

SEQ ID NO: 1734 - protein, 559 aa, Unknown
  Description of Unknown: Integrase B1735 sequence
  SM00857,IPR006118,G3DSA:1.10.10.2600,IPR036162,PS51737, G3DSA:3.40.50.1390,IPR006119,IPR038109,PF07508,SSF53041, IPR011109,PF00239,PTHR30461,PS00397,PS51736, Coil,cd00338
MSKTVAIYVRVSTGKQADRDSIPFQIQECSNYVKHFLKTENFEVFKDAGRSGKNTHRPEYQRMIEKVKSGMISHVVVYKIDRISRNLVDFSIMYNDFKEHKVAFISLNEQFDTSSAIGEAVLKIILVFAELERKLTGERVRDIMMNRALEGKWNGARVPYGWDWDSKKQCPVHSDTEAEYARMMYRLYDESHSTCVVRDYCNAHDIPTKRGGEWTSKTVADFLRNPMNVGDYRYNYRKSARGKRNDPSEVIYVKDVFPPLIDRELYERVTHQMDLNTFGLGKDGRKVVSKKTHVFGGLVVCGLCGAFYHSDADVVRADGFRPSNYRCGAHNKKIHCKAKGTSDVKLGPFIFNYISNLVKASNSKKLLHSVSDLEQILLTGPEFEQVAGIADAGLDVTFDTIMHGFKPKRYTAAPYTVIRSGDSDALTAKRDKTIRALERLKKLFLFEDDAMSEKEYLMSKRELEGTLSDIENELSALETDATDTKYDDMSFISTASGFLIAHQIASGEHINYRELACAVDAKVLKDFANSVIERIVLLDGHVASIEFKNGLVHEFLYRE

SEQ ID NO: 1735 - protein, 559 aa, Unknown
  Description of Unknown: Integrase B1736 sequence
  PTHR30461:SF3,IPR036162,PS51737,IPR011109,PTHR30461, PF00239,G3DSA:1.10.10.2600,IPR006119,PF14287,SSF53041, IPR025378,SM00857,IPR025827,cd03770,IPR038109, PF13408,G3DSA:3.40.50.1390,PF07508,Coil
MASNKKYAVLYGRLSQEDTQKTNKTDDSNSIQNQKLLLEKYAAEKGFTNTLFLYDDGYSGTNFNRPGWQQVMELMENGQVETLIVKDMSRLGREYLQVGQYTELIFPSYGVRFIAVNDGVDSLYESTNDFTPFRNLMNEFYAKDCSKKGRSVVRLKAETGARVSSRPRYGYMKDPADPKRHMVPDPETAPVVRYIFDLCVSGKGPAQIAKQLKKDKIPTPGYSYYQKHGVELTGVDITQPYNWSTNTVAGILEDETYLGHTINLKSTTLSFKNKKRIERPESEQLRFENTHEALITQQTWEIVQDIRKHKRRRANMAEQNIFSGLVYCLDCGGTMVLHRAHTMDAVKNNFMCSTYKKKGKDVCSGHYIREQELSAILLDDIRRVTHFARQNELRFAEHIRKKQGKEAQQEIAMLQKKIDTMQKRQVELTKLFKRLYEDSVLGRIPEEQYRILSQEYTAEQKEIQEQLPAMEARLQDLKDSSSNIARFIENAKRYSEIPELTAEILRTFIKRVEVGERAEKYSRTAPQEVRIYYRDIGLVDELPQSMADSVAEAIQNEVA

SEQ ID NO: 1736 - protein, 559 aa, Unknown
  Description of Unknown: Integrase B1737 sequence
  cd00338,SM00857,IPR006118,G3DSA:1.10.10.2600,IPR036162, PS51737,G3DSA:3.40.50.1390,IPR006119,IPR038109,PF07508, SSF53041,IPR011109,PTHR30461,PS00397,PS51736, Coil,PF00239
MSKTVAIYVRVSTGKQADRDSIPFQIQECSNYVKHFLKTENYEIFKDAGRSGKNTHRPEYQRMIEKVKAGMISHVVVYKIDRISRNLVDFSIMYNDFKEHKVAFISLNEQFDTSSAIGEAVLKIILVFAELERKLTGERVRDIMMNRALEGKWNGARVPYGWDWDTKKQCPVHSDTEAEYARMMYRLYDESHSTCVVRDYCNAHDIPTKRGGEWTSKTVADFLRNPMNVGDYRYNYRKSARGKRNDPSEVIYVKDVFPPLIDRELYERVTHQMDLNTFGLGKDGRKVVSKKTHVFGGLVVCGLCGAFYHSDADVVRADGFRPSNYRCGAHNKKIHCKAKGTSDVKLGPFIFNYISNLVKASKSKKLLHSVSDLEQILLTGPEFEQVAGIADIGLDVTFDTIIHGFKPKRYTAAPYTVIRSGDSDALTAKRDKTIRALERLKKLFLFEDDAMSEKEYLMSKRELEGTLSDIENELSALEADTADTKYDDMSFISTASGFLIAHQIASGEHINYRELACAVDAKVLKDFVNSVIERIVLLDGRVASIEFKNGLVHEFLYRE

SEQ ID NO: 1737 - protein, 559 aa, Unknown
  Description of Unknown: Integrase B1738 sequence
  IPR036162,PS51737,IPR011109,PTHR30461,PS00397, PF00239,G3DSA:1.10.10.2600,IPR006119,SSF53041,cd00338, SM00857,IPR025827,IPR038109,PS51736,IPR006118, PF13408,G3DSA:3.40.50.1390,PF07508,Coil
MSKTVAIYVRVSTGKQADRDSIPFQIQECSNYVKHFLKTENYEVFKDAGRSGKNTHRPEYQRMIEKVKSGMVSHVVVYKIDRISRNLVDFSIMYNDFKEHKVAFISLNEQFDTSSAIGEAVLKIILVFAELERKLTGERVRDIMMNRALEGKWNGARVPYGWDWDSKKQCPVHSDTEAEYARMMYRLYDESHSTCVVRDYCNAHDIPTKRGGEWTSKTVADFLRNPMNVGDYRYNYRKSARGKRNDPSEVIYVKDVFPPLIDRELYERVTHQMDLNTFGLGKDGRKVVSKKTHVFGGLIVCGLCGAFYHSDSDTPRSDGFLPSQYRCGAHNRKIHCKAKGTSDVKLGPFIFNYISNLVKASKSKKLLHSVSDLEQILLTGPEFEQVAGIADIGLDVTFDTIMHGFKPKRYTAAPYTVIRSGDSDALTAKRDKTIRALERVKKLFLFEDDAMSEKEYLMSKRELEGTLSDIENELSALEADTADAKYDDMSFISTASGFLIAHQISSGEHINYRELACAVDAKVLKDFVNSVIERIVLLDGRVASIEFKNGLVHEFLYRE

SEQ ID NO: 1738 - protein, 559 aa, Unknown
  Description of Unknown: Integrase B1739 sequence
  cd00338,SM00857,IPR006118,G3DSA:1.10.10.2600,IPR036162, PS51737,G3DSA:3.40.50.1390,IPR006119,IPR038109,PF07508, SSF53041,IPR011109,PTHR30461,PS00397,PS51736, Coil,PF00239
MSKTVAIYVRVSTGKQADRDSIPFQIQECSNYVKHFLKTENFEVFKDAGRSGKNTHRPEYQRMIEKVKSGMISHVVVYKIDRISRNLVDFSIMYNDFKEHKVAFISLNEQFDTSSAIGEAVLKIILVFAELERKLTGERVRDIMMNRALEGKWNGARVPYGWDWDTKKQCPVHSDTEAEYARMMYRLYDESHSTCVVRDYCNAHDIPTKRGGEWTSKTVADFLRNPMNVGDYRYNYRKSARGKRNDPSEVIYVKDVFPPLIDRELYERVTHQMDLNTFGLGKDGRKVVSKKTHVFGGLIVCGLCGAFYHSDADVVRADGFRPSNYRCGAHNKKIHCKAKGTSDVKLGPFIFNYISNLVKASKSKKLLHSVSDLEQILLTGPEFEQVAGIADIGLDVTFDTIMHGFKPKRYTAAPYTVIRSGDSDALTAKRDKTIRALERLKKLFLFEDDAMSEKEYLMSKRELEGTLSDIENELSALEADTADTKYDDMSFISTASGFLIAHQIASGEHINYRELACAVDAKVLKDFVNSVIERIVLLDGRVASIEFKNGLVHEFLYRE

SEQ ID NO: 1739 - protein, 559 aa, Unknown
  Description of Unknown: Integrase B1740 sequence
  cd00338,SM00857,IPR006118,G3DSA:1.10.10.2600,IPR036162, PS51737,G3DSA:3.40.50.1390,IPR006119,IPR038109,PF07508, IPR011109,SSF53041,PTHR30461,PS00397,PS51736, Coil,PF00239
MSKIVAIYVRVSTGKQADRDSIPFQIQECSNYVKHFLKTENFEVFKDAGRSGKNTQRPEYQRMIEKVKSGMVSHVVVYKIDRISRNLVDFSIMYNDFKEHKVAFISLNEQFDTSSAIGEAVLKIILVFAELERKLTGERVHDIMMNRALEGKWNGARVPYGWDWDAKKQCPVHSDAEAEYARMMYRLYDECHSTCVVRDYCNAHDIPTKRGGEWTSKTVADFLRNPMNVGDYRYNYRKSARGKRNDPSEVIYVKDVFPPLIDRELYERVTHQMDLNTFGLGKDGRKVVSKKTHVFGGLIVCGLCGAFYHSDADVVRADGFRPSNYRCGAHNKKIHCKAKGTSDVKLGPFIFNYISNLVKASKSKKLLHSVSDLEQILLTGPEFEQVAGIADIGLDVTFDTIMHGFKPKRYTAAPYTVIRSGDSDALTAKRDKTIRALERLKKLFLFEDDAMSEKEYLMSKRELEGTLSDIENELSALEADTADTKYDDMSFISTASGFLIAHQIASGEHINYRELACAVDAKVLKDFANSVIERIVLLDGRVASIEFKNGLVHEFLYRE

SEQ ID NO: 1740 - protein, 559 aa, Unknown
  Description of Unknown: Integrase B1741 sequence
  SM00857,IPR006118,G3DSA:1.10.10.2600,IPR036162,PS51737, G3DSA:3.40.50.1390,IPR006119,IPR038109,PF07508,SSF53041, IPR011109,PF00239,PTHR30461,PS00397,PS51736, Coil,cd00338
MSKTVAIYVRVSTGKQADRDSIPFQIQECSNYVKHFLKTENFEVFKDAGRSGKNTHRPEYQRMIEKVKSGMISHVVVYKIDRISRNLVDFSIMYNDFKEHKVAFISLNEQFDTSSAIGEAVLKIILVFAELERKLTGERVRDIMMNRALEGKWNGARVPYGWDWDTKKQCPVHSDTEAEYARMMYRLYDESHSTCVVRDYCNAHDIPTKRGGEWTSKTVADFLRNPMNVGDYRYNYRKSARGKRNDPSEVIYVKDVFPPLIDRELYERVTHQMDLNTFGLGKDGRKVVSKKTHVFGGLVVCGLCGAFYHSDADVVRADGFRPSNYRCGAHNKKIHCKAKGTSDVKLGPFIFNYISNLVKASKSKKLLHSVSDLEQILLTGPEFEQVAGIADIGLDVTFDTIMHGFKPKRYTAAPYTVIRSGDSDALTAKRDKTIRALERLKKLFLFEDDAMSEKEYLMSKRELEGTLSDIENELSALETDATDTKYDDMSFISTASGFLIAHQIASGEHINYRELACAVDAKVLKDFANSVIERIVLLDGRVASIEFKNGLVHEFLYRE

SEQ ID NO: 1741 - protein, 559 aa, Unknown
  Description of Unknown: Integrase B1742 sequence
  PTHR30461:SF3,cd00338,SM00857,G3DSA:1.10.10.2600,IPR036162, PF13408,PS51737,IPR025827,G3DSA:3.40.50.1390,IPR006119, IPR038109,PF07508,IPR011109,SSF53041,PTHR30461, PS51736,Coil,PF00239
MARKKNIAAGQNAVIYARYSSHNQREVSIEQQVRECMKHAAELGLHVVGTYEDRAISGKTDKRPNFQRMMRDAEKGKFQAVVAWKSNRIGRNMLQAMVNEAKLEDCGVKVFYAEEDFDDTAAGRFALRNMMNVNQFYSENMAEDITRGLYDNASKCMANGRQPLGYKRGEDGRVVLDEANAAVVREIFTRVAAGDLFVDIARDLNAQGIKTSKGANWNKGSFQSICQNERYRGIYIYGDVRVADGIPRIVSDDLWYRVQEAMRMKKNPVGTRHRVGAEDYLLTGKLRCGHCGSYMTGVSGTSRNGELHYYYTCQKRRTEHACDKKNIRRDVIEPAVAQAIKMYCLTDDVIAWIADRTVEYWEKHDNDLQIEALEQQLEENKKATSNMLKAIEMGIITEATRTRMVELETEQSRLSVQLNVAKEDVVKIDREQIISYLELLQQGDIHDRDFQMELFKNFLVAVYVYDDNRMKLVFSCMGDQNSVEIPLETGEDPPDGGLSPDAKMFVLTPDSSTKKALYFVGSMVLFFLLKPIFGGCIHPTALSTGTKMNMVFGFFHKLP

SEQ ID NO: 1742 - protein, 559 aa, Unknown
  Description of Unknown: Integrase B1743 sequence
  SM00857,IPR006118,G3DSA:1.10.10.2600,IPR036162,PS51737, G3DSA:3.40.50.1390,IPR006119,IPR038109,PF07508,SSF53041, IPR011109,PF00239,PTHR30461,PS00397,PS51736, Coil,cd00338
MSKTVAIYVRVSTGKQADRDSIPFQIQECSNYVKHFLKTENFEVFKDAGRSGKNTHRPEYQRMIEKVKSGMISHVVVYKIDRISRNLVDFSIMYNDFKEHKVAFISLNEQFDTSSAIGEAVLKIILVFAELERKLTGERVRDIMMNRALEGKWNGARVPYGWDWDTKKQCPVHSDTEAEYARMMYRLYDESHSTCVVRDYCNAHDIPTKRGGEWTSKTVADFLRNPMNVGDYRYNYRKSARGKRNDPSEVIYVKDVFPPLIDRELYERVTHQMDLNTFGLGKDGRKVVSKKTHVFGGLVVCGLCGAFYHSDADVVRADGFRPSNYRCGAHNKKIHCKAKGTSDVKLGPFIFNYISNLVKASKSKKLLHSVSDLEQILLTGPEFEQVAGIADIGLDVTFDTIMHGFKPKRYTAAPYTVIRSGDSDALTAKRDKTIRALERLKKLFLFEDDAMSEKEYLISKRELEGTLSDIENELSALEADTADTKYDDMSFISTASGFLIAHQIASGEHINYRELACAVDAKVLKDFVNSVIERIVLLDGRVASIEFKNGLVHEFLYRE

SEQ ID NO: 1743 - protein, 559 aa, Unknown
  Description of Unknown: Integrase B1744 sequence
  SM00857,G3DSA:1.10.10.2600,IPR036162,PF13408,PS51737, IPR025827,G3DSA:3.40.50.1390,IPR006119,IPR038109,PF07508, SSF53041,IPR011109,PTHR30461,Coil,cd00338, PF00239
MAYRKITDIRDTIGMRAVFYARVSTAEEEQLNAIELQIEENRGCIKDHGWKLVGEYIDRSKSGTMVKGRDDYQRLYEDLYEDLFDIVVIKDQERLQRNTLDWYLFINRVVQTGKLLFMYMDGKFYSPDDALITGVRAIIAEEFSRNLSKKLHNYHDHRIEKARQGQEIALQGSGNVYGWDKKDGKYYINPEQARVRRLMCEGIMARKGSTLIAKELNDAGYRNTVGKPWKPMDIPKFVYDCKNVGTMIINKERHDFESKQTIKLPKEEWVYVENALPPIVTQEEWDLICKIHEERVIATGSDRRGKKTSGYSFSGKLVCGICGAPYWRKQRVSKDEYWVCSTKQTKGRRTRKRDSTMGKAGEINPLGCDNENISYNSLMEIMGVVSERLQANTDTIKQDMINWLTKLRKQLLEANGGHTEADLQRELSRKSKLLDAYLDGILNKQEYQKKAEELDERIIQLKTETEKNKANSGDIAEIDKVLANIDEEVARYVDGNEKLKVEYLLEHLEQVQIFPDKVIVIVPILSEGIVVEKTQYVSREKWSGKDNNASHVSNVDQTG

SEQ ID NO: 1744 - protein, 559 aa, Unknown
  Description of Unknown: Integrase B1745 sequence
  PTHR30461:SF3,SM00857,G3DSA:1.10.10.2600,IPR036162,PF13408, IPR025827,G3DSA:3.40.50.1390,PS51737,IPR006119,IPR038109, PF07508,SSF53041,IPR011109,PTHR30461,Coil, PS51736,cd00338,PF00239
MNKKIKCDTYTRVSTTMQVDGYSLDAQKEKLKRYAEFQNMEIVNEYSDEGKSGKSVEGRPEFQRMLDNIENGTDEVQFVLVFKLSRFGRNAADVLNSLQRMQDFGVNLICVEDGIDSSKDSGKLMISVLSAVAEIERENILVQTMEGRKQKAREGKWNGGFAPYGYELVNGELQIAEDEAEIIRLIYNKFIHTNMGISAIAAWLNQHGYKKKKRQNNTLDAFAASFIKGVLDNPVYCGKLAYGRRKNEKVSGTRNEYRIVKQENYMLHDGIHEGIISETDWELAHQKREKTGVKYEKTHSLDHEHILSGILRCPLCGSGMYGNVNRKKKKDGTLYKDYFYYACKHRRLVDGHKCGYRKQWSEEKINNAVEEVIRKLVKNPKFEEAILNKIGSRIDTEEIEKEIERLEKQYRQLTGAKARLGQQMDSLDIMDKFYEKKYQDMETRLYRLYDEIEGVENRIEEVKNRLLNIRQQKISEENVYQFLLYFDKLYDKFTDLEKKEFLNSFVEQVDIYEQEQPDGRFLKHIKFRFPVYFGDRETQELCWDNESTVETVCLLSKKP

SEQ ID NO: 1745 - protein, 559 aa, Unknown
  Description of Unknown: Integrase B1746 sequence
  cd00338,SM00857,IPR006118,G3DSA:1.10.10.2600,IPR036162, PS51737,G3DSA:3.40.50.1390,IPR006119,IPR038109,PF07508, SSF53041,IPR011109,PTHR30461,PS00397,PS51736, Coil,PF00239
MSKTVAIYVRVSTGKQADRDSIPFQIQECSNYVKHFLKTENFEVFKDAGRSGKNTHRPEYQRMIEKVKSGMISHVVVYKIDRISRNLVDFSIMYNDFKEHKVAFISLNEQFDTSSAIGEAVLKIILVFAELERKLTGERVRDIMMNRALEGKWNGARVPYGWDWDTKKQCPVHSDTEAEYARMMYRLYDESHSTCVVRDYCNAHDIPTKRGGEWTSKTVADFLRNPMNVGDYRYNYRKSARGKRNDPSEVIYVKDVFPPLIDRELYERVTHQMDLNTFGLGKDGRKVVSKKTHVFGGLVVCGLCGAFYHSDADVVRADGFRPSNYRCGAHNKKIHCKAKGTSDVKLGPFIFNYISNLVKASKSKKLLHSVSDLEQILLTGPEFEQVAGIADIGLDVTFDTIMHGFKPKRYTAAPYTVIRSGDSDALTAKRDKTIRALERLKKLFLFEDDAMSEKEYLMSKRELEGTLSDIENELSALEADTADTKYDDMSFISTASGFLIAHQIASGEHINYRELACAVDAKVLKDFVNSVIERIVLLDGRVASIEFKNGLVHEFLYRE

SEQ ID NO: 1746 - protein, 559 aa, Unknown
  Description of Unknown: Integrase B1747 sequence
  IPR036162,PS51737,IPR011109,PTHR30461,PS00397, PF00239,G3DSA:1.10.10.2600,IPR006119,SSF53041,cd00338, SM00857,IPR025827,IPR038109,PS51736,IPR006118, PF13408,G3DSA:3.40.50.1390,PF07508,Coil
MSKTVAIYVRVSTGKQADRDSIPFQIQECSNYVKHFLKTENFEVFKDAGRSGKNTHRPEYQRMIEKVKSGMISHVVVYKIDRISRNLVDFSIMYNDFKEHKVAFISLNEQFDTSSAIGEAVLKIILVFAELERKLTGERVRDIMMNRALEGKWNGARVPYGWDWDSKKQCPVHSDTEAEYARMMYRLYDECHSTCVVRDYNNSHNIPTKRGGEWTSKTVADFLRNPMNVGDYRYNYRKSARGKRNDPSEVIYVKDVFPPLIDRELYERVTHQMDLNTFGLGKDGRKVVSKKTHVFGGLIVCGLCGAFYHSDSDTPRADGFLPSQYRCGAHNRKIHCKAKGTSDVKLGPFIFNYISNLVKASKSKKLLHSVSDLEQILLTGPEFEQVAGIADIGLDVTFDTIMHGFKPKRYTAAPYTVIRSGDSDALTAKRDKTIRALERLKKLFLFEDDAMSEKEYLMSKRELEGTLSDIENELSVLEADTADTKYDDMSFISTASGFLIAHQIASGEHINYRELACAVDAKVLKDFANSVIERIVLLDGRVASIEFKNGLVHEFLYRE

SEQ ID NO: 1747 - protein, 559 aa, Unknown
  Description of Unknown: Integrase B1748 sequence
  IPR036162,PS51737,IPR011109,PTHR30461,PS00397, PF00239,G3DSA:1.10.10.2600,IPR006119,SSF53041,cd00338, SM00857,IPR025827,IPR038109,PS51736,IPR006118, PF13408,G3DSA:3.40.50.1390,PF07508,Coil
MSKTVAIYVRVSTGKQADRDSIPFQIQECSNYVKHFLKTENFEVFKDAGRSGKNTHRPEYQRMIEKVKAGMISHVVVYKIDRISRNLVDFSIMYNDFKEHKVAFISLNEQFDTSSAIGEAVLKIILVFAELERKLTGERVRDIMMNRALEGKWNGARVPYGWDWDTKKQCPVHSDTEAEYARMMYRLYDESHSTCVVRDYCNAHDIPTKRGGEWTSKTVADFLRNPMNVGDYRYNYRKSARGKRNDPSEVIYVKDVFPPLIDRELYERVTHQMDLNTFGLGKDGRKVVSKKTHVFGGLIVCGLCGAFYHSDSDTPRADGFLPSQYRCGAHNRKIHCKAKGTSDVKLGPFIFNYISNLVKASKSKKLLHSVSDLEQILLTGPEFEQVAGIADAGLDVTFDTIMHGFKPKRYTAAPYTVIRSGDSDALTAKRDKTIRALERLKKLFLFEDDAMSEKEYLMSKRELEGTLSDIENELSALEADTADTKYDDMSFISTASGFLIAHQIASGEHINYRELACAVDAKVLKDFANSVIERIVLLDGRVASIEFKNGLVHEFLYRE

SEQ ID NO: 1748 - protein, 559 aa, Unknown
  Description of Unknown: Integrase B1749 sequence
  PTHR30461:SF3,SM00857,G3DSA:1.10.10.2600,IPR036162,PF13408, IPR025827,G3DSA:3.40.50.1390,PS51737,IPR006119,IPR038109, PF07508,IPR011109,SSF53041,PTHR30461,PS51736, cd00338,PF00239
MLRAVIYARFSSDMQREESIDAQVRACKAYCQRKGYAVVGVYSDEAKSGRSTVNRDGYNRMLADAVQGNFDVIIFHKIDRNSRNELNYYKFKDQLARLGVSYEYASQSIDCTPEGQMMESVLVGMAAYYSRNLAKEVRKGQNENAYKAISNGGIAPFGLKLVDQRYVIDEREADGVRMIFAMYLDGHGYGTIAKALADAGYTTRTGKPFAKNSMHDILANEKYAGVYVFGKASNDGVKRNTHAANTDVIRVEDAIPAIISKADFAAVKARMERNKRAPGHYNQCVHYLLAGRIFCGECGAAMVGHRCLGKKRKDGTRKEYLYYLCGNRQRNSVAPCSAKMVDKAAVENAVLEMIQAKVLAPTIRADLAAGIAEQYRAAASSSADELTALRQAKTGAERRMSHLYDLVEEGIADQFDLERLKAVKCELLEINKKLATQSKNSRLPALSEEQISAVLDNFYEKLEQDDKLSQQRLIDLFLHRVTVYVDHIHIELTIKSVYDWLVEMRGVEPLSENIAIQLSPSADVILCFALRLPDDGPSHCYPTEFPLKPIGISLKVSHY

SEQ ID NO: 1749 - protein, 559 aa, Unknown
  Description of Unknown: Integrase B1750 sequence
  SM00857,IPR006118,G3DSA:1.10.10.2600,IPR036162,PS51737, G3DSA:3.40.50.1390,IPR006119,IPR038109,PF07508,SSF53041, IPR011109,PF00239,PTHR30461,PS00397,PS51736, Coil,cd00338
MSKTVAIYVRVSTGKQADRDSIPFQIQECSNYVKHFLKTENFEVFKDAGRSGKNTHRPEYQRMIEKVKSGMISHVVVYKIDRISRNLVDFSIMYNDFKEHKVAFISLNEQFDTSSAIGEAVLKIILVFAELERKLTGERVRDIMMNRALEGKWNGARVPYGWDWDTKKQCPVHSDTEAEYARMMYRLYDECHSTCVVRDYCNAHDIPTKRGGEWTSKTVADFLRNPMNVGDYRYNYRKSARGKRNDPSEVIYVKDVFPPLIDRELYERVTHQMDLNTFGLGKDGRKVVSKKTHVFGGLVVCGLCGAFYHSDADMVRADGFRPSNYRCGAHNKKIHCKAKGTSDVKLGPFIFNYISNLVKASKSKKLLHSVSDLEQILLTGPEFEQVAGIADIGLDVTFDTIMHGFKPKRYTAAPYTVIRSGDSDALTAKRDKTIRALERLKKLFLFEDDAMSEKEYLMSKRELEGTLSDIENELSALETDATDTKYDDMSFISTASGFLIAHQIASGEHINYRELACAVDAKVLKDFANSVIERIVLLDGRVASIEFKNGLVHEFLYRE

SEQ ID NO: 1750 - protein, 559 aa, Unknown
  Description of Unknown: Integrase B1751 sequence
  IPR036162,PS51737,IPR011109,PTHR30461,PS00397, PF00239,G3DSA:1.10.10.2600,IPR006119,SSF53041,cd00338, SM00857,IPR025827,IPR038109,PS51736,IPR006118, PF13408,G3DSA:3.40.50.1390,PF07508,Coil
MSKIVAIYVRVSTGKQADRDSIPFQIQECSNYVKHFLKTENFEVFKDAGRSGKNTQRPEYQRMIEKVKSGMVSHVVVYKIDRISRNLVDFSIMYNDFKEHKVAFISLNEQFDTSSAIGEAVLKIILVFAELERKLTGERVHDIMMNRALEGKWNGARVPYGWDWDTKNRCPVHSETEAEYARMMYRLYDESHSTCVVRDYCNAHDIPTKRGGEWTSKTVADLLRNPMNVGDYRYNYRKSARGKRNDPSEVIYVKDVFPPLIDREIYERVTHQMDLNTLGLGKDGRKVVSKKTHVFGGLIVCGLCGAFYHSDSDTPRADGFLPTKYRCGAHNRKIHCKAKGISDVMLGPFIFNYISNLVKASKSRKLLHSVSDLEQILLTGPEFEQVAGIADVGLDVTFDTIMHGFRPKRYTAAPYTVIRSGDSDALNAKRDKTIRALERLKKLFLFEDDAMSEKEYLMSKRELEGTLSDIENELSALEADTADTKYDDMSFISTASGFLIAHQIASGEHINYRELACAVDAKVLKDFANSVIERIVLLDGRVASIEFKNGLVHEFLYRE

SEQ ID NO: 1751 - protein, 559 aa, Unknown
  Description of Unknown: Integrase B1752 sequence
  PTHR30461:SF3,cd00338,SM00857,G3DSA:1.10.10.2600,IPR036162, PF13408,IPR025827,PS51737,G3DSA:3.40.50.1390,IPR006119, IPR038109,PF07508,IPR011109,SSF53041,PTHR30461, PS51736,Coil,PF00239
MSQGKTKVYIYTRVSTTMQIDGYSLDAQKARMKAYADFNDYQIVGEYEDAGKSGKSIEGRASFCRMMEDIKSGKDGVSYVLVFKLSRFGRNAADVLSTLQVMQDFGVNLICVEDGIDSSKDAGKLMISVLSAVAEIERENIRVQTMEGRIQKAQEGRWNGGFAPYGYRLVDGELQINEDEAPAIQTIFEQYVNTDTGANGLSKYLAAHGFQKLARQNGTSPLFSATLIRSILRNPVYCGKIAFGRRKLEKVHGTRNEYRQVPQDNYLLVDGLHEGIVSEELWNAAQVKLLAQSKRYEPVTRNKTEQAHLLSALVKCPVCGAGMYSNKCTKHKKDGTAYKSFSYYSCKHRKMQRGQKCDFTKQIQEEVLDSAVVEVIIKLVSNPKFAVLMQSKINSKVDTTAIEQEITAAEKQLRQYYSVKSKLMDEIDTLDPDDRHYIMRKSDLDERLYKMYDKIEGTENQLVTARAKKQAIEADKITGDNIYKILLCFEKLYNVMNPVERKKLMEHLISEVHIYPERQPNGQWLKSIKFRLPIIENGADLCLDNGSHVECITAFARMK

SEQ ID NO: 1752 - protein, 559 aa, Unknown
  Description of Unknown: Integrase B1753 sequence
  PTHR30461:SF3,cd00338,SM00857,IPR036162,PF13408, IPR025827,G3DSA:3.40.50.1390,IPR006119,PF07508,IPR011109, SSF53041,PTHR30461,PS51736,Coil,PF00239
MKTKLYSYIRFSSMRQNDGSSYERQIRMAREIAVKYDLELVNDYQDLGVSAFKGANSKTGALSRFLDAIGRSVPVGSWLFIENLDRLSRADIVSAQELFLSIIRRGITIVTGMDNKIYSLDTVTANPMDLMFSILLFIRGNEESQTKRNRTNSSALIKIKAHQENPQNPAVAIEEIGKNMWWTDTTSGYVLPHPVFFPIVQEVVELRRNGRSTAEILDHLNATYTPPPAASHKRHSNWSRAMIERLFHTRALIGIKEISVDGVKYELKDYYPRVLDDAEFYHLKKSIGVRACNFGDKEEVKPIPLLSGVGLLKCEHCGSAMVKVKGTNRRPNQYRYSCDAMRSSRIECVHTNWSFRGDQLEKAVLQLLADKIWIAEDKANPVPALKVQIDEISRKIDNLITLSAMTGATKELADQITTLNSERETLYNQIKMAEEEMYSVDSQGWEKLAEFDLEDVYNEDRIKVRFKIKQALKRIGCSRIDKYKNLFVLEYIDGKTQRVVIENSRGPRKGRIFIDLKTINDRQILESNGLVLHPCLDMLTDKNWKPEEEIPGPLQEFGI

SEQ ID NO: 1753 - protein, 559 aa, Unknown
  Description of Unknown: Integrase B1754 sequence
  cd00338,SM00857,IPR006118,G3DSA:1.10.10.2600, IPR036162,PS51737,G3DSA:3.40.50.1390,IPR006119, IPR038109,PF07508,IPR011109,SSF53041, PTHR30461,PS00397,PS51736,Coil,PF00239
MSKTVAIYVRVSTGKQADRDSIPFQIQECSNYVKHFLKTENFEVFKDAGRSGKNTHRPEYQRMIEKVKSGMISHVVVYKIDRISRNLVDFSIMYNDFKEHKVAFISLNEQFDTSSAIGEAVLKIILVFAELERKLTGERVRDIMMNRALEGKWNGARVPYGLDWDTKKQCPVHSDTEAEYARMMYRLYDESHSTCVVRDYCNAHDIPTKRGGEWTSKTVADFLRNPMNVGDYRYNYRKSARGKRNDPSEVIYVKDVFPPLIDRELYERVTHQMDLNTFGLGKDGRKVVSKKTHVFGGLVVCGLCGAFYHSDADVVRADGFRPSNYRCGAHNKKIHCKAKGTSDVKLGPFIFNYISNLVKASKSKKLLHSVSDLEQILLTGPEFEQVAGIADIGLDVTFDTIMHGFKPKRYTAAPYTVIRSGDSDALTAKRDKTIRALERLKKLFLFEDDAMSEKEYLMSKRELEGTLSDIENELSALEADTADTKYDDMSFISTASGFLIAHQIASGEHINYRELACAVDAKVLKDFVNSVIERIVLLDGRVASIEFKNRLVHEFLYRE

SEQ ID NO: 1754 - protein, 559 aa, Unknown
  Description of Unknown: Integrase B1755 sequence
  PTHR30461:SF3,SM00857,G3DSA:1.10.10.2600,PS51736,PF13408, PS51737,IPR025827,IPR036162,G3DSA:3.40.50.1390,IPR006119, IPR038109,PF07508,IPR011109,SSF53041,PTHR30461, mobidb-lite,cd00338,PF00239
MRTIRKIERRIPNLKQRKKVAAYARVSMESERMHHSLSAQVSYYSSLIQKNPDWEYAGVYADYGISGTGMKKRQEFLRMLEDAEAGKIDSILTKSIQRFARNTVDLLRTVRHLKELGIEVWFEKENIHTMSGDGELMMTILASFAQEESRSISENIRWRIKKQFEQGNPNGRFRVYGYRWEGDNLVVVPEEAAVVRRIFQNFLDGKSRLETEREFAAEGITTRNGCRWMDSNIRVVLTNVTYTGNMLFQKEYVTDPILKKRKKNRGELPRYYVENTHEPIIDKETFDYVQQEMARRKELGALANKSLNTTCFTGKIKCGICGRSYMHNRRTDRGFEEFWDCGSHKLKGRNCGAKGSIPHAVLVKESTEVLGLDDFDEQAFLDRVEKIVVPEYHVMVFCMKNGQKLIRHWVSTAKKDCWTDEYKDRQRAWMKNYMANGKGTRFSVFTTRIRCALCGSSFRRCKTKHDRPVYWRCSKGGKCESVSIREDDLKRVAAETMGLEDFDEDRFRGKVESIEAGKPDCLTVHFKSGRTEEISYTPTPSKRRPKARRKESGEKWQRQ

SEQ ID NO: 1755 - protein, 559 aa, Unknown
  Description of Unknown: Integrase B1756 sequence
  IPR036162,PS51737,IPR011109,PTHR30461,PS00397, PF00239,G3DSA:1.10.10.2600,IPR006119,SSF53041,cd00338, SM00857,IPR025827,IPR038109,PS51736,IPR006118, PF13408,G3DSA:3.40.50.1390,PF07508,Coil
MSKTVAIYVRVSTGKQADRDSIPFQIQECSNYVKHFLKTENFEVFKDAGRSGKNTHRPEYQRMIEKVKSGMISHVVVYKIDRISRNLVDFSIMYNDFKEHKVAFISLNEQFDTSSAIGEAVLKIILVFAELERKLTGERVRDIMMNRALEGKWNGARVPYGWDWDTKKQCPVHSDTEAEYARMMYRLYDESHSTCVVRDYCNAHDIPTKRGGEWTSKTVADFLRNPMNVGDYRYNYRKSARGKRNDPSEVIYVKDVFPPLIDRELYERVTHQMDLNTFGLGKDGRKVVSKKTHVFGGLIVCGLCGAHYHSDSDTPRADGFLPSQYRCGAHNRKIHCKAKGTSDVKLGPFIFNYISNLVKASKSKKLLHSVSDLEQILLTGPEFEQVAGIADIGLDVTFDTIMHGFKPKRYTAAPYTVIRSGDSDALTAKRDKTIRALERLKKLFLFEDDAMSEKEYLMSKRELEGTLSDIENELSALEADTADTKYDDMSFISTASGFLIAHQIASGEHINYRELACAVDAKVLKDFANSVIERIVLLDGRVASIEFKNGLVHEFLYRE

SEQ ID NO: 1756 - protein, 559 aa, Unknown
  Description of Unknown: Integrase B1757 sequence
  PTHR30461:SF3,cd00338,SM00857,IPR036162,PF13408, IPR025827,G3DSA:3.40.50.1390,IPR006119,PF07508,IPR011109, SSF53041,PTHR30461,PS51736,Coil,PF00239
MKTKLYSYIRFSSMRQNDGSSYERQIRMAREIAVKYDLELVNDYQDLGVSAFKGANSKTGALSRFLDAIGRSVPVGSWLFIENLDRLSRADIVSAQELFLSIIRRGITIVTGMDNKIYSLDTVTANPMDLMFSILLFIRGNEESQTKRNRTNSSALIKIKAHQENPQNPAVAIEEVGKNMWWTDTTSGYVCPDPVFFPIVQEVVELRRNGRSTAEILDHLNATYTPPPAASHKRHSNWSRAMIERLFHTRALIGIKEISVDGVKYELKDYYPRVLDDAEFYHLKKSIGVRACNYGDKEEAKPIPLLSGVNLLKCEHCGSAMVKVKGTNRRPNQYRYSCDAMRSSRIECVHTNWSFRGDQLEKAVLQLLADKIWIAEDKANPVPALKVQIDEISRKIDNLITLSAMTGATKELADQITTLNSERETLYNQLKMAEEEMYSVDSQGWEKLAEFDLEDVYNEDRIKVRFKIKQALKRIGCSRIDKYKNLFVLEYIDGKTQRVVIENSRGPRKGRIFVDLKTINDRQILESNGLVLHPCLDMLTDKNWKPEEEIPGPLQEFGI

SEQ ID NO: 1757 - protein, 559 aa, Unknown
  Description of Unknown: Integrase B1758 sequence
  SM00857,IPR006118,G3DSA:1.10.10.2600,IPR036162, PS51737,G3DSA:3.40.50.1390,Coil,IPR006119, IPR038109,PF07508,SSF53041,IPR011109, PTHR30461,PS00397,PS51736,cd00338,PF00239
MSKTVAIYVRVSTGKQADRDSIPFQIQECSNYVKHFLKTENFEVFKDAGRSGKNTHRPEYQRMIEKVKAGMISHVVVYKIDRISRNLVDFSIMYNDFKEHKVAFISLNEQFDTSSAIGEAVLKIILVFAELERKLTGERVRDIMMNRALEGKWNGARVPYGWDWDTKKQCPVHSDTEAEYARMMYRLYDECHSTCVVRDYCNAHDIPTKRGGEWTSKTVADFLRNPMNVGDYRYNYRKSARGKRNDPSEVIYVKDVFPPLIDRELYERVTHQMDLNTFGLGKDGRKVVSKKTHVFGGLVVCGLCGAFYHSDADVVRADGFRPSNYRCGAHNKKIHCKAKGTSDVKLGPFIFNYISNLVKASKSKKLLHSVSDLEQILLTGPEFEQVAGIADIGLDVTFDTIMHGFKPKRYTAAPYTVIRSGDSDALTAKRDKTIRALERLKKLFLFEDDAMSEKEYLMSKRELEGTLSDIENELSALETDATDTKYDDMSFISTASGFLIAHQIASGEHINYRELACAVDAKVLKDFANSVIERIVLLDGRVASIEFKNGLVHEFLYRE

SEQ ID NO: 1758 - protein, 559 aa, Unknown
  Description of Unknown: Integrase B1759 sequence
  PTHR30461:SF3,SM00857,G3DSA:1.10.10.2600,IPR036162,PF13408, IPR025827,PS51737,G3DSA:3.40.50.1390,IPR006119,IPR038109, PF07508,IPR011109,SSF53041,PTHR30461,Coil, PS51736,cd00338,PF00239
MHIDLSMLTPEEQQQFRDDPTTLTKGEVDVALYLRFSSERQKEQSIEGQLRDCIAYCKRKSFRIVAIYVDRATTARKDVEKRVHFQEMISDSAHHLWNFVVVWKLDRFARNREDSAVFKMRLRKNGVRVKSATETISDNPEGIILESVLEGIAEYYSADLSQKITRGLRESAMKGHSVGGHVPLGYKIEDHRLVINPATAHIVQEAFQLYANGESMAEICRIFNSKGYRTAKNSEFNRSSFKSMFKNVRYIGTYIYKDIKKENAIPAIIDKDLFETVQRRLSLAADAPARGKAKVDYLLSGKLFCGHCGATMNGESGTSKTGAIHNYYTCYSRKRRKGCDKKPLKKDFIERIVAQDAMALLTNDVIEELADMAMSQADRDLKENTCIPELSARLTEVEQGINNITKAIEKGIASDALLNRLTELEKEKKDLTSQLREEEKYICRIDRDQIIFWLTKFQGGDIEDEDCRRRIIDLLVNSVTVWDEPDGYKITTAYNLTSCKTKTFRVSNNADSPSGGEFGFGELSSTKSKIRTFVRRDRGSDFSCLQLVLSRNEFKMEDA

SEQ ID NO: 1759 - protein, 558 aa, Unknown
  Description of Unknown: Integrase B1760 sequence
  PTHR30461:SF3,SM00857,G3DSA:1.10.10.2600,IPR036162,PF13408, PS51737,G3DSA:3.40.50.1390,IPR025827,IPR006119,IPR038109, PF07508,IPR011109,SSF53041,PF00239,PTHR30461, PS51736,Coil,cd00338
MAKKKKPAGGIAVIYARYSSHNQRDVSIEQQIEACRKHAAELGLTIIATYEDRAISGRTDNRPAFQRLMHDAEKGKFSYVLAWKSNRMGRNMMQAMVNESRLMDCGIKVYYAEEDFDDSAAGRFALRSMMNVNQFYSDNLAEDVRRGLMDNANKCMVNGRQPLGYKRGKDGKVVVDEPAAAIVREVYTRVASGELFTDIARDLNRRGIKTADKGEWNKNSFHRLCSNEKYRGIYIYGDVRIEGGIPTIIDDTLWYKVQEALRVKKLKRNGRHRPGDEDYLLTGKLRCGKCGGYMIGMSGRSKTGDIHYYYACQNRRVGRTCDKKNIRRDIIEPAVAQAIKEYCLTDDAIEWIADKTVEYWEKADRNLQLDSIEGDLAAVQSSISNVMKAIEMGVVTETTRDRLIELEKQRTDLKSKLALAKEEVVHVDRKKLISSLLLFRNGDIHDRQYQEDLFKTFLISVYVYDDDDNGHLKIVFNAFGDNDTVDLPIDFGETDNQSAFSDGAEKFDYSLHRSTKKPSGLCRMVFLFYIVIQKQRTVFATVRPFLCSYYRMLMRPAP

SEQ ID NO: 1760 - protein, 558 aa, Unknown
  Description of Unknown: Integrase B1761 sequence
  SM00857,G3DSA:1.10.10.2600,IPR036162,PS51737,G3DSA:3.40.50.1390, IPR006119,IPR038109,PF07508,IPR011109,SSF53041, PF00239,PTHR30461,PS51736,Coil,cd00338
MHPADHNRTLFCCGLHFYTRLYRTNVLFLSIFPSHILKKGDFMAYLIYLRKSRADAEAEARGEGETLARHRAALLALARRMGLEIGGVYEEIVSGETIAARPQMQRLLTEVEAGQWDGVLVMEIERLARGDSIDQGIVAQAFKYSGTRIITPTKTYDPANEFDEEYFEFGLFMSRREYKTIKRRMIAGRIASVKEGKYMGKTDPYGYFRVKVRDGKGYTLEPNPPQAAIVREIFDLRLQGVGCYVIACRLNARGERTSAGVAWSAQSVRNVLRNCLYAGYVTWGRKAAQPTVRDGVLTKPRRYVDDYVKARGLHEALVSDEDFDTVQRLLDNTPGLPLKKNHELKNPFVGLLYCAKCGHVMTYGAPAAALPCTGRLDCRWADCNNVSSFCADVEDAVLHALRLWLAEYEVDIDHQNTVERELDARAAQAHEEIRAIHAAQRKLRAQLDRAAELVEQEVYTPEYFVSRRRQLDSQLAELDRALAKASARALTIDQERRGAPAMRPRLEHVIEAYPNAATAQERNDLLKSVVNRITYEKNAAERSAGDATIYIQIERRFE

SEQ ID NO: 1761 - protein, 558 aa, Unknown
  Description of Unknown: Integrase B1762 sequence
  PTHR30461:SF3,IPR036162,PS51737,IPR011109,PTHR30461, PF00239,G3DSA:1.10.10.2600,PF14287,IPR006119,SSF53041, IPR025378,SM00857,IPR025827,cd03770, IPR038109,PS51736,PF13408,G3DSA:3.40.50.1390,PF07508,Coil
MLQQSNNTITSIYPIGNQTEELTALYCRLSQDDKQEGDSNSIINQKKILKRYAIEHGYQPYVFFVDDGFSGTNFNRPDFQRMIAEVEAGRIKRVIVKDMSRLGRDYLQVGMYTEIMFPNMDVHFIAVNDGVDSHVGENEFTPFRNIINEWYAKDTSKKIRAVKRSKGMAGEHIGSHAPYGYMKNPDNKKEWLIDEEAAEVVREIFRLCVNGYGPTRIANILTERKILCPTYYALEHGEKPRTVLPPDKYLWSATVVSHILERMDYLGHTVNFKTHVKSYKNRKKIDNSPEQWRIFENTHEAIIDKETFEIVQKIRSGKRRPTKMGDMPMFSGLLYCADCGSKMTFHRQMAQSAEKHNFVCSNYRHNSKSCTMHYIRNVVVEQIVLENLKEVIRYVSDYEDEFVQMVMDTDMRQRNKELSQKKKRLTEIHSRIQELDKIFQRIYEDNISGKLSDERFMKLSKGYEEEQHTLQEEQTSLEKELQKEEKQSVDVKQFLSVVRKYTNLTELTPEIVHEFIDKIIVHAPDKSSGKRLQEIEIIYNHIGVFDHSKVTLWKGKAV

SEQ ID NO: 1762 - protein, 558 aa, Unknown
  Description of Unknown: Integrase B1763 sequence
  PTHR30461:SF3,SM00857,G3DSA:1.10.10.2600,IPR036162,PF13408, IPR025827,G3DSA:3.40.50.1390,PS51737,IPR006119,IPR038109, PF07508,IPR011109,SSF53041,PTHR30461,PS51736, cd00338,PF00239
MNKLRAAAYCRVSTDRAEQSGSLASQRSFFDDYIRNSDSMTLVGVFYDEGTSGTTTLNRYGFNKMISLAVSGGIDIILTKEVSRFARNTVDTLNITRMLRAKGVGIIFINDNIDTRDSDGELRLSIMATIAQEESRKISERVKWGQQRKMEQGVVFGRSCLGYDVKDGKITVNADSAEIVKRIFTEYTVLLKGAESIADGLNAEQIRTVNGGRWSGAFIRKVLRNVKYVGDLEQKKTCTPDFLTHKKRLNRSEHIYIRNHHEPIISRELWEQTQAEISRRKPTDTSRHSDRYVFSGKVYCGVCGSVMVSRVKTLKNGKIYHALRCSGRIGGKSCNNETLNVTALKACVKRIFTDIPIDKTAVINAVIKGLSRTDKPDIPALRRKIETLNAKKRRAVDLMLDGLITQQELIEQKSYYDSIIEKLSQEISSDRSVFETDKIRKNAERFFDFTSDPIWLLVIRADYIHGTLTVYLKGIEKGFTTCFTATGRGDSYRVITGNTVRSQGIIPGTMQVPKNWFHHDVNDKLIKKSAPDIFQVHFVLICRLFCSLCVAGHSAPTL

SEQ ID NO: 1763 - protein, 558 aa, Unknown
  Description of Unknown: Integrase B1764 sequence
  PTHR30461:SF3,SM00857,G3DSA:1.10.10.2600,IPR036162,PF13408, IPR025827,G3DSA:3.40.50.1390,PS51737,IPR006119,IPR038109, PF07508,IPR011109,SSF53041,PTHR30461,PS51736, cd00338,PF00239
MNKLRAAAYCRVSTDRTEQSGSLASQRSFFDNYIRNSDSMTLVGVFYDEGTSGTTTLNRYGFNKMISLAVSGGIDIILTKEVSRFARNTVDTLNITRMLRAKGVGIIFINDNIDTRDSDGELRLSIMATIAQEESRKISERVKWGQQRRMEQGVVFGRSCLGYDVKDGKITVNADSAEIVKRIFTEYTVLLKGAESIADGLNAEQIRTVNGGRWSGAFIRKVLRNVKYVGDLEQKKTCTPDFLTHKKRLNSSEHIYIRNHHEPIISRELWEQTQAEISRRKPTDTSRHSDRYVFSGKVYCGVCGSVMVSRVKTLKNGKIYHALRCSGRIGGKSCNNETLNVTALKACVKRIFTDIPIDKTAVINAVIKGLSRTDKPDIPALRKKIETLNTKKRRAVDLMLDGLITQQELIEQKSYYDSIIEKLSQEISSDRSVLETDKIRKSAERFLDFTSDPLWLLVIRADYIHGTLTVYLNGIEKGFTTCFTATGRGDSYRVITGNTVRSQGIIPGTMQVQKNWFHHDVNDKSIKKSAPDTFQVHFVLICRLFCFLFVAGYLAPTL

SEQ ID NO: 1764 - protein, 558 aa, Unknown
  Description of Unknown: Integrase B1765 sequence
  PTHR30461:SF3,SM00857,G3DSA:1.10.10.2600,IPR036162,PF13408, PS51737,IPR025827,G3DSA:3.40.50.1390,IPR006119,IPR038109, PF07508,IPR011109,SSF53041,PF00239,PTHR30461, PS51736,Coil,cd00338
MAKKKKPAGGIAVIYARYSSHNQRDVSIEQQIEACRKHAAELGLTIIATYEDRAISGRTDNRPAFQRLMHDAEKGKFSYVLAWKSNRMGRNMMQAMVNESRLMDCGIKVYYAEEDFDDSAAGRFALRSMMNVNQFYSDNLAEDVRRGLMDNANKCMVNGRQPLGYKRGKDGKVVVDEPAAAIVREVYTRVASGELFTDIARDLNRRGIKTADKGEWNKNSFHRLCSNEKYRGIYIYGDVRIEGGIPIIIDDPLWYKVQEALRVKKLKRNGRHRPGDEDYLLTGKLRCGKCGGYMIGMSGRSKTGDIHYYYACQNRRVGRTCDKKNIRRDVIEPAVAQAIKEYCLTDDAIEWIADKTVEYWEKADRNLQLDSIEGDLVAVQSSISNVMKAIEMGVVTETTRDRLIELEKQRTDLKSKLALAKEEVVHVDRKKLISSLLLFRNGDIHDRQYQEDLFKTFLISVYVYDDDNNGHLKIVFNAFGDNNTVDLPIDFGETDNQSAFSDGAEKFDYSLHRSTKKPSGLCRMVFLFYIVIQKQRTVFATVRPFLCSYYRMLMRPAP

SEQ ID NO: 1765 - protein, 558 aa, Unknown
  Description of Unknown: Integrase B1766 sequence
  PTHR30461:SF3,IPR036162,PS51737,IPR011109,PTHR30461, PF00239,G3DSA:1.10.10.2600,IPR006119,PF14287,SSF53041, IPR025378,SM00857,IPR025827,cd03770,IPR038109, PS51736,PF13408,G3DSA:3.40.50.1390,PF07508,Coil
MLQTSKITALYCRLSQEDMQAGESESIQNQKLILQKYADEHHFFNTRFFVDDGFSGVSFERDGLQAMLREVEAGNVATVITKDLSRLGRNYLKTGELIEIVFPEYEVRYIAINDGVDTAREDNEFTPLRNWFNEFYARDTSKKIRAVKQAKAQKGERVNGEVPYGYIADPNDRNHLLPDPETAHVVKQIFAMYVRGDRICEIQNWLREHEILTVSELRYRRSGSCRHPRPHPNCIYNWPDKTLYDILGRKEYLGHTITGKSYKVSYKSKKTKKNPEEKQYFFPNTHEPLIDEETFELAQKRIATKHRPTKCEEIDLFSGLLFCGDCGYKMYLQQGAGTPERKHAYTCGKYRNRIRTGELCTTHYIRKSVLKELVLADLQRVLSYVQSHEQEFIQTANEYNAKAVQRTLAQQRKELDKAQGRMSELNVLFRKLYEDNALGKLSDEQFAFLTSGYDEEKKTLTRRIAELSQELDTATERSADVKKFVALVHKHTKVTELTYENVHEFIDRILIHELDKETNTRKIEIFYSFVGRVDTGDKPTESISYFRQIGADVKSYAI

SEQ ID NO: 1766 - protein, 558 aa, Unknown
  Description of Unknown: Integrase B1767 sequence
  PTHR30461:SF3,SM00857,G3DSA:1.10.10.2600,IPR036162,PF13408, PS51737,G3DSA:3.40.50.1390,IPR025827,IPR006119,IPR038109, PF07508,SSF53041,IPR011109,PF00239,PTHR30461, PS51736,Coil,cd00338
MTNAVIYARYSPGPNQTDQSIEGQIHECTRFCEDNNLRIVGTYIDRKQTGRNDNRADFQKMLRDSSRHGFSTVVVWKIDRFGRNREEIAKNKAVLRMNGVRVLSAKEHIPDGPEGIILESVLEGLAEYYSANLSQNIKRGMRESALKCQFNGSGLSTGYTVDADHKYRIDPDGAAVVRTIFEMYDSGKKIAYIQRYLQQSNIKTMRGKEYTHYGISRILRNRVYIGEYHWHDIVVPGGVPQIIDNDLFDRVQKRLEANKHAPAARRGDVDFLLTSKLICGNCKSTMIGDCGTGKNGARWYYYTCRAKKTKSSKCRKKSVPKEALEREVTALTAAYVLRDDVIDYIADKVVEIQKSEHDDKSMLRYFESQLKDTNKAIANIMRAIEAGIITETTRSRLEELEDTKRDLETEIIKEKVARPTIEREQVIFFLEKFRGGNVDDKEYQRKIIDTFVHKVILYDDKITITYNYSTDSTKNAENTVESIESAASAAECKCSNKPSSSPPVTRILLLQCSCYFFRRGSNRTVLRSRIPSVRWTVGKSACVSAHGSAPSVPLRLHQ

SEQ ID NO: 1767 - protein, 558 aa, Unknown
  Description of Unknown: Integrase B1768 sequence
  PTHR30461:SF3,SM00857,G3DSA:1.10.10.2600,IPR036162,PF13408, IPR025827,PS51737,G3DSA:3.40.50.1390,IPR006119,IPR038109, PF07508,SSF53041,IPR011109,PTHR30461,PS51736, cd00338,PF00239
MNKLRAAAYCRVSTDRTEQSGSLASQRSFFDNYIRNSDSMTLVGVFYDEGTSGTTTLNRYGFNKMISLAVSGGIDIILTKEVSRFARNTVDTLNITRMLRAKGVGIIFINDNIDTRDSDGELRLSIMATIAQEESRKISERVKWGQQRKMEQGVVFGRSCLGYDVKDGKITVNADSAEIVKRIFTEYTVLLKGAESIADGLNAEQIRTVNGGRWSGAFIRKVLRNVKYVGDLEQKKTCTPDFLTHKKRLNSSEHIYIRNHHEPIISRELWEQTQAEISRRKPTDTSRHSDRYVFSGKVYCGVCGSVMVSRVKMLKNGKIYHALRCSGRIGGKSCNNETLNVTALKACVKRIFTDIPIDKTSVINAVIKGLSRTDKPDIPALRRKIETLNAKKRRAVDLMLDGLITQQELIEQKSYYDSIIEKLSQEISSDRSVFETDKIRKNAERFLDFTSDPLWLLVIRADYIHGTLTVYLKDIEKGFTTCFTATGRGDSYRVITGNTVRSQGIISGTMQVQKNWFHHDVNDKSIKKSAPDTFQVHFVLICRLFCFLFVAGYLAPTL

SEQ ID NO: 1768 - protein, 558 aa, Unknown
  Description of Unknown: Integrase B1769 sequence
  PTHR30461:SF3,cd00338,SM00857,G3DSA:1.10.10.2600,IPR036162, PF13408,PS51737,G3DSA:3.40.50.1390,IPR025827,IPR006119, IPR038109,PF07508,IPR011109,SSF53041,PTHR30461, PS51736,Coil,PF00239
MRNCTIDLSSLTPEERRQFSENPGVLSFDCPEACCLYMRYSSDRQTEQSIEGQLRELVAYCLQHDLRIAAVYVDRAVSAHTSMAKRAAFQKMLADSKRSVWNTVLVWKLDRFARNRQDSAAARAILIKNGCMVVSATENITNSPEGRLLESVLEGLNEYYSEDLKQKIKRGNRESALKGQALGGSVPLGYKIEKKKWVIDPLTAPLVEEAFTRYASGETAAAICSDFNARGYRTSKGAEFNKSSFKNIFRNEKYIGVYKYTDIRQENAVPRIVTDDVWNLVQSRLKDNAAAPARGKAKVAYLLTGKIFCGKCGSPMTGEAGTGKGGGKYNYYTCANRKRRHACDKRPVRKDWLEDIVARDALEALTDEIIDYVATIAAQQSEDEISQNTNIPAIQKAIAEIERKIRNLTKAIEAAGTAPDALVGRISELESQKKGLQGQLKEAQRSVMPLTKEQVVFFLESVREQAVPLESQKYMLIDMFINSVTVYDDEPGYLTIKTAYNLTNLPGKTYRIPTSKDETVFGFDGECTTIRHKSEHNSHFTIAVFWTVFVQTRRHALP

SEQ ID NO: 1769 - protein, 558 aa, Unknown
  Description of Unknown: Integrase B1770 sequence
  PTHR30461:SF3,SM00857,G3DSA:1.10.10.2600,IPR036162,PF13408, IPR025827,PS51737,G3DSA:3.40.50.1390,IPR006119,IPR038109, PF07508,IPR011109,SSF53041,PTHR30461,PS51736, cd00338,PF00239
MNKLRAAAYCRVSTDRAEQSGSLASQRSFFDDYIRNSDSMTLVGVFYDEGTSGTTTLNRYGFNKMISLAVSGGIDIILTKEVSRFARNTVDTLNITRMLRAKGVGIIFINDNIDTRDSDGELRLSIMATIAQEESRKISERVKWGQQRKMEQGVVFGRSCLGYDVKDGKITVNADSAKIVKRIFTEYTVLLKGAESIADGLNAEQIRTVNGGRWSGAFIRKVLRNVKYVGDLEQKKTCTPDFLTHKKRLNSSEHIYIRNHHEPIISRELWEQTQAEISRRKPTDTSRHSDRYVFSGKVYCGVCGSVMVSRVKTLKNGKIYHALRCSGRIGGKSCNNETLNVTALKACVKRIFTDIPIDKTAVINAVIKGLSRTDKPDIPALRRKIETLNAKKRRAVDLMLDGLITQQELIEQKSYYDSIIEKLSQEISSDRSVFETDKIRKNAERFLDFTSDPIWLLVIRADYIHGTLTVYLKGIEKGFTTCFTATGRGDSYRVITGNTVRSQGIIPVTMQVQKNWFHHDVNDKLIKKSAPDIFQVHFVLICRLFCSLCVAGHSAPTL

SEQ ID NO: 1770 - protein, 558 aa, Unknown
  Description of Unknown: Integrase B1771 sequence
  PTHR30461:SF3,SM00857,G3DSA:1.10.10.2600,IPR036162,PF13408, IPR025827,PS51737,G3DSA:3.40.50.1390,IPR006119,IPR038109, PF07508,SSF53041,IPR011109,PTHR30461,PS51736, cd00338,PF00239
MNKLRAAAYCRVSTDRAEQSGSLASQRSFFDDYIRNSDSMTLVGVFYDEGTSGTTTLNRYGFNKMISLAVSGGIDIILTKEVSRFARNTVDTLNITRMLRAKGVGIIFINDNIDTRDSDGELRLSIMATIAQEESRKISERVKWGQQRKMEQGVVFGRSCLGYDVKDGKITINADSAEIVKRIFTEYTVLLKGAESIADGLNAEQIRTVNGGRWSGAFIRKVLRNVKYVGDLEQKKTCTPDFLTHKKRLNRSEHIYIRNHHEPIISRELWEQTQAEISRRKPTDTSRHSDRYVFSGKVYCGVCGSVMVSRVKTLKNGKIYHALRCSGRIGGKSCNNETLNVTALKACVKRIFTDMPIDKTAVINAVIKGLSRTDKPDIPALRRKIETLNAKKRRAVDLMLDGLITQQELIEQKSYYDSIIEKLSQEISSDRSVFETDKIRKNAERFLDFTSDPLWLLVIRADYIHGTLTVYLKGIENGFTTCFTATGRGDSYRVITGNTVRSQGIIPGTMQVQKNWFHHDVNDKSIKKSAPDTFQVHFVLICRLFCFLFVAGYLAPTL

SEQ ID NO: 1771 - protein, 558 aa, Unknown
  Description of Unknown: Integrase B1772 sequence
  PTHR30461:SF3,cd00338,SM00857,G3DSA:1.10.10.2600,IPR036162, PF13408,PS51737,G3DSA:3.40.50.1390,IPR025827,IPR006119, IPR038109,PF07508,SSF53041,IPR011109,PTHR30461, PS51736,Coil,PF00239
MAKKKKPAGGIAVIYARYSSHNQRDVSIEQQIEACRKHAAELGLTIIATYEDRAISGRTDNRPAFQRLMHDAEKGKFRYVLAWKSNRMGRNMMQAMVNESRLMDCGIKVYYAEEDFDDSAAGRFALRSMMNVNQFYSDNLAEDVRRGLMDNANKCMVNGRQPLGYKRGKDGKVVVDEPAAAIVREVYARVASGELFTDIARDLNRRGIKTADKGEWNKNSFHRLCSNEKYRGIYIYGDVRIEGGIPTIIDDTLWYKVQEALRVKKLKRNGRHRPGDEDYLLTGKLRCGKCGGYMIGMSGRSKTGDIHYYYACQNRRVGRTCDKKNIRRDVIEPAVAQAIKEYCLTDDAIEWIADKTVEYWEKADRNLQLDSIEGDLAAVQSSISNVMKAIEMGVVTETTRDRLIELEKQRTDLKSKLALAKEEVVHVDRKKLISSLLLFRNGDIHDRQYQEDLFKTFLISVYVYDDDDNGHLKIVFNAFGDNNTVDLPIDFGETDNQSAFSDGAEKFDYSLHRSTKSHPVYAGWLFSFYIVIQKQRTVFATVRPFLCSYYRMLMRPAP

SEQ ID NO: 1772 - protein, 558 aa, Unknown
  Description of Unknown: Integrase B1773 sequence
  PTHR30461:SF3,SM00857,G3DSA:1.10.10.2600,IPR036162,PF13408, IPR025827,G3DSA:3.40.50.1390,PS51737,IPR006119,IPR038109, PF07508,SSF53041,IPR011109,PTHR30461,PS51736, cd00338,PF00239
MNKLRAAAYCRVSTDRAEQSGSLASQRSFFDDYIRNSDSMTLVGVFYDEGTSGTTTLNRYGFNKMISLAVSGGIDIILTKEVSRFARNTVDTLNITRMLRAKGVGIIFINDNIDTRDSDGELRLSIMATIAQEESRKISERVKWGQQRKMEQGVVFGRSCLGYDVKDGKITVNADSAEIVKRIFTEYTVLLKGAESIADGLNAEQIRTVNGGRWSGAFIRKVLRNVKYVGDLEQKKTCTPDFLTHKKRLNRSEHIYIRNHHEPIISRELWEQTQAEISRRKPTDTSRHSDRYVFSGKVYCGVCGSVMVSRVKTLKNGKIYHALRCSGRIGGKSCNNETLNVTALKACVKRIFTDMPIDKTAVINAVIKGLSRTDKPDIPALRRKIETLNAKKRRAVDLMLDGLITQQELIEQKSYYDSIIEKLSQEISSDRSVLETDKIRKNAERFLDFTSDPLWLLVIRADYIHGTLTVYLKGIENGFTTCFTATGRGDSYRVITGNTVRSQGIIPGTMQVQKNWFHHDVNDKLIKKSAPDIFQVHFVLICRLFCSLCVAGHSAPTL

SEQ ID NO: 1773 - protein, 558 aa, Unknown
  Description of Unknown: Integrase B1774 sequence
  PTHR30461:SF3,SM00857,G3DSA:1.10.10.2600,IPR036162,PS51737, G3DSA:3.40.50.1390,IPR006119,IPR038109,PF07508,IPR011109, SSF53041,PF00239,PTHR30461,Coil,cd00338
MSKRVRTLLRVSSRQQLHDDDIPIQRAEATEFIAKHEDWVFDREYLEKGVSAYHNGVEDREILQEIVKDAKNKEFEILLAYMSDRIGRQEEYSFYVAELNRMGIEVWTIKDGQLKTEEHIDKLLNYIRFWQNEGESKKTGMRVHDTMVEMVKDGKFVGGKAPYGYKLVLSGEISNHGRALHKFVIVPEQADNVRKIFSYAVNQGMGFQKIAKTLNEENIPAPILAEWKSGTVRSILTNPIYMGYIAYNRRKNSHSSSTYLDRKEWTYSRERNPEITIVSQDIWERAQEIREARKKRINASKQATNELYMEQYNVPFSTRGRLALTGLVYCGYCGKKLKNTGYANHWTCKKTGEKKVAYVGRYGCPNQCKPRHTYTQKYLEEVVFATVGTYLENLKKIDISDELEEMQSQQDKNIKREIKDLEREIKGLSADIMTLEEKLPEAIRGEFAFSVDKLSAIISDKESLKKEKEAGKNKLQKQLDEINVQGSELKAFIDAMPKWDEIFFESDVQTKQMILSTLIDRIIVKDDNITINFKIRLENFLDEKLLENNGSDLSRKGL

SEQ ID NO: 1774 - protein, 558 aa, Unknown
  Description of Unknown: Integrase B1775 sequence
  cd00338,SM00857,G3DSA:1.10.10.2600,IPR036162, PS51737,G3DSA:3.40.50.1390,IPR006119,IPR038109, PF07508,IPR011109,SSF53041,PTHR30461, PS51736,Coil,PF00239
MDKKILCIIRASTEKQETESQKKELVAYCITKGYAVEEMEFIEVAGASAVKLNKKYIQMLEDIKATILSIPTITAVALWHLNRLGRVESKLHEMKEWFLQHKIQVYCKNPDFPLLDDTGKESAAGSLAFSMFASVVKFETDEMFAKMKRGRERNKVNGIFYGGKIKFGYTLDATKHFIINEEEAQTVRLIFNLYSSGKYSFYDLIEELKARGITKGGMKITYEMIQNALADEAYYSSKILPSIIDKELFDKCAAIKANTVAVKRTKESVNVNFAVGLLKCKCGNNFIANGDFYRCYSKINQQRKKKVVKCDAPIIRRDIMDDTLWLVTRLLQQRFLMDKDSVDISEQKDKINVLTAKLSTAQKGLSSIKDRKEKLEDAYYVDGEMNEAQFKKRLASLHSKEVQTESLIRNYKTEIEDIQKVIKQIELPSNDRYLQSLLLSDLDVEELEDRKKIKEMMFNHIDKVTVNRVMKGNHKCVEITITSKTKLTFVFLYDSWLNSHRKGECNLFYEDKPVYEIDGAIIRQNKAVTKMLYQKIGLPELTSRELGEAAARYAKKQE

SEQ ID NO: 1775 - protein, 558 aa, Unknown
  Description of Unknown: Integrase B1776 sequence
  SM00857,G3DSA:1.10.10.2600,IPR036162,PF13408,PS51737, G3DSA:3.40.50.1390,IPR025827,IPR006119,IPR038109,PF07508, SSF53041,IPR011109,PTHR30461,Coil,PS51736, cd00338,PF00239
MAYRKITDIKDTIGMRAVFYARVSTAEEEQLNAIELQIEENRGCIKDHGWKLVGEYIDRSKSGTMVKGRDDYQRLYEDLYEDLFDIVVIKDQERLQRNTLDWYLFINRIVQTGKLLFMYMDGKFYSPDDALITGVRAIIAEEFSRNLSKKLHNYHDHRIEKARQGQEIALQGSGNVYGWDKKDGKYYINPEQAKVRRLMCEGIMARKGSTLIAKELNEAGYRNTVGKLWKPMDIPKFVYDCKNVGTMIINKERHDFESKQTIKLPKEEWVYVENALPPIVTQEEWDLICKIHEERVIATGSDRRGKKTSGYSFSGKLVCGICGAPYWRKQRVSKDEYWVCSTKQTKGRRTRKRDSTMGKAGEINPLGCDNENISYNSLMEIMGVVSERLQANTNTIKQDMINWLTKLRKQLLEANGGHTEADLQRELSRKSKLLDAYLDGILNKQEYQKKAEELDERIIQLKTETEKNKANSGDIAEIDKVLANIDEEVARYVDGNEKLKVEYLLEHLEQVQIFPDKVIVIVPILSEGIVVEKTQYVSREKWCRKDYNNKLHLKNDKT

SEQ ID NO: 1776 - protein, 558 aa, Unknown
  Description of Unknown: Integrase B1777 sequence
  PTHR30461:SF3,SM00857,G3DSA:1.10.10.2600,IPR036162,PF13408, IPR025827,G3DSA:3.40.50.1390,PS51737,IPR006119,IPR038109, PF07508,IPR011109,SSF53041,PTHR30461,Coil, PS51736,cd00338,PF00239
MDIHETRQKLKLKNIFDINLRVTFYARVSSEKDEQLNSLDNQISYYKNLIKKNKNWQYVDGYIDEGISGISVKKRENFHNMIKDAKAGKFDLILTKEITRFARNTLDSIKYTRDLLSYGVGVFFQNDNINTLDEDSELRLTIMSGIAQDELRKLSSRIKFGHQQAIKNNVVLGNSRIFGYVKDGKRLVIDETEAEMVKELFTLYATDNYSMKQIENIFWEKGYRNLNGNKIVHSTMSNMISNPKYKGYYCGNKVKIVDMFTKKQKFLPPEEWVMFKDETGEIVPAIVDEDLWERANKVLQKRSNDVKNRKGICNHDNLLTGKLFCTHCGKPYYRRDSKDRNGNKNSIWVCSGKVKNGKDSCPSFSIYESEIKPILFQVFKDTSADVDSLIEQYIEMYKSLDEDNCISKSIKSIRNKVDLANRKKSKLLEYNISGKLSDNDFINMNTQISKDITKFEEEIAALEEQKNSKDKLKEHIEKMKKLLKQAEAEAQEKIIDKEFIKKYIDKIYVSPENGHLKLSIKIFTGEVTEKYLEDFKSRTGHTFKTNCRTFAKNFQVSN

SEQ ID NO: 1777 - protein, 558 aa, Unknown
  Description of Unknown: Integrase B1778 sequence
  PTHR30461:SF3,IPR036162,PS51737,IPR011109,PTHR30461, PF00239,G3DSA:1.10.10.2600,PF14287,IPR006119,SSF53041, IPR025378,SM00857,IPR025827,cd03770,IPR038109, PS51736,PF13408,G3DSA:3.40.50.1390,PF07508,Coil
MLQQSNNTITSIYPIGNQTEELTALYCRLSQDDKQEGDSNSIINQKKILKRYAIEHGYQPYVFFVDDGFSGTNFNRPDFQRMIAEVEAGRIKRVIVKDMSRLGRDYLQVGMYTEIMFPNLDVHFIAVNDGVDSHVGENEFTPFRNIINEWYAKDTSKKIRAVKRSKGMAGEHIGSHAPYGYMKNPDNKKEWLIDEEAAEVVREIFRLCVNGYGPTRIANILTERKILCPTYYALEHGEKPRTVLPPDKYLWSATVVSHILERMDYLGHTVNFKTHVKSYKNRKKIDNSPEQWRIFENTHEAIIDKETFEIVQKIRSGKRRPTKMGDMPMFSGLLYCADCGSKMTFHRQMAQSAEKHNFVCSNYRHNSKSCTMHYIRNVVVEQIVLENLKEVIRYVSDYEDEFVQMVMDTDMRQRNKELSQKKKRLTEIHSRIQELDKIFQRIYEDNISGKLSDERFMKLSKGYEEEQHTLQEEQTSLEKELQKEEKQSVDVKQFLSVVRKYTNLTELTPEIVHEFIDKIIVHAPDKSSGKRLQEIEIIYNHIGVFDHSKVTLWKGKAV

SEQ ID NO: 1778 - protein, 558 aa, Unknown
  Description of Unknown: Integrase B1779 sequence
  PTHR30461:SF3,SM00857,G3DSA:1.10.10.2600,IPR036162,PF13408, PS51737,IPR025827,G3DSA:3.40.50.1390,IPR006119,IPR038109, PF07508,IPR011109,SSF53041,PTHR30461,Coil, PS51736,cd00338,PF00239
MDIYKVRQLLKEQSIFDIPLRVVYYVRVSTDKEEQKNSTVNQDTFFEDLIASHPAWTFVGKYIDDGASGIMADKREDFQRMISDGQNKMYDLILTKEISRFARNTLDSIRYTRLLLNCGVGVWFYTDNVNTINEDAELHLAILSSIAQNESLKTSTRVRMGHAQSIKRGVVMGNSMLYGYNKDHGRLVIDPYEAEMVRSIYEKYATGVYTTPMLEREIYASGYRNHYGEKISRTVIGHIITNPKYKGYYVGGKVKIIDMFTKKRKFIPKDEWIMYKDETGERVPAIIDEETWELANKYFVERGDAIKARRKVCTTPNTFTGKIYCGTDGAPYWLKHRVLRGKDDSTWYCSDKLKNGTDSCKSFPIKEDEIRSMVVDLITLSPSDIQKYCEMYLEMLRKSIDSSVDKSAKIAELNKEIENNMAKKQKLLDYNLQGILSDDEFISNTKLLNRKIERAQSLIDSFTSKSPVELKSNSVLDKAAKLLNDFSGVKSEDLDNKIVDELIDKIVITPQDTDYASVEFYLKTSEKVHKTYDRKAVLRNDNLLKKMIEEQEKKMAGK

SEQ ID NO: 1779 - protein, 558 aa, Unknown
  Description of Unknown: Integrase B1780 sequence
  PTHR30461:SF3,SM00857,G3DSA:1.10.10.2600,IPR036162,PF13408, PS51737,IPR025827,G3DSA:3.40.50.1390,IPR006119,IPR038109, PF07508,IPR011109,SSF53041,PTHR30461,Coil, PS51736,cd00338,PF00239
MTNAVIYARYSPGPNQTDQSIEGQIHECTRFCEDNDLRIVGTYIDRKQTGRNDNRADFQKMLRDSSRHGFSTVVVWKIDRFGRNREEIAKNKAVLRMNGVRVLSAKEHIPDGPEGIILESVLEGLAEYYSANLSQNIKRGMRESALKCQFNGSGLSTGYTVDADHKYRIDPDGAAVVRTIFEMYDSGKKIADIQRYLQQSNIKTMRGKEYTHYGISRILRNRVYIGEYHWHDIVVPGGVPQIIDNDLFDRVQKRLEANKHAPAARRGDVDFLLTSKLICGNCKSTMIGDCGTGKNGARWYYYTCRAKKTKSSKCRKKSVPKEALEREVTALTAAYVLRDDVIDYIANKVVEIQKSEHDDKSMLRYFESQLKDTNKAIANIMRAIEAGIITETTRSRLEELEDTKRDLETEIIKEKVARPTIEREQVIFFLEKFRGGNVDDKEYQRKIIDTFVHKVILYDDKITITYNYSTDSTKNAENTVESIESAASAAECKCSNKPSSSPPITRILLLRCSCYFFRRGSNRTVLRSRISSVRWTVGKSACVSAHGSAPSDPLRLHQ

SEQ ID NO: 1780 - protein, 558 aa, Unknown
  Description of Unknown: Integrase B1781 sequence
  PTHR30461:SF3,SM00857,G3DSA:1.10.10.2600,IPR036162,PF13408, IPR025827,PS51737,G3DSA:3.40.50.1390,IPR006119,IPR038109, PF07508,IPR011109,SSF53041,PTHR30461,Coil, PS51736,cd00338,PF00239
MRKKFNIDLSMLTPEEQQQFHDDPTTLTKGEVDVALYLRFSSERQTEQSIEGQLRDCIAYCKRKSFRIVAIYVDRATTARKDVEKRVHFQEMISDSAHHLWNFVVVWKLDRFARNREDSAVFKMRLRKNGVRVKSATETISENPEGIILESVLEGIAEYYSADLSQKITRGLRESAMKGHSVGGHVPLGYKIEDHKLVINPATAHIVQEAFQLYANGESMAEICRIFNSKGYRTAKNSEFNRSSFKSMFKNVRYIGTYIYKDIKKENAIPAIIDKDLFETVQRRLSLAADAPARGKAKVDYLLSGKLFCGHCGATMNGESGTSKTGAIHNYYTCYSRKRRKGCDKKPLKKDFIERIVAQDAMALLTNDVIEELADMAMSQADRDLKENTCIPELSTRLTEIEQGINNITKAIEKGIASDTLLNRLTELEKEKKDLTSQLREEEKYICRIDRDQIIFWLTKFQGGNIEDEDCRRRIIDLLVNSVTVWDEPDGYKITTAYNLTSCKTKTFRVSNTGSPSSEGFGFGELSSTKTTLDELKSSMVTSEWLSCVLYRTVILSS

SEQ ID NO: 1781 - protein, 558 aa, Unknown
  Description of Unknown: Integrase B1782 sequence
  PTHR30461:SF3,SM00857,G3DSA:1.10.10.2600,IPR036162,PF13408, PS51737,G3DSA:3.40.50.1390,IPR025827,IPR006119,IPR038109, PF07508,SSF53041,IPR011109,PTHR30461,Coil, PS51736,cd00338,PF00239
MTNAVIYARYSPGPNQTDQSIEGQIHECTRFCEDNDLRIVGTYIDRKQTGRNDNRADFQKMLRDSSRHGFSTVVVWKIDRFGRNREEIAKNKAVLRMNGVRVLSAKEHIPDGPEGIILESVLEGLAEYYSANLSQNIKRGMRESALKCQFNGSGLSTGYTVDADHKYRIDPDGAVVVRTIFEMYDGGKKIADILRYLQQSNIKTMRGKEYTHYGISRILRNRVYIGEYHWHDIVVPGGVPQIIDNDLFDRVQKRLEANKHAPAARRGDVDFLLTSKLICGNCKSTMIGDCGTGKNGARWYYYTCRAKKTKSSKCRKKSVPKEALEREVTALTAAYVLRDDVIDYIANKVVEIQKSEHDDKSMLRYFESQLKDTNKAIANIMRAIEAGIITETTRSRLEELEDTKRDLETEIIKEKVARPTIEREQVIFFLEKFRGGNVDDKEYQRKIIDTFVHKVILYDDKITITYNYSTDSTKNAENTVESIESAASAAECKCSNKFSSSPPVTRILLLQCSCYFFRRGSNRMVLRSRIPSVRWTVGKSACVSAHGSAPSDPLRLHQ

SEQ ID NO: 1782 - protein, 558 aa, Unknown
  Description of Unknown: Integrase B1783 sequence
  PTHR30461:SF3,SM00857,G3DSA:1.10.10.2600,IPR036162,PF13408, PS51737,G3DSA:3.40.50.1390,IPR025827,IPR006119,IPR038109, PF07508,SSF53041,IPR011109,PF00239,PTHR30461, PS51736,Coil,cd00338
MRNCTIDLSSLTPEERRQFSENPGVLSFDCPEACCLYMRYSSDRQTEQSIEGQLRELVAYCLQHDLRIAAVYVDRAVSAHTSMAKRAAFQKMLADSKRSAWNTVLVWKLDRFARNRQDSAAARAILIKNGCMVVSATENITNSPEGRLLESVLEGLNEYYSEDLKQKIKRGNRESALKGQALGGSVPLGYKIEKKKWVIDPLTAPLVEEAFTRYASGETAAAICSDFNARGYRTSKGAEFNKSSFKNIFRNEKYIGVYKYTDIRQENAVPRIVTDDVWNLVQSRLKDNAAAPARGKAKVAYLLTGKIFCGKCGSPMTGEAGTGKGGGKYNYYTCANRKRRHACDKRPVPKDWLEDIVARDALEALTDEIIDYVATVAAQQSEDEISQNTNIPAIQKAIAEIERKIRNLTKAIEAAGTAPDALVGRISELESQKKGLQGQLKEAQRSVMPLTKEQVVFFLESVREQAVPLESQKYMLIDMFINSVTVYDDEPGYLTIKTAYNLTNLPGKTYRIPISKDKTVFGFDGECTTIRHKSEHNSHFTIAVIGTVFVQTRRHALP

SEQ ID NO: 1783 - protein, 558 aa, Unknown
  Description of Unknown: Integrase B1784 sequence
  cd00338,SM00857,G3DSA:1.10.10.2600,IPR036162,PS51737, G3DSA:3.40.50.1390,IPR006119,IPR038109,PF07508,IPR011109, SSF53041,PTHR30461,PS51736,Coil,PF00239
MSENTIQIIKIAQGIPGRNHEYTEMVIRGDIMIEEKRYCIYLRKSRADADAEARGEGETLLRHEKTLLELSERMHIKVEKIYREIVSGDTIAARPVMQELLTDVESMTWTGVLVMEVERLARGDTIDQGIVARTFQITNTQIITPLKTYDPQNESDEEYFEFGLFMSRREYKTINRRLNRGRIQSVKEGKYIASVAPYGYIRVKLPNEKGYTLSPHPEQADVVRMIFDLYVNGLNGEEYGATKIARYLDSLGIKPMVADKWSPASIRDILQNEVYVNKIVWGKRKEVKTVENGVVKIMRPTAADYLCNNALHEGLVTQEIFDKAQYKRTHSPHSIKVNVKKPLQNPLAGLIYCDKCGSLMTRLGESKKTPYAFLKCPNRYCDNVSVPLFLVEKNLIAFLQDWIKNYQIEIESGANTSYESQLTLLQSSEQALDKEKQNLLKQLNNAYNLVEQGVYTADIFKSRNQILTSQIHDVDIRLSEIREKISEANEHYRMRTELVPRAYTLIQSYNQLSTAAEKNALLNQLVSKATILKTERNTRGKRDNSNFTLNVWPKLPHA

SEQ ID NO: 1784 - protein, 558 aa, Unknown
  Description of Unknown: Integrase B1785 sequence
  PTHR30461:SF3,cd00338,SM00857,G3DSA:1.10.10.2600,IPR036162, PF13408,IPR025827,G3DSA:3.40.50.1390,PS51737,IPR006119, IPR038109,PF07508,IPR011109,SSF53041, PTHR30461,PS51736,Coil,PF00239
MAKKKKPAGGIAVIYARYSSHNQRDVSIEQQIEACRKHAAELGLTIIATYEDRAISGRTDNRPAFQRLMHDAEKGKFSYVLAWKSNRMGRNMMQAMVNESRLMDCGIKVYYAEEDFDDSAAGRFALRSMMNVNQFYSDNLAEDVRRGLMDNANKCMVNGRQPLGYKRGKDGKVVVDEPAAAIVREVYARVASGELFTDIARDLNRRGIKTADKGEWNKNSFHRLCSNEKYRGIYIYGDVRIEGGIPTIIDDTLWYNVQEALRVKKLKRNGRHRPGDEDYLLTGKLRCGKCGGYMIGMSGRSKTGDIHYYYACQNRRVGRTCDKKNIRRDVIEPAVAQAIKEYCLTDDAIEWIADKTVEYWEKADRNLQLDSIEGDLAAVQSSISNVMKAIEMGVVTETTRDRLIELEKQRTDLKSKLALAKEEVVHVDRKKLISSLLLFRNGDIHDRQYQEDLFKTFLISVYVYDDDDNGHLKIVFNAFGDNNTVDLPIDFGETDNQSAFSDGAEKFDYSLHRSTKKPSGLCRMVFLFYIVIQKQRTVFATVRPFLCSYYRMLMRPAP

SEQ ID NO: 1785 - protein, 558 aa, Unknown
  Description of Unknown: Integrase B1786 sequence
  PTHR30461:SF3,SM00857,G3DSA:1.10.10.2600,IPR036162,PF13408, PS51737,G3DSA:3.40.50.1390,IPR025827,IPR006119,IPR038109, PF07508,SSF53041,IPR011109,PTHR30461,PS51736, cd00338,PF00239
MSKRESKSSQKCLAAEQIGVIYARYSSHNQKEESIEQQIAECSDFAAKNGIRIVGIYADKAVSGRSDRRPNFQRMMRDAEKRHFQIVVAYKSNRIARNMLNALQYEARLDLFGIKTLYAKEEFGNTAAGRFALRTMMNVNQFYSENMGEDIKRGMVDNANECKVNGMLPLGYVKSKEGKYAVAPGEAAVVREIFDSFLKDVPVAEIARSLNQRGIRTKLGREWNKNSFHIMLKNDNYIGVYRHSGVVVEDGIPPILEKEVFAAVQEKLANKKKTAGRRSANGEYLLTGKLFCGYCGSYMIGVSGTGENGTVHNYYQCQKRHAENRCEKKNVRRDFIEKLIARLTQDYILQDETIEWIADSTMSFQAVARRQSGITQLERDLADNRKIAKNIMAAIEQGIITETTKARLLEVEGTIRDLERSLSIAKAASQPIERERVVFSLEQMREGNVGSKEHQKKLIDTFVKSVTLWDDRIQIDYYHTPGKHKFSYSLEELTSKVENESNAADVRAESLEVHHCRRELHRFTTAFYWQLHLCGYMARSKRRRNQIPASFLHVLMGV

SEQ ID NO: 1786 - protein, 558 aa, Unknown
  Description of Unknown: Integrase B1787 sequence
  PTHR30461:SF3,SM00857,G3DSA:1.10.10.2600,IPR036162,PF13408, PS51737,IPR025827,G3DSA:3.40.50.1390,IPR006119,IPR038109, PF07508,IPR011109,SSF53041,PTHR30461,Coil, PS51736,cd00338,PF00239
MTNAVIYARYSPGPNQTDQSIEGQIHECTRFCEDNDLRIVGTYIDRKQTGRNDNRADFQKMLRDSSRHGFSTVVVWKIDRFGRNREEIAKNKAVLRMNGVRVLSAKEHIPDGPEGIILESVLEGLAEYYSANLSQNIKRGMRESALKCQFNGSGLSTGYTVDADHKYRIDPDGAAVVRTIFEMYDGGKKIADILRYLQQSNIKTMRGKEYTHYGISRILRNRVYIGEYHWHDIVVPGGVPQIIDNDLFDRVQKRLEVNKHAPAARRGDVDFLLTSKLICGNCKSTMIGDCGTGKNGARWYYYTCRAKKTKSSKCRKKSVPKEALEREVTALTAAYVLRDDVIDYIANKVVEIQKSEHDDKSMLRYFESQLKDTNKAIANIMRAIEAGIITETTRSRLEELEDTKRDLETEIIKEKVARPTIEREQVIFFLEKFRGGNVDDKEYQRKIIDTFVHKVILYDDKITITYNYSTDSTKNAENTVESIESAASAAECKCSNKPSSSPPVTRILLLQCSCYFFRRGSNRTVLRSRIPSVRWTVGKSACVSAHGSAPSDPLRLHQ

SEQ ID NO: 1787 - protein, 558 aa, Unknown
  Description of Unknown: Integrase B1788 sequence
  PTHR30461:SF3,SM00857,G3DSA:1.10.10.2600,IPR036162,PF13408, PS51737,G3DSA:3.40.50.1390,IPR025827,IPR006119,IPR038109, PF07508,IPR011109,SSF53041,PTHR30461,Coil, PS51736,cd00338,PF00239
MTNAVIYARYSPGPNQTDQSIEGQIHECTRFCEDNDLRIVGTYIDRKQTGRNDNRADFQKMLRDSSRHGFSTVVVWKIDRFGRNREEIAKNKAVLRMNGVRVLSAKEHIPDGPEGIILESVLEGLAEYYSANLSQNIKRGMRESALKCQFNGSGLSTGYTVDADHKYRIDPDGAAVVRTIFEMYDGGKKIADILRYLQQSNIKTMRGKEYTHYGISRILRNRVYIGEYHWHDIVVPGGVPQIIDNDLFDRVQKRLEANKHAPAARRGDVDFLLTSKLICGNCKSTMIGDCGTGKNGARWYYYTCRAKKTKSSKCRKKSVPKEALEREVTALTAAYVLRDDVIDYIANKVVEIQKSEHDDKSMLRYFESQLKDTNKAIANIMRAIEAGIITETTRSRLEELEDTKRDLETEIIKEKVARPTIEREQVIFFLEKFRGGNVDDKEYQRKIIDTFVHKVILYDDKITITYNYSTDSTKNAENTVESIESAASAAECKCSNKFSSSPPVTRILLLQCSCYFFRRGSNRMVLRSRIPSVRWTVGKSACVSAHGSAPSDPLRLHQ

SEQ ID NO: 1788 - protein, 558 aa, Unknown
  Description of Unknown: Integrase B1789 sequence
  PTHR30461:SF3,SM00857,G3DSA:1.10.10.2600,IPR036162,PF13408, IPR025827,PS51737,G3DSA:3.40.50.1390,IPR006119,IPR038109, PF07508,SSF53041,IPR011109,PTHR30461,Coil, PS51736,cd00338,PF00239
MDIYKVRQLLKGQSIFDIPLRVVYYVRVSTDKEEQKNSTVNQDTFFEELIASHPAWTFVGKYIDDGASGIMADKREDFQRMISDGQNQMYDLILTKEISRFARNTLDSIRYTRLLLNCGIGVWFYTDNVNTINEDAELHLAILSSIAQNESLKTSTRVRMGHAQSIKRGVVMGNSMLYGYNKDHGKLVIDPYEAEMVRSIYEKYATGVYTTPMLEREIYASGYRNHYGEKISRTVIGHIITNPKYKGYYVGGKVKIIDMFTKKRKFIPKDEWIMYKDETGERVPAIIDEETWELANKYFVERGDAIKARRKVCTTPNTFTGKIYCGTDGAPYWLKHRVLRGKDDSTWYCSDKLKNGTDSCKSFPIKEDEIRSMVVDLITLSPSDIQKYCEMYLEMLRKNIDSSVDKSAKIAELNKEIENNMAKKQKLLDYNLQGILSDDEFISNTKLLNRKIERAQSLIDSFTSKSPVELKSNSVLDKAAKLLNDFSGVKSEDLDNKIVDELIDKIVITPQDTDYASVEFYLKTSEKVHKTYDRKAVLRNDNLLKKMIEEQEKKMAGK

SEQ ID NO: 1789 - protein, 558 aa, Unknown
  Description of Unknown: Integrase B1790 sequence
  PTHR30461:SF3,SM00857,G3DSA:1.10.10.2600,IPR036162,PF13408, PS51737,G3DSA:3.40.50.1390,IPR025827,IPR006119,IPR038109, PF07508,IPR011109,SSF53041,PTHR30461,Coil, PS51736,cd00338,PF00239
MTNAVIYARYSPGPNQTDQSIEGQIHECTRFCEDNDLRIVGTYIDRKQTGRNDNRADFQKMLRDSSRHGFSTVVVWKIDRFGRNREEIAKNKAVLRMNGVRVLSAKEHIPDGPEGIILESVLEGLAEYYSANLSQNIKRGMRESALKCQFNGSGLSTGYTVDADHKYRIDPDGAAVVRTIFEMYDGGKKIADILRYLQQSNIKTMRGKEYTHYGISRILRNRVYIGEYHWHDIVVPGGVPQIIDNDLFDRVQKRLEVNKHAPAARRGDVDFLLTSKLICGNCKSTMIGDCGTGKNGARWYYYTCRAKKTKSSKCRKKSVPKEALEREVTALTAAYVLRDDVIDYIADKVVEIQKSEHDDKSMLRYFESQLKDTNKAIANIMRAIEAGIITETTRSRLEELEDTKRDLETEIIKEKVARPTIEREQVIFFLEKFRGGNVDDKEYQRKIIDTFVHKVILYDDKITITYNYSTDSTKNAENTAESIESAASAAECKCSNKTSSSPPMTRILLLRCSCYFFRRGSNRTVLRSRIPSVRWTVGKSACVSAHGSAPSDPLRLHQ

SEQ ID NO: 1790 - protein, 558 aa, Unknown
  Description of Unknown: Integrase B1791 sequence
  PTHR30461:SF3,SM00857,G3DSA:1.10.10.2600,IPR036162,PF13408, IPR025827,G3DSA:3.40.50.1390,PS51737,IPR006119,IPR038109, PF07508,SSF53041,IPR011109,PF00239,PTHR30461, PS51736,Coil,cd00338
MSSVDKIAVVYARYSSHGQTEQSIEGQIAAAQKYAEQHGYTIIHVYADRAMTGRNDDREQFQKMLSDTAMHQFGVILLWKIDRFGRNREEIAFNRYRCKKNGVRVERVAEDVPDGPEGVILDSVLEGMAEYYSLQLAQNVRRGQRESAKKSMSIGGNKMLGYIVNPETKRYESDPKTASYVTEIFKRYANGETISEIVAWLNAQGIRTTRGSEFTVNSLHRLLKNEKYTGVYIFHDIRNEGGMPALTDRATFDKVQEMLKVNRRAPARVWSKTEYLLTDKLFCGHCGEMMVGESGHGRNGIKHSYYTCLNRKKKKSCDKKPVRQDVIEPLVLRAIGKLLENPATLENITDQVWAAYERSDTSGDTIKALDKQIADVDRALSNVMKAIELGIINEMTKTRMDELTNQKQALSTARAEAGLAEGFKLTRDMILFFLQEIAALDMADRDSQKRLIKTFVNAIYLYDDHFDIAFNYTDNGKVAVRMQEINDAASGEVFGCCAQSPTKRIRNLGCGSFSIASSSRKIQNCGKGVGRFLEKNQNFFRCFQNALRKWLLIQPENG

SEQ ID NO: 1791 - protein, 558 aa, Unknown
  Description of Unknown: Integrase B1792 sequence
  SM00857,G3DSA:1.10.10.2600,IPR036162,PS51737,G3DSA:3.40.50.1390, IPR006119,IPR038109,PF07508,IPR011109,SSF53041, PTHR30461,Coil,PS51736,cd00338,PF00239
MDKKILCIIRASTEKQETESQKKELVAYCITKGYAVEEMEFIEVAGASAVKLNKKYIQMLEDIKATILSIPTITAVALWHLNRLGRVESKLHEMKEWFLQHKIQVYCKNPDFTLLDDTGKESAAGSLAFSMFASVVKFETDEMFAKMKRGRERNKVNGIFYGGKIKFGYTLDATKHFIINEEEAQTIRLIFNLYSSGKYSFYDLIEELKARGITKGGMKITYEMIQNALADEAYYSSKILPSIIDKELFDKCAAIKANTVAVKRTKESVNVNFAVGLLKCKCGNNFIANGDFYRCYSKINQQRKKKVVKCDAPIIRRDIMDDTLWLVTRLLQQRFLMDKDSVDISEQKDKINVLTAKLSTAQKGLSSIKDRKEKLEDAYYVDGEMNEAQFKKRLASLHSKEVQTESLIRNYKTEIEDIQKVIKQIELPSNDRYLQSLLLSDLDVEELEDRKKIKEMMFNHINKVTVNRVMKGNHKCVEITITSKTKLTFVFLYDSWLNSHRKGECNLFYEDKPVYEIDGAIIRQNKAVTKMLYQKIGLPELTSRELGEAAARYAKKQE

SEQ ID NO: 1792 - protein, 558 aa, Unknown
  Description of Unknown: Integrase B1793 sequence
  PTHR30461:SF3,cd00338,SM00857,G3DSA:1.10.10.2600,IPR036162, PF13408,IPR025827,G3DSA:3.40.50.1390,PS51737,IPR006119, IPR038109,PF07508,IPR011109,SSF53041, PTHR30461,PS51736,Coil,PF00239
MKKKPIEPEMQDAVIYTRYSSHNQRDCSIEQQVADCEIFARQNNLRVVKVYADRHLSGTTDNRPQFQQMLKDASHGHWAYVICWKIDRFARNRYDSATYKFRLKKAGVRVLYAKESIPDGPEGILLESVLEGSAEYYSAALAQNIRRGMKFNAEQCKVNSGSIPFGYCKGPDGRFAVHEANAEVVREIFRKAAAGMPFVDIANDLNSRGLKTSRGGRWNKGSFRLLMNEAYIGVYHFSDTRIEGGMPALIDQGTFWAANERLKANSSVRGRHQDGGDYLLTGKLKCAHCGSYMIGFSGTGKSGELHYYYGCQKRRRERACKKANVPREWIERVVVKAALDYVLRPEVMEWIADAVMEYQEREAASAQLAALTAELEENRKATDNVMKAIEAGIITSTTKQRLLDLEAKAQDLKRAIELEKLSHVRLERDQILFWLDRFRGGSLQSQEFRRKVIDAFVSVVYLFDDHLRIAFNYSGGSNAEADFDLVMDAEAAAGELSKKFAQGHVASTKCESGEPRHDLLRGYVLRPDHAALRAVKNKHSAFIAGCLFFARIVLTECL

SEQ ID NO: 1793 - protein, 558 aa, Unknown
  Description of Unknown: Integrase B1794 sequence
  PTHR30461:SF3,SM00857,G3DSA:1.10.10.2600,IPR036162,PF13408, IPR025827,PS51737,G3DSA:3.40.50.1390,IPR006119,IPR038109, PF07508,SSF53041,IPR011109,PF00239,PTHR30461, PS51736,Coil,cd00338
MKERTKVYLYTRVSTAMQIDGYSLEAQKNRMKAYAEFNDYEIAGEYEDAGKSGKSIEGRIEFSRMMDDIKCSKDHVSYVLVFKLSRFGRNAADVLSTLQVMQDFGVNLICVEDGIDSSKDAGKLMISVLSAVAEIERENIRIQTMEGRIQKAREGKWNGGFAPYGYDLINGELHINEEEAKTVRLIYELYVHKKMGGRLIAQYLESHDIKKLSHKNTRGDMFAAAYIQDILRNPTYCGKIAYGRRKQEKVHGTRNDYRIVWNDDYLLTDGIHQPIVSVEDWEEAQARLRSQATKYKRYDRQENEHAYLLTGIIKCPECGAGMYVSKSVKKRPDGSYYKEFRYYGCKHRRMDKGQKCTFKNQLPMELMDQAVAEVIVSLVSRPDFAAMMAEKINAEIDISALLEEIAHYEKQLRQQYAVKDRLAEDIDQLDPDDRHYQRRKSDLEERLYKMYDKIEETEEHLIEARAKKQAIDADRITRDNILSILMNFEKLYSVMSDIEKRDLMATMIADIQVYPQRQPNGQWLKSIHFKLPLIAEEELQFSLDKKDWLENVMVLAKL

SEQ ID NO: 1794 - protein, 558 aa, Unknown
  Description of Unknown: Integrase B1795 sequence
  PTHR30461:SF3,SM00857,G3DSA:1.10.10.2600,IPR036162,PF13408, IPR025827,G3DSA:3.40.50.1390,PS51737,IPR006119,IPR038109, PF07508,IPR011109,SSF53041,PTHR30461,PS51736, cd00338,PF00239
MNKLRAAAYCRVSTDRAEQSGSLASQRSFFDDYIRNSDSMTLVGVFYDEGTSGTTTLNRYGFNKMISLAVSGGIDIILTKEVSRFARNTVDTLNITRMLRSKGVGIIFINDNIDTRDSDGELRLSIMATIAQEESRKISERVKWGQQRKMEQGVVFGRSCLGYDVKDGKITVNADSAKIVKRIFTEYAVLLKGAESIADGLNAEQIRTVNGGRWSGAFIRKVLRNVKYVGDLEQKKTCTPDFLTHKKRLNSSEHIYIRNHHEPIISRELWEQTQAEISRRKPTDTSRHSDRYVFSGKVYCGVCGSVMVSRVKTLKNGKIYHALRCSGRIGGKSCNNETLNVTALKACVKRIFTDIPIDKTAVINAVIKGLSRTDKPDIPALRRKIETLNAKKRRAVDLMLDGLITQQELIEQKSYYDSIIEKLSQEISSDRSVFETDKIRKNAERFLDFTSDPIWLLVIRADYIHGTLTVYLKGIEKGFTTCFTATGRGDSYRVITGNTVRSQGIIPGTMQVQKNWFHHDVNDKLIKKSAPDIFQVHFVLICRLFCSLCVAGHSAPTL

SEQ ID NO: 1795 - protein, 558 aa, Unknown
  Description of Unknown: Integrase B1796 sequence
  PTHR30461:SF3,SM00857,G3DSA:1.10.10.2600,IPR036162,PF13408, IPR025827,PS51737,G3DSA:3.40.50.1390,IPR006119,IPR038109, PF07508,IPR011109,SSF53041,PTHR30461,Coil, PS51736,cd00338,PF00239
MDIYKVRQLLKGQSIFDIPLRVVYYVRVSTDKEEQKNSTVNQDTFFEELIASHPAWTFVGKYIDDGASGIMADKREDFQRMISDGQNQMYDLILTKEISRFARNTLDSIRYTRLLLNCGVGVWFYTDNVNTINEDAELHLAILSSIAQNESLKTSTRVRMGHAQSIKRGVVMGNSMLYGYNKDHGKLVIDPYEAEMVRSIYEKYATGVYTTPMIEREIYASGYRNHYGERISRTVIGHIITNPKYKGYYVGGKVKIIDMFTKKRKFIPKDEWIMYKDETGERVPAIIDEETWELANKYFVERGDAIKARRKVCTTPNTFTGKIYCGTDGAPYWLKHRVLRGKDDSTWYCSDKLKNGTDSCKSFPIKEDEIRSMVVDLITLSPSDIQKYCEMYLEMLRKSVDSSVDKSAKIAELNKEIENNMAKKQKLLDYNLQGILSDDEFISNTKLLNRKIERAQSLIDSFTSKSPVELKSNSVLDKAAKLLNDFSGVKSEDLDNKIVDELIDKIVITPQDTDYASVEFYLKTSEKVHKTYDRKAVLRNDNLLKKMIEEQEKKMAGK

SEQ ID NO: 1796 - protein, 558 aa, Unknown
  Description of Unknown: Integrase B1797 sequence
  PTHR30461:SF3,SM00857,G3DSA:1.10.10.2600,IPR036162,PF13408, IPR025827,G3DSA:3.40.50.1390,PS51737,IPR006119,IPR038109, PF07508,IPR011109,SSF53041,PF00239,PTHR30461, PS51736,Coil,cd00338
MKKTKTKCYLYTRVSTSMQVDGYSLDAQRDKLRKYAEYEDMVVAGEYSDEGFSGKNIQGRHEFQRMLQDIQDCKDGVEYVLVFKLSRFGRNAADVLNSLQLMQDFGVNLICVEDGIDSSKDSGKLMISVLSAVAEIERENIRTQTMAGREQKAREGKWNGGFAPYGYRLEKGELLIAEDEVDVIRTIFDRYIHTNDGVSGVAKYLNRQGFVKKLRQNGTIPGFSASFVKSIIDNPVYMGKIAYGRRRTEKKIGTRNEMHVVEQSEFPVYEGKHEAIISEEDWNLAQEKRKINAYRREKVNDPTHAHILSGILKCPCCGKSLYGNIAKAHSKDKKTRYYYYCKNTVTPTGHECTFRLNIEQMEMNRMVASIISAMVSDPRFADAIKAKIGSAVDTNDLEKQLEALQAQLRQTLGTKARLERQMDGLDVNDPYYDRKISDLQRRYDEQYGAIDEIEVQIDDVQSQIRSIRQEKISGDNIYRLLLAFDQVYEAASEVERKEFMRAFIERIELFPEKQPDGNWIRKIIFNFPVPVNGTEVKELPLENETIVETVVLMSRKEE

SEQ ID NO: 1797 - protein, 558 aa, Unknown
  Description of Unknown: Integrase B1798 sequence
  PTHR30461:SF3,SM00857,G3DSA:1.10.10.2600,IPR036162,PF13408, IPR025827,G3DSA:3.40.50.1390,PS51737,IPR006119,IPR038109, PF07508,SSF53041,IPR011109,PTHR30461,PS51736, cd00338,PF00239
MNKLRAAAYCRVSTDRAEQSGSLASQRSFFDDYIRNSDSMTLVGVFYDEGTSGTTTLNRYGFNKMISLAVSGGIDIILTKEVSRFARNTVDTLNITRMLRAKGVGIIFINDNIDTRDSDGELRLSIMATIAQEESRKISERVKWGQQRKMEQGVVFGRSCLGYDVKDGKITVNADSAEIVKRIFTEYTVLLKGAESIADGLNAEQIRTVNGGRWSGAFIRKVLRNVKYVGDLEQKKTCTPDFLTHKKRLNRSEHIYIRNHHEPIISRELWEQTQAEISRRKPTDTSRHSDRYVFSGKVYCGVCGSVMVSRVKTLKNGKIYHALRCSGRIGGKSCNNETLNVTALKACVKRIFTDMPIDKTAVINAVIKGLSRTDKPDIPALRRKIETLNAKKRRAVDLMLDGLITQQELIEQKSYYDSIIEKLSQEISSDRSVLETDKIRKNAERFLDFTSDPLWLLVIRADYIHGTLTVYLKGIENGFTTCFTATGRGDSYRVITGNTVRSQGIIPGTMQVQKNWFHHDVNDKSIKKSAPDTFQVHFVLICRLFCFLFVAGYLAPTL

SEQ ID NO: 1798 - protein, 558 aa, Unknown
  Description of Unknown: Integrase B1799 sequence
  PTHR30461:SF3,SM00857,G3DSA:1.10.10.2600,IPR036162,PF13408, IPR025827,G3DSA:3.40.50.1390,PS51737,IPR006119,IPR038109, PF07508,SSF53041,IPR011109,PTHR30461,Coil, PS51736,cd00338,PF00239
MDIYKVRQLLKGQSIFDIPLRVVYYVRVSTDKEEQKNSTVNQDTFFEELIASHPAWTFVGKYIDDGASGIMADKREDFQRMISDGQNQMYDLILTKEISRFARNTLDSIRYTRLLLNCGIGVWFYTDNVNTINEDAELHLAILSSIAQNESLKTSTRVRMGHAQSIKRGVVMGNSMLYGYNKDHGKLVIDPYEAEMVRSIYEKYATGVYTTPMLEREIYASGYRNHYGEKISRTVIGHIITNPKYKGYYVGGKVKIIDMFTKKRKFIPKDEWIMYKDETGERVPAIIDEETWELANKYFVERGDAIKARRKVCTTPNTFTGKIYCGTDGAPYWLKHRVLRGKDDSTWYCSDKLKNGTDSCKSFPIKEDEIRSMVVDLITLSPSDIQKYCEMYLEMLRKSIDSSVDKSAKIAELNKEIENNMAKKQKLLDYNLQGILSDDEFISNTKLLNRKIERAQSLIDSFTSKSPVELKSNSILDKAAKLLNDFSGVKSEDLDNKIVDELIDKIVITPQDTDYASVEFYLKTSEKVHKTYDRKAVLRNDNLLKKMIEEQEKKMAGK

SEQ ID NO: 1799 - protein, 558 aa, Unknown
  Description of Unknown: Integrase B1800 sequence
  PTHR30461:SF3,SM00857,G3DSA:1.10.10.2600,IPR036162,PF13408, IPR025827,PS51737,G3DSA:3.40.50.1390,IPR006119,IPR038109, PF07508,IPR011109,SSF53041,PTHR30461,Coil, PS51736,cd00338,PF00239
MTNAVIYARYSPGPNQTDQSIEGQIHECTRFCEDNDLRIVGTYIDRKQTGRNDNRADFQKMLRDSSRHGFSTVVVWKIDRFGRNREEIAKNKAVLRMNGVRVLSAKEHIPDGPEGIILESVLEGLAEYYSANLSQNIKRGMRESALKCQFNGSGLSTGYTVDADHKYRIDPDGAAVVRTIFEMYDSGKKIADIQRYLQQSNIKTMRGKEYTHYGISRILRNRVYIGEYHWHDIVVPGGVPQIIDNDLFDRVQKRLEANKHAPAARRGDVDFLLTSKLICGNCKSTMIGDCGTGKNGARWYYYTCRAKKTKSSKCRKKSVPKEALEREVTALTAAYVLRDDVIDYIADKVVEIQKSEHDDKSMLRYFESQLKDTNKAIANIMRAIEAGIITETTRSRLEELEDTKRDLETEIIKEKVARPTIEREQVIFFLEKFRGGNVDDKEYQRKIIDTFVHKVILYDDKITITYNYSTDSTKNAENTVESIESAASAAECKCSDKYSSSPPITRILLLQCSCYFFRRGSNRTVLRSRIPSVRWTVGKSACVSAHGSAPSDPLRLHQ

SEQ ID NO: 1800 - protein, 558 aa, Unknown
  Description of Unknown: Integrase B1801 sequence
  PTHR30461:SF3,SM00857,G3DSA:1.10.10.2600,IPR036162,PF13408, PS51737,G3DSA:3.40.50.1390,IPR025827,IPR006119,IPR038109, PF07508,IPR011109,SSF53041,PTHR30461,Coil, PS51736,cd00338,PF00239
MTNAVIYARYSPGPNQTDQSIEGQIHECTRFCEDNDLRIVGTYIDRKQTGRNDNRADFQKMLRDSSRRGFSTVVVWKIDRFGRNREEIAKNKAVLRMNGVRVLSAKEHIPDGPEGIILESVLEGLAEYYSANLSQNIKRGMRESALKCQFNGSGLSTGYTVDADHKYRIDPDGAAVVRTIFEMYDSGKKIADIQRYLQQSNIKTMRGKEYTHYGISRILRNRVYIGEYHWHDIVVPGGVPQIIDNDLFDRVQKRLEANKHAPAARRGDVDFLLTSKLICGNCKSTMIGDCGTGKNGARWYYYTCRAKKTKSNKCRKKSVPKEALEREVTALTAAYVLRDDVIDYIANKVVEIQKSEHDDKSMLRYFESQLKDTNKAIANIMRAIEAGIITETTRSRLEELEDTKRDLETEIIKEKVARPTIEREQVIFFLEKFRGGNVDDKEYQRKIIDTFVNKVILYDDKITITYNYSTDSTKNAENTVESIESAASAAECKCSNKSSSSPPITRILLLRCSCYFFRRGSNRTVLRSRISSVRWTVGKSACVSAHGSAPSDPLRLHQ

SEQ ID NO: 1801 - protein, 558 aa, Unknown
  Description of Unknown: Integrase B1802 sequence
  PTHR30461:SF3,SM00857,G3DSA:1.10.10.2600,IPR036162,PF13408, IPR025827,PS51737,G3DSA:3.40.50.1390,IPR006119,IPR038109, PF07508,IPR011109,SSF53041,PTHR30461,PS51736, cd00338,PF00239
MNKLRAAAYCRVSTDRAEQSGSLASQRSFFDDYIRNSDSMTLVGVFYDEGTSGTTTLNRYGFNKMISLAVSGGIDIILTKEVSRFARNTVDTLNITRMLRAKGVGIIFINDNIDTRDSDGELRLSIMATIAQEESRKISERVKWGQQRKMEQGVVFGRSCLGYDVKDGKITINADSAEIVKRIFTEYTVLLKGAESIADGLNAEQIRTVNGGRWSGAFIRKVLRNVKYVGDLEQKKTCTPDFLTHKKRLNRSEHIYIRNHHEPIISRELWEQTQAEISRRKPTDTSRHSDRYVFSGKVYCGVCGSVMVSRVKTLKNGKIYHALRCSGRIGGKSCNNETLNVTALKACVKRIFTDMPIDKTAVINAVIKGLSRTDKPDIPALRRKIETLNAKKRRAVDLMLDGLITQQELIEQKSYYDSIIEKLSQEISSDRSVFETDKIRKNAERFLDFTSDPLWLLVIRADYIHGTLTVYLKGIEKGFTTCFTATGRGDSYRVITGNTVRSQGIIPVTMQVQKNWFHHDVNDKSIKKSAPDTFQVHFVLICRLFCFLFVAGYLAPTL

SEQ ID NO: 1802 - protein, 558 aa, Unknown
  Description of Unknown: Integrase B1803 sequence
  PTHR30461:SF3,SM00857,G3DSA:1.10.10.2600,IPR036162,PF13408, IPR025827,PS51737,G3DSA:3.40.50.1390,IPR006119,IPR038109, PF07508,IPR011109,SSF53041,PTHR30461,Coil, PS51736,cd00338,PF00239
MTNAVIYARYSPGPNQTDQSIEGQIHECTRFCEDNDLRIVGTYIDRKQTGRNDNRADFQKMLRDSSRHGFSTVVVWKIDRFGRNREEIAKNKAVLRMNGVRVLSAKEHIPDGPEGIILESVLEGLAEYYSANLSQNIKRGMRESALKCQFNGSGLSTGYTVDADHKYRIDPDGAAVVRTIFEMYDSGKKIADIQRYLQQSNIKTMRGKEYTHYGISRILRNRVYIGEYHWHDIVVPGGVPQIIDNDLFDRVQKRLEANKHAPAARRGDVDFLLTSKLICGNCKSTMIGDCGTGKNGARWYYYTCRAKKTKSSKCRKKSVPKEALEREVTALTAAYVLRDDVIDYIADKVVEIQKSEHDDKSMLRYFESQLKDTNKAIANIMRAIEAGIITETTRSRLEELEDTKRDLETEIIKEKVARPTIEREQVIFFLEKFRGGNVDDKEYQRKIIDTFVHKVILYDDKITITYNYSTDSTKNAENTVESIESAASAAECKCSDKSSSSPPITRILLLQCSCYFFRRGSNRTVLRSRIPSVRWTVGKSACVSAHGSAPSDPLRLHQ

SEQ ID NO: 1803 - protein, 558 aa, Unknown
  Description of Unknown: Integrase B1804 sequence
  PTHR30461:SF3,SM00857,G3DSA:1.10.10.2600,IPR036162,PF13408, PS51737,G3DSA:3.40.50.1390,IPR025827,IPR006119,IPR038109, PF07508,IPR011109,SSF53041,PTHR30461,PS51736, cd00338,PF00239
MNKLRAAAYCRVSTDRAEQSGSLASQRSFFDDYIKNSDSMTLVGVFYDEGTSGTTTLNRYGFNKMISLAVSGGIDIILTKEVSRFARNTVDTLNITRMLRAKGVGIIFINDNIDTRDSDGELRLSIMATIAQEESRKISERVKWGQQRKMEQGVVFGRSCLGYDVKDGKITVNADSAEIVKRIFTEYTVLLKGAESIADRLNAEQIRTVNGGRWSGAFIRKVLRNVKYVGDLEQKKTCTPDFLTHKKRLNSSEHIYIRNHHEPIISRELWEQTQAEISRRKPTDTSRHSDRYVFSGKVYCGVCGSVMVSRVKTLKNGKIYHALRCSGRISGKSCNNETLNVTALKACVKRIFTDMPIDKTAVINAVIKGLSRTDKPDIPALRRKIETLNAKKRRAVDLMLDGLITQQELIEQKSYYDSIIEKLSQEISSDRSVFETDKIRKNAEKFLDFTSDPIWLLVIRADYIHGTLTVYLKGIEKGFTTCFTATGRGDSYRVITGNTVRSQGIIPGTMQVQKNWFHHDVNDKLIKKSAPDIFQVHFVLICRLFCFLYAAGHSVPTL

SEQ ID NO: 1804 - protein, 558 aa, Unknown
  Description of Unknown: Integrase B1805 sequence
  PTHR30461:SF3,cd00338,SM00857,G3DSA:1.10.10.2600,IPR036162, PF13408,IPR025827,PS51737,G3DSA:3.40.50.1390,IPR006119, IPR038109,PF07508,IPR011109,SSF53041,PTHR30461, PS51736,Coil,PF00239
MAKKKKPAGGIAVIYARYSSHNQRDVSIEQQIEACRKHATELGLTIIATYEDRAISGRTDNRPAFQRLMHDAEKGKFSYVLAWKSNRMGRNMMQAMVNESRLMDCGIKVYYAEEDFDDSAAGRFALRSMMNVNQFYSDNLAEDVRRGLMDNANKCMVNGRQPLGYKRGKDGKVVVDEPAAAIVREVYARVASGELFTDIARDLNRRGIKTADKGEWNKNSFHRLCSNEKYRGIYIYGDVRIEGGIPTIIDDTLWYKVQEALRVKKLKRNGRHRPGDEDYLLTGKLRCGKCGGYMIGMSGRSKTGDIHYYYACQNRRVGHTCDKKNIRRDVIEPAVAQAIKEYCLTDDAIEWIADKTVEYWEKADRNLQLDSIEGDLAAVQSSISNVMKAIEMGVVTETTRDRLIELEKQRTDLKSKLALAKEEVVHVDRKKLISSLLLFRNGDIHDRQYQEDLFKTFLISVYVYDDDDNGHLKIVFNAFGDNNTVDLPIDFGETDNQSAFSDGAEKFDYSLHRSTKKPSGLCRMVFLFYIVIQKQRTVFATVRPFLCSYYRMLMRPAP

SEQ ID NO: 1805 - protein, 558 aa, Unknown
  Description of Unknown: Integrase B1806 sequence
  PTHR30461:SF3,SM00857,G3DSA:1.10.10.2600,IPR036162,PF13408, PS51737,IPR025827,G3DSA:3.40.50.1390,IPR006119,IPR038109, PF07508,IPR011109,SSF53041,PTHR30461,Coil, PS51736,cd00338,PF00239
MTNAVIYARYSPGPNQTDQSIEGQIHECTRFCEDNDLRIVGTYIDRKQTGRNDNRADFQKMLRDSSRHGFSTVVVWKIDRFGRNREEIAKNKAVLRMNGVRVLSAKEHIPDGPEGIILESVLEGLAEYYSANLSQNIKRGMRESALKCQFNGSGLSTGYTVDADHKYRIDPDGAAVVRTIFEMYDGGKKIADILRYLQQSNIKTMRGKEYTHYGISRILRNRVYIGEYHWHDIVVPGGVPQIIDNDLFDRVQKRLEVNKHAPAARRGDVDFLLTSKLICGNCKSTMIGDCGTGKNGARWYYYTCRAKKTKSSKCRKKSVPKEALEREVTALTAAYVLRDDVIDYIANKVVEIQKSEHDDKSMLRYFESQLKDTNKAIANIMRAIEAGIITETTRSRLEELEDTKRDLETEIIKEKVARPTIEREQVIFFLEKFRGGNVDDKEYQRKIIDTFVHKVILYDDKITITYNYSTDSTKNAENTVESIESAASAAECKCSNKPSSSPPMTRILLLQCSCYFFRRGSNRMVLRSRIPSVRWTVGKSACVSAHCRAPSDPLRLHQ

SEQ ID NO: 1806 - protein, 558 aa, Unknown
  Description of Unknown: Integrase B1807 sequence
  PTHR30461:SF3,SM00857,G3DSA:1.10.10.2600,IPR036162,PF13408, PS51737,IPR025827,G3DSA:3.40.50.1390,IPR006119,IPR038109, PF07508,IPR011109,SSF53041,PTHR30461,Coil, PS51736,cd00338,PF00239
MTNAVIYARYSPGPNQTDQSIEGQIHECTRFCEDNDLRIVGTYIDRKQTGRNDNRADFQKMLRDSSRHGFSTVVVWKIDRFGRNREEIAKNKAVLRMNGVRVLSAKEHIPDGPEGIILESVLEGLAEYYSANLSQNIKRGMRESALKCQFNGSGLSTGYTVDADHKYRIDPDGAAVVRTIFEMYDGGKKIADILRYLQQSNIKTMRGKEYTHYGISRILRNRVYIGEYHWHDIVVPGGVPQIIDNDLFDRVQKRLEVNKHAPAARRGDVDFLLTSKLICGNCKSTMIGDCGTGKNGARWYYYTCRAKKTKSSKCRKKSVPKEALEREVTALTAAYVLRDDVIDYIANKVVEIQKSEHDDKSMLRYFESQLKDTNKAIANIMRAIEAGIITETTRSRLEELEDTKRDLETEIIKEKVARPTIEREQVIFFLEKFRGGNVDDKEYQRKIIDTFVHKVILYDDKITITYNYSTDSTKNAENTVESIESAASAAECKCSNKPSSSPPVTRILLLQCSCYFFRRGSNRTVLQSRIPSVRWTAGKSACVSAHGSAPSDPLRLHQ

SEQ ID NO: 1807 - protein, 558 aa, Unknown
  Description of Unknown: Integrase B1808 sequence
  PTHR30461:SF3,IPR036162,PS51737,IPR011109,PTHR30461, PF00239,G3DSA:1.10.10.2600,PF14287,IPR006119,SSF53041, IPR025378,SM00857,IPR025827,cd03770,IPR038109, PS51736,PF13408,G3DSA:3.40.50.1390,PF07508,Coil
MLQQSNNTITSIYPIGNQTEELTALYCRLSQDDKQEGDSNSIINQKKILKRYAIEHGYQPYVFFVDDGFSGTNFNRPDFQRMIAEVEAGRIKRVIVKDMSRLGRDYLQVGMYTEIMFPNMDVHFIAVNDGVDSHVGENEFTPFRNIINEWYAKDTSKKIRAVKRSKGMAGEHIGSHAPYGYMKNPDNKKEWLIDEEAAEVVREIFRLCVNGYGPTRIANILTERKILCPTYYALEHGEKPRTVLPPDKYLWSATVVSHILERMDYLGHTVNFKTHVKSYKNRKKIDNSPEQWRVFENTHEAIIDKETFEIVQKIRSGKRRPTKMGDMPMFSGLLYCADCGSKMTFHRQMAQSAEKHNFVCSNYRHNSKSCTMHYIRNVVVEQIVLENLKEVIRYVSDYEDEFVQMVMDTDMRQRNKELSQKKKRLTEIHSRIQELDKIFQRIYEDNISGKLSDERFMKLSKGYEEEQHTLQEEQTSLEKELQKEEKQSVDVKQFLSVVRKYTNLTELTPEIVHEFIDKIIVHAPDKSSGKRLQEIEIIYNHIGVFDHSKVTLWKGKAV

SEQ ID NO: 1808 - protein, 558 aa, Unknown
  Description of Unknown: Integrase B1809 sequence
  PTHR30461:SF3,cd00338,SM00857,G3DSA:1.10.10.2600,IPR036162, PF13408,IPR025827,G3DSA:3.40.50.1390,PS51737,IPR006119, IPR038109,PF07508,IPR011109,SSF53041,PTHR30461, PS51736,Coil,PF00239
MKEKTKVYIYTRVSTAVQVDGYSLDAQKSRMKAYAEFNDFEIVGEYEDAGKSGKSIEGRLEFNRMMEDIKSGKDGVSYVLVFKLSRFGRNAADVLSTLQVMQDFDVNLICVEDGIDSSKDAGKLMISVLSAVAEIERENIRVQTMEGRIQKAREGKWNGGFAPYGYKLEKGMLYINEEEAEAIRIIFDQYVHTDIGANGLAKYLANHGINKIQRQNGKNPLFDAALIRRILKNPVYCGKIAYGRRRREKGHGTRNDYRLVEQENYLLVDGLHEAIVSEGLWHEAQVKLLAQAKKYEKVNNGKDNKVHLLTGLLKCPICGAGMYGNKSIKHKPDGTKYKDFFYYGCKHRTMTRGHKCEYKKQINEELLDGAVAEVIIKLVSNPKFAAMMQQKINMKIDTSAIEQEIANYEKQLRQSYATKSRLIDEIDTLDPDDKHYIKRKADLDDRLYKMYDKIEDTENLLIEARAKKMAIEAEKLTADNIYKVLIYFEKLYAVMDEQEKRQIMESLISEIHIYEERQPNGQWLKSIKFKLPIIEEDMEMSLDSDTHVEAIVSLQREI

SEQ ID NO: 1809 - protein, 558 aa, Unknown
  Description of Unknown: Integrase B1810 sequence
  PTHR30461:SF3,SM00857,G3DSA:1.10.10.2600,IPR036162,PF13408, PS51737,IPR025827,G3DSA:3.40.50.1390,IPR006119,IPR038109, PF07508,SSF53041,IPR011109,PTHR30461,PS51736, cd00338,PF00239
MNKLRAAAYCRVSTDRAEQSGSLASQRSFFDDYIRNSDSMTLVGVFYDEGTSGTTTLNRYGFNKMISLAVSGGIDIILTKEVSRFARNTVDTLNITRMLRAKGVGIIFINDNIDTRDSDGELRLSIMATIAQEESRKISERVKWGQQRKMEQGVVFGRSCLGYDVKDGKITINADSAEIVKRIFTEYTVLLKGAESIADGLNAEQIRTVNGGRWSGAFIRKVLRNVKYVGDLEQKKTCTPDFLTHKKRLNRSEHIYIRNHHEPIISRELWEQTQAEISRRKPTDTSRHSDRYVFSGKVYCGVCGSVMVSRVKTLKNGKIYHALRCSGRIGGKSCNNETLNVTALKACVKRIFTDMPIDKTAVINAVIKGLSRTDKPDIPALRRKIETLNAKKRRAVDLMLDGLITQQELIEQKSYYDSIIEKLSQEISSDRSVFETDKIRKNAERFLDFTSDPLWLLVIRADYIHGTLTVYLKGIEKGFTTCFTATGRGDSYRVITGNTVRSQGIIPGTMQVQKNWFHHDVNDKLIKKSAPDIFQVHFVLICRLFCSLCVAGHSAPTL

SEQ ID NO: 1810 - protein, 558 aa, Unknown
  Description of Unknown: Integrase B1811 sequence
  PTHR30461:SF3,SM00857,G3DSA:1.10.10.2600,IPR036162,PF13408, PS51737,IPR025827,G3DSA:3.40.50.1390,IPR006119,IPR038109, PF07508,IPR011109,SSF53041,PTHR30461,Coil, PS51736,cd00338,PF00239
MRSIEICDNKCGEKMMQTLAQGEMRVVVIPAKSSEENKQAAKCLRVAAYCRVSTDDEEQKTSYEAQIGYYTEKINQNPEWQMAGIFADEGISGTQAKKRPEFLKMIRLCRQRKIDIILTKSLSRFARNTVDSLGYIRELRALGIAVISEKENINTLTAESEMLITIMSCFAQAESESISKNVSWGVRQSFKNGNVPMQYARLLGYRKGHDGNAEIIPEEAEVVKEIYRCYLDGMSMNLIADRLNEKGLTTKGGSSPYRKTVVQRILTNEKYTGDALLQKTYVTDCITKKTRKNNGELPMYLVKNHHEPIISRTDFNRVQEEMARRSAKRTIADKLTKTGQGKYSAKYALSELLICGECGEHYRRVTWTAKGFKEIKWRCVSRIQYGKKKCHSSPTVDEQAFHRAIVSAINEFCEVKDDVAKALRESIIEALDQNQNGSVHAAQQRIDELARNMDELIKLATVPETAENAMSDIAKFSEEMKMLREFIETEKAKQAATQRGSDEVNTILERLGQEDFTLIEYDDVAARQLIEKITVASKDAITVRFKGGFEIRKDLNGN

SEQ ID NO: 1811 - protein, 558 aa, Unknown
  Description of Unknown: Integrase B1812 sequence
  PTHR30461:SF3,SM00857,G3DSA:1.10.10.2600,IPR036162,PF13408, PS51737,IPR025827,G3DSA:3.40.50.1390,IPR006119,IPR038109, PF07508,IPR011109,SSF53041,PTHR30461,Coil, PS51736,cd00338,PF00239
MTNAVIYARYSPGPNQTDQSIEGQIHECTRFCEDNDLRIVGTYIDRKQTGRNDNRADFQKMLRDSSRHGFSTVVVWKIDRFGRNREEIAKNKAVLRMNGVRVLSAKEHIPDGPEGIILESVLEGLAEYYSANLSQNIKRGMRESALKCQFNGSGLSTGYTVDADHKYRIDPDGAAVVRTIFEMYDGGKKIADILRYLQQSNIKTMRGKEYTHYGISRILRNRVYIGEYHWHDIVVPGGVPQIIDNDLFDRVQKRLEANKHAPAARRGDVDFLLTSKLICGNCKSTMIGDCGTGKNGARWYYYTCRAKKTKSSKCRKKSVPKEALEREVTALTAAYVLRDDVIDYIADKVVEIQKSEHDDKSMLRYFESQLKDTNKAIANIMRAIEAGIITETTRSRLEELEDTKRDLETEIIKEKVARPTIEREQVIFFLEKFRGGNVDDKEYQRKIIDTFVHKVILYDDKITITYNYSTDSTKNAENTVESIESAASAAECKCSNKPSSSPPVTRILLLQCSCYFFRRGSNRMVLRSRIPSVRWTVGKSACVSAHGSAPSDPLRLHQ

SEQ ID NO: 1812 - protein, 558 aa, Unknown
  Description of Unknown: Integrase B1813 sequence
  PTHR30461:SF3,SM00857,G3DSA:1.10.10.2600,IPR036162,PF13408, IPR025827,G3DSA:3.40.50.1390,PS51737,IPR006119,IPR038109, PF07508,IPR011109,SSF53041,PTHR30461,PS51736, cd00338,PF00239
MNKLRAAAYCRVSTDRAEQSGSLASQRSFFDDYIRNSDSMTLVGVFYDEGTSGTTTLNRYGFNKMISLAVSGGIDIILTKEVSRFARNTVDTLNITRMLRAKGVGIIFINDNIDTRDSDGELRLSIMATIAQEESRKISERVKWGQQRKMEQGVVFGRSCLGYDVKDGKITVNADSAEIVKRIFTEYTVLLKGAESIADGLNAEQIRTVNGGRWSGAFIRKVLRNVKYVGDLEQKKTCTPDFLTHKKRLNSSEHIYIRNHHEPIISRELWEQTQAEISRRKPTDTSRHSDRYVFSGKVYCGVCGSVMVSRVKTLKNGKIYHALRCSGRIGGKSCNNETLNVTALKACVKRIFTDIPIDKTSVINAVIKGLSRTDKPDIPALRRKIETLNAKKRRAVDLMLDGLITQQELIEQKSYYDSIIEKLSQEISSDRSVFETDKIRKNAERFLDFTSDPIWLLVIRADYIHGTLTVYLKGIEKGFTTCFTATGRGDSYRVITGNTVRSQGIIPGTMQVQKNWFHHDVNDKSIKKSAPDTFQVHFVLICRLFCFLFVAGYLAPTL

SEQ ID NO: 1813 - protein, 557 aa, Unknown
  Description of Unknown: Integrase B1814 sequence
  PTHR30461:SF3,cd00338,SM00857,G3DSA:1.10.10.2600,IPR036162, PF13408,PS51737,G3DSA:3.40.50.1390,IPR025827,IPR006119, IPR038109,PF07508,IPR011109,SSF53041,PTHR30461, PS51736,Coil,PF00239
MARKKNIAAGQNAVIYARYSSHNQREVSIEQQVRECMKHAAELGLHVVGTYEDRAISGKTDKRPNFQRMMRDAEKGKFQAVVAWKSNRIGRNMLQAMVNEAKLEDCGVKVFYAEEDFDDTAAGRFALRNMMNVNQFYSENMAEDITRGLYDNASKCMANGRQPLGYKRGEDGRVVLDEANAAVVREIFTRVAAGDLFVDIARDLNAQGIKTSKGVNWNKGSFQSICQNERYRGIYIYGDVRVADGIPRIVSDDLWYRVQEAMRMKKNPVGTRHRVGAEDYLLTGKLRCGHCGSYMTGVSGTSRNGELHYYYTCQKRRTEHACDKKNIRRDVIEPAVAQAIKMYCLTDDVIAWIADRTVEYWEKHDNDLQIEALEQQLEENKKATSNMLKAIEMGIITEATRTRMVELETEQSRLSVQLNVAKEDVVKIDREQIISYLELLQQGDIHDRDFQMELFKNFLVAVYVYDDNRMKLVFSCMGDQNSVEIPLETGEDPPDGGLSPDAKMFVLTPDSSTKKALYFVGSMVLFFFIPVKRSGVHRSPCRRASDTPDLNRNRYLI

SEQ ID NO: 1814 - protein, 557 aa, Unknown
  Description of Unknown: Integrase B1815 sequence
  PTHR30461:SF3,SM00857,G3DSA:1.10.10.2600,IPR036162,PF13408, PS51737,G3DSA:3.40.50.1390,IPR025827,IPR006119,IPR038109, PF07508,IPR011109,SSF53041,PTHR30461,PS51736, cd00338,PF00239
MAKKRYDLRPVRTVCIYARYSPGSRQTDQSIEGQLRVCQEYAEQHDYRIIQTYADKHKTGTNDDREAFRQMIKDSEKGLFDAVLVWKSDRFGRNMEDMVLNEMRIKRNGVSLISCTEPVADGPLGGMQKAMLMGMAEFYSATNAENVRRGLLESARKCQITSGAIPFGYKAGEDKRFYTDPINAAAVLEIFQRYDGGELLTHIMDDLNKKGIRSHKGKPLTRSSMYSILRNERYTGVYIYADIRVEGGMPQIVPKDLYERVQIKLGKNKHAPARAKAAEPFILTTKCFCGQCGGPMAGESGTSKTGAKHYYYGCVHHKNSRDKSKACQKKPVRKDFLERLVIDTTLDVALHKENIQSIAADLCAWQQRQKDTAILDGLKSRRRECEKAIGNLVAALEAGAASPTIAARVRDREEELENIKFAIAEQELVQEKFDEKKIMYFLSKVPEGDRTDINYMQRIVDTFINSVFVYDDRVVICYNFDGDGSKITVNDVDKAMQEAEDRENRQITQEAPGQGGSCVESDDSKCSPYGGLVQGNEPKANSILFFQRAFGIIVKLQ

SEQ ID NO: 1815 - protein, 557 aa, Unknown
  Description of Unknown: Integrase B1816 sequence
  PTHR30461:SF3,IPR036162,PS51737,IPR011109,PTHR30461, PF00239,G3DSA:1.10.10.2600,IPR006119,SSF53041,cd00338, SM00857,IPR025827,IPR038109,mobidb-lite,PS51736, PF13408,G3DSA:3.40.50.1390,PF07508,Coil
MAQQKKAAGAEFDGTPRAVIYARYSSTHQRERSIEDQIADCRAYAERCGLMVVGMYADRAISGKTDERPDFQRMIDDSKKRQFDRVIVWKLDRFARNRYDSALYKHKLKQNGVSVLSAMENIGEGDESIILEAILEASAEYYSRDLRKKVLRGMTTSAKKGLHNTGSVPYGYRLEGEIAIPDGDRAEFVKHVFEAYAKGETPAELYREMQRRGLDTKVNGRKVSDNIIGSILRNEKYTGRGMWRGIPVEWPRLIDDDLFEAARARTEKNRRAPAAYKAAEPFILCGKAFCGYCGAPLMSGGGKGRSGKYYRHYICRTKKRERACGKKTEDKDFLEWYIVEQTCAYVLAPERLEYIADRVVECYKESFDGQRVSALEARIAKLDRDLDKTTDLLFAAPSAAAVDRINKHVVELEAQKSELEAELSGLKIAAAITYTRDEVVAWLKQFCNGDPLEAEFRRRIVETFINSVYVYDDRIVIYFNVRGGKQISYAEMLESVGDVEPLPPGPENKKSGCPDNGTAANNSKERFLHGKNTEQTTESAVRFCSGLVHQKALLHLR

SEQ ID NO: 1816 - protein, 557 aa, Unknown
  Description of Unknown: Integrase B1817 sequence
  SM00857,G3DSA:1.10.10.2600,IPR036162,PS51736,PS51737, G3DSA:3.40.50.1390,PF13408,IPR025827,IPR006119,IPR038109, PF07508,IPR011109,SSF53041,PTHR30461,Coil, mobidb-lite,cd00338,PF00239
MEELDTRPVADILARYSTDNQNPVTIDVQVEKCREWCERNGYQVGKIFSDEAVSGMKETRAGYEACMMHLGMGGAQLVVVYDQSRMFREFTEWFQFRKDVDMLGARVASVTQPMVGGDLKDPAVFINEAATAMLNHAQVLITRQKTIDALKHNAREGKSSGGKPPLGYDLDKDKKYVVNEHEAEAVRLVFQLFARGFSYGEIIDELNSRGYLTKRGQPFGKNSIFDLLKNEKYIGRLVYGATKAQADGRWNSHAKSKEDAIVVENGVPAIIEQELWEQVQSRIRTRKGAGGRYSAKREYLLTGRVFCGDCGASMVVMGSKASGYQYYECNNKRRTHTCKMKNVRTEWLEQTVAASIKQMLTEPANIEMLVDVARDQERQITTEYDTRRAGLASRYTRVCRQLENGVNALLEGVVSAELKEKVRRLEEEKAEIEAETAELNQYKGYVGLDDATIRRCVENVAKVDIDTPEGLKLILSVVSRVNIHTDTIEIKTLISTDGTDPDPTKSRPQNLELFPSEGLSGEKYHTTPENGSGHQMKTALYSQKRLYSAFFYAFKML

SEQ ID NO: 1817 - protein, 557 aa, Unknown
  Description of Unknown: Integrase B1818 sequence
  PTHR30461:SF3,cd00338,SM00857,G3DSA:1.10.10.2600,IPR036162, PF13408,PS51737,G3DSA:3.40.50.1390,IPR025827,IPR006119, IPR038109,PF07508,IPR011109,SSF53041,PTHR30461, PS51736,Coil,PF00239
MKMPIDLSSLTPAERTLFDSCPEALDSGCETVCCFYLRYSSDKQTEQSIEGQLRDLLDFCKRMGYRCAAVYVDRAISAHASMEKRPAFQQMLTDSARSEWTIVLVWKLDRFARRREDAAIARMRLRKNGCTVESAKENISKNPEGVILESLLEGMAEYYSAELSQKVKRGMRETALKGSSTGGVIPLGYKSVNKRLELDPVYAPIVKEMFERYAAGETATSIMRDLNARGYRTAKNMEFRGSTFSRIMANKKYIGICRYGDVYTEDVIPPIIDKELFDAVQKKLKQVAEAPAKTKAKVPYLLSQKIFCGHCGNNMFGESGRGKQGRIYHYYACYSKKRGKGCRKKNLQKDWIEGIVAEQARAMLTDEVIDHIATMAEKQSEEAYRATSKAPALQKEIKENETKIRNLTAAIEASGATSSYLISRIAELEGQTKALQTELAKEEDNTIRLTKDKVVFWLEKVRDKVAAVGDQTAMLLDLLVNSVTVWDDGPDGITIKTAFNITGLPEKTYKVPAGSPPSGGEMCSDLMASGSPNATHPNPTITFIGFLLVQTQRYSLP

SEQ ID NO: 1818 - protein, 557 aa, Unknown
  Description of Unknown: Integrase B1819 sequence
  PTHR30461:SF3,SM00857,G3DSA:1.10.10.2600,IPR036162,PF13408, IPR025827,G3DSA:3.40.50.1390,PS51737,IPR006119,IPR038109, PF07508,IPR011109,SSF53041,PTHR30461,Coil, PS51736,cd00338,PF00239
MNRYGKRCVLYPRVSTEMQVDGYSLEGQKNMLTRFADREEMIVVDTYEDAGKSGKSIEGRPAFQKMLRDIEDGLDIDYILVYKLSRFGRNAADILNSLELVQSYGVNLICIEEGIDSSQTSGKLLISVLSAVAEIERENIIEQTMNGRREKARQGGWNGGFAPYGYTLEDNKLMIEETEAVAIRKIFELYTSSEIGLGGIANQLNLQGIRKIPRQNGTLEDWTGHFIKLILDNPVYCGKIAYGRRTKEKVKGTKNDYQMKRNDDYILTEGQHKGIVSEEVWEKAHAKRLRTGVKQPSKIGRDRVHLLSGLLKCPVCGSPMYTNKHAWTNKDGTYKEIYYYVCSRNRMVRGKHCEYKAMLKKTDIEPMVIEAIREIVRNEEYAQAIKKRIGVQIDTKAVDKELEGYQAKLKEVDLNKTRLEREIDSLPADAKYRERKLHDMTLRLDSLYDVIVELEEKIEDARLRRDAIKQQAITLENIYKIMVNFDCVYNIINDEEKRNVVTALIKEIEIYRNDESEYPLKRIGLNFPVFKDGGEVTELLWDKGNTVETVALITRIK

SEQ ID NO: 1819 - protein, 557 aa, Unknown
  Description of Unknown: Integrase B1820 sequence
  cd03768,SM00857,G3DSA:1.10.10.2600,IPR036162,PF13408, PS51737,SSF109709,IPR025827,G3DSA:3.40.50.1390,IPR006119, IPR038109,PF07508,IPR011109,SSF53041,PTHR30461, PS51736,PF00239
MNTVRCAIYTRKSTEEGLDKEFNTLEAQRESGENYVKSQSYQGWEIIPTRYDDGGFSGGNLNRPALQQLMSDVENGLVDMIVVYKIDRLTRSLVDFAKLVAVLDEHHCSFVSVTQNFNTYDSMGRLTLNVLLSFAQFEREVITERIRDKISASKKKGMWMGGCLPIGYDTVNKKLVVNEAEAAVVRLIFEKYLVMRSEIAVSDWLNAHGYTTMGKTGSKQFNHQRVNKILRNVIYIGKVPHKTAVYDGQHEAIVSQEIFDEVQEIKKTNRGGRLALSRFVEHSLLKGYIYCDCCHSAMVATNSNKKNKVYGYYSSVRVIKEGYKQCQVGNIPAGELDNFILEQMEAIIRSPKIVAGLISEAKITNPDVNDVQIIGKVKREKEFIHHLSSLTQRQLLMLLIKKVRVDVDRIKIIYTDLALSLMNEEMKAKLSANNLDGKENEILYRVKLRRRRGSLKIFAPEDYKPDENNALFMALIKAYKWREQMNKKGWFIDDIAKNEGLSREYVGKVLRMNYLAPDIVTAIVDGVYPKKMSLNRIFEKEIPLLWSEQRIKYGFGD

SEQ ID NO: 1820 - protein, 557 aa, Unknown
  Description of Unknown: Integrase B1821 sequence
  PTHR30461:SF3,SM00857,G3DSA:1.10.10.2600,IPR036162,PF13408, PS51737,G3DSA:3.40.50.1390,IPR025827,IPR006119,IPR038109, PF07508,IPR011109,SSF53041,PTHR30461,Coil, PS51736,cd00338,PF00239
MPRKKKLQEVGGLRLVAYYRYSNGGQQTEQSIEGQRRDCEAYAKAHGYKIVHEYIDRHISGKSDSRPAFQQMISDSDSHLFDAVICWKTDRLARSRYDSIIYKTRLRRNGVKILYAAETVVDGPEGIIIEGLMESLAEYYSAELAQKLRRGQRESALKCIALGGNRSFGYDIGPDKHYCINEKQAPAVRYIFEQYAAGATAADIVRELTARGYRTSRGNPFNKNSICRIITNEMYLGVYKYADIRIEGGVPAMIDRELFNRCQTQLAFNRAHGGGKGAPRADYVLVGKLDCGLCGHAMKGASATGHTGSKHYYYTCTQHVEKKCPKTSIEKSYLEQIIVDGVAKYVLTPEKISQIVDCMMELQAKEQEPKGNPEKDALEAELAECRRKQNNILEAIEEGGSARLAARLRALEEQEAQLTFALGEINNAPAPPQFSREALTFMFEQFRREEDEVDEEYRRRILDTFVSSILLYEDRAEVKFNITDQKTGDFERVILPISANKKPPEDDDIPSNSEGSTALRLVEAMGVELITGDSTWKIFDFDPQIGPLLWMKIPLTE

SEQ ID NO: 1821 - protein, 557 aa, Unknown
  Description of Unknown: Integrase B1822 sequence
  PTHR30461:SF3,IPR036162,PS51737,IPR011109,PTHR30461, PF00239,G3DSA:1.10.10.2600,IPR006119,SSF53041,cd00338, SM00857,IPR025827,IPR038109,PS51736,mobidb-lite, PF13408,G3DSA:3.40.50.1390,PF07508,Coil
MPRAAQAAGAVFDGTPRAVIYARYSSTHQRERSIEDQIADCRAYAERCGLMVVGIYADRAISGKTDERPDFQRMIDDSKKRQFDRVIVWKLDRFARNRYDSALYKHKLKQNGVSVLSAMENIGEGDESIILEAILEASAEYYSRDLRKKVLRGMTTSAKKGLHNTGSVPYGYRLEGESAIPDGDRAEFVKHVFEAYAKGETPAELYREMQRRGLDTKVNGRKVSDNIIGSILRNEKYTGRGMWRGIPVEWPRLIDDELFEAARARTEKNRRAPAAYKAAEPFILCGKAFCGYCGAPLMSGGGKGRSGKYYRHYICRTKKRERACGKKTEDKDFLEWYIVEQTCAYVLAPERLEYIADRVVECYKESFDGQRVSVLEARIAKLDRDLDKTTDLLFAAPSAAAVDRINKHVVELEAQKSELEAELSGLKIAAAITYTRDEVVAWLKQFCNGDPLEAEFRRRIVETFINSVYVYDDRIVIYFNVRGGKQISYAEMLDSAGDVEPLPPGPENEKSGGPDNGTAASNSKERFLHGKNTEQTAGSAVRFCSGLVHQKALSQMR

SEQ ID NO: 1822 - protein, 557 aa, Unknown
  Description of Unknown: Integrase B1823 sequence
  PTHR30461:SF3,cd00338,SM00857,G3DSA:1.10.10.2600,IPR036162, PF13408,IPR025827,G3DSA:3.40.50.1390,PS51737,IPR006119, IPR038109,PF07508,SSF53041,IPR011109,PTHR30461, PS51736,Coil,PF00239
MNPVDKIAVVYARYSSHGQTEQSIEGQIAAAQKYAEQHGYTIIHVYADRAMTGRNDDREQFQKMLSDTAMHQFGVILLWKIDRFGRNREEIAFNRYRCKKNGVRVERVAEDVPDGPEGVILDSVLEGMAEYYSLQLAQNVRRGQRESAKKSMSIGGNKMLGYIVNPETKRYESDPKTASYVTEIFKRYANGETISEIVAWLNAQGIRTTRGSEFTVNSLHRLLKNEKYTGVYIFHDIRNEGGMPALTDRATFDKVQEMLKVNRRAPARVWSKTEYLLTDKLFCGHCGEMMVGESGHGRNGIKHSYYTCLNRKKKKSCDKKPVRQDVIEPLVLRAIGKLLENPATLENITDQVWAAYERSDTSGDTIKALDKQIADVDRALSNVMKAIELGIVNEMTKTRMDELTNQKQALSTARAEAGLAEGFKLTRDMILFFLQELSALDMADRDGQKRLIKTFVNAIYLYDDHFDIAFNYTDNGNVVVRIQEINDAARGEVFGHCAQSPTKKNPQLRLRVLFCAGAGRIRTGRPSADGKKQSCGLFFRPRLANPPAPTKKLWQRY

SEQ ID NO: 1823 - protein, 557 aa, Unknown
  Description of Unknown: Integrase B1824 sequence
  PTHR30461:SF3,IPR036162,PS51737,IPR011109,PTHR30461, PF00239,G3DSA:1.10.10.2600,IPR006119,SSF53041,cd00338, SM00857,IPR025827,IPR038109,mobidb-lite,PS51736, PF13408,G3DSA:3.40.50.1390,PF07508,Coil
MPRAAQAAGAAFDGTPRAVIYARYSSTHQRERSIEDQIADCRAYAERCGLMVVGIYADRAISGKTDERPDFQRMIDDSKKRQFDRVIVWKLDRFARNRYDSALYKHKLKQNGVSVLSAMENIGEGDESIILEAILEASAEYYSRDLRKKVLRGMTTSAKKGLHNTGSVPYGYRLEGESAIPDGDRAEFVKHVFEAYAKGETPAELYREMQRRGLDTKANGRKVSDNIIGSILRNEKYTGRGMWRGIPVEWPRLIDDELFEAALARTEKNRRAPAAYKAAEPFILCGKAFCGYCGAPLMSGGGKGRSGKYYRHYICRTKKRERACGKKTEDKDFLEWYIVEQTCAYVLAPERLEYIADRVVECYKESFDGQRVSVLEARIAKLDRDLDKTTDLLFAAPSAAAVDRINKHVVELEAQKSELEAELSGLKIAAAITYTRDEVVAWLKQFCNGDPLEAEFRRRIVETFINSVYVYDDRIVIYFNVRGGKQISYAEMLDSAGDVEPLPPGPESKKSGGPDNGTAASDSKERFLHGKNTEQTAESAVRFCSCLVHQKALLHLR

SEQ ID NO: 1824 - protein, 557 aa, Unknown
  Description of Unknown: Integrase B1825 sequence
  PTHR30461:SF3,SM00857,G3DSA:1.10.10.2600,IPR036162,PF13408, IPR025827,G3DSA:3.40.50.1390,PS51737,IPR006119,IPR038109, PF07508,SSF53041,IPR011109,PF00239,PTHR30461, PS51736,Coil,cd00338
MFIDDNRPKRVAAYCRVSTDKTDQANSLVSQQRYFSEYINRNPLWELYDIYVDDGISGTNTKKRAAFNHMIEDAVNGKFDLIITKEISRFARNIVDSITYTRELKKHGVGVLFLSDGIYTLDSDGELRLALISTIAQEESRKTSERVKWGQRRQMEKGVVFGKDMLGYDVRNGKLFINEEGAETVRKIFHKFLDEGKGVHRIAKELREEGVKTAARMKDWSYTNILRILRNEKYCGDLVQQKTYTPDYLTHQKKRNYGEVETVTIRDHHEPIISRERFEAVQRELKRRRPSESTIKAYANRYALSGKIICGECGAGFVRRQKKRKDGTFNVKWVCAESRKNGGSHQEKDGETAGCTTNSISDRDIKQILQRVVADTMNGREELVSKLLQTVESVIKTVSGNDDLYRIEKETEKCAEKKKRLLDMCLNGYIEAKDYRAACDALETQIAELQSALVKEKEKQKMIADKEKLIEDIKKFISNISCGAEWNDAFYRNIVDKIVVYKGRKMDIHLKFIPDRWQVQILAGVKEINAYESKMRASVCSAPISVSRPFNSGSGIE

SEQ ID NO: 1825 - protein, 557 aa, Unknown
  Description of Unknown: Integrase B1826 sequence
  cd03768,SM00857,G3DSA:1.10.10.2600,IPR036162,PF13408, IPR025827,SSF109709,G3DSA:3.40.50.1390,PS51737,IPR006119, IPR038109,PF07508,SSF53041,IPR011109,PTHR30461, PS51736,PF00239
MKTIKCAIYTRKSTDEGLDKEFNTLEAQRESGENYIKSQMHQGWQIIEKHYDDGGFSGGTLKRPALQELLQDVENGEVNMIVVYKIDRLTRSLIDFAKLVEVLDRNQCSFVSVTQNFNTYDSMGRLTLNVLLSFAQFEREVITERIRDKVDASKKKGMWMGGNIPIGYDAINKKLVINSKEAPVVKLAFEKYLVLRSEVAVANWLNLNGYTTMSKGNNGKFNHLRISKMLRNVIYIGKIPHKDKIYDGQHSAIISEELFNEVQKIKNTNRAGRLTPSRFFEHALLKGLIECDCCHAAMVSTKSNKHNKIYEYYTSVRAVKDGYKNCLVGNIPAGEMDNFVLTQLADIIKSPKILSGLIEEAKIKRPDICDIQIINKLGDGIDFIHRISPIVQRQLVELFIKKVRVNTNRIKIIYTKTAIELMDNNMRDNLFPNNIDGEENEIMYHVELHKKRGSVKIFEPETYKPDLYNPLYLALIKAFKWQEIIRTEHLTFEEVAEREKLSREYVGKIMKMTYLAPDIITSIVDGSYPKTLSINKIVESEIPILWTEQRIKYGFTA

SEQ ID NO: 1826 - protein, 557 aa, Unknown
  Description of Unknown: Integrase B1827 sequence
  PTHR30461:SF3,cd00338,SM00857,G3DSA:1.10.10.2600,IPR036162, PF13408,IPR025827,G3DSA:3.40.50.1390,PS51737,IPR006119, IPR038109,PF07508,IPR011109,SSF53041,PTHR30461, PS51736,Coil,PF00239
MKMQIDLSALTPAERTLFDGCPEALDSGCETVCCFYLRYSSDKQTEQSIEGQLRDLLDFCKRMGYRCAAVYVDRAISAHASMEKRPAFQQMLTDSARSEWTIVLVWKLDRFARRREDAAIARMRLRKNGCTVESAKENISKNPEGVILESLLEGMAEYYSAELSQKVKRGMRETALKGASTGGVIPLGYKSVNKRLELDPVYAPIVKEMFERYAAGETATAIMRDLNARGYRTQHNMEFRGSTFSRIMANKKYIGICRYGDVYTEDVIPPIIDKELFDAVQKKLKQVAEAPAKAKAKVPYLLSQKIFCGHCGSNMFGESGRGKQGRIYHYYACYSKKRGKGCRKKNLQKDWIEGIVAEQARAMLTDEVIDHIATMAEKQSEEAYRATSKAPALQKEIKENETKIRNLTAAIEASGATSSYLISRIAELEAQTKALQSELVKEEGNTVRLTKDKVVFWLEKVRDKVAAVGDQTAMLLDLLVNSVTVWDDGPDGITIKTAFNITGLPEKTYKVPAGSPPSGGEMCSDLMASGSPDATHPNPTITFIGFLLVQTQRYSLP

SEQ ID NO: 1827 - protein, 557 aa, Unknown
  Description of Unknown: Integrase B1828 sequence
  PTHR30461:SF3,cd00338,SM00857,G3DSA:1.10.10.2600,IPR036162, PF13408,PS51737,G3DSA:3.40.50.1390,IPR025827,IPR006119, IPR038109,PF07508,IPR011109,SSF53041,PTHR30461, PS51736,Coil,PF00239
MKMQIDLSALTPAERTLFDSCPEALDSGCETVCCFYLRYSSDKQTEQSIEGQLRDLLDFCKRMGYRCAAVYVDRAISAHASMEKRPAFQQMLTDSARSEWTIVLVWKLDRFARRREDAAIARMRLRKNGCTVESAKENISKNPEGVILESLLEGMAEYYSAELSQKVKRGMRETALKGASTGGVIPLGYKSVNKRLELDPVYAPIVKEMFERYAAGETATAIMRDLNARGYRTQHNMEFRGSTFSRIMANKKYIGICRYGDVYTEDVIPPIIDKELFDAVQKRLKQVAEAPAKTKAKVPYLLSQKIFCGHCGSNMFGESGRGKQGRIYHYYACYNKKRGKGCTKKNLQKDWIEGVVAEQARAMLTDEVIDYIATMAEKQSEEAYKATSKAPALQKAIKENEVKIRNLTAAIEESGATSSYLISRIAELEAQTKALQTELAKEEDNTIRLTKDKVVFWLEKVRDKVAAVGDQTAMLLDLLVNSVTVWDDGPDGITIKTAFNITGLPEKTYKVPAGSPPSGGEMCSDLMAYGSPNATYPNPTITFVGFLLVQTRRYSLP

SEQ ID NO: 1828 - protein, 557 aa, Unknown
  Description of Unknown: Integrase B1829 sequence
  SM00857,G3DSA:1.10.10.2600,IPR036162,PF13408,IPR025827, G3DSA:3.40.50.1390,mobidb-lite,PS51737,IPR006119,IPR038109, PF07508,IPR011109,SSF53041,PTHR30461,Coil, PS51736,cd00338,PF00239
MNEQNKWPIADILARYSTDNQNPVTIDVQVEKCREWCERNGYQVGKIFSDEAVSGMKETRAGYEACMMHLGMGGAQLVVVYDQSRMFREFTEWFQFRKDVDMLGARVASVTQPMVGGDLKDPAVFINEAATAMLNHAQVLITRQKTIDALKHNAREGKSSGGKPPLGYDLDKDKKYVVNEHEAEAVRFVFQLFARGFSYGEIIDELNSRGYLTKRGQPFGKNSIFDLLKNEKYIGRLVYGATKAQADGRWNSHAKSKEDAIVVENGVPAIIEQELWEQVQSRIRTRKGAGGRYSAKREYLLTGRVFCGDCGTSMVVMGSKASGYQYYECNNKRRTHTCKMKNVRTEWLEQTVAASIKQMLTEPANIEMLVDVARDQERQITTEYDTRRAELASRYTRVCRQLENGVNALLEGVVSSELKEKVRRLEEEKAEIEAETAELNQYKGYVGLDDATIRHCVENVAKVDINTSEGLKLILAVVSRVNIRTDTIEIKTLISMDGTDPDPTKSRPQHLELFPSESASGEKYHTTPENGSGHQMKTALYSQKRLYSAVFYAFKML

SEQ ID NO: 1829 - protein, 557 aa, Unknown
  Description of Unknown: Integrase B1830 sequence
  PTHR30461:SF3,IPR036162,PS51737,IPR011109,PTHR30461, PF00239,G3DSA:1.10.10.2600,IPR006119,SSF53041,cd00338, SM00857,IPR025827,IPR038109,PS51736,mobidb-lite, PF13408,G3DSA:3.40.50.1390,PF07508,Coil
MARKKNIAAGLDAVIYARYSSHNQREVSIEQQIAECTKHAAALGLRIVGTYEDRAISGKTDNRPRFQQMMRDAEKGKFQAVVAWKSNRIGRNMLQAMVNEAKLDDYGVKVFYAEEDFDDTAAGRFALRNMMNVNQFYSENMAEDITRGLYDNASKCMANGRQPLGYKRGEDGRVVLDEANAAVVREIFTRVAAGDLFVDIARDLNAQGIKTSKGANWNKGSFQSICQNERYRGIYIYGDVRVADGIPRIVSDDLWYRVQEAMRMKKNPVGTRHRVGAEDYLLTGKLRCGHCGSYMTGVSGTSRNGELHYYYTCQKRRTEHACDKKNIRRDVIEPAVAQAIKMYCLTDDVIEWMADRTVEYWEKHDNDLQIEALEQQLEENKKATSNMLKAIEMGIITEATRTRMVELETEQSRLSVQLNAAKEDVVKIDREQIISYLELLQQGDIHDRDFQMELFKNFLVAVYVYDDNRMKLVFSCMGDQNSVEIPLETGEDPPDGGLSPDAKMFVLTPDSSTKKALYFVGSTVLFFFVPTKRSGVHRSPCRRASDTPDLKRNRYPI

SEQ ID NO: 1830 - protein, 557 aa, Unknown
  Description of Unknown: Integrase B1831 sequence
  PTHR30461:SF3,SM00857,G3DSA:1.10.10.2600,IPR036162,PF13408, PS51737,G3DSA:3.40.50.1390,IPR025827,IPR006119,IPR038109, PF07508,SSF53041,IPR011109,PF00239,PTHR30461, PS51736,Coil,cd00338
MSSVDKIAVIYARYSSHGQTEQSIEGQIAAAQKYAEQHGYTIIHIYADRAMTGRNDDREQFQKMLSDTAMHQFGVILLWKIDRFGRNREEIAFNRYRCKKNGVRVERVAEDVPDGPEGVILDSVLEGMAEYYSLQLAQNVRRGQRESAKKSMSIGGNKMLGYVVNPETKRYESDPKTASYVTEIFKRYANGETISEIVAWLNAQGIRTTRGSEFTVNSLHRLLKNEKYTGVYIFHDIRNEGGMPALTDRATFDKVQEMLKVNRRAPVRVWSKTEYLLTDKLFCGHCGAIMVGESGHGRNGTKHSYYTCLNRKKKKSCDKKPVRQDVIEPLVLRAIGKLLENPATLENIADQVWAAYERSDTSGDTIKALDKQIADVDRALSNVMKAIEMGIINEMTKTRMDELTNQKQALSQSRAEAGLTGGFKLTRDMILFFLQEMAALDMADRDSQKRLIKTFVNAIYLYDDHFDIAFNYTDNGKVAVRMQEINDAASGEVFGCCAQSPTKKNPQLRLRVLFCAGAGRIRTGRPSADGKKQSCGLFFRPRLANPPAPTKKLWQRY

SEQ ID NO: 1831 - protein, 557 aa, Unknown
  Description of Unknown: Integrase B1832 sequence
  PTHR30461:SF3,SM00857,G3DSA:1.10.10.2600,IPR036162,PF13408, IPR025827,PS51737,G3DSA:3.40.50.1390,IPR006119,IPR038109, PF07508,SSF53041,IPR011109,PF00239,PTHR30461, PS51736,Coil,cd00338
MKKARTKCYIYTRVSTAMQVDGYSLDAQREKLRKYADYEDMVIAGEYSDEGFSGKNIQGRHEFQQMLRDVQDCKDGVSYVLVFKLSRFGRNAADVLNSLQLMQDFGVNLICVEDGIDSSKDSGKLMISVLSAVAEIERENIRAQTMAGREQKAREGKWNGGFAPYGYRLENGELSIADDEVEVIRVIFDRFIHTNDGVAGIARYLNTHGYVKKLRQNGTIPKFSAVFVRGILDNPIYCGKIAFGRRKVEKKLGTRNEMHVVKQSEFPVYVGQHEAIVSEDDWNLAQTKRQRTTGRREKVRDPDHAHILSGILKCPCCGRNLYGNVSKAHSKDNKTRYYYFCKSIKGQTGHECSFRLNIEQNEINQMVASIVSAMVHDPRFVDAIKEKIGSAVDTSELEHQSETIKAQLRQRLSTKSRLEHQMDTLDFNDPYYDRKSLDLQRRYDEQYELIEDMEAQLAEIQGQIDDIHQEKITADNIYHLLLAFDEVYNAATEVEQKEFMRAFIEHIDIFPEKQPDGNWIRNIVFAFPVPYNRKEIREFPLESQSTVEAIVSLRREI

SEQ ID NO: 1832 - protein, 557 aa, Unknown
  Description of Unknown: Integrase B1833 sequence
  PTHR30461:SF3,cd00338,SM00857,G3DSA:1.10.10.2600,IPR036162, PF13408,IPR025827,PS51737,G3DSA:3.40.50.1390,IPR006119, IPR038109,PF07508,SSF53041,IPR011109,PTHR30461, PS51736,Coil,PF00239
MARKKNIAAGLDAVIYARYSSHNQREVSIEQQIAECTKHAAALGLRIVGTYEDRAISGKTDNRPRFQQMMRDAEKGKFQAVVAWKSNRIGRNMLQAMVNEAKLDDYGVKVFYAEEDFDDTAAGRFALRNMMNVNQFYSENMAEDITRGLYDNANKCMANGRQPLGYKRGADGKVMLDEPAAAVVREIFTRVAAGDLFVDIARDLNAKGIKTSKGATWNKGSFQSICQNERYKGIYIYGNVRIVDGIPRIVSDELWYKVQEAMRMKKNPVGTRHRVGAEDYLLTGKLRCGHCGSYMTGVSGTSRNGELHYYYTCQKRRTEHACNKKNVRRDVIEPAIAQAIKMYCLTDDVIEWVANRTVEYWEKHDNDLHIEALEQQLEENKKATSNMLKAIEMGIITDATRSRMIELETEQSKLAVQLNAAKADVVKIDRDDLIDELQIFRDMDVNNRSVQAELFKDFLVAAYIYDDNRLKLVFSFMGKDNSIEIPLETGEDPPDGEDSPDAKMFVLTPDCSTKKALYFVGSTVLFFFIPAKRSGVHRSPCRRASDTPDLNRNRYLI

SEQ ID NO: 1833 - protein, 557 aa, Unknown
  Description of Unknown: Integrase B1834 sequence
  PTHR30461:SF3,cd00338,SM00857,G3DSA:1.10.10.2600,IPR036162, PF13408,PS51737,G3DSA:3.40.50.1390,IPR025827,IPR006119, IPR038109,PF07508,IPR011109,SSF53041,PTHR30461, mobidb-lite,Coil,PF00239
MPKKPTKHPAKPKRGKKLEIEEPGVLYGRYSSHNQKDISVEQQFEKGYELAAEYGIKIIDTYADRAVSGRTDKRKDFQRMMSDATKGKFRYVIAWKSNRMGRNMLEALINEARLQELGVRVLYVEEDFDDTAAGRFAARSMMNVNQFYSENMAEDIRRGLYDNASNCMVANGHLPYGYKRDDTLHYVIDEPKAAVIREIFTRVAAGEPFVDIMSSLNARGIKTSYNRPWGRSSFQKILSNERYRGIYIYGDVRKEDGIPRIISDELFFKVQEVITTKKNPQGRHRVNGDYLLTGKLFCGKCKSPMVGISGTGRSGKLHYYYVCQKHRTEKTCDKKNVRRDEIEMQVAQAIKDYALKDDVIEWIADSTVAYNERKEAESKVGILEDQLAGTERGIKNIMSAIEQGIITETTKSRLVELESERATIKAKIAAARADIVTVSRDDIISGLEMFRDGDVHDKKYQARLFDTFLVAVYVYDNDLRLVFSFSGNKNTVQIPIESAVNAVENNEAECSFKLCSAPPKIPITLLGDWYFSFSLFPLHSSLTPCSFLSKLADLGNR

SEQ ID NO: 1834 - protein, 557 aa, Unknown
  Description of Unknown: Integrase B1835 sequence
  PTHR30461:SF3,SM00857,G3DSA:1.10.10.2600,IPR036162,PF13408, PS51737,IPR025827,G3DSA:3.40.50.1390,IPR006119,IPR038109, PF07508,IPR011109,SSF53041,PF00239,PTHR30461, PS51736,Coil,cd00338
MPRKKKLQEVGGLRLVAYYRYSNGGQQTEQSIEGQRRDCEAYAKAHGYKIVHEYIDRHISGKSDSRPAFQQMISDSDSHLFDAVICWKTDRLARSRYDSIIYKTRLRRNGVKILYAAETVVDGPEGIIIEGLMESLAEYYSAELAQKLRRGQRESALKCIALGGNRSFGYDIGPDKHYCINEKQAPAVRYIFEQYAAGATAADIVRELTARGYRTSRGNPFNKNSICRIITNEMYLGVYKYADIRIEGGVPAMIDRELFNRCQTQLAFNRAHGGGKGAPRADYVLVGKLDCGLCGHAMKGASATGHTGSKHYYYTCTQHVEKKCPKTSIEKNYLEQVIVDGVAKYVLTPEKISQIVDCMMELQAKEQEPKGNPEKDALEAELAECRRKQNNILEAIEEGGSARLAARLRALEEQEAQLTFALGEINNAPAPPQFSREALTFMFEQFRREEDEVDEEYRRRILDTFVSSILLYEDRAEVKFNITDQKTGDFERVILPISANKKPPEDDDATSNSEGSTALRLVEAMGVELITGDSTWKISDSDSKIVPLLWLKIPLTE

SEQ ID NO: 1835 - protein, 556 aa, Unknown
  Description of Unknown: Integrase B1836 sequence
  cd03768,SM00857,G3DSA:1.10.10.2600,IPR036162,PF13408, IPR025827,G3DSA:3.40.50.1390,PS51737,SSF109709,IPR006119, IPR038109,PF07508,SSF53041,IPR011109,PTHR30461, PS51736,PF00239
MKTIRCAVYTRKSTEDGLEKEFNTLEAQRESGENYIKSQAYQGWEIIPTHYDDGGYSGGTLKRPALQQLLKDVEAGMVDMIVVYKIDRLTRSLIDFSKLVEIFDRNQCSFVSVTQNFNTYDSMGRLTLNVLLSFAQFEREVITERIRDKVDASKKKGMWMGGVLPLGYVSVNKKLEIIPEEAKIVYLAFEKYLIFRSEIAVAEWLNNNGYTTLSKGNGKFTHMRVSSMLKNVLYIGKVPHKDKVYDGQHHAIISQELFDEVQKIKSQNRIGRLAPSRFVEHALLKGLIYCDCCQAAMISTKSNKKNKVYEYYTSFRAVKEGFNNCKIGSIPAGEMDNFVLLQIAGIIKSPKILSGLIEQAKIIRPDIKDVQIISKLQDGDDFIQRLSSITLRQLLIMLVQKIRVDVDRIKIMYTELAVSLMDDKMKDDLFPNNINGERNEILYRVCLRRKRGSLKIFAPEKYKPDENNPLYLALIKAFVWQDKMKKENLFIEDLAKSEGLSREYVGKVLHMTYLAPDIVTAIVDGVYPKTLSLRKILESEIPLLWSQQRLKYGFSF

SEQ ID NO: 1836 - protein, 556 aa, Unknown
  Description of Unknown: Integrase B1837 sequence
  cd03768,PTHR30461:SF3,SM00857,G3DSA:1.10.10.2600,IPR036162, PF13408,PS51737,G3DSA:3.40.50.1390,IPR025827,IPR006119, IPR038109,PF07508,SSF53041,IPR011109,PTHR30461, PS51736,Coil,PF00239
MNTIAIYTRKSKFTGKGESIENQIEKCKKFIEFKFNIDSENVNIFIDEGFSGKNENRPQYQLMMEKIKKKEIDSIVIYQLNRLGRNARDIHNTMQLCDDLGVIIYSATEGFDSSTSFGRAVIGILASLAQLEREQLAERVKDNMYTLAKMGRWLGGQSPLGFDGSREYYIDETGKERSITKLKKNEEELKLVKLLYDKYLEEKSLSQVGKWALINHLTGKNGGNLNKNAINVILQNPVYVKSSKEVFEYLSNEGYEVCGEPNGNGLLRYGKDDEPIVATAKHKGVIPSDQWIEVQKILKDNAYKAPRMGKTNTALLTGLLRCKCGSTMRISYGQKRKDGTKPFYYICNMKINSGGTRCNLKNLNGNLFEKNFIQFLKNYSKETLFTELQKLLNNSKDLESTISSNKIDVEIEKSNKAIKQILNKLKLTDDDELSKILLQEIKVENNKLKALSKQKEELLNDQSEVVITQSEVLAILDDLDNFQKTFDDLNLEDKQKALKSLIESITLTDDKFIVDFNIKKKLDNAINKLSSLFAKYKSSQLRHPCRSYMYRHPSWP

SEQ ID NO: 1837 - protein, 556 aa, Unknown
  Description of Unknown: Integrase B1838 sequence
  SM00857,G3DSA:1.10.10.2600,IPR036162,PF13408,PS51737, G3DSA:3.40.50.1390,IPR025827,IPR006119,IPR038109,PF07508, SSF53041,IPR011109,PTHR30461,Coil,cd00338, PF00239
MAYRKITDIRDTIGMRAVFYARVSTAEEEQLNAIELQIEENRGCIKDHGWKLVGEYIDRSKSGTMVKGRDDYQRLYEDLYEDLFDIVVIKDQERLQRNTLDWYLFINRVVQTGKLLFMYMDGKFYSPDDALITGVRAIIAEEFSRNLSKKLHNYHDHRIEKARQGQEIALQGSGNVYGWDKKDGKYYINPEQAKVRRLMCEGIMARKGSTLIAKELNDAGYRNTVGKPWKPMDIPKFVYDCKNVGTMIINKERHDFESKQTIKLPKEEWVYVENALPPIVTQEEWDLICKIHEERVIATGSDRRGKKTSGYSFSGKLVCGICGAPYWRKQRVSKDEYWVCSTKQTKGRRTRKRDSTMGKAGEINPLGCDNENISYNSLMEIMGVVSERLQANTDTIKHDMINWLTKLRKQLLEANGGHTEADLQRELSRKSKLLDAYLDGILNKQEYQKKAEELDERIIQLKAETEKNKANSGDIAEIDKVLANIDEEVSRYVDGNEKLKVEYLLEHLEQVQIFPDKVIVIVPILSEGIVVEKTQYVSREKRRRKNNFNKASYETL

SEQ ID NO: 1838 - protein, 556 aa, Unknown
  Description of Unknown: Integrase B1839 sequence
  SM00857,G3DSA:1.10.10.2600,IPR036162,PF13408,PS51737, G3DSA:3.40.50.1390,IPR025827,IPR006119,IPR038109,PF07508, SSF53041,IPR011109,PTHR30461,Coil,cd00338, PF00239
MAYRKITDIRDTIGMRAVFYARVSTAEEEQLNAIELQIEENRGCIKDHGWKLVGEYIDRSKSGTMVKGRDDYQRLYEDLYEDLFDIVVIKDQERLQRNTLDWYLFINRVVQTGKLLFMYMDGKFYSPDDALITGVRAIIAEEFSRNLSKKLHNYHDHRIEKARQGQEIALQGSGNVYGWDKKDGKYYINPEQARVRRLMCEGIMARKGSTLIAKELNDAGYRNTVGKPWKPMDIPKFVYDCKNVGTMIINKERHDFESKQTIKLPKEEWVYVENALPPIVTQEEWDLICKIHEERVIATGSDRRGKKTSGYSFSGKLVCGICGAPYWRKQRVSKDEYWVCSTKQTKGRRTRKRDSTMGKAGEINPLGCDNENISYNSLMEIMGVVSERLQANTDTIKQDMINWLTKLRKQLLEANGGHTEADLQRELSRKSKLLDAYLDGILNKQEYQKKAEELDERIIQLKTETEKNKANSGDIAEIDKVLANIDEEVARYVDGNEKLKVEYLLEHLEQVQIFPDKVIVIVPILSEGIVVEKTQYVSREKRCRKVYAAKSSVRDI

SEQ ID NO: 1839 - protein, 556 aa, Unknown
  Description of Unknown: Integrase B1840 sequence
  PTHR30461:SF3,cd00338,SM00857,G3DSA:1.10.10.2600,IPR036162, PF13408,PS51737,G3DSA:3.40.50.1390,IPR025827,IPR006119, IPR038109,PF07508,IPR011109,SSF53041,PTHR30461, mobidb-lite,Coil,PF00239
MPRKPAKHPAKPKRGKKLEVEEPGVLYGRYSSHNQKDISVEQQFEKGYELAAEYGIRIIDTYADRAVSGRTDKRRDFQRMMTDAAKGKFRYVIAWKSNRMGRNMLEALINEARLQDLGVRVLYVEEDFDDTAAGRFAARSMMNVNQFYSENMAEDIKRGLYDNAANCMVANGHLPYGYKADETLHYAIDEPKAAVIREIFARVSCGEAFVDIMASLNARGIKTSYGRPWGRSSFQKILSNERYRGIYIYGDVRKEGGIPRIISDELYFKVQEVITTKKNPQGRHRVNGDYLLTGKLFCGHCKSPMTGVSGTGRSGNLHYYYVCQKRRTGKTCDKKNVRRDEIELQVAQAIKDYALKDDVIEWIADSTVAYNERKEAESKVGILEDQLAGTEHGIKNIMSAIEQGIITETTKSRLVELESERAAIKANIAAARADIVTVSRDDIISGLEMFRDGDVHDKKYQARLFDTFLVAVYAYDDDLRLVFSFSGNKNTIQIPIESAVNAVENNEAECSFKLCSAPPKQSQTNQAGSPGFCSAPTVYMTGGIFVLVFPLAYAKK

SEQ ID NO: 1840 - protein, 556 aa, Unknown
  Description of Unknown: Integrase B1841 sequence
  SM00857,G3DSA:1.10.10.2600,IPR036162,PF13408,IPR025827, G3DSA:3.40.50.1390,PS51737,IPR006119,IPR038109,PF07508, IPR011109,SSF53041,PTHR30461,Coil,PS51736, cd00338,PF00239
MNIYYARERLRTGSIFDLKLKVAYYARVSTEKVEQQVSIKHQQEYYEEFIRSNQNWTFSGAYIDDGISGIHAEKREEFQNMIRDAKLGRVDMIITKEISRFARNTLDSIQYTRELLSYGVCVWFQNDGINTIDEDSEFRLTIMAGVAQDELRKLSSRIKFGHARSIQNGVVLGNRIYGYHKKDGKLTIVPEEAEMIRMIFRDYASGTMSTPKLEKKLWDMGYRNFKGGKINRDVIRNIIKNPKYKGYFCGGKVKIVDMFTKKQEFLPESKWVIFKDDGSRVPQIIDEETWEKANDYMKKRSEAIKSHRTSFKNGNLFTGKIFCANDDAPYWMKQHYVRGKEDVRWVCSYKIKNGADSCSSHGIRESDLKKVVASLINESSCNIDEVIKEYLNILRKVINNKPDTGIEKERLQNQIDAIKKKKEKILEYNLNGDISDEEFISRNKGYTKQIIDLEMEISKLVPEDVELQIAEKQLSKITEELKSFKEVKEEDINRQIIDKLFDKIVVSLSADKQTVCKFYLSTGCLKIRDLGGVVLNTCYLTIRKNDTRHFIGELVA

SEQ ID NO: 1841 - protein, 556 aa, Unknown
  Description of Unknown: Integrase B1842 sequence
  PTHR30461:SF3,SM00857,G3DSA:1.10.10.2600,IPR036162,PF13408, IPR025827,PS51737,G3DSA:3.40.50.1390,IPR006119,IPR038109, PF07508,IPR011109,SSF53041,PF00239,PTHR30461, Coil,cd00338
MPKKTAKHPAKPKRGKKLEIEEPGVLYGRYSSHNQKDISVEQQFEKGYELAAEYGIRIIDTYADRAVSGRTDKRKDFQRMMSEAAKGKFRYVIAWKSNRMGRNMLEALINEARLQELGVRVLYVEEDFDDTAAGRFAARSMMNVNQFYSENMAEDIKRGLYDNASNCMVANGHLPYGYKRDETLHYVIDEPKAAVIREIFTRVAAGEPFVDIMNSLNARGIKTSYNRPWGRSSFQKILSNERYRGIYIYGDVRKEDGIPRIISDELFFKVQEVITTKKNPQGRHRVNGDYLLTGKLFCGKCKSPMVGISGTGRSGKLHYYYVCQKHRTEKTCDKKNVRRDEIELQVAQAIKDYALKDDVIEWIADSTVAYNERKEAESKVGILEDQLAGTERGIKNIMSAIEQGIITETTKSRLVELESERATIKAKIAAARADIVTVSRDDIISGLEMFRDGDVYDKKYQARLFDTFLVAVYVYDDDLRLVFSFSGNKNTIQIPIESAVNAVENNAAECSFKLCSAPPKQSQTNHAGSPGFCYAPTIYMVSGIFVLVCPFDHARK

SEQ ID NO: 1842 - protein, 556 aa, Unknown
  Description of Unknown: Integrase B1843 sequence
  cd03768,SM00857,G3DSA:1.10.10.2600,IPR036162,PF13408, PS51737,G3DSA:3.40.50.1390,SSF109709,IPR025827,IPR006119, IPR038109,PF07508,IPR011109,SSF53041,PTHR30461, PS51736,PF00239
MKSIRCAVYTRKSTEDGLEKEFNTLEAQRESGENYIKSQAYQGWEIIPTHYDDGGFSGGTLKRPALQQLLKDVEAGMVDMIVVYKIDRLTRSLIDFSKLVEIFDRNQCSFVSVTQNFNTYDSMGRLTLNVLLSFAQFEREVITERIRDKVDASKKKGMWMGGVLPLGYVSVNKKLEIIPEEAKIVRLAFEKYLIFRSEIAVAEWLNNNGYTTLSKGNGKFTHMRVSSMLKNVLYIGKVPHKDKVYNGQHHAIISQELFDEVQKIKSKNRVGRLAPSRFVEHALLKGLIYCDCCQAAMISTKSNKKNKVYEYYTSFRAVKEGFNNCKIGSIPAGEMDNFVLRQIAGIIKSPKILSGLIEQAKIIRPDIKDVQIISKLQDGDDFIQRLSSITLRQLLIMFVQKIRVDVDRIKIMYTELAVSLMDDKMKDDLFPNNINGERNEILYRVCLRRKRGSLKIFAPEKYKPDENNPLYLALIKAFVWQDKMKKENLFIEDLAKSEGLSREYVGKVLRMTYLAPDIVTAIVDGVYPKTLSLRKILESEIPLLWSQQRLKYGFSF

SEQ ID NO: 1843 - protein, 556 aa, Unknown
  Description of Unknown: Integrase B1844 sequence
  cd03768,PTHR30461:SF3,SM00857,G3DSA:1.10.10.2600,IPR036162, PF13408,PS51737,IPR025827,G3DSA:3.40.50.1390,IPR006119, IPR038109,PF07508,IPR011109,SSF53041,PTHR30461, PS51736,Coil,PF00239
MNTIAIYTRKSKFTGKGESIENQIEKCKKFIEFKFNIDSENVNIFIDEGFSGKNENRPQYQLMMEKIKKKEIDSIVIYQLNRLGRNARDIHNTMQLCDDLGVIIYSATEGFDSSTSFGRAVIGILASLAQLEREQLAERVKDNMYTLAKMGRWLGGQSPLGFDGSREYYIDETGKERSITKLKKNEEELKLVKLLYDKYLEEKSLSQVGKWALINHLTGKNGGNLNKNAINVILQNPVYVKSSKEVFEYLSNEGYEVCGEPNGNGLLRYGKDDEPIVATAKHKGVIPSDQWIEVQKILKGNAYKAPRMGKTNTALLTGLLRCKCGSTMRISYGQKRKDGTKPFYYICNMKINSGGARCNLKNLNGNLFEKNFIQFLKNYSKETLFAELQKLLNNSKDLESTISSNKIDVEIEKSNKAIKQILNKLKLTDDDELSKILLQEIKVENNKLKALSKQKEELLNDQSEVVITQSEVLAILDDLDNFQKTFDDLNLEDKQKALKSLIESITLTDDKFIVDFNIKKKLDNAIKKLSSLFAKYKSSQLRHPCRSYMYRHPSWP

SEQ ID NO: 1844 - protein, 556 aa, Unknown
  Description of Unknown: Integrase B1845 sequence
  PTHR30461:SF3,IPR036162,PS51737,IPR011109,PTHR30461, PS00397,PF00239,G3DSA:1.10.10.2600,IPR006119,SSF53041, SM00857,IPR025827,IPR038109,PS51736,cd03768, IPR006118,PF13408,G3DSA:3.40.50.1390,PF07508,Coil
MKAALYVRVSTTYQIDKDSLPVQRQDLINYAKYAFNIDDYKIFEDAGFSGKNTNRPAFQNMMDRIRSREFSHLFVWKIDRVSRNLLDFCDMYEELKKYNCTFVSKNEQFDTSSAMGEAMLKIILVFAELERKLTSERVTSIMLARAEKGLWNGANVPLGYSYDEETKYPVINENEAKTIRFIFDMYEKRQSTAAISKYLNENNVHTKRGGSWTSKGIGDIIHNPFYYGTLRYNYRESARGKKKSEDEWIVKENNHEGIISKEQWLRCNKIIEENAKKNASRFRSMNQIQHIFGGLIYCKTCGAKYICSLDKPRKDGYKPSRYICGGKIKGVICDNKIVTDVTIGDFMLQYVLNFISCINKIPSNLEDLENRLLGNYDVCLDYDSLYDTFSMLAYIKQMRKNNYKYEDLDKIVDFEKVKSNKSEIDSLLENKSKLERAAERLTNLYLYDDVPMSEREFYKRKTEIEDKLSEVNEKLNALNNEKNKPKITDLGFMDEMDDLLLRLDFTGSSLRELTMNNDRKILKDFFETIIEKIIVCDKRVDSIVFRNGLVHKFYYK

SEQ ID NO: 1845 - protein, 556 aa, Unknown
  Description of Unknown: Integrase B1846 sequence
  cd03768,SM00857,G3DSA:1.10.10.2600,IPR036162,PF13408, PS51737,G3DSA:3.40.50.1390,SSF109709,IPR025827,IPR006119, IPR038109,PF07508,SSF53041,IPR011109,PTHR30461, PS51736,PF00239
MKTIRCAVYTRKSTEDGLEKEFNTLEAQRESGENYIKSQAYQGWEIIPTHYDDGGFSGGTLKRPALQQLLRDVEAGMVDMIVVYKIDRLTRSLIDFSKLVEIFDRNQCSFVSVTQNFNTYDSMGRLTLNVLLSFAQFEREVITERIRDKVDASKKKGMWMGGVLPLGYVSVNKKLEIVPEEAKVVRLAFEKYLIFRSEIAVAEWLNNNGYTTLSKGNGKFTHMRVSSMLKNVLYIGKVPHKDKVYDGQHHAIISRELFDEVQKIKSQNRIGRLAPSRFVEHALLKGLIYCDCCQAAMISTKSNKKNKVYEYYTSFRAVKEGFNNCKIGSIPAGEMDNFVLRQIAGIIKSPKILSGLIEQAKIIRPDIKDVQIISKLQDGDDFIQRLSSITLRQLLIMLVQKIRVDVDRIKIMYTELAVSLMDDKMKDDLFPNNINGERNEILYRVCLRRKRGSLKIFAPEKYKPDENNPLYLALIKAFVWQDKMKKENLFIEDLAKSEGLSREYVGKVLRMTYLAPDIVTAIVDGVYPKTLSLRKILESEIPLLWSQQRLKYGFSF

SEQ ID NO: 1846 - protein, 556 aa, Unknown
  Description of Unknown: Integrase B1847 sequence
  PTHR30461:SF3,SM00857,G3DSA:1.10.10.2600,IPR036162,PF13408, PS51737,G3DSA:3.40.50.1390,IPR025827,IPR006119,IPR038109, PF07508,IPR011109,SSF53041,PF00239,PTHR30461, Coil,cd00338
MKKFKFPIDLSMLTEEEINQFREDPSTLFQGDTDVCLYLRFSSERQKEQSIEGQLRDCIAYCKRKNYRIVAIYVDRATTARKDVEKRVHFQEMITASVHQTWKLVVVWKLDRFARNREDSAVFKMRLRKNGVKVESATEGISKNPEGIILEAVLEGIAEYYSADLSQKITRGMRESALKCHSIGGHVPLGYKIEDHKLVINPDTAHIVQEAFELYANGETVADICRMFNAKGYRTAKGAEFNRNSFKSMFRNRRYIGVYRYKDFEKEGGVPPIINKDLFETVQKRLSANAEAPARGKAKVDYLLAGKLFCGHCGGSMNGESGTSKTGAVHNYYACYTRKRQHSCDKKPLRKEWIEQIVAQDAMELLTDDAIQEMADMAISQTEKDLRENTRIPELSERMKETESGIANITKAVEKGIASDALMSRLVELEKEKKNLLRLIAEEEKYVCKIDRDQIVYWLTKFKDGNIEDENFKRIIIDLMVNSVTVWDEPDGFRITTAYNLTSCKNKTFRIPSSSDKGFGFEGLESTRTTLDELKSSMVTSEWLSCVLYRTVILSS

SEQ ID NO: 1847 - protein, 556 aa, Unknown
  Description of Unknown: Integrase B1848 sequence
  cd03768,SM00857,G3DSA:1.10.10.2600,IPR036162,PF13408, PS51737,G3DSA:3.40.50.1390,SSF109709,IPR025827,IPR006119, IPR038109,PF07508,SSF53041,IPR011109,PTHR30461, PS51736,PF00239
MKTIRCAVYTRKSTEDGLEKEFNTLEAQRESGENYIKSQAYQGWEIIPTHYDDGGFSGGTLKRPALQQLLKDVEAGMVDMIVVYKIDRLTRSLIDFSKLVEIFDRNQCSFVSVTQNFNTYDSMGRLTLNVLLSFAQFEREVITERIRDKVDASKKKGMWMGGVLPLGYVSVNKKLEIIPEEAKIVHLAFEKYLIFRSEIAVAEWLNNNGYTTLSKGNGKFTHMRVSSMLKNVLYIGKVPHKDKVYDGQHHAIISQELFDEVQKIKSQNRIGRLAPSRFVEHALLKGLIYCDCCQAAMISTKSNKKNKVYEYYTSFRAVKEGFNNCKIGSIPAGEMDNFVLRQIAGIIKSPKILSGLIEQAKIIRPDIKDVQIISKLKDGDDFIQRLSSITLRQLLIMLVQKIRVDVDRIKIMYTELAVSLMDDKMKDDLFPNNINGERNEILYRVCLRRKRGSLKIFAPEKYKPDENNPLYLALIKAFVWQDKMKKENLFIEDLAKSEGLSREYVGKVLRMTYLAPDIVTAIVDGVYPKTLSLRKILESEIPLLWSQQRLKYGFSF

SEQ ID NO: 1848 - protein, 556 aa, Unknown
  Description of Unknown: Integrase B1849 sequence
  PTHR30461:SF3,IPR036162,PS51737,IPR011109,PTHR30461, PS00028,PF00239,G3DSA:1.10.10.2600,IPR006119,SSF53041, IPR013087,cd00338,SM00857,IPR025827,IPR038109, PS51736,PF13408,G3DSA:3.40.50.1390,PF07508,Coil
MRQKFKIDLSMLTPEEQQQFRDDPTTLTKGEVDVALYLRFSSERQKEQSIEGQLRDCIAYCKRKGFRIVAIYVDRATTARKDVEKRVHFQEMISDSIHHLWNFVVVWKLDRFARNREDSAVFKMRLRKNGVRVKSATETISENPEGIILESVLEGIAEYYSADLSQKITRGLRESAMKGHSVGGHVPLGYKIEDHKLVINPATAHIVQEAFQLYANGESMAEICRIFNSKGYRTAKNSEFNRSSFKSMFKNVRYIGTYIYKDIEKENAIPAIIDKDLFETVQRRLSLTADAPARGKAKVDYLLSGKLFCGHCGSSMNGDSGTGRHGEIHNYYKCFSRKKHKNCNKKSLRKEYIERIVAQDAMDLLTDEVIEELADMAMTQADRDLKENTRIPELTVKLTEIEQGIANITKAIEKGIASDALLNRLTELEKEKKDLTSQLREEEKYIYRIDRDQVVFWLTKFQGGDIEDEDCRRRIIDLLVNSVTVWDEPDGYKITTAYNLTSCKTRTFRVSEKADSPSGEGFGFGDLSSTKKIRDTLSRVSYFFGSLISFVHPKGN

SEQ ID NO: 1849 - protein, 556 aa, Unknown
  Description of Unknown: Integrase B1850 sequence
  PTHR30461:SF3,SM00857,G3DSA:1.10.10.2600,IPR036162,PF13408, IPR025827,G3DSA:3.40.50.1390,PS51737,IPR006119,IPR038109, PF07508,SSF53041,IPR011109,PTHR30461,PS51736, cd00338,PF00239
MARAAKQDNNSEIIDGVIYARYSEGPNQTEASIEGQVRECKEYAKRNGIRIINVYSDSKHTGTNDNRAEFQKMLRDSRRGGFSVVVVWKIDRFGRNRAEMAQNKALLKLQGVKVVSAKEYIPDSPEGIILESVLEGMAEYYSANLSQNIKRGMKENALHCKSNGSGKSLGYIVDKDGYFEIEPNEATIVKTIFQKYDEGMKIADIWREIVASGAKTKRGKDFTQYGISRVLNNRAYIGEYRYGDIVTPGGMPRIIDDDLFNRVQERRALRKKAPASRRSNSDVDFLLTGKVFCGHCKGTMRGMSGTSKTGRKFYYYACHDKIFKHNKCTKKNVKKEWLETEVTRITKDDILNKETIEFIADRVVEIQRQEQEDKSMLRYYEQQLRDTQSAINNIMKAIEAGIITSSTKSRLFELEEQKSIIEGEIEREKIITPVIEKEQVIFSLERFFSGDINNKEYQRNIIDMFVNKVILYDDKIIITYNISSQNEISVDVVEQAAFAALDECSSKLSLPPPAGACPCTQSALLYVERFFIAAHQFYLKPNHCFAVADISRQGFL

SEQ ID NO: 1850 - protein, 556 aa, Unknown
  Description of Unknown: Integrase B1851 sequence
  PTHR30461:SF3,cd00338,SM00857,G3DSA:1.10.10.2600,IPR036162, PF13408,PS51737,G3DSA:3.40.50.1390,IPR025827,IPR006119, IPR038109,PF07508,IPR011109,SSF53041,PTHR30461, PS51736,Coil,PF00239
MTVKKFPIDLSCLTEEEISQFREDPYTLYNGDQDVAIYLRYSSTGQSDQSIEGQLRDCRAFCKANHYRIVAIYVDRATTARKDVEKRVHLMEMVADSAKQNWEYVIVWKLDRFARNRNDSAIMKMRLRKNGVKVLSATEHLTDSPESIILESVLEGMAEFFSAELSQKVTRGMRESALKCHSVGGHIPLGYKVENHKLVVNPDTAHIVQEAFSLYANGESVADICRKFNSAGYKTAKNTEFNRSSFKAMFRNTRYIGTYTYKDIVIENGIPAIIDKELFETVQRRLSKTATAPARGKAKVDYLLSGKLFCGHCGASMNGESGAGRHGKVYHYYSCYTKKRKLGCDKWPLKKDYIEGIVARDALNLLTDQLIDEIADMAIRQSEQDLINDTHIPQLTAQLSEVEKSIANITAAIEKGIASETLMNRLVQLEHEKKTLNKEIKAEEKFVYRIDRDQIIFWLSQFKYGNIEDEDFRRRLIDLLVNSVTVWDEPDGYKITTAYNLTSCKTKTFRVDKNPAAEEATGFDFGESECTKSPRNHLISRTFAFHKSPFSDTVFF

SEQ ID NO: 1851 - protein, 556 aa, Unknown
  Description of Unknown: Integrase B1852 sequence
  SM00857,G3DSA:1.10.10.2600,IPR036162,PF13408,PS51737, G3DSA:3.40.50.1390,IPR025827,IPR006119,IPR038109,PF07508, SSF53041,IPR011109,PTHR30461,Coil,PS51736, cd00338,PF00239
MNIYYARERLRTGSIFDLKLKVAYYARVSTEKTEQQVSIKHQQEYYEEFIRSNQNWTFSGAYIDDGISGIHAEKREEFQNMIRDAKLGRVDMIITKEISRFARNTLDSIQYTRELLSYGVCVWFQNDGINTIDEDSEFRLTIMAGVAQDELRKLSSRIKFGHARSIQNGVVLGNRIYGYHKKDGKLTIVPEEAEMIRMIFKDYASGTVSTPKLEKKLWDMGYRNFKGGKINRDVIRNIIKNPKYKGYFCGGKVKIVDMFTKKQEFLPESKWVIFKDDGSRVPQIIDEETWEKANEYMKKRSEAIKSHRTSFKNGNLFTGKIFCANDGAPYWMKQHYVRGKEDVRWVCSYKIKNGADSCSSHGIRESDLKKVVASLINESSCNIDEVIKEYLNILRKVINNKPDTGIEKERLQNQIDAIKKKKEKILEYNLNGDIPDEEFISRNKGYTKQIIDLEMEISKLVPEDVELQIAEKQLSKITEELKSFKEVKEEDINRQIIDKLFDKIVVSLSADKQTVCKFYLSTGCSKIRDLGGVVLNTCYLTIRKNDTRYFIGELVA

SEQ ID NO: 1852 - protein, 556 aa, Unknown
  Description of Unknown: Integrase B1853 sequence
  SM00857,G3DSA:1.10.10.2600,IPR036162,PF13408,PS51737, G3DSA:3.40.50.1390,IPR025827,IPR006119,IPR038109,PF07508, SSF53041,IPR011109,PTHR30461,Coil,cd00338, PF00239
MAYRKITDIRDTIGMRAVFYARVSTAEEEQLNAIELQIEENRGCIKDHGWKLVGEYIDRSKSGTMVKGRDDYQRLYEDLYEDLFDIVVIKDQERLQRNTLDWYLFINRVVQTGKLLFMYMDGKFYSPDDALITGVRAIIAEEFSRNLSKKLHNYHDHRIEKARQGQEIALQGSGNVYGWDKKDGKYYINPEQAKVRRLMCEGIMARKGSTLIAKELNDAGYRNTVGKPWKPMDIPKFVYDCKNVGTMIINKERHDFESKQTIKLPKEEWVYVENALPPIVTQEEWDLICKIHEERVIATGSDRRGKKTSGYSFSGKLICGICGAPYWRKQRVSKDEYWVCSTKQTKGRRTRKRDSTMGKAGEINPLGCDNENISYNSLMEIMGVVSERLQANTDTIKQDMINWLTKLRKQLLEANGGHTEVDLQRELSRKSKLLDAYLDGILNKQEYQKKAEELDERIIQLKAETEKNKANSGDIAEIDKVLANIDEEVARYVDGNEKLKVEYLLEHLEQVQIFPDKVIVIVPILSEGIVVEKTQYVSRKKWSGKDNFDESFDHCA

SEQ ID NO: 1853 - protein, 556 aa, Unknown
  Description of Unknown: Integrase B1854 sequence
  PTHR30461:SF3,SM00857,G3DSA:1.10.10.2600,IPR036162,PF13408, PS51737,G3DSA:3.40.50.1390,IPR025827,IPR006119,IPR038109, PF07508,IPR011109,SSF53041,PF00239,PTHR30461, PS51736,Coil,cd00338
MKKFPIDLSCLTEEEISQFQEDPYTLYNGDQNVAIYLRYSSTGQSDQSIEGQLRDCRTFCKANHYRIVAIYVDRATTARKDVEKRVHLMEMISDSAKQNWEYVIVWKLDRFARNRNDSAIMKMRLRKNGVKVLSATEHLTDSPESIILESVLEGMAEFFSAELSQKVTRGMRESALKCHSVGGHIPLGYKVENHKLVVDPDTAHIVQEAFSLYANGESVADICRKFNSAGYKTAKNTEFNRSSFKAMFRNTRYIGTYTYKDIVIENGIPAIIDKELFETVQRRLSKTATAPARGKAKVDYLLSGKLFCGHCGASMNGESGAGRHGKVYHYYSCYTKKRKLGCDKRPLKKDYIEGIVARDALNLLTDHLIDEIADMAIRQSEQDLINDTHIPQLTAQLSEVEKSITNITAAIEKGIASETLMNRLVQLEHEKKTLNKEIKAEEKFVYRIDRDQIVFWLSQFKYGNIEDEDFRRRLIDLLVNSVTVWDEPDGYKITTAYNLTSCKTKTFRVEKNPAAEEATGFDFGESECTLAAAGCKAGFPPLPAAISLPWCSMWLW

SEQ ID NO: 1854 - protein, 556 aa, Unknown
  Description of Unknown: Integrase B1855 sequence
  cd03768,SM00857,G3DSA:1.10.10.2600,IPR036162,PF13408, PS51737,G3DSA:3.40.50.1390,SSF109709,IPR025827,IPR006119, IPR038109,PF07508,IPR011109,SSF53041,PTHR30461, PS51736,PF00239
MKTIRCAVYTRKSTEDGLEKEFNTLEAQRESGENYIKSQAYQGWEIIPTHYDDGGYSGGTLKRPALQQLLRDVEAGMVDMIVVYKIDRLTRSLIDFSKLVEIFDRNQCSFVSVTQNFNTYDSMGRLTLNVLLSFAQFEREVITERIRDKVDASKKKGMWMGGVLPLGYVSVNKKLEIIPEEAKIVRLAFEKYLIFRSEIAVAEWLNNNGYTTLSKGNGKFTHMRVSSMLKNVLYIGKVPHKDKVYNGQHHAIISQELFDEVQKIKSQNRVGRLAPSRFVEHALLKGLIYCDCCQAAMISTKSNKKNKVYEYYTSFRAVKEGFNNCKIGSIPAGEMDNFVLRQIAGIIKSPKILSGLIEQAKIIRPDIKDVQIISKLQDGDDFIQGLSSITLRQLLIMLVQKIRVDVDRIKIMYTELAVSLMDDKMKDDLFPNNINGERNEILYRVCLRRKRGSLKIFAPEKYKPDENNPLYLALIKAFVWQDKMKKENLFIEDLAKSEGLSREYVGKVLRMTYLAPDIVTAIVDGVYPKTLSLRKILESEIPLLWSQQRLKYGFSF

SEQ ID NO: 1855 - protein, 556 aa, Unknown
  Description of Unknown: Integrase B1856 sequence
  SM00857,G3DSA:1.10.10.2600,IPR036162,PF13408,IPR025827, G3DSA:3.40.50.1390,PS51737,IPR006119,IPR038109,PF07508, SSF53041,IPR011109,PTHR30461,Coil,cd00338, PF00239
MAYRKITDIKDTIGMRAVFYARVSTAEEEQLNAIELQIEENRGCIKDHGWKLVGEYIDRSKSGTMVKGRDDYQRLYEDLYEDLFDIVVIKDQERLQRNTLDWYLFINRVVQTGKLLFMYMDGKFYSPDDALITGVRAIIAEEFSRNLSKKLHNYHDHRIEKARQGQEIALQGSGNVYGWDKKDGKYYINPEQAKVRRLMCEGIMARKGSTLIAKELNDAGYRNTVGKPWKPMDIPKFVYDCKNVGTMIINKERHDFESKQTIKLPKEEWVYVENALPPIVTQEEWDLICKIHEERVIATGSDRRGKKTSGYSFSGKLVCGICGAPYWRKQRVSKDEYWVCSTKQTKGRRTRKRDSTMGKAGEINPLGCDNENISYNSLMEIMGVVSERLQANTDTIKHDMINWLTKLRKQLLEANGGHTEADLQRELSRKSKLLDAYLDGILNKQEYQKKAEELDERIIQLKAETEKNKANSGDIAEIDRVLANIDEEVARYVDGNEKLKVEYLLEHLEQIQIFPDKVIVIVPILSEGIVVEKTQYVSREKRSRQDNSFTLPDGTV

SEQ ID NO: 1856 - protein, 556 aa, Unknown
  Description of Unknown: Integrase B1857 sequence
  cd03768,PTHR30461:SF3,SM00857,G3DSA:1.10.10.2600,IPR036162, PF13408,IPR025827,G3DSA:3.40.50.1390,PS51737,IPR006119, IPR038109,PF07508,SSF53041,IPR011109,PTHR30461, PS51736,Coil,PF00239
MNTIAIYTRKSKFTGKGESIENQIEKCKKFIEFKFNIDSENVNIFIDEGFSGKNENRPQYQLMMEKIKKKEIDSIVIYQLNRLGRNARDIHNTMQLCDDLGVIIYSATEGFDSSTSFGRAVIGILASLAQLEREQLAERVKDNMYTLAKMGRWLGGQSPLGFDGSREYYIDETGKERSITKLKKNEEELKLVKLLYDKYLEEKSLSQVGKWALINHLTGKNGGNLNKNAINVILQNPVYVKSSKEVFEYLSNEGYEVCGEPNGNGLLRYGKDDEPIVATAKHKGVIPSDQWIEVQKILKDNAYKAPRMGKTNTALLTGLLRCKCGSTMRISYGQKRKDGTKPFYYICNMKINSGGARCNLKNLNGNLFEKNFIQFLKNYSKETLFTELQKLLNNSKDLESTISSNKIDVEIEKSNKAIKQILNKLKLTDDDELSKILLQEIKVENNKLKALSKQKEELLNDQSEVVITQSEVLAILDDLDNFQKTFDDLNLEDKQKALKSLIESITLTDDKFIVDFNIKKKLDNAIKKLSSLFAKYKSSQLRHPCRSYMYRHPSWP

SEQ ID NO: 1857 - protein, 556 aa, Unknown
  Description of Unknown: Integrase B1858 sequence
  PTHR30461:SF3,SM00857,G3DSA:1.10.10.2600,IPR036162,PF13408, PS51737,G3DSA:3.40.50.1390,IPR025827,IPR006119,IPR038109, PF07508,IPR011109,SSF53041,PTHR30461,Coil, PS51736,cd00338,PF00239
MKKFPIDLSCLTEEEISQFQEDPYTLYNGDQNVAIYLRYSSTGQSDQSIEGQLRDCRTFCKVNHYRIVAIYVDRATTARKDVEKRVHLMEMISDSAKQNWEYVIVWKLDRFARNRNDSAIMKMRLRKNGVKVLSATEHLTDSPESIILESVLEGMAEFFSAELSQKVTRGMRESALKCHSVGGHIPLGYKVENHKLVVDPDTAHIVQEAFSLYANGESVAAICRKFNSAGYKTAKNTEFNRSSFKAMFRNTRYIGTYTYKDIVIENGIPAIIDKELFETVQRRLSKTATAPARGKAKVDYLLSGKLFCGHCGASMNGESGAGRHGKVYHYYSCYTKKRKLGCDKRPLKKDYIEGIVARDALNLLTDQLIDEIADMAIRQSEQDLINDTHIPQLTAQLSEVEKSITNITAAIEKGIASETLMNRLVQLEHEKKTISKEIKAEEKFVYRIDRDQIVFWLSQFKYGNIEDENFRRRLIDLLVNSVTVWDEPDGYKITTAYNLTSCKTKTFRVEKNPAAEEATGFDFGESECTKSPRNRLISRAFSLVTETTGSAGGGTS

SEQ ID NO: 1858 - protein, 556 aa, Unknown
  Description of Unknown: Integrase B1859 sequence
  PTHR30461:SF3,SM00857,G3DSA:1.10.10.2600,IPR036162,PF13408, PS51737,G3DSA:3.40.50.1390,IPR025827,IPR006119,IPR038109, PF07508,SSF53041,IPR011109,PTHR30461,Coil, PS51736,cd00338,PF00239
MRVSVNLNAQKPDTTTNAVIYARYSSHGQTEQSIEGQLAKGHEYAAAQGYTVVHEYIDRAMTGRNDNREAFQKMLSDTGKHQFQVVIVWKVDRFGRNREEIAFNKHTCKKNGVRVEYVAESLPNSPEAVILESVLEGMAEYYSIQLSQNIRRGQLESAKKCQCVGGSVPLGYTLDSDKHFVIDPQTAPVVKKIFDLYAEGATISEITGQLNEQGIRTARKQLFTKNSLTKLLKNEKYIGIYAYKDVVRVEGGVPAIVDKSTFDRVQELLKINRRAPSHTWTKVEYLLTDKLFCGHCGSPMVGESGFSHTGAKYSYYGCIKRRREKACDKKPVRQDWIEALVLDETVKLLHDDELMEYIIDRTWEYYQITDKVQEEKAVLEAQLAEVDKAINNLVRAIEAGIFNAATKSRMDELDAQKAALTASLADLELTSGIRITRDHIEYFLLRLRDLDVKDRECQKRLVQTFVNAVFVYDDGRVKITYNYSGQSSTITLNQIASAEKGKGFVCCLPCSTFSPRFRVGSRGIFCFLGKTGRKYTTNFSCFVLQWKRKRQRGNGK

SEQ ID NO: 1859 - protein, 556 aa, Unknown
  Description of Unknown: Integrase B1860 sequence
  SM00857,G3DSA:1.10.10.2600,IPR036162,PF13408,PS51737, G3DSA:3.40.50.1390,IPR025827,IPR006119,IPR038109,PF07508, IPR011109,SSF53041,PTHR30461,Coil,PS51736, cd00338,PF00239
MNIYYARERLRTGSIFDLKLKVAYYARVSTEKAEQQVSIKHQQEYYEEFIRSNQNWTFSGAYIDDGISGIHAEKREEFQNMIRDAKLGRVDMIITKEISRFARNTLDSIQYTRELLSYGVCVWFQNDGINTIDEDSEFRLTIMAGVAQDELRKLSSRIKFGHARSIQNGVVLGNRIYGYHKKDGKLTIVPEEAEMIRMIFKDYASGTVSTPKLEKKLWDMGYRNFKGGKINRDVIRNIIKNPKYKGYFCGGKVKIVDMFTKKQEFLPESKWVIFKDDGSRVPQIIDEETWEKANEYMKKRSEAIKSHRTSFKNGNLFTGKIFCANDGAPYWMKQHYVRGKEDVRWVCSYKIKNGADSCSSHGIRESDLKKVVASLINESSCNIDEFIKEYLSILRKVINNKPDTGIEKERLQNQIDAIKKKKEKILEYNLNGDIPDEEFISRNKGYTKQIIDLEMEISKLVPEDVELQIAEKQLSKITEELKSFKEVKEEDINRQIIDNLFDKIVVSLSADKQTVCKFYLSTGCSKIRDLGGVVLNTCYLTIRKNDTRHFIGELVA

SEQ ID NO: 1860 - protein, 556 aa, Unknown
  Description of Unknown: Integrase B1861 sequence
  PTHR30461:SF3,SM00857,G3DSA:1.10.10.2600,IPR036162,PF13408, IPR025827,G3DSA:3.40.50.1390,PS51737,IPR006119,IPR038109, PF07508,SSF53041,IPR011109,PTHR30461,PS51736, cd00338,PF00239
MARAAKQDSNSEIIDGVIYARYSEGPNQTEASIEGQVRECKEYAKRNGIRIINVYSDSKHTGTNDNRAEFQKMLRDSRRGGFSVVVVWKIDRFGRNRAEMAQNKALLKLQGVKVVSAKEYIPDSPEGIILESVLEGMAEYYSANLSQNIKRGMKENALHCKSNGSGKSLGYIVDKDGYFEIEPNEATIVKTIFQKYDEGMKIADIWREIVASGAKTKRGKDFTQYGISRVLSNRAYIGEYRYGDIVTPGGMPRIIDDDLFNRVQERRALSKKETPHRRSSSPADFLLTGKVYCGHCKSSMRGDSGTSKNGNSFYFYTCHGKRYKHNGCKKKNVRKEWLETEVTRLTVENILNDEVISFIADRVVKIQKEEQENKSMLHYYEQQLRDTQSAINNIMKAIEAGIITSSTKSRLFELEEQKSIIEGEIEREKIITPVIEKEQVIFSLERFFGGDINNKEYQRNIIDMFVNKVILYDDKIIITYNISSQNEISVDVVEQAAFAALDECSSKLSLAPPAGACPCTQSALLYVERFFIAAHQFYLKPNHCFAVADISRQGFL

SEQ ID NO: 1861 - protein, 556 aa, Unknown
  Description of Unknown: Integrase B1862 sequence
  SM00857,G3DSA:1.10.10.2600,IPR036162,PF13408,PS51737, G3DSA:3.40.50.1390,IPR025827,IPR006119,IPR038109,PF07508, SSF53041,IPR011109,PTHR30461,Coil,cd00338, PF00239
MAYRKITDIKDTIGMRAVFYARVSTAEEEQLNAIELQIEENRGCIKDHGWKLVGEYIDRSKSGTMVKGRDDYQRLYEDLYEDLFDIVVIKDQERLQRNTLDWYLFINRVVQTGKLLFMYMDGKFYSPDDALITGVRAIIAEEFSRNLSKKLHNYHDHRIEKARQGQEIALQGSGNVYGWDKKDGKYYINPEQAKVRRLMCEGIMARKGSTLIAKELNDAGYRNTVGKPWKPMDIPKFVYDCKNVGTMIINKERHDFESKQTIKLPKEEWVYVENALPPIVTQEEWDLICKIHEERVIATGSDRRGKKTSGYSFSGKLVCGICGAPYWRKQRVSKDEYWVCSTKQTKGRRTRKRDSTMGKAGEINPLGCDNENISYNSLMEIMGVVSERLQANTDTIKQDMINWLTKLRKQLLEANGGHTEADLQREISRKSKLLDAYLDGILNKQEYQKKAEELDERIIQLKAETEKNKANSGDIAEIDKVLANIDEEVARYIDGNEKLKVEYLLEHLEQVQIFPDKVIVIVPILSEGIVVEKTQYVSREKRSRKIYVSASGSRDP

SEQ ID NO: 1862 - protein, 556 aa, Unknown
  Description of Unknown: Integrase B1863 sequence
  PTHR30461:SF3,SM00857,G3DSA:1.10.10.2600,IPR036162,PF13408, PS51737,IPR025827,G3DSA:3.40.50.1390,IPR006119,IPR038109, PF07508,IPR011109,SSF53041,PTHR30461,Coil, PS51736,cd00338,PF00239
MKKKFPIDLSMLTPEEIDQFREDPYTLYHGDIEVSLYLRFSSERQKEQSIEGQLRDCRAFCKRSGYRIVAIYVDRALTARKDAEKRVQFQQMIVDSEKRHWQYLVVWKLDRFARNRNDSAIYKMRLKKNGVRVISATENISENPEGIILEAVLEGMAEFYSAELSQKITRGMRESAMKCHSIGGHVPLGYKIKDHKLVIDPVGAAIVQEAFQLYANGDTVADICRLFNNKGYRTAKGAEFNRNSFKSMFKNERYIGIYTYRDLRIEDGVPAIVDKELFEIVQQRLRKNGEAPARGKAKVDYLLSGKLFCGHCGASMNGESGTGRHGGKFHYYSCYNRKRHRNCDKKPLKKEYIERVVVEDALTLLTDEVIEELADMAISQSDIDLKENTRVPELTAKCDEIDKAIGNITKAIEKGIASDALMERLMVLEKDKKDALRQLREEEKYIYRIDRDQVIYWLYQFKEGDIEDENFRRHIIDLLVNSVTVWDEPDGYRITSAYNLTSAPTKTFKVDGAFSGEGFGFEKLTSTIKSYRYRCVWRKARRINRFRAFSSPDFFF

SEQ ID NO: 1863 - protein, 556 aa, Unknown
  Description of Unknown: Integrase B1864 sequence
  PTHR30461:SF3,IPR036162,PS51737,IPR011109,PTHR30461, PF00239,G3DSA:1.10.10.2600,PF14287,IPR006119,SSF53041, IPR025378,SM00857,IPR025827,cd03770,IPR038109, PS51736,PF13408,G3DSA:3.40.50.1390,PF07508,Coil
MVMMNGMEYTGMDAILAGSFRAAIYCRLSKDDDLDGESASIANQRDMLENYCEKQGWEVVAVYQDDGYTGLNMERPDLKRMLKAIERRQANLVITKDLSRLGRNYLQTGFLIEDFFPRHGVRYIAMNDGIDTMRDNNDIAPFKNILNEMYSKDISKKVHSSYLLKAQKGQFTGCLAPFGYQKDPEDKNHLLIDEETAPIVRRLFAWALEGHGPNYIRRRLEEEKIPCPTYWNRVRGLRNVSTKWEKKDPVNGRYIWDFTVIKDILMNPVYTGAIASQKKEYRFKIGTIGEKKPEEWIVVENQHEPLVDRKTFDIVQRKLKSRQRPRQTGEISLFAGLIKCGECGKSLTIRYTNEKHPKQIYSCKTYNAYGKQHCSQHRVEYDTLYRLVLNKIRECARAALMDGEAVAGKLSDTCEAEQKGQREALERSLAKDEERIDVLEKMVLRLYEDMVAGRISEANFNLLMEKTQKEQAELKTRVEEGRKKLADEIRLACDARQWVEAIQEYADITELDAATLNRLIKEIVVHESIDSDKTRHISIEIHFNLKPIPEVEQVTA

SEQ ID NO: 1864 - protein, 556 aa, Unknown
  Description of Unknown: Integrase B1865 sequence
  SM00857,G3DSA:1.10.10.2600,IPR036162,PF13408,PS51737, IPR025827,G3DSA:3.40.50.1390,IPR006119,IPR038109,PF07508, IPR011109,SSF53041,PTHR30461,Coil,PS51736, cd00338,PF00239
MNIYYARERLRTGSIFDLKLKVAYYARVSTEKVEQQVSIKHQQEYYEEFIRSNQNWTFSGAYIDDGISGIHAEKREEFQNMIRDAKLGRVDMIITKEISRFARNTLDSIQYTRELLSYGVCVWFQNDGINTIDEDSELRLTIMAGVAQDELRKLSSRIKFGHARSIQNGVVLGNRIYGYHKKDGKLTIVPEEAEMIRMIFRDYASGTMSTPKLEKKLWDMGYRNFKGGKINRDVIRNIIKNPKYKGYFCGGKVKIVDMFTKKQEFLPESKWVIFKDDGSRVPQIIDEETWEKANEYMKKRSEAIKSHRTSFKNGNLFTGKIFCANDGAPYWMKQHYVRGKEDVRWVCSYKIKNGADSCSSHGIRESDLKKVVASLINESSCNIDEVIKEYLNIIRKVINNKPDTGIEKERLQNQIDAIKKKKEKILEYNLNGNIPDEEFISRNKDYTKQIIDLEMEISKLVPEDVELQITEKQLSKITEELKSFKEVKEEDINRQIIDKLFDKIVVSLSADKQTVCKFYLSTGCLKIRDLGGVVLNTCYLTIRKNDTRHFIGELVA

SEQ ID NO: 1865 - protein, 556 aa, Unknown
  Description of Unknown: Integrase B1866 sequence
  cd03768,PTHR30461:SF3,SM00857,G3DSA:1.10.10.2600,IPR036162, PF13408,IPR025827,G3DSA:3.40.50.1390,PS51737,IPR006119, IPR038109,PF07508,SSF53041,IPR011109,PTHR30461, PS51736,Coil,PF00239
MNTIAIYTRKSKFTGKGESIENQIEKCKKFIEFKFNIDSENVNIFIDEGFSGKNENRPQYQLMMKKIKKKEIDSIVIYQLNRLGRNARDIHNTMQLCDDLGVIIYSATEGFDSSTSFGRAVIGILASLAQLEREQLAERVKDNMYTLAKMGRWLGGQSPLGFDGSREYYIDETGKERSITKLKKNEEELKLVKLLYDKYLEEKSLSQVGKWALINHLTGKNGGNLNKNAINVILQNPVYVKSSKEVFEYLSNEGYEVCGEPNGNGLLRYGKDDEPIVATAKHKGVIPSDQWIEVQKILKDNAYKAPRMGKTNTALLTGLLRCKCGSTMRISYGQKRKDGTKPFYYICNMKINSGGARCNLKNLNGNLFEKNFIQFLKNYSKETLFAELQKLLNNSKDLESTISSNKIDIEIEKSNKAIKQILNKLKLTDDDELSKILLQEIKVENNKLKVLSKQKEELLNDQSEVVITQSEVLAILDDLDNFQKTFDDLNLEDKQKALKSLIESITLTDDKFIVDFNIKKKLDNAIKKLSSLFAKYKSSQLRHPCRSYMYRHPSWP

SEQ ID NO: 1866 - protein, 556 aa, Unknown
  Description of Unknown: Integrase B1867 sequence
  PTHR30461:SF3,cd00338,SM00857,G3DSA:1.10.10.2600,IPR036162, PF13408,IPR025827,PS51737,G3DSA:3.40.50.1390,IPR006119, IPR038109,PF07508,SSF53041,IPR011109,PTHR30461, mobidb-lite,Coil,PF00239
MPRKPAKHPAKPKRGKKLEIEEPGVLYGRYSSHNQKDISVEQQFEKGYELAAEYGIRIIDTYADRAVSGRTDKRRDFQRMMTDAAKGKFRYVIAWKSNRMGRNMLEALINEARLQDLGVRVLYVEEDFDDTAAGRFAARSMMNVNQFYSENMAEDIKRGLYDNAANCMVANGHLPYGYKADETLHYAIDEPKAAVIREIFTRVSCGEAFVDIMASLNARGIKTSYGRPWGRSSFQKILSNERYRGIYIYGDVRKEGGIPRIVSDELYFKVQEVITTKKNPQGRHRVNGDYLLTGKLFCGHCKSPMTGVSGTGRSGNLHYYYVCQKRRTEKTCDKKNVRRDEIELQVAQAIKDYALKDDVIEWIADSTVAYNERKEAESKVGILEDQLAGTEHGIKNIMSAIEQGIITETTKSRLVELESERATIKAKIAAARADIVTVSRDDIISGLEMFRDGDVHDKKYQARLFDTFLVAVYAYDDDLRLVFSFSGNKNTIQIPIESAVNAVENNEAECSFKLCSAPPKQSQTNQAGSPGFCSAPTVYMTGGIFVLVFPLAYAKK

SEQ ID NO: 1867 - protein, 556 aa, Unknown
  Description of Unknown: Integrase B1868 sequence
  PTHR30461:SF3,SM00857,G3DSA:1.10.10.2600,IPR036162,PF13408, PS51737,IPR025827,G3DSA:3.40.50.1390,IPR006119,IPR038109, PF07508,IPR011109,SSF53041,PTHR30461,Coil, cd00338,PF00239
MPRKPAKHPAKPKRGKKLEIEEPGVLYGRYSSHNQKDISVEQQFEKGYELAVEYGIRIIDTYADRAVSGRTDKRRDFQRMMTDAAKGKFRYVIAWKSNRMGRNMLEALINEARLQDLGVRVLYVEEDFDDTAAGRFAARSMMNVNQFYSENMAEDIKRGLYDNAANCMVANGHLPYGYKADETLHYAIDEPKAAVIREIFTRVSCGEAFVDIMASLNARGIKTSYGRPWGRSSFQKILSNERYRGIYIYGDVRKEGGIPRIISDELYFKVQEVITTKKNPQGRHRVNGDYLLTGKLFCGHCKSPMTGVSGTGRSGNLHYYYVCQKRRTEKTCDKKNVRRDEIELQVAQAIKDYALKDDVIEWIADSTVAYNERKEAESKVGILEDQLAGTEHGIKNIMSAIEQGIITETTKSRLVELESERATIKANIAAARADIVTVSRDDIISGLEMFRDGDVHDKKYQARLFDTFLVAVYAYDDDLRLVFSFSGNKNTIQIPIESAVNAVENNEAECSFKLCSAPPKQSQTNHAGSPGFCSAPTIYMVSDVFVLVCPFSHARK

SEQ ID NO: 1868 - protein, 556 aa, Unknown
  Description of Unknown: Integrase B1869 sequence
  SM00857,G3DSA:1.10.10.2600,IPR036162,PF13408,IPR025827, PS51737,G3DSA:3.40.50.1390,IPR006119,IPR038109,PF07508, SSF53041,IPR011109,PTHR30461,Coil,cd00338, PF00239
MAYRKITDIKDTIGMRAVFYARVSTAEEEQLNAIELQIEENRGCIKDHGWKLVGEYIDRSKSGTMVKGRDDYQRLYEDLYEDLFDIVVIKDQERLQRNTLDWYLFINRVVQTGKLLFMYMDGKFYSPDDALITGVRAIIAEEFSRNLSKKLHNYHDHRIEKARQGQEIALQGSGNVYGWDKKDGKYYINSEQAKVRRLMCEGIMARKGSTLIAKELNDAGYRNTVGKPWKPMDIPKFVYDCKNVGTMIINKERHDFESKQTIKLPKEEWVYVENALPPIVTQEEWDLICKIHEERVIATGSDRRGKKTSGYSFSGKLVCGICGAPYWRKQRVSKDEYWVCSTKQTKGRRTRKRDSTMGKAGEINPLGCDNENISYNSLMEIMGVVSERLQANTDTIKHDMINWLTKLRKQLLEANGGHTEADLQRELSRKSKLLDAYLDGILNKQEYQKKAEELDERIIQLKAETEKNKANSGDIAEIDKVLANIDEEVSRYVDGNEKLKVEYLLEHLEQVQIFPDKVIVIVPILSEGIVVEKTQYVSREKRCGKNNHFTDDFRAY

SEQ ID NO: 1869 - protein, 556 aa, Unknown
  Description of Unknown: Integrase B1870 sequence
  cd03768,SM00857,G3DSA:1.10.10.2600,IPR036162,PF13408, PS51737,G3DSA:3.40.50.1390,SSF109709,IPR025827,IPR006119, IPR038109,PF07508,IPR011109,SSF53041,PTHR30461, PS51736,PF00239
MKTIRCAVYTRKSTEDGLEKEFNTLEAQRESGENYIKSQAYQGWEIIPTHYDDGGFSGGTLKRPALQQLLKDVEAGMVDMIVVYKIDRLTRSLIDFSKLVEIFDRNQCSFVSVTQHFNTYDSMGRLTLNVLLSFAQFEREVITERIRDKVDASKKKGMWMGGVLPLGYVSVNKKLEIIPEEAKIVRLAFEKYLIFRSEIAVAEWLNNNGYTTLSKGNGKFTHIRVSSMLKNVLYIGKVPHKDKVYDGQHHAIISQELFDEVQKIKSQNRIGRLAPSRFVEHALLKGLIYCDCCQAAMISTKSNKKNKVYEYYTSFRAVKEGFNNCKIGSIPAGEMDNFVLRQIAGIIKSPKILSGLIEQAKIIRPDIKDVQIISKLKDGDDFIQRLSSITLRQLLIMLVQKIRVDVDRIKIMYTELAVSLMDDKMKDDLFPNNINGERNEILYRVCLRRKRGSLKIFAPEKYKPDENNPLYLALIKAFVWQDKMKKENLFIEDLAKSEGLSREYVGKVLRMTYLAPDIVTAIVDGVYPKTLSLRKILETEIPLLWSQQRLKYGFSF

SEQ ID NO: 1870 - protein, 556 aa, Unknown
  Description of Unknown: Integrase B1871 sequence
  cd03768,SM00857,G3DSA:1.10.10.2600,IPR036162,PF13408, PS51737,G3DSA:3.40.50.1390,SSF109709,IPR025827,IPR006119, IPR038109,PF07508,IPR011109,SSF53041,PTHR30461, PS51736,Coil,PF00239
MKTMRCAIYTRKSTEDGLDKEFNTLEAQRESGENYIKSQAYQGWEIIPTHYDDGGFSGGTLKRPALQQLLKDVEAGMVDMIVVYKIDRLTRSLIDFSKLVEVFDRNQCSFVSVTQNFNTYDSMGRLTLNVLLSFAQFEREVITERIRDKVDASKKKGMWMGGNLPIGYTTINKKLTVISDEAAIVRLAFEKYLLFRSETMVAEWLNNNGYTTMGKGNGKFTHARVSKMLRNVLYVGKVPHKDKVYDGQHEAIVSQELFDKVQQIKKQNRAGRLSPSRFVEHALLKGFIYCDCCQSAMVSTKSNKKNKVYEYYTSARAVKEGFNNCHVGSVPAGEMDNFVLRQMAQIIKSPKILSGLIEQAKIARPDIKDVQIIDKMKGGDDFMHHLSAITQRQLLILLIKKVRVDVDRIKIMYTDLAIELMDGEFKEQLFPNNIDGEENEVMHRVCLRRKRGSLKIFAPEKYKPDENNPLYLALIKAFVWQDKIKKEGLFIDGLAKSEGLSREYVGKVLRLTYLAPDIVTAIIDGVYPKTLSLNKVLESEIPILWRDQRIKYGFSV

SEQ ID NO: 1871 - protein, 556 aa, Unknown
  Description of Unknown: Integrase B1872 sequence
  PTHR30461:SF3,IPR036162,PS51737,IPR011109,PTHR30461, PF00239,G3DSA:1.10.10.2600,IPR006119,SSF53041,cd00338, SM00857,IPR025827,IPR038109,PS51736,mobidb-lite, PF13408,G3DSA:3.40.50.1390,PF07508,Coil
MPRAAQAAGAAFDGTPRAVIYTRYSSTHQRERSIEDQIADCRAYAERCGLMVVGIYADRAISGKTDERPDFQRMIDDSKKRQFDRVIVWKLDRFARNRYDSALYKHKLKQNGVSVLSAMENIGEGDESIILEAILEASAEYYSRDLRKKVLRGMTTSAKKGLHNTGSVPYGYRLEGESAVPDGDRAEFVKHVFEAYAKGETPAELYREMQSRGLDTKVNGRKVSDNIIGSILRNEKYTGRGMWRGIPVEWPRLIDDELFEAARARTEKNRRAPAAYKAAEPFILCGKAFCGYCGAPLMSGGGKGRSGKYYRHYICRTKKRERACGKKTEDKDFLEWYIVEQTCAYVLAPERLEYIAERVVECYKESFDGQRVSALEARIAKLDRDLDKTTDLLFAAPSAAAVDRINKHVVELEAQKSELEAELSGLKIAAAITYTRDEVVAWLKQFCNGDPLEAEFRRRIVETFINSVYVYDDRIVIYFNVRGGKQISYAEMLESVGDVEPLPPGPENEKSGGPDNGTAANNSKERFLHGKNTEQTTESAVRFCSGLVHQDSIIRT

SEQ ID NO: 1872 - protein, 556 aa, Unknown
  Description of Unknown: Integrase B1873 sequence
  PTHR30461:SF3,cd00338,SM00857,G3DSA:1.10.10.2600,IPR036162, PF13408,PS51737,IPR025827,G3DSA:3.40.50.1390,IPR006119, IPR038109,PF07508,IPR011109,SSF53041,PTHR30461, mobidb-lite,Coil,PF00239
MPKKPTKHPAKPKRGKKLETEEPGVLYGRYSSHNQKDISVEQQFEKGYELAAEYGIKIIDTYADRAVSGRTDKRKDFQRMMSDAAKGKFRYVIAWKSNRMGRNMLEALINEARLQELGVRVLYVEEDFDDTAAGRFAARSMMNVNQFYSENMAEDIRRGLYDNASNCMVANGHLPYGYKRDDTLHYVIDEPKAAVIREIFTRVAAGEPFVDIMSSLNARGIKTSYNRPWGRSSFQKILSNERYRGIYIYGDVRKEDGIPRIISDELFFKVQEVITTKKNPQGRHRVNGDYLLTGKLFCGKCKSPMVGISGTGRSGKLHYYYVCQKHRTEKTCDKKNVRRDEIELQVAQAIKDYALKDDVIEWIADSTVAYNERKEAESKVGILEDQLAGTERGIKNIMSAIEQGIITETTKSRLVELESERATIKAKIAAARADIVTVSRDDIISGLEMFRDGDVHDKKYQARLFDTFLVAVYVYDDDLRLVFSFSGSKNTVQIPIESAVNAVENNEAKCSFKLCSAPPKQSQMNHAGSPGFCYAPTIYMVSGIFVLVCPFDHARK

SEQ ID NO: 1873 - protein, 556 aa, Unknown
  Description of Unknown: Integrase B1874 sequence
  SM00857,G3DSA:1.10.10.2600,IPR036162,PF13408,PS51737, G3DSA:3.40.50.1390,IPR025827,IPR006119,IPR038109,PF07508, IPR011109,SSF53041,PTHR30461,Coil,PS51736, cd00338,PF00239
MNIYYARERLRTGSIFDLKLKVAYYARVSTEKAEQQVSIKHQQEYYEEFIRSNQNWTFSGAYIDDGISGIHAEKREEFQNMIRDAKLGRVDMIITKEISRFARNTLDSIQYTRELLSYGVCVWFQNDGINTIDEDSEFRLTIMAGVAQDELRKLSSRIKFGHARSIQNGVVLGNRIYGYHKKDGKLTIVPEEAEMIRMIFRDYASGTMSTPKLEKKLWDMGYRNFKGGKINRDVIRNIIKNPKYKGYFCGGKVKIVDMFTKKQEFLPESKWVIFKDDGSRVPQIIDEETWEKANEYMKKRSEAIKSHRTSFKNGNLFTGKIFCANDGAPYWMKQHYVRGKEDVRWVCSYKIKNGADSCSSHGIRESDLKKVVASLINESSCNIDEVIKEYLNILKKVINNKPDTGIEKERLQNQIDAIKKKKEKILEYNLNGNISDEEFISRNKGYTKQIIDLEMEISKLVPEDVELQIAEKQLSKITDELKSFKEVKEEDINRQIIDKLFDKIVVSLSADKQTVCKFYLSTGCLKIRDLGGVVLNTCYLTIRKNDTRHFIGELVA

SEQ ID NO: 1874 - protein, 556 aa, Unknown
  Description of Unknown: Integrase B1875 sequence
  cd03768,SM00857,G3DSA:1.10.10.2600,IPR036162,PF13408, IPR025827,G3DSA:3.40.50.1390,PS51737,SSF109709,IPR006119, IPR038109,PF07508,SSF53041,IPR011109,PTHR30461, PS51736,PF00239
MKTMRCAIYTRKSTEDGLDKEFNTLEAQRESGENYIKSQAYQGWEIIPTHYDDGGFSGGTLKRPALQQLLKDVEAGMVDMIVVYKIDRLTRSLIDFSKLVEVFDRNQCSFVSVTQNFNTYDSMGRLTLNVLLSFAQFEREVITERIRDKVNASKKKGMWMGGNLPIGYTTIHKKLTIIPDEAAIVRLAFEKYLLFRSETMVAEWLNNNGYTTMGKGNEKFTHARVSKMLRNVLYVGKVPHKDKVYDGQHEAIVSQELFDKVQQIKKQNRAGRLSPSRFVEHALLKGFIYCDCCQSAMVSTKSNKKNKVYEYYTSARAVKEGFNNCHVGSVPAGEMDNFVLRQMAQIIKSPKILSGLIEQAKIARPDVKDVQIIDKMKDGDDFMHHLSAITQRQLLLLLIKKVRVDVDRIKIMYTDLAIELMDGEFKEQLFPNNIDGEENEVMHRVCLRRKRGSLKIFAPEKYKPDENNPLYLALIKAFVWQDKIKKEGLFIDALAKSEGLSREYVGKVLRLTYLAPDIVTAIIDGVYPKTLSLNKVLESEIPILWRDQRIKYGFSV

SEQ ID NO: 1875 - protein, 556 aa, Unknown
  Description of Unknown: Integrase B1876 sequence
  SM00857,G3DSA:1.10.10.2600,IPR036162,PF13408,PS51737, G3DSA:3.40.50.1390,IPR025827,IPR006119,IPR038109,PF07508, IPR011109,SSF53041,PTHR30461,Coil,PS51736, cd00338,PF00239
MNIYYARERLRTGSIFDLKLKVAYYARVSTEKAEQQVSIKHQQEYYEEFIRSNQNWTFSGAYIDDGISGIHAEKREEFQNMIRDAKLGRVDMIITKEISRFARNTLDSIQYTRELLSYGVCVWFQNDGINTIDEDSEFRLTIMAGVAQDELRKLSSRIKFGHARSIQNGVVLGNRIYGYHKKDGKLTIVPEEAEMIRMIFRDYASGTMSTPKLEKKLWDMGYRNFKGGKINRDVIRNIIKNPKYKGYFCGGKVKIVDMFTKKQEFLPESKWVIFKDDGSRVPQIIDEETWEKANEYMKKRSEAIKSHRTSFKNGNLFTGKIFCANDGAPYWMKQHYVRGKEDVRWVCSYKIKNGADSCSSHGIRESDLKKVVASLINESSCNIDEVIKEYLNILRKVINNKPDTGIEKERLQNQIDAIKKKKEKILEYNLNGNIPDEEFISRNKGYTKQIIDLEMEISKLVPEDVELQIAEKQLSKITEELKSFKEVKEEDINRQIIDKLFDKIVVSLSADKQTVCKFYLSTGCLKIRDLGGVVLNTCYLTIRKNDTRHFIGELVA

SEQ ID NO: 1876 - protein, 556 aa, Unknown
  Description of Unknown: Integrase B1877 sequence
  PTHR30461:SF3,SM00857,G3DSA:1.10.10.2600,IPR036162,PF13408, IPR025827,PS51737,G3DSA:3.40.50.1390,IPR006119,IPR038109, PF07508,SSF53041,IPR011109,PF00239,PTHR30461, PS51736,Coil,cd00338
MDILKTREQLRSCSIYDLPLRVTFYARVSTEKDAQLNSLDNQISFYSNMIKKNPNWEYVEGYIDEGLSAITTEKRENFHRMVTDGENGEFDMIITKEISRFARNTLDSIRFTRELLHFGVAVFFQNDNINTLDEDSELRLTIMSSIAQDELRKLSSRIKFGHQQAIKDHVVLGNSRIFGYSKDNKRLVIDEDEAKMVRELFELYATNEYSMKQIENIFWEKGYRNHNGNKIAHTTMSGMISNPKYKGYYVGNKVKVVDMFTKKQKFLPPEDWVMFKDETGEIVPAIVSEELWDKANDVLERRSKDVKNRQGKCNHGNLLTGKLFCTDCGATYYRRDAKDRQGNKNSKWICSGKIKNGAESCKSFPIYESDVVPILLEVFKETSCDVEELINQYIEMYKSLSQPEEVGRRLDELKKKMDLEQKKKSKLLGYNVSGQISDRDFISLTKQCSNEIALCEKEISALENEMQTRNDFKKRIEEMRRTLKRASEDANSGVINHSFVEKYIDKIYVTPIDETHMEMKIKLFTNETTTKYLENLRVRTGHTFKKMIESYENSMK

SEQ ID NO: 1877 - protein, 555 aa, Unknown
  Description of Unknown: Integrase B1878 sequence
  SM00857,G3DSA:1.10.10.2600,IPR036162,PF13408,PS51737, IPR025827,G3DSA:3.40.50.1390,IPR006119,IPR038109,PF07508, IPR011109,SSF53041,PTHR30461,Coil,PS51736, cd00338,PF00239
MLLLLDINFNRTFEPNYRLIKNRLLRQQEPASNTSEDASQIQQKYCIIFGAAMQAEHPFYFWLLFLYSFLHTTKQEGDIMAKLRNGALYIRVSTADQTELSPDAQQRLLLDYAKKNGIIISKDYVFEESVSGRHADKRPKFQEMIGIAKQESHPIDVILVWKYSRFARNQEESIVYKSLLKKSNVDVISISEPLIDGPFGTLIERIIEWMDEYYSIRLSGEVIRGMKEKALKHGYQTTPCLGYDAVGGGKPFVINEEEYKIVQYIMDQYDLYDQDATAIARKCNDLGFRSKRGNLFEQRNVDLILKNPFYAGTVVWNGISFEGSHETRLSKERFEKRIALMRARRRPAKARNISTCKHWLSGLLRCSVCGATLSLAGSGSYRYFQCWKYSKGFHTGSQSLSAAKAEAAVCDYFDRILAGADFTYTVRNIPDQKESDELDLLRQELDQIAVKEARVKLAYENGIDTLEEYKENRRRLKESREELQEKIDDATAATQPEDSDSVAREALLKEIRSVSEILKDPAESYERKGLLLRSIVDGITYDKEKNRLYFNFFIS

SEQ ID NO: 1878 - protein, 555 aa, Unknown
  Description of Unknown: Integrase B1879 sequence
  PTHR30461:SF3,SM00857,G3DSA:1.10.10.2600,IPR036162,PF13408, PS51737,G3DSA:3.40.50.1390,IPR025827,IPR006119,IPR038109, PF07508,IPR011109,SSF53041,PTHR30461,Coil, cd00338,PF00239
MARTATKHPAKPKRGKKLEAEEPGVLYGRYSSHNQKDISVEQQFEKGYGLAGEYGIRIVETYADRAVSGRTDKRKDFQRMMADAAKGKFRYVIAWKSNRMGRNMLEALVNEAKLQELGVRVLYVEEDFDDTAAGRFAARSMMNVNQFYSENMAEDIKRGLYDNASNCMVANGHLPYGYKRDDTLHYVIDEAKAAVIREIFVRVSCGEPLVDIYDSLNARGIKTSYGRPWGRSSFQKILSNERYRGIYIYGDVRKEGGIPRIVSDELYFKVQEVLKTKKNPQGRHRVNGDYLLTGKLFCGNCKSPMIGISGTGRTGKLHYYYVCQKKRSEKTCDKKNVRRDEVEYQIAKAIFDNALQDQVIEWIADSTIAYNDRKEAEGHIGILEDQLADVQRSLKNIMSAIEQGIVTETTKSRLLELESERSEIEGKIAAAKADIVPVNREQLIEWLLSLREGDIHDKKYQARLFDTFLIAAYLYDDGTAKLVFSFAGDKNTVTVPLAEAVDSVEENTAEGSFKLCLAPPKQSQTNQMRSPGFSASPAIYMVGGAFVLVCSLVQE

SEQ ID NO: 1879 - protein, 555 aa, Unknown
  Description of Unknown: Integrase B1880 sequence
  SM00857,G3DSA:1.10.10.2600,IPR036162,PF13408,IPR025827, G3DSA:3.40.50.1390,PS51737,IPR006119,IPR038109,PF07508, SSF53041,IPR011109,PTHR30461,Coil,cd00338, PF00239
MAYRKITDIKDTIGMRAVFYARVSTAEEEQLNAIELQIEENRGCIKDHGWKLVGEYIDRSKSGTMVKGRDDYQRLYEDLYEDLFDIVVIKDQERLQRNTLDWYLFINRVVQTGKLLFMYMDGKFYSPDDALITGVRAIIAEEFSRNLSKKLHNYHDHRIEKARQGQEIALQGSGNVYGWDKKDGKYYINPEQAKVRRLMCEGIMARKGSTLIAKELNDAGYRNTVGKPWKPMDIPKFVYDCKNVGTMIINKERHDFESKQTIKLPKEEWVYVENALPPIVTQEEWDLICKIHEERVIATGSDRRGKKTSGYSFSGKLVCGICGAPYWRKQRVSKDEYWVCSTKQTKGRRTRKRDSTMGKAGEINPLGCDNENISYNSLMEIMGVVSERLQANTDTIKHDMINWLTKLRKQLLEANGGHTEADLQRELSRKSKLLDAYLDGILNKQEYQKKAEELDERIIQLKAETEKNKANSGDIAEIDKVLANIDEEVSRYVDGNEKLKVEYLLEHLEQVQIFPDKVIVIVPILSEGIVVEKTQYVSREKRSRKDDAFKTYVRN

SEQ ID NO: 1880 - protein, 555 aa, Unknown
  Description of Unknown: Integrase B1881 sequence
  PTHR30461:SF3,SM00857,G3DSA:1.10.10.2600,IPR036162,PF13408, IPR025827,PS51737,G3DSA:3.40.50.1390,IPR006119,IPR038109, PF07508,PF14287,IPR011109,SSF53041,cd03770, PTHR30461,IPR025378,PF00239
MTKQPDKITALYCRLSRDDEQDGLSGSIKNQQTILEKYAQENGFRNTRVFIDDGWSGTNFARPAFTEIMELAEKGLIGTLIVKDHSRLGRNRLIVGQLLEEGFDSLGVRYIAIMDNIDTAKGISDLVPMQDLFNEWHAKNTSQKVRNVFKSKGMSGAPLTTNPPFGYQKDPESKNGWLVDEEAAKTVRQIFAWCVDGLGPTQIAKRLKAGKIPTPTEHWSNIGRNCSKLPAVPYNWCSATVADILGKQEYCGDTVNFRSTTKSFKNKKKIERPSEEWQIFKDTHPAIIDRETFALVQELRKHRRRPTKSGIVSPFSGLLYCADCGEKLYYSVTGSYKREQAYFFCSSYRKNSEVCSAHYIREKVVEQIVLESMQRILLNVQVFEKEFARKQMDCYTEDKKKLLAAKRRELGKVKKRIAEIDTLIQKIYEDNASGKLSDERYATLSLSYEEEQKTLKAAVPEMQAYLEAETDKTESLQRFIQKVKQITELKALTPELIHEFVDRIVVYAPRYLDGKRVQLLDIYYSGVGILHELTPEEMEEAFQHHLTERNKEKTA

SEQ ID NO: 1881 - protein, 555 aa, Unknown
  Description of Unknown: Integrase B1882 sequence
  PTHR30461:SF3,cd00338,SM00857,G3DSA:1.10.10.2600,IPR036162, PF13408,PS51737,IPR025827,G3DSA:3.40.50.1390,IPR006119, IPR038109,PF07508,IPR011109,SSF53041,PTHR30461, PS51736,Coil,PF00239
MDETRLIFPSSLKEREIEMKKRVYTLYRVSTKGQVEKDDIPMQKEACRNFAESQGWEIVKEFSEKGVSGFKKSAKERDELQKIQQAAMEGKFDILLVFMFDRLGRRDDETPFIVEWFTKQGIEVWSVNEGQQRFDTHVDKLMNYIRYWQASGESLKTSVRTRTRLEQLTGEGHYTGGTVAFGYKRVRLGRVNKKNQEVCDLVIDEAEAEIVRLIFHKYVYEGYGAQKLSHYLYEQGVVGRNSKNIPNTSIVRMIKNKGYTGYLINGAVETECPQLRIIEPELFEQAQELRQARTCERGGTSLGTSSKALLTGLVYCGHCGNRLSLTSSGRTHTYADGHTVKEVRPRYSCFYKIRHPGDCDGQSGYGVSKLDSIVEEVVRQIFAQFREVSRKKLLESVKTNDAARIQKKIKKIQKDLEAKQKELDDLKAETILVIRGVSALDKELLGTLVAEAKDALETLEKQLVQAQEEYEEATKTAKRSNYICNELFTWADVYDTANHDERRAILQQFIKEIRVRKDYEISIALNASFNQVEQLKAVSTYDGAEIFEEISEKGA

SEQ ID NO: 1882 - protein, 555 aa, Unknown
  Description of Unknown: Integrase B1883 sequence
  PTHR30461:SF3,SM00857,G3DSA:1.10.10.2600,IPR036162,PS51737, G3DSA:3.40.50.1390,IPR006119,IPR038109,PF07508,IPR011109, SSF53041,PTHR30461,Coil,PS51736,cd00338, PF00239
MKSTIYARYSTDKQRESSIDDQTRLCRQRAQTEGFEITAIYSDDGVSGSMPVSRRSGGAKLIADALAGRFDALIVESLDRLSRDQVEQESIIRRFEHHGIIIIGVSDGYDSRMDGRKIMRGVRGLINELYLDDLRHKTHRGQEGQVARGFLAGGKSYGYNIIKTDKGSRPEINEQEAKQVKWIFTRYAEGWSVQKIAAELNRQRIPSPRGRTWAVSGIYGSPAKGCGILNNEMYIGRYVWNRSQWVKDPDTGNRQRIDRPESEWKITEMPELRIIDDNLWQAVRNRMGKHGKKIIGRKATTLFGGLMTCPYCGGSIIAVSSRLYGCNTRKDRGSSVCKGILFSRDDADKNLLAILQDEMLTDEAIHEIENQVHAILASRQKDQRDQKNAAENRLKELDAEINRLVDAIASIGLSNALKSRLQAAESERDALQAQQSAQKAINKPIHKMDIVGRIRKKIGEMKTVLTSDTKRARKIIADMLGEIRITEKAGNVIAEYDKATQKLLLVSSGVSLNVVAGARYQLERQTKIIATRKLSPVSVDKDGEKMKIIRRHKDL

SEQ ID NO: 1883 - protein, 555 aa, Unknown
  Description of Unknown: Integrase B1884 sequence
  PTHR30461:SF3,SM00857,G3DSA:1.10.10.2600,IPR036162,PF13408, PS51737,IPR025827,G3DSA:3.40.50.1390,IPR006119,IPR038109, PF07508,IPR011109,SSF53041,PF00239,PTHR30461, Coil,cd00338
MPRKPAKHPAKPKRGKKLEIEEPGVLYGRYSSHNQKDISIEQQFEKCYELAAEYGIRIIDTYADRAVSGRTDKRVDFQRMMADAAKGKFRYVLAWKSNRIGRNMLEALVNEARFQELGVRVLYVEEDFDDTAAGRFAARSMMNVNQFYSENMAEDIKRGLYDNAANCMVTNGHLPYGYKADETLHYAIDEPRAAVIREIFTRVSCGEAFVDIMSSLNARGITTSYGRPWGRSSFQKILSNERYRGIYIYGDVRIEGGIPRIVSDELYFKVQEAITTKKNPQGRHRVNGDYLLTGKLFCGHCKSPMTGISGTGRAGKLHFYYVCQKRRTEKTCHKKNVRRDVIELKIAKAIRDYALKDDIIEWIADSCVEDHDRRVSESHLSVFEDQLAEVNRSIKNVMSAIEKGIITETTKGRLMELEAERTAIEGKICAAKAAIVPTNRERLVEWLRSLREGDVHDKKYQAGLFDTFLVAAYLYDDNRVKIVFSFTGDKNTIEIPLEDVIDSIDDEASCVRLSSTLSHQKTFAQKCGGFLLITYYFFTVTLSELRFFGKVKSKK

SEQ ID NO: 1884 - protein, 555 aa, Unknown
  Description of Unknown: Integrase B1885 sequence
  SM00857,G3DSA:1.10.10.2600,IPR036162,PF13408,IPR025827, PS51737,G3DSA:3.40.50.1390,IPR006119,IPR038109,PF07508, IPR011109,SSF53041,PF00239,PTHR30461,PS51736, Coil,cd00338
MARKKKFELNDNNLAIAYYRFSSHSQNEASIDQQRELAHAWADAHGFKIVKEYEDAAISGTTEDRPGFQQMLSEVAKIRPRVLIMWKTDRLGRDKYVLAMAKRTIRDAGCEIRLLAENIPTDGPEGVLIEGLMDAMAEYYSRQLSQNIQRGMDYNAQHALYNGHKLFGYGVDKSTKRYVVDPDTAPFVQRMFAEYAEGKAMQTICDELNAQGLRTTRGAKFGVKTMNKMLQNRAYIGEYRHGDIVVEGGMPALVDEETFDKVQRKFAENKRKGSQRARGMDENDAPRYWLTGKVYCGKCGSTLQGVSGTSGTGRTYYYYYCSAQRRKQCTLKKVRKEKLEDAVTMILRSILHDSENLMSLAVDAAAYYEKNYRDTGYLDGLEAKRREVEKSLANLVKVIESGLISETVTERLVQLEEQKRALNEAIEAENIRAALCEDEHTIKAYFEKFLHADFDNPETRDQVLEYFVDKIYLTDDGLVVTSWYSEDRTEVTWDMLYGEDGNPFVKGEAVKFDCFPFGSTMHWYGEHPSGARRFFVCSTLISCESRGFYSGESGV

SEQ ID NO: 1885 - protein, 555 aa, Unknown
  Description of Unknown: Integrase B1886 sequence
  PTHR30461:SF3,cd00338,SM00857,G3DSA:1.10.10.2600,IPR036162, PF13408,PS51737,G3DSA:3.40.50.1390,IPR025827,IPR006119, IPR038109,PF07508,IPR011109,SSF53041,PTHR30461, PS51736,Coil,PF00239
MARKKNIAAGLDAVIYARYSSHNQREVSIEQQIAECTKHAAALGLRIVGTYEDRAISGKTDNRPRFQQMMRDAEKGKFQAVVAWKSNRIGRNMLQAMVNEAKLDDYGVKVFYAEEDFDDTAAGRFALRNMMNVNQFYSENMAEDITRGLYDNASKCMANGRQPLGYKRGEDGRVVLDEANAAVVREIFTRVAAGDLFVDIARDLNAQGIKTSKGANWNKGSFQSICQNERYRGIYIYGDVRVADGIPRIVSDDLWYRVQEAMRMKKNPVGTRHRVGAEDYLLTGKLRCGHCGSYMTGVSGTSRNGELHYYYTCQKRRTEHACDKKNIRRDVIEPAVAQAIKMYCLTDDVIEWMADRTVEYWEKHDNDLQIEALEQQLEENKKATSNMLKAIEMGIITEATRTRMVELETEQSRLSVQLNAAKEDVVKIDREQIISYLELLQQGDIHDRDFQMELFKNFLVAVYVYDDNRMKLVFSCMGDQNSVEIPLETGEDPPDGGLSPDAKMFVLTPDSSTKKALYFVGSMVLFFLRGQIFGAALLRLHVFWAFCEKPGCSRR

SEQ ID NO: 1886 - protein, 555 aa, Unknown
  Description of Unknown: Integrase B1887 sequence
  PTHR30461:SF3,SM00857,G3DSA:1.10.10.2600,IPR036162,PF13408, IPR025827,PS51737,G3DSA:3.40.50.1390,IPR006119,IPR038109, PF07508,SSF53041,IPR011109,PTHR30461,Coil, PS51736,cd00338,PF00239
MDETRLIFPFSLKEREIEMKKRVYTLYRVSTKGQVEKDDIPMQKEACRNFAESQGWEIVKEFSEKGVSGFKKSAKERDELQKIQQAAMEGKFDILLVFMFDRLGRRDDETPFIVEWFTKQGIEVWSVNEGQQRFDTHVDKLMNYIRYWQASGESLKTSVRTRTRLEQLTGEGHYTGGTVAFGYKRVRLGRVNKKNQEVCDLVIDEAEAEIVRLIFHKYVYEGYGAQKLSHYLYEQGVVGRNNKNIPNTSIVRMIKNKGYTGYLINGAVETECPQLRIIEPELFEQAQELRQARTCERGGTSLGTSSKALLTGLVYCGHCGNRLSLTSSGRTHTYADGHTVKEVRPRYSCFYKIRHPGDCDGQSGYGVSKLDSIVEEVVRQIFAQFREVSRKKLLESVKTNDAARIQKKVKKIQKDLESKQKELDDLKAETILVIRGVSALDKELLGTLVAEARETLETLEKQLVQAQEEYEEATKTAKRSNYICNELFTWADVYDTANHDERRAILQQFITEIRVRKDYEISITLNASFNQVEQLKAVSTYDGAEIFEEISEKGA

SEQ ID NO: 1887 - protein, 555 aa, Unknown
  Description of Unknown: Integrase B1888 sequence
  PTHR30461:SF3,SM00857,G3DSA:1.10.10.2600,IPR036162,PF13408, IPR025827,G3DSA:3.40.50.1390,PS51737,IPR006119,IPR038109, PF07508,IPR011109,SSF53041,PF00239,PTHR30461, PS51736,Coil,cd00338
MMTLFEIRNALADGTSIYELPLKVTYYARVSTDKYEQLNSLENQVTYYENYIKENCKWTFVEGYIDEGISGTSTNKRDSFKRMIRDGQNGKFNLVITKEISRFARDTLDSISYTRKLLEYGVGVFFQYDHINTFNSDSELRLTIMASIAQEEVRKLSERVKFGFQRSIESGKVLGNDFIWGYKKDKCKLVVVEEEAEIIRKIFDMYVNEHLGMRSIGNKLAGEGILNKNGKPFQQGTIKYILTNPKYKGYYCGNKTRVIDYHTKQRVNINEEDWKLYEDNINVPPIVSEYIWNKAQEIVKSRSDRFSTHKEVYQNRYPFSGKIFCMNHNTTYRRKKQISSGKKKKVVITWRCSHFLKYNTTGCDGPILYDDELKEIVGKSILKYISNVSIVDDLIKEYKTIEDNKDYSKDIEKKKDEIERLERSKSKILDLIVKELINEDDFKKQSDEIVSKIHKLENEISELETKSKSILTNYKYLEEVRKKALEKLKYENADIDSLIYEFLEKIEVYKLNDNNYISLRVILNTGNQYGITFKHGEHPFGTNYTYDKSRSRKHI

SEQ ID NO: 1888 - protein, 555 aa, Unknown
  Description of Unknown: Integrase B1889 sequence
  PTHR30461:SF3,cd00338,SM00857,G3DSA:1.10.10.2600,IPR036162, PF13408,IPR025827,PS51737,G3DSA:3.40.50.1390,IPR006119, IPR038109,PF07508,IPR011109,SSF53041,PTHR30461, PS51736,Coil,PF00239
MTVKKFPIDLSCLTEEEISQFQEDPYTLYNGDQEVALYLRYSSTGQSDQSIEGQLRDCRAFCKANHYRIVAIYVDRATTARKDVEKRVHLMEMVADSAKQNWEYVIVWKLDRFARNRNDSAIMKMRLRKNGVKVLSATEHLTDSPESIILESVLEGMAEFFSAELSQKVTRGMRESALKCHSVGGHIPLGYKVENHKLVVDPDTAHIVQEAFSLYANGESVADICRKFNSAGYKTAKNTEFNRSSFKAMFRNTRYIGTYTYKDIVIENGIPAIIDKELFETVQRRLSKTATAPARGKAKVDYLLSGKLFCGHCGASMNGESGAGRHGKVYHYYSCYTKKRKLGCDKRPLKKDYIEGIVARDALNLLTDQLIDEIADMAIRQSEQDLINDTHIPQLTAQLSEVEKSITNITAAIEKGIASETLMNRLVQLEHEKKTLNKEIKAEEKFVYRIDRDQIIFWLSQFKYGNIEDEDFRRRLIDLLVNSVTVWDEPDGYKITTAYNLTSCKTKTFRVDKNPAAEEATGFDFGESECTIERISEPYIVWGTVFVQTKRHSLP

SEQ ID NO: 1889 - protein, 555 aa, Unknown
  Description of Unknown: Integrase B1890 sequence
  PTHR30461:SF3,IPR036162,PS51737,IPR011109,PTHR30461, PF00239,G3DSA:1.10.10.2600,IPR006119,SSF53041,cd00338, SM00857,IPR025827,IPR038109,mobidb-lite,PS51736, PF13408,G3DSA:3.40.50.1390,PF07508,Coil
MYEDIKTACLYVRFSSHNQTEQSIEGQTRVCRDFCKRHNIRIVEIYADRATSASKDIEKRVQFLKMIKDSEKGLFDAVIVYKLDRFARSRYDSATYKYRLKRNGVQLISATENISNDPEGIILESVLEGMAEFYSAELSQKINRGMRESAYKHNSIGGAIPLGYKIEDKKLVIDPKTAPIVKEAFEKYADGETVAEICRQFNARGYKTSKGTAFGKSSFTKIFRNERYIGVYTFHDYRAEDAIPAIIDKDLWDRVQLRVGKIKNAPARNKAKVVYLLSGKIFCGHCGSKMNGNCNAGNYCYYQCYGKKNGNVDCKKKNIRKEFIERLVAQDALSLLTDEYIEQIATIACEKNQHEIELDSALPTIRDRIHQVDLSLNHLLKAIESGSAPDMLVKRMGELEKEKKDLQAQAKKESEDIVELDKAQVIYWLEQFRGGSIEDEEFCRMLIDLFVNSVTVWDEDDNTYKVTVAYNLTSLPTKTYRLNKGGTLSDFASNAPPINRHTHRSCAPAPQETASARSAGRRGGCTPQKFRFCTAYYRRIAPCLQAGCPPTRGRA

SEQ ID NO: 1890 - protein, 555 aa, Unknown
  Description of Unknown: Integrase B1891 sequence
  PTHR30461:SF3,cd00338,SM00857,G3DSA:1.10.10.2600,IPR036162, PF13408,IPR025827,PS51737,G3DSA:3.40.50.1390,IPR006119, IPR038109,PF07508,IPR011109,SSF53041,PTHR30461, PS51736,Coil,PF00239
MTVKKFPIDLSCLTEEEISQFQEDPYTLYNGDQNVAIYLRYSSTGQSDQSIEGQLRDCRTFCKANHYRIVAIYVDRATTARKDVEKRVHLMEMISDSAKQNWEYVIVWKLDRFARNRNDSAIMKMRLRKNGVKVLSATEHLTDSPESIILESVLEGMAEFFSAELSQKVTRGMRESALKCHSVGGHIPLGYKVENHKLVVDPDTAHIVQEAFSLYANGESVAAICRKFNSAGYKTAKNTEFNRSSFKAMFRNTRYIGTYTYKDIVIENGIPAIIDKELFETVQRRLSKTATAPARGKAKVDYLLSGKLFCGHCGASMNGESGAGRHGKVYHYYSCYTKKRKLGCDKRPLKKDYIEGIVARDALNLLTDQLIDEIADMAIRQSEQDLINDTHIPQLTAQLSEVEKSITNITAAIEKGIASETLMNRLVQLEHEKKTLNKEIKAEEKFVYRIDRDQIVFWLSQFKYGNIEDENFRRRLIDLLVNSVTVWDEPDGYKITTAYNLTSCKTKTFRVEKNPAAEEATGFDFGESECTIERISEPYIVWGTVFVQTKRHSLP

SEQ ID NO: 1891 - protein, 555 aa, Unknown
  Description of Unknown: Integrase B1892 sequence
  PTHR30461:SF3,cd00338,SM00857,G3DSA:1.10.10.2600,IPR036162, PF13408,PS51737,G3DSA:3.40.50.1390,IPR025827,IPR006119, IPR038109,PF07508,SSF53041,IPR011109,PTHR30461, PS51736,Coil,PF00239
MNRKELLFKGYRVVFYARVSTEEEEQLNAIELQIEENRSVIAENGGTLVDEYIDRGKSGTMTKKRDDYLRLYEDMSTDKFDIICIKDQDRLMRNTRDWYLFVDRLVTTGKKLYLYLDGKFFIPAEDALITGVKAIMAEEYSRNLSKKLTNYNKRRLDKARAGETVRLQGSGNAYGWNKKDGVYTINPEQFKIRRLMCELTLQGMGTTAVAEYLNSNGYRNSIGKEWRAQDIPKFIYDEKNIGTLIINKERRDFDTKTRVKVPPEEWVTIENALPPVVTPEEWERLCKIREERTTLTRGKYVGKKKGGYFTGKLVCGCCGAPYWRSLCKNRSKEGSREYWVCKTKQTEGRKTRMKTTAKGKAGDINPKGCDNANISYNDLMEILQRVADQLSANTDQIKADMLSWLENLKANIVKSVASYTEEDLRKEESRRDKLLDSYLDGIISKEVYRRKNQDLEARIKMIQKDIESCHAQAEDIEDIDNIIKNIDKEVEKYIAENENLKLNFVLENLKSIVVYDDFVEVNIPVIGSGVMLRNIQLVSRQEWCRKKHYYQSDIK

SEQ ID NO: 1892 - protein, 555 aa, Unknown
  Description of Unknown: Integrase B1893 sequence
  PTHR30461:SF3,IPR036162,PS51737,IPR011109,PTHR30461, PF00239,G3DSA:1.10.10.2600,IPR006119,PF14287,SSF53041, IPR025378,SM00857,IPR025827,cd03770,IPR038109, PF13408,G3DSA:3.40.50.1390,PF07508,Coil
MIIACCILSESEVKMTDKITALYCRLSQDDMLDGESNSITNQKAILQKFAEDNGFPNPTFYVDDGVSGTTWERDGFKAMMADIEDGKVATVITKDLSRLGRDYLKTGELIEMVFPDYDVRYIAVNDNVDTAKSENELLAFKNIFNDWYARDCSKKIRAVFRAKGQSGKHLCPPVYGYKKSETDKNLWVIDEPAAEVVRKIFKLCIDGYDPVQIARILTEQGIPTPTAYALLQGRDNGRHNAKTYRWGAQTIAHILERYEYCGHTVNFRTKMKSYKVHKIVYNPQDEWQIFENTQEPIITQQTFDLVQELRKHKRRPQKMQTVNPFAGMVYCADCGEKMYLSRRKNERPEQEHMRCSTYAKEQDKCSVHYIRTCVLNEIVLGELNKLLTMVRENEDEFIQTAMSNSVQRKSSELTKAKKALKQAEKRIAELDKLFTRLYEDNVLGRLSDERFTMMSAGYEDEQKQLKATVTELTAFVETAEQKSSDVTAFLKVVHRYEHIETLTPEIMHELVDKIIVHEPDKSSGKRVQDIEIHFRFGVAVSTISVETGKYGKKVA

SEQ ID NO: 1893 - protein, 555 aa, Unknown
  Description of Unknown: Integrase B1894 sequence
  SM00857,G3DSA:1.10.10.2600,IPR036162,PS51737,G3DSA:3.40.50.1390, IPR006119,IPR038109,PF07508,SSF53041,IPR011109, PF00239,PTHR30461,PS51736,Coil,cd00338
MDKRILCIIRASTEKQETESQKKELISYCEAKGFTVDEMAFIEVAGASARKLNKKYIQMLEDIKATLLSSPTIKAVALWDLNRLGRVESKLHEMKEFFVAHKIQVYCKSPEFVLLNEDGTASDAGGIVFSVFASIVKHDTDEMFAKMNRGRMRNKENGIYYGGQIKFGYTLDETKHFIIKEEEAKTIRLIFELYATGKYSFYSLIDELKARGITKNGKKITFEMIQNALSDEAYYNGKLPIISKDLFDKCTAIKANSVAVKRTKETCNVNFAVGLLKCECGNNFIASGDYYTCFSKVNRKRKKVVVECDAPVIKSDLLDDLLWIVTRPLQQKFLMQTDSQSVAENNDKINVLTVKVSTAQKELSSFKDRIEKLEDAYYVEGEMDEAQFKKRLGILKSKKVQTESLITNYRNEINDIKKVIEQLEQPINDRYLQSLLLSNLDTEDIEDRKKIKEMMFMHIEKVTAKKVMLGNHKGVEITIIAKSGLSFVFFYDIWLSSFRKGECNTFYEDKPLYEVNGFIKSMNTKVQNMIYEKIGLPLLSYKELGEAAAEYAKTH

SEQ ID NO: 1894 - protein, 555 aa, Unknown
  Description of Unknown: Integrase B1895 sequence
  PTHR30461:SF3,IPR036162,PS51737,IPR011109,PTHR30461, PF00239,G3DSA:1.10.10.2600,IPR006119,PF14287,SSF53041, IPR025378,SM00857,IPR025827,cd03770, IPR038109,PF13408,G3DSA:3.40.50.1390,PF07508,Coil
MTKQPDKITALYCRLSRDDEQDGLSGSIKNQRTILEKYAQENGFQNTRVFIDDGWSGTNFARPAFTEIMELAEKGLIGTLIVKDHSRLGRNRLIVGQLLEEGFDSLGIRYIAIMDNIDTAKGISDLVPMQDLFNEWHAKNTSQKVRNVFKSKGMSGAPLTTNPPFGYLKDPESKNGWIIDEAAAKIVRQIFAWCIDGLGPTQIAKRLKAGKIPTPTEHWGNIGRNCSKPPAVPYNWCSATVADILGKQEYCGDTVNFRSTTKSFENKKKIERPPEEWQIFKDTHPAIIDRETFALVQELRKHRRRPTKSGIVSPFSGLLYCADCGEKLYYSVSNNYKREQAYFFCSSYRKNSEVCSAHYIREKVVEQIVLESMQRILLNVQVFEKEFARKQMDCYTEDKKKQLAAKRRELSKAKKRIAEIDTLIQRIYEDNASGKLSDERYATLSLSYEEEQKTLKAAIPKMQVYLEDETNKTESLQRFIQKVKQITELKALTPELIHEFVDKIVVYAPRYLDGKRVQLLDIYYSGVGILHELTPEEMEEAFQHHLAERSKEKTA

SEQ ID NO: 1895 - protein, 555 aa, Unknown
  Description of Unknown: Integrase B1896 sequence
  PTHR30461:SF3,cd00338,SM00857,G3DSA:1.10.10.2600,IPR036162, PF13408,PS51737,G3DSA:3.40.50.1390,IPR025827,IPR006119, IPR038109,PF07508,IPR011109,SSF53041,PTHR30461, PS51736,Coil,PF00239
MKTAVIYARYSSDKQTEQSIEGQLYDCYNYAKQHGITVVREYIDRAMTGKNDDRPAFQQMLHESAMHKWDSVIVWKLDRFARNTIDSAVNRQILAKNGVKLLSVMESFGDDASGQMMTHIIEAINEYYSADLREKTIRGMRQSAMKAQTTGHIPLGYKVVDKKLVIDDETRIIPETVFRMYAEGERLTDIAEYLNAHGYRNRRGRPFTTNSFYNMLANEKYIGIYKYDDIVIEGGIPQMIPNEVFEAVREKLITNRKRAAKNTAKADYYLSGKLYCGHCGEPMSGLSGTGRNGVKHYYYRCNGVQKKSGCHKKLENKYLIEDEVCRAARSAFEQMDKAETAETIYQMYLQTVRNEYAPAELEKELTECTKQAENVVNAIAQTGGNQLLYDKVRELEERKEQLSSALRLSQAMTDNVPSVEQITVFIDDILATDINTTEGKKAIADIMISKVYVYDDKLTVIFKDKDGKSVDIPLSAVSDTSLADCAPSALGSQSRIIRTLSSLRMCSDLLFIFDIETVRIFISSGGFCYHKVKFALGLSADYKVKIEFMQIVIFV

SEQ ID NO: 1896 - protein, 555 aa, Unknown
  Description of Unknown: Integrase B1897 sequence
  cd00338,SM00857,G3DSA:1.10.10.2600,IPR036162,PS51737, G3DSA:3.40.50.1390,mobidb-lite,IPR006119,IPR038109,PF07508, IPR011109,SSF53041,PTHR30461,PS51736,Coil, PF00239
MPEDIKTAVIYARFSCSKQREASIDDQLRVCRDWCAREGYAIVGEYSDYAMSGRSDDRPQFQKMIANAGESDIVLVYMMDRFSRDEYDAPAYKHELRRKGVEVVSAMEAMPDGPERILIEKIYEGLAAVESVKTSMRTRRGMEGNALKCKTNGVRVYGYGRNEDDEYVVNEDEAAIVREAFRRSCDHEPVDSIASDFARRGVTTRTGRPCGYSMVYQMLHNRKYTGFYSWGGIEVEGGMPQIIDKATFAIAQEVKPKKRRASEDWGTFALSGRAICSECGHNMAGTSGRGKRNVKYEYYGCRCGAKPVRRDWLEHELAEAIRGMLRDRETALRISHMLWDEPEPEIADARRRAMASKRKAENGLQNIMAAIEQGIVMPEFTDRIAQLQAQKARAERDLASYDEARIDPEEFADFLQCGGGMDDAAVLDSFVYQVMVTPEECVATLYCDDERNEPARLSIARVRTFSGWCPFAKIVEPRYWRSVAPCSSGFLGPPKMATTEKGEAPRGASPLLLAIPPPALGRGRSRSGSPARSPWPASGSPCRTWRRCPRACLRS

SEQ ID NO: 1897 - protein, 555 aa, Unknown
  Description of Unknown: Integrase B1898 sequence
  PTHR30461:SF3,SM00857,G3DSA:1.10.10.2600,IPR036162,PF13408, PS51737,G3DSA:3.40.50.1390,IPR025827,IPR006119,IPR038109, PF07508,IPR011109,SSF53041,PTHR30461,Coil, PS51736,cd00338,PF00239
MNRYGKRCVLYPRVSTEMQVDGYSLEGQKNMLTRFADREEMIVVDTYEDAGKSGKSIEGRPAFQKMLRDIEDGLDIDYILVYKLSRFGRNAADILNSLELVQSYGVNLICIEEGIDSSQTSGKLLISVLSAVAEIERENIIEQTMNGRREKARQGGWNGGFAPYGYTLEDNKLMIEETEAVAIRKIFELYTSSEIGLGGIANQLNLQGIRKIPRQNGTLEDWTGHFIKLILDNPVYCGKIAYGRRTKEKVKGTKNDYQMKRNDDYILTEGQHKGIVSEEIWEKAHAKRLRTGVKQPSKIGRDRVHLLSGLLKCPVCGSPMYTNKHAWTNKDGTYKEIYYYVCSRNRMVRGKHCEYKAMLKKTDIEPMVIEAIREIVRNEEYAQAIKKRICVQIDTKAVDKELEGYQAKLKEVDLNKTRLEREIDSLPADAKYRERKLHDMTLRLDSLYDVIVELEEKIEDARLRRDAIKQQAITLENIYKIMVNFDCVYNIINDEEKRNVVTALIKEIEIYRNDESEYPLKRIGLNFPVFKDGGEVTELLWDKGNTVETVCLLCH

SEQ ID NO: 1898 - protein, 555 aa, Unknown
  Description of Unknown: Integrase B1899 sequence
  PTHR30461:SF3,SM00857,G3DSA:1.10.10.2600,IPR036162,PF13408, IPR025827,G3DSA:3.40.50.1390,PS51737,IPR006119,IPR038109, PF07508,SSF53041,IPR011109,PTHR30461,Coil, PS51736,cd00338,PF00239
MDEARLIFPFSLKEREIEMKKRVYTLYRVSTKGQVEKDDIPMQKESCRNFAESQGWEIVKEFSEKGVSGFKKSAKERDELQKIQQAAMEGKFDILLVFMFDRLGRRDDETPFIVEWFTKQGIEVWSVNEGQQRFDTHVDKLMNYIRYWQASGESLKTSVRTRTRLEQLTGEGHYTGGTVAFGYKRVRLGRVNKKNQEVCDLVVDEAEAEIVRLIFHKYVYEGYGAQKLSHYLYEQGVVGRNNKNIPNTSIVRMIKNKGYTGYLINGAVETECPQLRIIEPELFEQAQELRQARTCERGGTSLGTSSKALLTGLVYCGHCGNRLSLTSSGRIHTYADGHTVKEVRPRYSCFYKIRHPGDCDGQSGYGVSKLDSIVEEVVRQIFAQFREVSRKKLLESVKTNDAARIQKKIKKIQKDLEAKQKELDDLKAETILVIRGVSALDKELLGTLVAEAKDALETLEKQLVQAQEEYEEATKTAKRSNYICNELFTWADVYDTANHDERRAILQQFIKEIRVRKDYEISITLNASFDQVEQLKAVSTYDGAEIFEEISAKGA

SEQ ID NO: 1899 - protein, 555 aa, Unknown
  Description of Unknown: Integrase B1900 sequence
  PTHR30461:SF3,SM00857,G3DSA:1.10.10.2600,IPR036162,PF13408, PS51737,IPR025827,G3DSA:3.40.50.1390,IPR006119,IPR038109, PF07508,IPR011109,SSF53041,PTHR30461,cd00338, PF00239
MPKKTAKHPAKPKRGKKLEIEEPGVLYGRYSSHNQKDISIEQQFEKCYELAAEYGIRVIDTYADRAVSGRTDKRVDFQRLMADAAKGKFCYVLAWKSNRIGRNMLEALVNEARFQELGVRVLYVEEDFDDTAAGRFAARSMMNVNQFYSENMAEDIKRGLYDNAANCMVTNGHLPYGYKADETLHYAIDEPKAAVIREIFTRVSCGEAFVDIMASLNDRGITTSYGRPWGRSSFQKILSNERYRGIYIYGDVRIEGGIPRIVSDELYFKVQEAITTKKNPQGRHRVNGDYLLTGKLFCGHCKSPMTGISGTGRAGKLHFYYVCQKRRTEKTCHKKNVRRDVIELKIAKAIRDYALKDDIIEWIADSCVEDHDRRVSESHLSVFEDQLAEVNRSIKNVMSAIEKGIITETTKGRLMELEAERTAIEGKICAAKAAIVPTNRERLVEWLRSLREGDVHDKKYQAGLFDTFLVAAYLYDDNRVKIVFSFAGDKNTIEIPLEDVIDSIDGEASCVRLSSTLSHQSRARRTERSPGSAPISAIYMVGGVFVLVCPLDAEE

SEQ ID NO: 1900 - protein, 555 aa, Unknown
  Description of Unknown: Integrase B1901 sequence
  PTHR30461:SF3,SM00857,G3DSA:1.10.10.2600,IPR036162,PF13408, IPR025827,G3DSA:3.40.50.1390,PS51737,IPR006119,IPR038109, PF07508,IPR011109,SSF53041,PF00239,PTHR30461, PS51736,Coil,cd00338
MARKRINTPEATGVIYARFSSHNQREESIEQQVAECNTFALASGIKIVGVYSDSAKTGRTDRRPQFQKLQREAQKGEFDYIIAYKSNRIARNILNALMFENEMEKLGIKVVYAKEEFGNNAAGRFALRTMMNVNQFFSENMAEDIKRNQADNALNCRANGPAPYGYKTGADGKFVIDEMRAPIVQEIFNRTANAEKFVEISEDLNRRGIKTKNGNEWGKSSFFTILHNERYTGVYIFNDVRIEGGMPVIIERSLFDRVQKIMKTKKNPQGRKRADDGIYLLTGKLFCGKCKSHMIGMSGTSKNGDSHYYYICNEKRTNGTCDKKAVRRNFLENEIAKAIRRYILQPNVMEWIVQQVLSFQKGDVRQVEIANMQERHKEVKKAIANVMIAIDQGIITASTKEHLQDLESERAQLDARILVAQSEAGKAVTRESLLAYLEHFRAANVEDKECQKELFDTFVKAVYLYDDHITLIFDINDGTTEDVEISMDEVEQSLCENVRLNSVVGHQIEQDEHVFMCLSYFFCLLQGHSKLLITTFSYDIILSEVLSVYIDNEYL

SEQ ID NO: 1901 - protein, 555 aa, Unknown
  Description of Unknown: Integrase B1902 sequence
  PTHR30461:SF3,IPR036162,PS51737,IPR011109,PTHR30461, PF00239,G3DSA:1.10.10.2600,IPR006119,PF14287,SSF53041, IPR025378,SM00857,IPR025827,cd03770,IPR038109, PF13408,G3DSA:3.40.50.1390,PF07508,Coil
MTKQPDKITALYCRLSRDDEQDGLSGSIKNQQAILEKYAQENGFKNTRVFIDDGWSGTNFARPAFTEIMELAEKGLIGTLIVKDHSRLGRNRLIVGQLLEEGFDSLGVRYIAIMDNIDTAKGISDLVPMQDLFNEWHAKNTSQKVRNVFKSKGMSGAPLTTNPPFGYLKDPESRNGWIVDEEASKTVRQIFAWCIDGLGPTQIAKRLKAAKVSTPTEHWCNIGRNCSKPPAVPYNWCSATVADILGKQEYCGDTVNFRSTTKSFKNKKKIERPPEEWQIFKDTHPAIVDRETFALVQELRKHRRRPTKSGIVSPFSGLLYCADCGEKLYYSVTNNYKREQAYFFCSSYRKNSEVCSAHYIREKVVEQIVLESMQRILLNVQAFEKEFARKQMDCYTEDKKKQLAAKRRELSKAKKRIAEIDALIQKIYEDNASGKLSDERYATLSLSYEEEQKTLKASVPEMQTYLETETDKTESLQRFIQKVKQITELKALTPELIHEFVDKIVVYAPRYLDGKRVQLLDIYYSGVGILHELTPEEMEEAFQQHLAQRNKEKTA

SEQ ID NO: 1902 - protein, 555 aa, Unknown
  Description of Unknown: Integrase B1903 sequence
  PTHR30461:SF3,SM00857,G3DSA:1.10.10.2600,IPR036162,PF13408, PS51737,G3DSA:3.40.50.1390,IPR025827,IPR006119,IPR038109, PF07508,IPR011109,SSF53041,PTHR30461,cd00338, PF00239
MPRKPAKHPAKPKRGKKLEIEEPGVLYGRYSSHNQKDISIEQQFEKCYELAAEYGIRIIDTYADRAVSGRTDKRVDFQRMMADAAKGKFRYVLAWKSNRIGRNMLEALVNEARFQELGVRVLYVEEDFDDTAAGRFAARSMMNVNQFYSENMAEDIKRGLYDNAANCMVTNGHLPYGYKADETLHYAIDEPRAAVIREIFTRVSCGEAFVDIMSSLNARGITTSYGRPWGRSSFQKILSNERYRGIYIYGDVRIEGGIPRIVSDELYFKVQEAITTKKNPQGRHRVNGDYLLTGKLFCGHCKSPMTGISGTGRAGKLHFYYVCQKRRTEKTCHKKNVRRDVIELKIAKAIRDYALKDDIIEWIADSCVEDHDRRVSESHLSVFEDQLAEVNRSIKNVMSAIEKGIITETTKGRLMELEAERTAIEGKICAAKAAIVPTNRERLVEWLRSLREGDVHDKKYQAGLFDTFLVAAYLYDDNRVKIVFSFAGDKNTIEIPLEDVIDSIDDEASCVRLSSTLSHQKTFAQKCGGFLLITYYFFTVTLSELRFFGKVKSKK

SEQ ID NO: 1903 - protein, 554 aa, Unknown
  Description of Unknown: Integrase B1904 sequence
  PTHR30461:SF3,SM00857,G3DSA:1.10.10.2600,IPR036162,PF13408, PS51737,IPR025827,G3DSA:3.40.50.1390,IPR006119,IPR038109, PF07508,IPR011109,SSF53041,PTHR30461,Coil, PS51736,cd00338,PF00239
MQTMPIDLSALTAEERQQFAENPSVLSTDCVATCCLYMRYSSDRQSEQSIEGQLRELISYCIRQEYRIAAVYVDRAISAHTSMAKRVAFQQMLADSKRAAWNTVLVWKLDRFARNRQDSAAARALLYKNGCGVESATEAISATKEGRLLESVLEGLNEYYSDELREKIIRGNRESALKGNALGGSVPLGYKIENKKWVLDPLTAPLVAEAFDRYANGETVAAICDDFNARGYRTAKGAKFNKSSFKNIFRNEKYIGVYKYKDIRQEDSVPRIVTDDVWAKVKARLKVNEEAPARGKAKVPYLLAGKIFCGHCGSQMVGECGRSKNGHTYNYYSCAGRKIRRACNKKPVPKDWIEDIVVQDALEVLTDDVIDYVATVAARQSEEEIQQNTNIPAIREQIADIERKVRNLTKAIETSGMAPDTLVSRIAELESQRKGLSAQLLEEQHSVIHLTKDMVVYYLESVRKQAVPLETQKKMLIDLFVNSVTVYDDDTGYFKIITAYNLSAVPTKTYRVSTSFVEAGSSDTGPNGPPLDANPNTITVVGMVFVQTRKHALP

SEQ ID NO: 1904 - protein, 554 aa, Unknown
  Description of Unknown: Integrase B1905 sequence
  PTHR30461:SF3,SM00857,G3DSA:1.10.10.2600,IPR036162,PF13408, IPR025827,G3DSA:3.40.50.1390,PS51737,IPR006119,IPR038109, PF07508,SSF53041,IPR011109,PF00239,PTHR30461, PS51736,Coil,cd00338
MKKFPIDLSCLTEEEISQFQEDPYTLYNGDQEVALYLRYSSTGQSDQSIEGQLRDCRAFCKANHYRIVAIYVDRATTARKDVEKRVHLMEMVADSAKQNWEYVIVWKLDRFARNRNDSAIMKMRLRKNGVKVLSATEHLTDSPESIILESVLEGMAEFFSAELSQKVTRGMRESALKCHSVGGHIPLGYKVENHKLVVDPDTAHIVQEAFSLYANGESVADICRKFNSAGYKTAKNTEFNRSSFKAMFRNTRYIGTYTYKDIVIENGIPAIIDKELFETVQRRLSKTATAPARGKAKVDYLLSGKLFCGHCGASMNGESGAGRHGKVYHYYSCYTKKRKLGCDKRPLKKDYIEGIVARDALNLLTDQLIDEIADMAIRQSEQDLINDTHIPQLTAQLSEVEKSITNITAAIEKGIASETLMNRLVQLEHEKKTLNKEIKAEEKFVYRIDRDQIVFWLSQFKYGNIEDEDFRRRLIDLLVNSVTVWDEPDGYKITTAYNLTSCKTKTFRVEKNPAAEEATGFDFGESECTKSPRNRLISRTFAFHKFRFYGVAFF

SEQ ID NO: 1905 - protein, 554 aa, Unknown
  Description of Unknown: Integrase B1906 sequence
  PTHR30461:SF3,cd00338,SM00857,G3DSA:1.10.10.2600,IPR036162, PF13408,IPR025827,G3DSA:3.40.50.1390,PS51737,IPR006119, IPR038109,PF07508,IPR011109,SSF53041,PTHR30461, PS51736,Coil,PF00239
MKKFPIDLSCLTEEEISQFQEDPYTLYNGDQNVAIYLRYSSTGQSDQSIEGQLRDCRTFCKANHYRIVAIYVDRATTARKDVEKRVHLMEMVADSAKRNWEYVIVWKLDRFARNRNDSAIMKMRLRKNGVKVLSATEHLTDSPESIILESVLEGMAEFFSAELSQKVTRGMRESALKCHSVGGHIPLGYKVENHKLVVDPDTAHIVQEAFSLYANGESVAAICRKFNSAGYKTAKNTEFNRSSFKAMFRNTRYIGTYTYKDIVIENGIPAIIDKELFETVQRRLSKTATAPARGKAKVDYLLSGKLFCGHCGASMNGESGAGRHGKVYHYYSCYTKKRKLGCDKRPLKKDYIEGIVARDALNLLTDQLIDEIADMAIRQSEQDLINDTHIPQLTAQLSEVEKSITNITAAIEKGIASETLMNRLVQLEHEKKTLNKEIKAEEKFVYRIDRDQIVFWLSQFKYGNIEDEDFRRRLIDLLVNSVTVWDEPDGYKITTAYNLTSCKTKTFRVKKNPAAEEATGFDFGESECTKSPRNRLISRTFAFRKLLFSDAAFS

SEQ ID NO: 1906 - protein, 554 aa, Unknown
  Description of Unknown: Integrase B1907 sequence
  PTHR30461:SF3,SM00857,G3DSA:1.10.10.2600,IPR036162,PF13408, IPR025827,G3DSA:3.40.50.1390,PS51737,IPR006119,IPR038109, PF07508,SSF53041,IPR011109,PF00239,PTHR30461, PS51736,Coil,cd00338
MKKFPIDLSCLTEEEISQFQEDPYTLYNGDQNVAIYLRYSSTGQSDQSIEGQLRDCRTFCKANHYRIVAIYVDRATTARKDVEKRVHLMEMIADSAKRNWEYVIVWKLDRFARNRNDSAIMKMRLRKNGVKVLSATEHLTDSPESIILESVLEGMAEFFSAELSQKVTRGMRESALKCHSVGGHIPLGYKVENHKLVVDPDTAHIVQEAFSLYANGESVAAICRKFNSAGYKTAKNTEFNRSSFKAMFRNTRYIGTYTYKDIVIENGIPAIIDKELFETVQRRLSKTATAPARGKAKVDYLLSGKLFCGHCGASMNGESGAGRHGKVYHYYSCYTKKRKLGCDKRPLKKDYIEGIVARDALNLLTDQLIDEIADMAIRQSEQDLINDTHIPQLTAQLSEVEKSIANITAAIEKGIASETLMNRLVQLEHEKKTLNKEIKAEEKFVYRIDRDQIVFWLSQFKYGNIEDEDFRRRLIDLLVNSVTVWDEPDGYKITTAYNLTSCKTKTFRVEKNPAAEEATGFDFGESECTKSPRNHLISRTFAFHKFRFLGVAFF

SEQ ID NO: 1907 - protein, 554 aa, Unknown
  Description of Unknown: Integrase B1908 sequence
  PTHR30461:SF3,SM00857,G3DSA:1.10.10.2600,IPR036162,PF13408, IPR025827,G3DSA:3.40.50.1390,PS51737,IPR006119,IPR038109, PF07508,IPR011109,SSF53041,PF00239,PTHR30461, PS51736,Coil,cd00338
MKKFLIDLSCLTEEEISQFQEDPYTLYNGDQNVAIYLRYSSTGQSDQSIEGQLRDCRTFCKANHYRIVAIYVDRATTARKDVEKRVHLMEMISDSAKQNWEYVIVWKLDRFARNRNDSAIMKMRLRKNGVKVLSATEHLTDSPESIILESVLEGMAEFFSAELSQKVTRGMRESALKCHSVGGHIPLGYKVENHKLVVDPDTAHIVQEAFSLYANGESVAAICRKFNSAGYKTAKNTEFNRSSFKAMFRNTRYIGTYTYKDIVIENGIPAIIDKELFETVQRRLSKTATAPARGKAKVDYLLSGKLFCGHCGASMNGESGAGRHGKVYHYYSCYTKKRKLGCDKRPLKKDYIEGIVARDALNLLTDQLIDEIADMAIRQSEQDLINDTHIPQLTAQLSEVEKSITNITAAIEKGIASETLMNRLVQLEHEKKTLNKEIKAEEKFVYRIDRDQIVFWLSQFKYGNIEDENFRRRLIDLLVNSVTVWDEPDGYKITTAYNLTSCKTKTFRVEKNPAAEEATGFDFGESECTKSPRNRLVSRTFAFHKFRFLGTAFF

SEQ ID NO: 1908 - protein, 554 aa, Unknown
  Description of Unknown: Integrase B1909 sequence
  PTHR30461:SF3,SM00857,G3DSA:1.10.10.2600,IPR036162,PF13408, PS51737,IPR025827,G3DSA:3.40.50.1390,IPR006119,IPR038109, PF07508,IPR011109,SSF53041,PF00239,PTHR30461, PS51736,Coil,cd00338
MKKFPIDLSCLTEEEISQFQEDPYTLYNGDQDVALYLRYSSTGQSDQSIEGQLRDCRAFCKANHYRIVAIYVDRATTARKDVEKRVHLMEMVADSAKQNWEYVIVWKLDRFARNRNDSAIMKMRLRKNGVKVLSATEHLTDSPESIILESVLEGMAEFFSAELSQKVTRGMRESALKCHSVGGHIPLGYKVENHKLVVDPDTAHIVQEAFSLYANGESVADICRKFNSAGYKTAKNTEFNRSSFKAMFRNTRYIGTYTYKDIIIENGIPAIIDKELFETVQRRSSKTATAPARGKAKVDYLLSGKLFCGHCGASMNGESGAGRHGKVYHYYSCYTKKRKLGCDKRPLKKDYIEGIVARDALNLLTDQLIDEIADMAIRQSEQDLINDTHIPQLTAQLSEVEKSITNITAAIEKGIASETLMNRLVQLEHEKKTLNKEIKAEEKFVYRIDRDQIIFWLSQFKYGNIEDEDFRRRLIDLLVNSVTVWDEPDGYKITTAYNLTSCKTKTFRVEKNPAAEEATGFDFGESECTKSPRNHLISRTFAFHKFRFLGVAFF

SEQ ID NO: 1909 - protein, 554 aa, Unknown
  Description of Unknown: Integrase B1910 sequence
  IPR036162,PS51737,IPR011109,PTHR30461,PS00397, PF00239,G3DSA:1.10.10.2600,IPR006119,SSF53041,SM00857, IPR025827,IPR038109,PS51736,cd03768,IPR006118, PF13408,G3DSA:3.40.50.1390,PF07508,Coil
MEKSKRVVGYARVSTEAQDITRQVELITAYCTERNYHLIKIIQEKISGARKDRKSINELLEVDDTVADMIIVSELSRLSREDDILSVLSTINELLKQGVDILFLDKQDRIYKAGTVLSLYDIITLSVEAKASADERYKIAGRMQTGLRSKLSEFTNMFTGGTVPFGYKVIHNPDYKLNLTPKNLLVVDAQEAEAVKYLFQQLIDGNTIRQTVRVYNKLYPYKLSYSGICRIIRNPKYKGEIYRRGKLYGTIPELQIITPEVFDKANKQMRENNLFQSNAPKYYNPLKGLIFCPCGCSLYMKPNHNSYLIYRCSSSYNDKQRCENFGIKCSYVLSAVWTCVKETLHTEEYKRFNTERANELQGINKQIRETITRKVNNVDELKTQSASLIAKIKKLNNDDLINELETDYNVLCKQIKQIEQEISELNGQIAENDAEIKRSVEQKDFSEMEQSALYKEKLQKVVYHSLSAMRGILEIVFKNGMIRYVLIKKHRNGGVFLLPEFWTVDISRAVIIVPTHPSVDPEHPYTLLPTIPREYTFDTIITERDMDEYRITVS

SEQ ID NO: 1910 - protein, 554 aa, Unknown
  Description of Unknown: Integrase B1911 sequence
  PTHR30461:SF3,SM00857,G3DSA:1.10.10.2600,IPR036162,PF13408, PS51737,IPR025827,G3DSA:3.40.50.1390,IPR006119,IPR038109, PF07508,IPR011109,SSF53041,PTHR30461,Coil, PS51736,cd00338,PF00239
MRKKFNIDLSMLTPEEQQQFRDDPTTLTKGEVNVALYLRFSSERQKEQSIEGQLRDCIAYCKRKSFRIAAIYVDRATTARKDVEKRVHFQEMISDSVHHLWNFVVVWKLDRFARNREDSAVFKMRLRKNGVRVKSATETISDNPEGIILESVLEGIAEYYSADLSQKITRGLRESAMKGHCVGGHVPLGYKIEDHRLVINPETAHIVQEAFQLYANGESVAEICRIFNSKGYRTAKNSEFNRSSFKSIFKNVRYIGTYIYKDIEKENAIPAIIDKDLFETVQRRLSLAADAPARGKAKVDYLLSGKLFCGHCGAAMHGESGTSKTGVIHNYYTCYSRKRRKGCNKKPLKKDFIERVVAQDAMTLLTDDVIEELADMAMSQADRDLKENTRIPELSARLTEIEQGINNITKAVEKGIASDALLNRLTELEKEKKDLTSQLREEEKYIYRIDRDQVVFWLTKFQGGDIEDEDCRRRIIDLLVNSVTVWDEPDGYKITTAYNLTSCKTKTFRVSSNADSPSGEGFGFGELSSTIGRISEPYIVWGTVFVQTKRHSLS

SEQ ID NO: 1911 - protein, 554 aa, Unknown
  Description of Unknown: Integrase B1912 sequence
  PTHR30461:SF3,SM00857,G3DSA:1.10.10.2600,IPR036162,PF13408, IPR025827,G3DSA:3.40.50.1390,PS51737,IPR006119,IPR038109, PF07508,IPR011109,SSF53041,PTHR30461,cd00338, PF00239
MPKKPIKHPAKPKRGVKLDIEEPGVLYGRYSSHNQKDISVEQQFEKGYELAAEYGIRIVETYADRAVSGRTDKRADFQRMMRDATQGKFRYVIAWKSNRMGRNMLEALINETRLQELGVRVLYVEEDFDDTAAGRFAARSMMNVNQFYSENMAEDIKRGLYDNASNCMVANGHLPYGYKADETLHYTIDEPKAAVIREIFTRVSCGEAFTDIMGSLNSRGITTSYGRPWGRTSFQKILSNERYRGIYIYGDVRIEGGIPRIVSDELYFKVQEVLTTKKNPQGRHRTNGDYLLTGKLFCGHCKSPMTGISGTGRTGKLHYYYVCQKKRTEKSCHKKNVRRDVIELKVAKAIRENVLKDDIIEWIADSSVEDYKRRESESYLSVFEGQLAEINRSIKNVMSAIEQGIITETTKSRLMELEAERSAMEGKIYAARADIVPADRERIIEWLRSLREGDIHDKQYQAGLFDTFLIGVYLYDDDNRMKIVFSFSGNKNTIEIPLDDAIDDVADEGEDVRLSSTLVHQSRARRTIAGLPGSTAVLYMIGGLFVLECSLEER

SEQ ID NO: 1912 - protein, 554 aa, Unknown
  Description of Unknown: Integrase B1913 sequence
  cd03768,SM00857,IPR006118,G3DSA:1.10.10.2600,IPR036162, PS51737,G3DSA:3.40.50.1390,IPR006119,IPR038109,PF07508, SSF53041,IPR011109,PTHR30461,PS00397,PS51736, Coil,PF00239
MEKSKRVVGYARVSTEAQDITRQVELITAYCTERNYHLIKIIQEKISGARKDRKSINELLEVDDTVADMIIVSELSRLSREDDILSVLSTINELLKQGVDILFLDKQDRIYKAGTVLSLYDIITLSVEAKASADERYKIAGRMQTGLRSKLSEFTNMFTGGTVPFGYKVIHNPDYKLNLTPKNLLVVDAQEAEAVKYLFQQLIDGNTIRQTVRGYNKLYPYKLSYSGICRIIRNPKYKGEIYRRGKLYGTIPELQIITPEVFDKANKQMRENNLFQSNAPKYYNPLKGLIFCPCGCSLYMKPNHNSYLIYRCSSAYNDKQKCENYGVKCAYILSSVWTCVKETLHTEEYKRFNTERANELQGINKQIREIVTRKVNNVDELKTQSASLIAKIKKLNNDDLINELETDYNVLCKQIKQIEQEISELNGQIAENDAEIKRSVEQKDFSEMEQSALYKEKLQKVVYHSLSAMRGILEIVFKNGMIRYVLIKKHRNGGVFLLPEFWTVDISRAVIIVPTHPSVDPEHPYTLLPTIPREYTFDTIITERDMDEYRITVS

SEQ ID NO: 1913 - protein, 554 aa, Unknown
  Description of Unknown: Integrase B1914 sequence
  PTHR30461:SF3,SM00857,G3DSA:1.10.10.2600,IPR036162,PF13408, PS51737,IPR025827,G3DSA:3.40.50.1390,IPR006119,IPR038109, PF07508,IPR011109,SSF53041,PF00239,PTHR30461, PS51736,Coil,cd00338
MKKFPIDLSCLTEEEISQFQEDPYTLYNGDQEVALYLRYSSTGQSDQSIEGQLRDCRAFCKANHYRIVAIYVDRATTARKDVEKRLHLMEMISDSAKQNWEYVIVWKLDRFARNRNDSAIMKMRLRKNGVKVLSATEHLTDSPESIILESVLEGMAEFFSAELSQKVTRGMRESALKCHSVGGHIPLGYKVENHKLVVDPDTAHIVQEAFSLYANGESVADICRKFNSAGYKTAKNTEFNRSSFKAMFRNTRYIGTYTYKDIVIENGIPAIIDKELFETVQRRLSKTATAPARGKAKVDYLLSGKLFCGHCGASMNGESGAGRHGKVYHYYSCYTKKRKLGCDKRPLKKDYIEGIVARDALNLLTDQLIDEIADMAIRQSEQDLINDTHIPQLTAQLSEVEKSITNITAAIEKGIASETLMNRLVQLEHEKKTLNKEIKAEEKFVYRIDRDQIIFWLSQFKYGNIEDEDFRRRLIDLLVNSVTVWDEPDGYKITTAYNLTSCKTKTFRVEKNPAAEEATGFDFGESECTKSPRNRMISRTFAFHKFRFLGVAFF

SEQ ID NO: 1914 - protein, 554 aa, Unknown
  Description of Unknown: Integrase B1915 sequence
  PTHR30461:SF3,cd00338,SM00857,G3DSA:1.10.10.2600,IPR036162, PF13408,PS51737,G3DSA:3.40.50.1390,IPR025827,IPR006119, IPR038109,PF07508,IPR011109,SSF53041,PTHR30461, PS51736,Coil,PF00239
MYEDIKTCVLYVRYSSNNQTEQSIEGQLRVCKDFCAHHNIKIVEVYADRATSASKDIEKRVSFLKMIKDSEKGNFDAVVVYKLDRFARSRYDSATYKYRLRKNGVQLISATENISDDPEGIILESVLEGMAEFYSAELSQKINRGLRESAYKHNSIGGQIPLGYKTEGKKLVIDEETAPIVRQAFEMYAEGHSVAEICRTFNARGYKTSKGTRFGKSSFSKIFRNEKYIGVYQFHEYRAENAIPALIDKKTFDLVQARLKAVGKAPGQFKAKRVYLLSGKLYCGHCGSKMNGNCNTSGYVYYECYGKKNLHKDCNKRNLKKEFIEDIVVKDALSLLTEERIQEIASIAVQTNTHEVETSTDIPTIRSRLHETRLSLDNITKAIETGAAPETLVKRMVELEKEKKTLEGELKRQEKGIVYLDKEQVIFWLEQFKNGDIEDEDFRRQLIDLFVNSVTVWDEPDDYFKITIAYNLTSLQEKTYRLPKGGTLSDFASNTPDRESDENSIILVHVITFGSNSRARGYLKGAMCIAAYLPKLVGFITGVQRQDNGEHGRK

SEQ ID NO: 1915 - protein, 554 aa, Unknown
  Description of Unknown: Integrase B1916 sequence
  PTHR30461:SF3,SM00857,G3DSA:1.10.10.2600,IPR036162,PF13408, IPR025827,G3DSA:3.40.50.1390,PS51737,IPR006119,IPR038109, PF07508,SSF53041,IPR011109,PTHR30461,Coil, PS51736,cd00338,PF00239
MSDTPKLNAAFYGRYSAGPNQSESSIEGQRRECYARAKSQNTIIRKDYIDRHISGQTDQRPQFQQLMKDVKKGLYNIVYVYTIDRFSRNKFDIAKYKNEMRKAGCRLISAKEYVPAGPEGIILESVLEGMAEYYSKELSRKVSRGIYESALKHQHIGGTVPFGFVLENKKYKPDPIKAPIVREIFERYVSGEPAVDICSNLNNRGIATSVGQKFNKSSLNRILSNTKYIGTYTYKRAYIDEITQEKKKELIEFKNVIEPIVSEELFIKAGQRMEQNKHTSKRKKDKPAVEFLLSGKLFCGKCKAPMTGDSGTGKSGNTYYYYTCANKKSKRGKDACRSKSYPKEKLEEFIVKFTRDDILSPEILDWLSENIIQLQGNQKDDMQIRLMLQQKKDVENKIANIMTAIENGIFTETTKDRLENLEEAKRNLEYNIQVEKFKNNAPAESKDSIIYYLEQFRKDDIKDNDCQRLIINTLIDTIIIDEENDRGIVAYRYNDDNNGTREFSIKNTFDVFECVSYGGLSGTKLTLLSKEIIEVCKEKNNIIFFEVLQNWLAA

SEQ ID NO: 1916 - protein, 554 aa, Unknown
  Description of Unknown: Integrase B1917 sequence
  SM00857,G3DSA:1.10.10.2600,IPR036162,PF13408,IPR025827, G3DSA:3.40.50.1390,PS51737,PS51736,IPR006119,IPR038109, PF07508,IPR011109,SSF53041,PTHR30461,Coil, mobidb-lite,cd00338,PF00239
MEELDTRPVADILARYSTDNQNPVTIDVQVEKCREWCERNGYQVGKIFSDEAVSGMKETRAGYEACMMHLGMGGAQLVVVYDQSRMFREFTEWFQFRKDVDMLGARVASVTQPMVGGDLKDPAVFINEAATAMLNHAQVLITRQKTIDALKHNAREGKSSGGKPPLGYDLDKDKKYVVNEHEAEAVRLVFQLFARGFSYGEIIDELNSRGYLTKRGQPFGKNSIFDLLKNEKYIGRLVYGATKAQADGRWNSHAKSKEDAIVVENGVPAIIEQELWEQVQSRIRTRKGAGGRYSAKREYLLTGRVFCGDCGASMVVMGSKASGYQYYECNNKRRTHTCKMKNVRTEWLEQTVAASIKQMLTEPANIEMLVDVARDQERQITTEYDTRRAGLASRYTRVCRQLENGVNALLEGVVSAELKEKVRRLEEEKAEIEAETAELNQYKGYVGLDDATIRRCVENVAKVDIDTPEGLKLILSVVSRVNIHTDTIEIKTLISTDGTDPDPTNSRPQNLELFPSEGLSGEKYHTTPENGSGHHYQQTRTWSCMRAGSGLFFV

SEQ ID NO: 1917 - protein, 554 aa, Unknown
  Description of Unknown: Integrase B1918 sequence
  PTHR30461:SF3,SM00857,G3DSA:1.10.10.2600,IPR036162,PF13408, PS51737,G3DSA:3.40.50.1390,IPR025827,IPR006119,IPR038109, PF07508,IPR011109,SSF53041,PTHR30461,Coil, PS51736,cd00338,PF00239
MRQKFKIDLSMLTPEEQQQFRDDPTTLTKGEVDVALYLRFSSERQKEQSIEGQLRDCIAYCKRKGFRIVAIYVDRATTARKDVEKRVHFQEMISDSIHHLWNFVVVWKLDRFARNREDSAVFKMRLRKNGVRVKSATETISENPEGIILESVLEGIAEYYSADLSQKITRGLRESAMKGHSVGGHVPLGYKLEDHKLVINPATAHIVQEAFQLYANGESMAEICRIFNNKGYRTAKNSEFNRSSFKSMFKNVRYIGTYIYKDIEKENAIPAIIDKDLFETVQRRLSLTADAPARGKAKVDYLLSGKLFCGHCGAAMNGESGTSKTGTIYNYYACYSRKRRKGCNKKPLKKDFIERIVAQDAMALLTNDVIEELADMAMSQADRDLKENTRIPELSTRLTEVEQGINNITKAVEKGIASDALLNRLAELEKEKKDLTSQLREEEKYIYRIDRDQVIFWLTKFQGGDIEDEDCRRRIIDLLVNSVTVWDEPDGYKITTAYNLTSCKTKTFRVSNNAGSPSREGFGFGELSSTIGRISEPYVVWGTVFVQTKRHFLP

SEQ ID NO: 1918 - protein, 554 aa, Unknown
  Description of Unknown: Integrase B1919 sequence
  cd00338,SM00857,G3DSA:1.10.10.2600,IPR036162,PF13408, IPR025827,G3DSA:3.40.50.1390,PS51737,IPR006119,IPR038109, PF07508,SSF53041,IPR011109,PTHR30461,PS51736, Coil,PF00239
MNKTAPAQRRSGIRITFCPCGENLPMKFTSTWKIADPLAQYIIYLRKSRKDMEAEALGQTDTLKRHRAALLSLSESRALNVVEICEEVVTGDSIAVRPEVQKVLQLVETGNYAGVIVMEVERLARGDTIDQGIIAQTFKYSNTKIVTPNKVYDPNNEMDEEYFEFGLFMSRREYNTIKRRLSRGKEASLREGKWISGKTPFGWSREKLPNDKGYKLVPHPEQAPVLQQIYNWYTGDGCARIGAKAISTRLNSLGVPTNSGSLWRADSVLDILRNPANAGWIKSGGRPETKRIVDGSVVVSRPRTRQEDLKLYKGLHNGLISQEQYDKAVALSYSSASPRGKGAWGTVTSLAGLVRCDQCGRVMVRRPSSGNRRDTLLCPSYGCTTVSAWYDDVEDAVLDALRGWLRELELGEAAAPDDTPMRTALESSIAADRKQLAKLEAQEARAYELVETGVYTPEVFLQRSQALAADKQVIVDRIEASQTTIHELARAKQARARLAPAVRRVLETYPLAASPQEKNALLKTVLQKVLYHKQTKSYTKSGSDMHVTLYPLAD

SEQ ID NO: 1919 - protein, 554 aa, Unknown
  Description of Unknown: Integrase B1920 sequence
  SM00857,G3DSA:1.10.10.2600,IPR036162,PF13408,IPR025827, G3DSA:3.40.50.1390,PS51737,IPR006119,IPR038109,PF07508, SSF53041,IPR011109,PTHR30461,Coil,cd00338, PF00239
MAYRKITDIKDTIGMRAVFYARVSTAEEEQLNAIELQIEENRGCIKDHGWKLVGEYIDRSKSGTMVKGRDDYQRLYEDLYEDLFDIVVIKDQERLQRNTLDWYLFINRVVQTGKLLFMYMDGKFYSPDDALITGVRAIIAEEFSRNLSKKLHNYHDHRIEKARQGQEIALQGSGNVYGWDKKDGKYYINPEQAKVRRLMCEGIMARKGSTLIAKELNEAGYRNTVGKPWKPMDIPKFVYDCKNVGTMIINKERHDFESKQTIKLPKEEWVYVENALPPIVTQEEWDLICKIHEERVIATGSDKRGKKTSGYSFSGKLVCGICGAPYWRKQRVSKDEYWVCSTKQTKGRKTRKRDSTMGKAGEINPLGCDNENISYNSLMEIMGVVSERLQANTDTIKHDMINWLTKLRKQLLEANGGHTEADLQRELSRKSKLLDAYLDGILNKQEYQKKAEELDERIIQLKAETEKNKANAGDIAEIDKVLANIDEEVARYVDGNEKLKVEYLLEHLEQVQIFPDKVIVIVPILSEGIVVEKTQYVSREKRRREKYNVWYADG

SEQ ID NO: 1920 - protein, 554 aa, Unknown
  Description of Unknown: Integrase B1921 sequence
  PTHR30461:SF3,cd00338,SM00857,G3DSA:1.10.10.2600,IPR036162, PF13408,PS51737,IPR025827,G3DSA:3.40.50.1390,IPR006119, IPR038109,PF07508,SSF53041,IPR011109,PTHR30461, PS51736,Coil,PF00239
MQTMPIDLSALTPEERQQFAENPSVLSTDCVATCCLYMRYSSDRQSEQSIEGQLRELISYCIRQEYRIAAVYVDRAISAHTSMAKRVAFQQMLADSKRAAWNTVLVWKLDRFARNRQDSAAARALLYKNGCGVESATEAISATKEGRLLESVLEGLNEYYSDELREKIIRGNRESALKGNALGGSVPLGYKIENKKWAIDPLTAPLVSEAFDRYASGDTVAAICDDFNARGYRTAKGAKFNKSSFKNIFRNEKYIGVYKYKDIRQEDSVPRIVTDDVWAKVKARLKVNESAPARGKAKVPYLLAGKIFCGHCGSQMVGECGRSKNGHTYNYYSCAGRKIRRDCNKKPVPKDWIEDIVVQDALEVLTDDVIDYVATVAARQSEEEIQQNTNIPAIREQIADIERKVRNLTKAIETSGMAPDTLVSRIAELESQRKGLSAQLLEEQHSVIHLTKEMVVYYLESVRKQAVPLETQKKMLIDLFVNSVTVYDDDQGYFKIITAYNLSEVPTKTYRVSTSFVEAGSSDTGPNGPPLDANPNTITVSGMVFVQTRKHALP

SEQ ID NO: 1921 - protein, 554 aa, Unknown
  Description of Unknown: Integrase B1922 sequence
  PTHR30461:SF3,cd00338,SM00857,G3DSA:1.10.10.2600,IPR036162, PF13408,IPR025827,PS51737,G3DSA:3.40.50.1390,IPR006119, IPR038109,PF07508,SSF53041,IPR011109,PTHR30461, PS51736,Coil,PF00239
MKKFPIDLSYLTEEEISQFQEDPYTLYNGDQDVALYLRYSSTGQSDQSIEGQLRDCRAFCKANHYRIVAIYVDRATTAHKDVEKRVHLMEMVADSAKQNWEYVIVWKLDRFARNRNDSAIMKMRLRKNGVKVLSATEHLTDSPESIILESVLEGMAEFFSAELSQKVTRGMRESALKCHSVGGHIPLGYKVENHKLVVDPDTAHIVQEAFSLYANGESVADICRKFNSAGYKTAKNTEFNRSSFKAMFRNTRYIGTYTYKDIVIENGIPAIIDKELFETVQRRLSKTATAPARGKAKVDYLLSGKLFCGHCGASMNGESGAGRHGKVYHYYSCYTKKRKLGCDKRPLKKDYIEGIVARDALNLLTDQLIDEIADMAIRQSEQDLINDTHIPQLTAQLSEVEKSITNITAAIEKGIASETLMNRLVQLEHEKKTLNKEIKAEEKFVYRIDRDQIVFWLSQFKYGNIEDEDFRRRLIDLLVNSVTVWDEPDGYKITTAYNLTSCKTKTFRVEKNPAAEEATGFDFGESECTKSPRNRLISRTFAFHKLSFSDVAFS

SEQ ID NO: 1922 - protein, 554 aa, Unknown
  Description of Unknown: Integrase B1923 sequence
  PTHR30461:SF3,SM00857,G3DSA:1.10.10.2600,IPR036162,PF13408, PS51737,G3DSA:3.40.50.1390,IPR025827,IPR006119,IPR038109, PF07508,SSF53041,IPR011109,PF00239,PTHR30461, PS51736,Coil,cd00338
MAKKKKPAGGNAIIYARYSSHNQRDVSIEQQIEACRKHAAELGLTITDTYEDRAISGRTDNRPAFQRMMRDAEDGKFQYVLAWKSNRMGRNMMQAMVNESRLMDCGVKVFYAEEDFDDSAAGRFALRSMMNVNQFYSDNLAEDVRRGLMDNASKCMANGRQPLGYKRGEDGKVVVDEPAAAIVREIYTRIASGEMFMDIARDLNRRGIKTQSGSEWNKSSFKVLCRNERYRGIYIYGDTRIEGGIPPIVDDVLWYKVQEVLKVKKSKNRHHCPSDEDYLLTGKLRCGKCGGYMIGMSGRSKTGDVHHYYACQNRRVGHTCDKKNIRRDVVEPAVAQAIKQYCLTDDAIEWITDQTIAYWEDEDRKLQIDSIENDLSAVQSSISNVMKAIEMGVITETTRDRLIELERQQTDLKSKLALAKEEIVHVDRKDLISSLLAFRHGNVHDRAYQEKLFNAFLIAVYVYDDDHLKLVFNSFGKDDTVNIALDLGENDDNSGLSDVSKSSPILSNGQPKSHLVYAGWLFSFYIVIQKQRTVFATVRPFLCSYYRMLMRPAP

SEQ ID NO: 1923 - protein, 554 aa, Unknown
  Description of Unknown: Integrase B1924 sequence
  PTHR30461:SF3,cd00338,SM00857,G3DSA:1.10.10.2600,IPR036162, PF13408,IPR025827,PS51737,G3DSA:3.40.50.1390,IPR006119, IPR038109,PF07508,IPR011109,SSF53041,PTHR30461, PS51736,Coil,PF00239
MKKFPIDLSCLTEEEISQFQEDPYTLYNGDQDVALYLRYSSTGQSDQSIEGQLRDCRAFCKANHYRIVAIYVDRATTARKDVEKRVHLMEMVADSAKQNWEYVIVWKLDRFARNRNDSAIMKMRLRKNGVKVLSATEYLTDSPESIILESVLEGMAEFFSAELSQKVTRGMRESALKCHSVGGHIPLGYKVENHKLVVNPDTAHIVQEAFSLYANGESVADICRKFNSAGYKTAKNTEFNRSSFKAMFRNTRYIGTYTYKDIVIENGIPAIIDKELFETVQRRLSKTATAPARGKAKVDYLLSGKLFCGHCGASMNGESGAGRHGKVYHYYSCYTKKRKLGCDKRPLKKDYIEGIVARDALNLLTDQLIDEIADMAIRQSEQDLINDTHIPQLTAQLSEVEKSIMNITAAIEKGIASETLMNRLVQLEHEKKTLNKEIKAEEKFVYRIDRDQIVFWLSQFKYGNIEDENFRRRLIDLLVNSVTVWDEPDGYKITTAYNLTSCKTKTFRVDKNPAAEEATGFDFGESECTKSPRNRLISRAFAFHKLSFWDTAFP

SEQ ID NO: 1924 - protein, 554 aa, Unknown
  Description of Unknown: Integrase B1925 sequence
  PTHR30461:SF3,SM00857,G3DSA:1.10.10.2600,IPR036162,PF13408, IPR025827,PS51737,G3DSA:3.40.50.1390,IPR006119,IPR038109, PF07508,IPR011109,SSF53041,PTHR30461,Coil, PS51736,cd00338,PF00239
MPQKFKIDLSMLTPEEQQQFRDDPTTLTKGEVDVALYLRFSSERQKEQSIEGQLRDCIAYCKHKSFRIVAIYVDRATTARKDVEKRIHFQEMISDSAHHLWNFVVVWKLDRFARNREDSAVFKMRLRKNGVRVKSATETISDNPEGIILESVLEGIAEYYSADLSQKITRGLRESAMKGHCVGGHVPLGYKIEDHRLVINPETAHIVQEAFQLYANGESVAEICRIFNGKGYRTAKNSEFNRSSFKSIFKNVRYIGTYIYKDIEKENAIPAIIDKDLFETVQRRLSLAADAPARGKAKVDYLLSGKLFCGHCGAAMHGESGTSKTGAIHNYYTCYSRKRRKGCNKKPLKKDFIERVVAQDAITLLTDDVIEELADMAMSQADRDLKENTRIPELSARLTEIEQGINNITKAVEKGIASDALLNRLTELEKEKKDLTSQLREEEKYIYRIDRDQVVFWLTKFQGGDIEDEDCRRRIIDLLVNSVTVWDEPDGYKITTAYNLTSCKTKTFRVSNNADSPSGEGFGFGELSSTIGRISEPYIVWGTVFVQTKRHSLS

SEQ ID NO: 1925 - protein, 554 aa, Unknown
  Description of Unknown: Integrase B1926 sequence
  PTHR30461:SF3,SM00857,G3DSA:1.10.10.2600,IPR036162,PF13408, IPR025827,PS51737,G3DSA:3.40.50.1390,IPR006119,IPR038109, PF07508,IPR011109,SSF53041,PTHR30461,Coil, PS51736,cd00338,PF00239
MAERVCCSYQNVLSIQNRVCCLYRVSTTKQVDHDDQNQADIPVQRKACREFAERMGWTIVYEEQENGVSGFKVSANDRDKIQLIKEYAEQGKFDILLVFMFDRIGRRAEETPFVVEWLINHGIQVWSVNEGEQRIDTHVDRLTNYIRFWQADGESQKTSMRTKAALGQMVEEGRFRGGSAPYGYDLVPSGTYNKRKHEVFKLEINPDEAKVVRMMFDLCVGSGYGRFKIANFLSEMGIKTRDGKNWHEATVGHILHNIMYTGVLRSGCTQSEVFPDLQIISPENFGLAQKLMAERANECNALRTMPRNTRGQSLLSGNVFCGHCGGRLTLTTNGTTRINAAGEKVGRKRIRYVCYNKTRKRSNCDGQTGYTMHILDKMVTDILHQVFDRMRSVEENEIISRTHRSAMVSLKKRLSDAKAESAKATKEYESLKLEVIKAVQGESAFPMDILSELVNNARTRMLDANAQLTELNEEVEKSNQRVEAIKADYRRIMEWSEMFDGSDMNVKKMIAGYIIKRVDVYSDYRLHIEFNMSFAQFELGLETEVEYEAQNIVS

SEQ ID NO: 1926 - protein, 554 aa, Unknown
  Description of Unknown: Integrase B1927 sequence
  SM00857,G3DSA:1.10.10.2600,IPR036162,PF13408,IPR025827, G3DSA:3.40.50.1390,PS51737,mobidb-lite,IPR006119,IPR038109, PF07508,SSF53041,IPR011109,PTHR30461,Coil, PS51736,cd00338,PF00239
MEELDTRPVADILARYSTDNQNPVTIDVQVEKCREWCERNGYQVGKIFSDEAVSGMKETRAGYEACMMHLGMGGAQLVVVYDQSRMFREFTEWFQFRKDVDMLGARVASVTQPMVGGDLKAPAVFINEAATAMLNHAQVLITRQKTIDALKHNAREGKSSGGKPPLGYDLDKDKKYVVNEHEAEAVRLVFQLFARGFSYGEIIDELNSRGYLTKRGQPFGKNSIFDLLKNEKYIGRLVYGATKAQADGRWNSHAKSKEDAIVVENGVPAIIEQELWEQVQSRIRTRKGAGGRYSAKREYLLTGRVFCGDCGASMVVMGSKASGYQYYECNNKRRTHTCKMKNVRTEWLEQTVAASIKQMLTEPANIEMLVDVARDQERQITTEYDTRRAGLASRYTRVCRQLENGVNALLEGVVSAELKEKVRRLEEEKAEIEAETAELNQYKGYVGLDDATIRRCVENVAKVDIDTPEGLKLILSVVSRVNIHTDTIEIKTLISTDGTDPDPTNSRPQNLELFPSEGLSGEKYHTTPENGSGHHYQQTRTWSCMRAGSGLFFV

SEQ ID NO: 1927 - protein, 554 aa, Unknown
  Description of Unknown: Integrase B1928 sequence
  PTHR30461:SF3,SM00857,G3DSA:1.10.10.2600,IPR036162,PF13408, PS51737,IPR025827,G3DSA:3.40.50.1390,IPR006119,IPR038109, PF07508,IPR011109,SSF53041,PF00239,PTHR30461, PS51736,Coil,cd00338
MKKFPIDLSCLTEEEISQFQEDPYTLYNGDQNVAIYLRYSSTGQSDQSIEGQLRDCRAFCKANHYRIVAIYVDRATTARKDVEKRVHLMEMISDSAKQNWEYVIVWKLDRFARNRNDSAIMKMRLRKNGVKVLSATEHLTDSPESIILESVLEGMAEFFSAELSQKVTRGMRESALKCHSVGGHIPLGYKVKNHKLVVDPDTAHIVQEAFSLYANGESVADICRKFNSAGYKTAKNTEFNRSSFKAMFRNTRYIGTYTYKDIVIENGIPAIIDKELFETVQRRLSKTATAPARGKAKVDYLLSGKLFCGHCGASMNGESGAGRHGKVYHYYSCYTKKRKLGCDKRPLKKDYIEGIVARDALNLLTDQLIDEIANMAIRQSEQDLINDTHIPQLTAQLSEVEKSITNITAAIEKGIASETLMNRLVQLEHEKKTLNKEIKAEEKFVYRIDRDQIVFWLSQFKYGNIEDENFRRRLIDLLVNSVTVWDEPDGYKITTAYNLTSCKTKTFRVEKNPAAEEATGFDFGESECTKSPRNHLISRTFAFHKFRFLGVAFS

SEQ ID NO: 1928 - protein, 554 aa, Unknown
  Description of Unknown: Integrase B1929 sequence
  PTHR30461:SF3,SM00857,G3DSA:1.10.10.2600,IPR036162,PF13408, PS51737,IPR025827,G3DSA:3.40.50.1390,IPR006119,IPR038109, PF07508,IPR011109,SSF53041,PF00239,PTHR30461, PS51736,Coil,cd00338
MKKFPIDLSCLTEEEISQFQEDPYTLYNGDQDVALYLRYSSTGQSDQSIEGQLRDCRTFCKANHYRIVAIYVDRATTARKDVEKRVHLMEMVADSAKRNWEYVIVWKLDRFARNRNDSAIMKMRLRKNGVKVLSATEHLTDSPESIILESVLEGMAEFFSAELSQKVTRGMRESALKCHSVGGHIPLGYKVENHKLVVDPDTAHIVQEAFSLYANGESVADICRKFNSAGYKTAKNTEFNRSSFKAMFRNTRYIGTYTYKDIVIENGIPAIIDKELFETVQRRLSKTATAPARGKAKVDYLLSGKLFCGHCGASMNGESGAGRHGKVYHYYSCYTKKRKLGCDKRPLKKDYIEGIVARDALNLLTDQLIDEIADMAIRQSEQDLINDTHIPQLTAQLSEVEKSITNITAAIEKGIASEALMNRLVQLEHEKKTLNKEIKAEEKFVYRIDRDQIVFWLSQFKYGNIEDEDFRRRLIDLLVNSVTVWDEPDGYKITTAYNLTSCKTKTFRVEKNPAAEEATGFDFGESECTKSPRNRLISRTFAFHKFRFFGTAFF

SEQ ID NO: 1929 - protein, 554 aa, Unknown
  Description of Unknown: Integrase B1930 sequence
  PTHR30461:SF3,IPR036162,PS51737,IPR011109,PTHR30461, PF00239,G3DSA:1.10.10.2600,IPR006119,SSF53041,cd00338, SM00857,IPR025827,IPR038109,mobidb-lite,PS51736, PF13408,G3DSA:3.40.50.1390,PF07508,Coil
MGKKQKTNGGDAVIYARYSSHNQRDVSIEQQVEACRKHAAELGLTVTATYEDRAISGKTDKRPSFQRMMRDAEQHKFAYVLAWKSNRIGRNMMQALVNESRLVDCGVKVFYAEEDFDDNAAGRFALRSMMNVNQFYIENMAEDVKRGLYDNAKRGLVNGSLPLGYKRGADGKPEIDEPKAAIVREIYTRVAAGELFASIADDLNARGIKTARGREWNKGSFHVLCHNDRYRGIYMYGDIRIPGGMPRIISDELFYDAQEAYGMKKDNRYGRARHGAENYLLTGKLYCGHCGGYMVGISGTSKTGEMHYYYACQKHRLEHTCEKKAIRRDVIENAVARAIMMYCLDDETIDFIVDSTIAYFKQKDHELHIEAMENELAAVQQAISNLMKAIEAGIITPTTRTRLLDLEEQQSKLSAKINTAKAERVEINRDDLIAGLQLFRTGDIKNKKFLAKLFNTFLIAVYLYDDNRLKIVFSFTGNHNSVEIPLELDNDCPDSEIVSDETEVRMSHLECRKNLGSSPSSGEAEKDDDCSDGRFVRTAPLPPHQTMKIRTFSR

SEQ ID NO: 1930 - protein, 554 aa, Unknown
  Description of Unknown: Integrase B1931 sequence
  PTHR30461:SF3,SM00857,G3DSA:1.10.10.2600,IPR036162,PF13408, IPR025827,PS51737,G3DSA:3.40.50.1390,IPR006119,IPR038109, PF07508,IPR011109,SSF53041,PF00239,PTHR30461, PS51736,Coil,cd00338
MKKFPIDLSCLTEEEISQFQEDPYTLYNGDQNVAIYLRYSSTGQSDQSIEGQLRDCRTFCKANHYRIVAIYVDRATTARKDVEKRLHLMEMISDSAKQNWEYVIVWKLDRFARNRNDSAIMKMRLRKNGVKVLSATEHLTDSPESIILESVLEGMAEFFSAELSQKVTRGMRESALKCHSVGGHIPLGYKVENHKLVIDPDTAHIVQEAFSLYANGESVAAICRKFNSAGYKTAKNTEFNRSSFKAMFRNTRYIGTYTYKDIVIENGIPAIIDKELFETVQRRLSKTATAPARGKAKVDYLLSGKLFCGHCGASMNGESGAGRHGKVYHYYSCYTKKRKLGCDKRPLKKDYIEGIVARDALNLLTDQLIDEIADMAIRQSEQDLINDTHIPQLTAQLSEVEKSITNITAAIEKGIASETLMNRLVQLEHEKKTLNKEIKAEEKFVYRIDRDQIVFWLSQFKYGNIEDEDFRRRLIDLLVNSVTVWDEPDGYKITTAYNLTSCKTKTFRVEKNPAAEEATGFDFGESECTKSPRNRSISRTFAFYKLPFSDVAFF

SEQ ID NO: 1931 - protein, 554 aa, Unknown
  Description of Unknown: Integrase B1932 sequence
  PTHR30461:SF3,SM00857,G3DSA:1.10.10.2600,IPR036162,PF13408, IPR025827,G3DSA:3.40.50.1390,PS51737,IPR006119,IPR038109, PF07508,IPR011109,SSF53041,PF00239,PTHR30461, PS51736,Coil,cd00338
MQTMPIDLSALTPEERQQFAENPSALSTDCVATCCLYMRYSSDRQSEQSIEGQLRELISYCIRQEYRIAAVYVDRAISAHTSMAKRVAFQQMLADSKRAAWNTVLVWKLDRFARNRQDSAAARALLYKNGCGVESATEAISATKEGRLLESVLEGLNEYYSDELREKIIRGNRESALKGNALGGSVPLGYKIENKKWAIDPLTAPLVSEAFDRYASGDTVAAICDDFNARGYRTAKGAKFNKSSFKNIFRNEKYIGVYKYKDIRQEDSVPRIVTDDVWRKVQSRLKVNEQAPARGKAKVPYLLAGKIFCGHCGSQMVGECGRSKNGHTYNYYSCAGRKIRRACNKKPVPKDWIEDIVVQDALEVLTDDVIDYVATVAARQSEEEIQQNTNIPAIREQIADIERKVRNLTKAIETSGMAPDTLVSRIAELESQRKGLSAQLLEEQHSVIHLTKEMVVYYLESVRKQAVPLETQKKMLIDLFVNSVTVYDDDPGYFKITTAYNLSAVPTKTYRVSASFVEAGSSDTGPNGPPLDANPNTITVSGMVFVQTRKHALP

SEQ ID NO: 1932 - protein, 554 aa, Unknown
  Description of Unknown: Integrase B1933 sequence
  PTHR30461:SF3,cd00338,SM00857,G3DSA:1.10.10.2600,IPR036162, PF13408,IPR025827,G3DSA:3.40.50.1390,PS51737,IPR006119, IPR038109,PF07508,IPR011109,SSF53041,PTHR30461, PS51736,Coil,PF00239
MNNHRKIAACYMRYSSHAQDDGNSIEAQDKAIKRYAEEHNYDLQYIYCDKAKTGKSAKRPEFQKMIADAKNQLFDVCIVHKFDRFSRSRRDSIIYKEILSEYGVCLVSVSEQFGSGPQSTVMEAISETMAEYYIKNLSNEVRKGLDVVASKGLHTGGIPPLGYDVSEDKKLVINEAEAEIVRLIFDRYANNYTYNDIAKELNAKGFKTKIGNEFTGSSFNAILQQRKYIGEYVYNRRVSEDKRGCVNSHKNKPEEEILRIPGAVPQIIDNETFEKVQKRLEMNKRKAGHYKSKSSYLLSGLIVCGVCGFHYQGNCRPSGSSSNMYSSYRCGKRQNHKVGCGNSEIEKNRLETFVLEQMQKHLFSDKAIKAIVTQVNEYNASVSKNKNKDLLLYEKQLKEVDKKIKNLSNAIANGVNQDLIIEQINSLGSAKKDLEQRINDSKAPEFPPVVEADVKKALSQFPTFLKENNSIECKNFINQYIDKIVVNKETVEVTFKVASAVFNSSFPDDKTGMIKIKIEISRFELKALPKQRRKIPTNGNFGKSFLKGYEIVQT

SEQ ID NO: 1933 - protein, 554 aa, Unknown
  Description of Unknown: Integrase B1934 sequence
  SM00857,G3DSA:1.10.10.2600,IPR036162,PF13408,PS51737, G3DSA:3.40.50.1390,IPR025827,IPR006119,IPR038109,PF07508, SSF53041,IPR011109,PF00239,PTHR30461,PS51736, Coil,cd00338
MNKTAPAQRRSGIRITFCPCGENLLMKFTSTWKIADPLAQYIIYLRKSRKDMEAEALGQTDTLKRHRAALLSLSESRWLNVVEICEEVVTGDSIAVRPEVQKVLQLVETGNYAGVIVMEVERLARGDTIDQGIIAQTFKYSNTKIITPNKIYDPNNEMDEEYFEFGLFMSRREYNTIKRRLSRGKEASLREGKWISGKTPFGWSREKLPNDKGYKLVPHPEQAPVLQQIYNWYTGEGCARIGAKAISTRLNSLGVPTNSGSLWRADSVLDILRNPANAGWIKSGGRPETKRIVDGAVVVSRPRTRQEDLKLYKGLHDGLISQEQYDKAVALSYSSASPRGKGAWGTVTSLAGLVRCDQCGRVMVRRPSSGGRRDTLLCPSYGCTTVSAWYDDVEDAVLDALRGWLRELELGDASAPDDTPMRTALESSIAADRKQLAKLEAQEARAYELVETGVYTPEIFLQRSQALAADKQTIVDRIEASQTTIHELARARHARARLAPAVRRVLETYPLAASPQEKNALLKTVLQKVLYHKQTKSYTKSGSDMHVTLYPLAD

SEQ ID NO: 1934 - protein, 554 aa, Unknown
  Description of Unknown: Integrase B1935 sequence
  PTHR30461:SF3,SM00857,G3DSA:1.10.10.2600,IPR036162,PF13408, PS51737,G3DSA:3.40.50.1390,IPR025827,IPR006119,IPR038109, PF07508,IPR011109,SSF53041,PF00239,PTHR30461, PS51736,Coil,cd00338
MKKFPIDLSCLTEEEISQFQEDPYTLYNGDQDVALYLRYSSTGQSDQSIEGQLRDCRTFCKANHYRIVAIYVDRATTARKDVEKRVHLMEMVADSAKQNWEYVIVWKLDRFARNRNDSAIMKMRLRKNGVKVLSATEHLTDSPESIILESVLEGMAEFFSAELSQKVTRGMRESALKCHSVGGHIPLGYKVENHKLVVDPDTAHIVQEAFSLYANGESVADICRKFNSAGYKTAKNTEFNRSSFKAMFRNTRYIGTYTYKDIVIENGIPAIIDKELFETVQRRLSKTATAPARGKAKVDYLLSGKLFCGHCGASMNGESGAGRHGKVYHYYSCYTKKRKLGCDKRPLKKDYIEGIVARDALNLLTDQLIDEIADMAIRQSEQDLINDTHIPQLTAQLSEVEKSITNITAAIEKGIASETLMNRLVQLEHEKKTLNKEIKAEEKFVYRIDRDQIIFWLSQFKYGNIEDEDFRRRLIDLLVNSVTVWDEPDGYKITTAYNLTSCKTKTFRVEKNPAAKEATGFDFGESECTKSPRNRLISRAFAFHKFRFFGAAFF

SEQ ID NO: 1935 - protein, 554 aa, Unknown
  Description of Unknown: Integrase B1936 sequence
  cd00338,SM00857,G3DSA:1.10.10.2600,IPR036162,PF13408, PS51737,IPR025827,G3DSA:3.40.50.1390,IPR006119,IPR038109, PF07508,SSF53041,IPR011109,PTHR30461,PS51736, Coil,PF00239
MNKTAPAQRRSGIRITFCPCGENLLMKFTSTWKIADPLAQYIIYLRKSRKDMEAEALGQTDTLKRHRAALLSLSESRWLNVVEICEEVVTGDSIAVRPEVQKVLQLVETGNYAGVIVMEVERLARGDTIDQGIIAQTFKYSNTKIITPNKIYDPNNEMDEEYFEFGLFMSRREYNTIKRRLSRGKEASLREGKWISGKTPFGWSREKLPNDKGYKLVPHPEQAPVLQQIYNWYTGEGCARIGAKAISTRLNSLGVPTNSGSLWRADSVLDILRNPANAGWIKSGGRPETKRIVDGAVVVSRPRTRQEDLKLYKGLHDGLISQEQYDKAVALSYSSASPRGKGAWGTVTSLAGLVRCDQCGRVMVRRPSSGGRRDTLLCPSYGCTTVSAWYDDVEDAVLDALRGWLRELELGDASAPDDTPMRTALESSIAADRKQLAKLEAQEARAYELVETGVYTPEIFLQRSQALAADKQVIVDRIEASQTTITELARAKQARARLAPAVRRVLETYPLAASPQERNALLKTVLQKVLYHKQTKSYTKSGSDMHVTLYPLAD

SEQ ID NO: 1936 - protein, 554 aa, Unknown
  Description of Unknown: Integrase B1937 sequence
  PTHR30461:SF3,SM00857,G3DSA:1.10.10.2600,IPR036162,PF13408, IPR025827,G3DSA:3.40.50.1390,PS51737,IPR006119,IPR038109, PF07508,IPR011109,SSF53041,PF00239,PTHR30461, PS51736,Coil,cd00338
MKKFPIDLSCLTEEEISQFQEDPYTLYNGDQDVALYLRYSSTGQSDQSIEGQLRDCRTFCKANHYRIVAIYVDRATTARKDVEKRVHLMEMVADSAKQNWEYVIVWKLDRFARNRNDSAIMKMRLRKNGVKVLSATEHLTDSPESIILESVLEGMAEFFSAELSQKVTRGMRESALKCHSVGGHIPLGYKVENHKLVVDPDTAHIVQEAFSLYANGESVADICRKFNSAGYKTAKNTEFNRSSFKAMFRNTRYIGTYTYKDIVIENGIPAIIDKELFETVQRRLSKTATAPARGKAKVDYLLSGKLFCGHCGASMNGESGAGRHGKVYHYYSCYTKKRKLGCDKRPLKKDYIEGIVARDALNLLTDQLIDEIADMAIRQSEQDLINDTHIPQLTAQLSEVEKSITNITAAIEKGIASETLMNRLVQLEHEKKTLNKEIKAEEKFVYRIDRDQIVFWLSQFKYGNIEDEDFRRRLIDLLVNSVTVWDEPDGYKITTAYNLTSCKTKTFRIEKNPAAEEATGFDFGKSECTKSPRNRLISRTFAFHKFRFLGVAFF

SEQ ID NO: 1937 - protein, 554 aa, Unknown
  Description of Unknown: Integrase B1938 sequence
  PTHR30461:SF3,SM00857,G3DSA:1.10.10.2600,IPR036162,PF13408, PS51737,G3DSA:3.40.50.1390,IPR025827,IPR006119,IPR038109, PF07508,IPR011109,SSF53041,PF00239,PTHR30461, PS51736,Coil,cd00338
MKKFPIDLSCLTEEEISQFQEDPYTLYNGDQNVAIYLRYSSTGQSDQSIEGQLRDCRTFCKANHYRIVAIYVDRATTARKDVEKRVHLMEMISDSAKQNWEYVIVWKLDRFARNRNDSAIMKMRLRKNGVKVLSATEHLTDSPESIILESVLEGMAEFFSAELSQKVTRGMRESALKCHSVGGHIPLGYKVENHKLVVDPDTAHIVQEAFSLYANGESVAAICRKFNSAGYKTAKNTEFNRSSFKAMFRNTRYIGTYTYKDIVIENGIPAIIDKELFETVQRRLSKTATAPARGKAKVDYLLSGKLFCGRCGASMNGESGAGRHGKVYHYYSCYTKKRKLGCDKRPLKKDYIEGIVARDALNLLTDQLIDEIADMAIRQSEQDLINDTHIPQLTAQLSEVEKSITNITAAIEKGIASETLMNRLVQLEHEKKTLNKEIKAEEKFVYRIDRDQIVFWLSQFKYGNIEDENFRRRLIDLLVNSVTVWDEPDGYKITTAYNLTSCKTKTFRVEKNPAAEEATGFDFGESECTKSPRNRLISRTFAFHKLLFVGVAFF

SEQ ID NO: 1938 - protein, 554 aa, Unknown
  Description of Unknown: Integrase B1939 sequence
  PTHR30461:SF3,SM00857,G3DSA:1.10.10.2600,IPR036162,PF13408, IPR025827,G3DSA:3.40.50.1390,PS51737,IPR006119,IPR038109, PF07508,SSF53041,IPR011109,PF00239,PTHR30461, PS51736,Coil,cd00338
MKKFPIDLSCLTEEEISQFQEDPYTLYNGDQEVALYLRYSSTGQSDQSIEGQLRDCRAFCKANHYRIVAIYVDRATTARKDVEKRVHLMEMVADSAKQNWEYVIVWKLDRFARNRNDSAIMKMRLRKNGVKVLSATEHLTDSPESIILESVLEGMAEFFSAELSQKVTRGMRESALKCHSVGGHIPLGYKVENHKLVVDPDTAHIVQEAFSLYANGESVADICRKFNSAGYKTAKNTEFNRSSFKAMFRNTRYIGTYTYKDIVIENGIPAIIDKELFETVQRRLSKTATAPARGKAKVDYLLSGKLFCGHCGASMNGESGAGRHGKVYHYYSCYTKKRKLGCDKRPLKKDYIEGIVARDALNLLTDQLIDEIADMAIRQSEQDLINDTHIPQLTAQLSEVEKSITNITAAIEKGIASETLMNRLVQLEHEKKTLNKEIKAEEKFVYRIDRDQIVFWLSQFKYGNIEDEDFRRRLIDLLVNSVTVWDEPDGYKITTAYNLTSCKTKTFRVEKNPDAEEATGFDFRESECTKSPRNRLISRTFAFHKFRFLGTAFF

SEQ ID NO: 1939 - protein, 554 aa, Unknown
  Description of Unknown: Integrase B1940 sequence
  PTHR30461:SF3,SM00857,G3DSA:1.10.10.2600,IPR036162,PF13408, IPR025827,G3DSA:3.40.50.1390,PS51737,IPR006119,IPR038109, PF07508,IPR011109,SSF53041,PTHR30461,Coil, PS51736,cd00338,PF00239
MKKFPIDLSCLTEEEISQFQEDPYTLYNGDQNVAIYLRYSSTGQSDQSIEGQLRDCRTFCKVNHYRIVAIYVDRATTARKDVEKRIHLMEMISDSAKQNWEYVIVWKLDRFARNRNDSAIMKMRLRKNGVKVLSATEHLTDSPESIILESVLEGMAEFFSAELSQKVTRGMRESALKCHSVGGHIPLGYKVENHKLVVDPDTAHIVQEAFSLYANGESVAAICRKFNSAGYKTAKNTEFNRSSFKAMFRNTRYIGTYTYKDIVIENGIPAIIDKELFETVQRRLSKTATAPARGKAKVDYLLSGKLFCGHCGASMNGESGAGRHGKVYHYYSCYTKKRKLGCDKRPLKKDYIEGIVARDALNLLTDQLIDEIADMAIRQSEQDLINDTHIPQLTAQLSEVEKSITNITAAIEKGIASETLMNRLVQLEHEKKTISKEIKAEEKFVYRIDRDQIVFWLSQFKYGNIEDENFRRRLIDLLVNSVTVWDEPDGYKITTAYNLTSCKTKTFRVEKNPAAEEATGFDFGESECTKSHRNRLISMTFAFHKLLFSDVAFS

SEQ ID NO: 1940 - protein, 554 aa, Unknown
  Description of Unknown: Integrase B1941 sequence
  SM00857,G3DSA:1.10.10.2600,IPR036162,PF13408,IPR025827, G3DSA:3.40.50.1390,PS51737,IPR006119,IPR038109,PF07508, SSF53041,IPR011109,PF00239,PTHR30461,PS51736, Coil,cd00338
MNKTAPAQRRSGIRITFCPCGENLLMKFTSTWKIADPLAQYIIYLRKSRKDMEAEALGQTDTLKRHRAALLSLSESRGLNVIEICEEVVTGDSIAVRPEVQKVLQLVETGNYAGVIVMEVERLARGDTIDQGIIAQTFKYSDTRIITPNKTYDPNNEMDEEYFEFGLFMSRREYNTIKRRLSRGKEASLREGKWISGKTPFGWLREKLPNDKGYKLVPHPEQAPVLRQIYNWYTGEGCARIGAKAISTRLNSLGIPTNSGSLWRADSVLDILRNPANAGWIKSGGRPETKRIVDGAVVVSRPRTRQEDLRLYKGLHDGLISQEQYDKAVALSYSSASPRGKGAWGTVTSLAGLVRCDQCGRVMVRRPSSGNRRDTLLCPSYGCPTVSAWYDDVEDAVLDALRGWLRELELGEAAAPDDTPMRTALESSIAADRKQLAKLESQEARAYELVETGVYTPEIFLQRSQALAADKQVIVDRIEASQTTITELARAKQARARLAPAVRRVLETYPLAASPQEKNALLKTVLQKVLYHKQTKSYTKSGSDMHVTLYPLAD

SEQ ID NO: 1941 - protein, 554 aa, Unknown
  Description of Unknown: Integrase B1942 sequence
  PTHR30461:SF3,cd00338,SM00857,G3DSA:1.10.10.2600,IPR036162, PF13408,IPR025827,PS51737,G3DSA:3.40.50.1390,IPR006119, IPR038109,PF07508,IPR011109,SSF53041,PTHR30461, PS51736,Coil,PF00239
MKKFPIDLSCLTEEEISQFQEDPYTLYNGDQDVALYLRYSSTGQSDQSIEGQLRDCRAFCKANHYRIVAIYVDRATTARKDVEKRVHLMEMVADSAKQNWEYVIVWKLDRFARNRNDSAIMKMRLRKNGVKVLSATEYLTDSPESIILESVLEGMAEFFSAELSQKVTRGMRESALKCHSVGGHIPLGYKVENHKLVVNPDTAHIVQEAFSLYANGESVADICRKFNSAGYKTAKNTEFNRSSFKAMFRNTRYIGTYTYKDIVIENGIPAIIDKELFETVQRRLSKTATAPARGKAKVDYLLSGKLFCGHCGASMNGESGAGRHGKVYHYYSCYTKKRKLGCDKRPLKKDYIEGIVARDALNLLTDQLIDEIADMAIRQSEQDLINDTHIPQLTAQLSEVEKSIMNITAAIEKGIASETLMNRLVQLEHEKKTLNKEIKAEEKFVYRIDRDQIVFWLSQFKYGNIEDENFRRRLIDLLVNSVTVWDEPDGYKITTAYNLTSCKTKTFRVDKNPAAEEATGFDFGESECTKSPRNRLISRTFAFYKLPFSDAAFS

SEQ ID NO: 1942 - protein, 554 aa, Unknown
  Description of Unknown: Integrase B1943 sequence
  SM00857,G3DSA:1.10.10.2600,IPR036162,PF13408,IPR025827, G3DSA:3.40.50.1390,PS51737,IPR006119,IPR038109,PF07508, SSF53041,IPR011109,PTHR30461,Coil,cd00338, PF00239
MAYRKITDIKDTIGMRAVFYARVSTAEEEQLNAIELQIEENRGCIKDHGWKLVGEYIDRSKSGTMVKGRDDYQRLYEDLYEDLFDIVVIKDQERLQRNTLDWYLFINRVVQTGKLLFMYMDGKFYSPDDALITGVRAIIAEEFSRNLSKKLHNYHDHRIEKARQGQEIALQGSGNVYGWDKKDGKYYINPEQAKVRRLMCEGIMARKGSTLIAKELNDAGYRNTVGKPWKPMDIPKFVYDCKNVGTMIINKERHDFESKQTIKLPKEEWVYVENALPPIVTQEEWDLICKIHEERVIATGSDRRGKKTSGYSFSGKLVCGICGAPYWRKQRVSKDEYWVCSTKQTKGRRTRKRDSTMGKAGEINPLGCDNENISYNSLMEIMGVVSERLQANTDTIKHDMINWLTKLRKQLLEANGGHTEADLQRELSRKSKLLDAYLDGILNKQEYQKKAEELDERIIQLKAETEKNKANSGDIAEIDKVLANIDEEVSRYVDGNEKLKVEYLLEHLEQVQIFPDKVIVIVPILSEGIVVEKAQYVSREKWSRKKYTDESSDG

SEQ ID NO: 1943 - protein, 554 aa, Unknown
  Description of Unknown: Integrase B1944 sequence
  SM00857,G3DSA:1.10.10.2600,IPR036162,PF13408,IPR025827, G3DSA:3.40.50.1390,PS51737,IPR006119,IPR038109,PF07508, SSF53041,IPR011109,PTHR30461,Coil,cd00338, PF00239
MAYRKITDIRDTIGMRAVFYARVSTAEEEQLNAIELQIEENRGCIKDHGWKLVGEYIDRSKSGTMVKGRDDYQRLYEDLYENLFDIVVIKDQERLQRNTLDWYLFINRVVQTGKLLFMYMDGKFYSPDDALITGVRAIIAEEFSRNLSKKLHNYHDHRIEKARQGQEIALQGSGNVYGWDKKDGKYYINPEQAKVRRLMCEGIMARKGSTLIAKELNDAGYRNTVGKPWKPMDIPKFVYDCKNVGTMIINKERHDFESKQTIKLPKEEWVYVENALPPIVTQEEWDLICKIHEERVIATGSDRRGKKTSGYSFSGKLVCGICGAPYWRKQRVSKDEYWVCSTKQTKGRKTRKRDSTMGKAGEINPLGCDNENISYNSLMEIMGVVSERLQANTDTIKQDMINWLTKLRKQLLEANGGHTEADLQRELSRKSKLLDAYLDGILNKQEYQKKAEELDERIIQLKTETEKNKANSGDIAEIDKVLANIDEEVARYVDGNEKLKVEYLLEHLEQVQIFPDKVIVIVPILSEGIVVEKTQYVSREKRRREKYNVWYADG

SEQ ID NO: 1944 - protein, 554 aa, Unknown
  Description of Unknown: Integrase B1945 sequence
  PTHR30461:SF3,SM00857,G3DSA:1.10.10.2600,IPR036162,PF13408, IPR025827,G3DSA:3.40.50.1390,PS51737,IPR006119,IPR038109, PF07508,IPR011109,SSF53041,PF00239,PTHR30461, PS51736,Coil,cd00338
MKKFPIDLSCLTEEEISQFQEDPYTLYNGDQNVAIYLRYSSTGQSDQSIEGQLRDCRTFCKANHYRIVAIYVDRATTARKDVEKRVHLMEMISDSAKQNWEYVIVWKLDRFARNRNDSAIMKMRLRKNGVKVLSATEHLTDSPESIILESVLEGMAEFFSAELSQKVTRGMRESALKCHSVGGHIPLGYKVENHKLVVDPDTAHIVQEAFSLYANGESVAAICRKFNSAGYKTAKNTEFNRSSFKAMFRNTRYIGTYTYKDIVIENGIPAIIDKELFETVQRRLSKTATAPARGKAKVDYLLSGKLFCGHCGASMNGESGAGRHGKVYHYYSCYTKKRKLGCDKRPLKKDYIEGIVARDALNLLTDQLIDEIADMAIRQSEQDLINDTHIPQLTAQLSEVEKSITNITAAIEKGIASETLMNRLVQLEHEKKTLNKEIKAEEKFVYRIDRDQIVFWLSQFKYGNIEDEDFRRRLIDLLVNSVTVWDEPDGYKITTAYNLTSCKTKTFRVEKNPAAEEATGFDFGESECTKSPRNHPISRTFAFHKFRFYGVAFF

SEQ ID NO: 1945 - protein, 554 aa, Unknown
  Description of Unknown: Integrase B1946 sequence
  IPR036162,PS51737,IPR011109,PTHR30461,PS00397, PF00239,G3DSA:1.10.10.2600,IPR006119,SSF53041,SM00857, IPR025827,IPR038109,PS51736,cd03768,IPR006118, PF13408,G3DSA:3.40.50.1390,PF07508,Coil
MGKSKRVVGYARVSTEAQDITRQVELITAYCTERNYHLIKIIQEKISGARKDRKSINELLEVDDTVADMIIVSELSRLSREDDILSVLSTINELLKQGVDIQFLDKQDRIYKAGTVLSLYDIITLSVEAKASADERYKIAGRMQTGLRSKLSEFTNMFTGGTVPFGYKVIHNPDYKLNQTPKNLLVVDAQEAEAVKYLFQQLIDGNTIRQTVRVYNKLYPYKLSYSGICRIIRNPKYKGEIYRRGKLYGTIPELQIITPEVFDKANKQMRENNLFQSNAPKYYNPLKGLIFCPCGCSLYMKPNHNSYLIYRCSSSYNDKQRCENFGIKCSYVLSAVWTCIKATLHTEEYLRFNSRRSNELHEINKQIRETITQKVNNVDELKTQSASLIAKIKKLNNDDLINELETDYNVLCKQIKQIEQEISELNGQIAENDAEIKRSVEQKDFSEMEQSALYKEKLQKVVYHSLSAMRGILEIVFKNGMIRYVLIKKHRNGGVFLLPEFWTVDISRAVIIIPTHPSVDPEHPYTLLPTIPKEYTFDAIITERDMDEYRITVS

SEQ ID NO: 1946 - protein, 554 aa, Unknown
  Description of Unknown: Integrase B1947 sequence
  PTHR30461:SF3,SM00857,G3DSA:1.10.10.2600,IPR036162,PF13408, IPR025827,PS51737,G3DSA:3.40.50.1390,IPR006119,IPR038109, PF07508,IPR011109,SSF53041,PTHR30461,Coil, PS51736,cd00338,PF00239
MQTMPIDLSALTPEERQQFAENPSVLSTDCVATCCLYMRYSSDRQSEQSIEGQLRELISYCIRQEYRIAAVYVDRAISAHTSMAKRVAFQQMLADSKRAAWNTVLVWKLDRFARNRQDSAAARALLYKNGCGVESATEAISATKEGRLLESVLEGLNEYYSDELREKIIRGNRESALKGNALGGSVPLGYKIENKKWAIDPLTAPLVSEAFDRYASGDTVAAICDDFNARGYRTAKGAKFNKSSFKNIFRNEKYIGVYKYKDIRQENSVPRIVTDDVWAKVKARLKVNEEAPARGKAKVPYLLTGKIFCGHCGSQMVGECGRGKGGKTYNYYSCAGRKIRHTCDKKPVPKDWIEDIVVQDALEVLTDDVIDYVATVAARQSEEELQQNTNIPAIREQIADIERKVRNLTKAIEASNMAPDSLVARIAELESQRKGLSAQLLEEQHSVIHLSKEVVVYFLESVREKASPLESQKKMLVDLLINSVTVYDDEPGYLKITTAYNLSAVPAKTYRVSTSSVESGCSDMRANGPPLDANPNTITVVGMVFVQTRKHALP

SEQ ID NO: 1947 - protein, 554 aa, Unknown
  Description of Unknown: Integrase B1948 sequence
  cd03768,SM00857,IPR006118,G3DSA:1.10.10.2600,IPR036162, PS51737,G3DSA:3.40.50.1390,IPR006119,IPR038109,PF07508, IPR011109,SSF53041,PTHR30461,PS00397,PS51736, Coil,PF00239
MEKSKRVVGYARVSTEAQDITRQVELITAYCTERNYHLIKIIQEKISGARKDRKSLNELLEVDDTVADMIIVSELSRLSREDDILSVLSTINELLKQGVDILFLDKQDRIYKAGTVLSLYDIITLSVEAKASADERYKIAGRMQTGLRSKLAEFTNMFTGGTVPFGYKVIHNPDYKLNLTPKNLLVVDAQEAEAVKYLFQQLIDGNTIRQTVRVYNKLYPYKLSYSGICRIIRNPKYKGEIYRRGKLYGQISELQIISPEDFDKANKQMRENELFQSNAPKYYNPLKGLLFCPCGCGLYMKPNHNSYLIYRCSSAYNDKQKCENYGIKCAYILSSVWTCVKETLHTEEYKRFNTERANELQGINKQIRETITRKVNNVDELKTQSASLIAKIKKLNNDDLINELETDYNGLCKQIKQTEQEISELNGQIAENDAEIKRSVEQKDFSQMEQSALYKEKLQKVVYHSLSAMRGILEIVFKNGMIRYVLIKKHRNGGVFLLPEFWTVDISRAVIIIPTHPSVDPEHPYTLLPTIPREYTFDAIITERDMDEYRITVS

SEQ ID NO: 1948 - protein, 554 aa, Unknown
  Description of Unknown: Integrase B1949 sequence
  SM00857,G3DSA:1.10.10.2600,IPR036162,PF13408,IPR025827, PS51737,G3DSA:3.40.50.1390,IPR006119,IPR038109,PF07508, SSF53041,IPR011109,PTHR30461,Coil,cd00338, PF00239
MAYRKITDIRDTIGMRAVFYARVSTAEEEQLNAIELQIEENRGCIKDHGWKLVGEYIDRSKSGTMVKGRDDYQRLYEDLYEDLFDIVVIKDQERLQRNTLDWYLFINRVVQTGKLLFMYMDGKFYSPDDALITGVRAIIAEEFSRNLSKKLHNYHDHRIEKARQGQEIALQGSGNVYGWDKKDGKYYINPEQAKVRRLMCEGIMARKGSTLIAKELNDAGYRNTVGKPWKPMDIPKFVYDCKNVGTMIINKERHDFESKQTIKLPKEEWVYVENALPPIVTQEEWDLICKIHEERVIATGSDRRGKKTSGYSFSGKLVCGICGAPYWRKQRVSKDEYWVCSTKQTKGRRTRKRDSTMGKAGEINPLGCDNENISYNSLMEIMGVVSERLQANTDTIKQDMINWLTKLRKQLLEANGGHTEADLQREISRKSKLLDAYLDGILNKQEYQKKAEELDDRIIQLKAETEKNKANSGDIAEIDKVLANIDEEVSRYVDGNEKLKVEYLLEHLEQVQIFPDKVIVIVPILSEGIVVEKAQYVSREKRRREKYNVWYADG

SEQ ID NO: 1949 - protein, 554 aa, Unknown
  Description of Unknown: Integrase B1950 sequence
  PTHR30461:SF3,SM00857,G3DSA:1.10.10.2600,IPR036162,PF13408, PS51737,G3DSA:3.40.50.1390,IPR025827,IPR006119,IPR038109, PF07508,IPR011109,SSF53041,PTHR30461,Coil, cd00338,PF00239
MARTATKHPAKPKRGKKLEAEEPGVLYGRYSSHNQKDISVEQQFEKGYGLAGEYGIRIVETYADRAVSGRTDKRKDFQRMMADAAKGKFRYVIAWKSNRMGRNMLEALVNEAKLQELGVRVLYVEEDFDDTAAGRFAARSMMNVNQFYSENMAEDIKRGLYDNASNCMVANGHLPYGYKRDDTLHYVIDEAKAAVIREIFVRVSCGEPLVDIYDSLNARGIKTSYGRPWGRSSFQKILSNERYRGIYIYGDVRKEGGIPRIVSDELYFKVQEVLKTKKNPQGRHRVNGDYLLTGKLFCGNCKSPMIGISGTGRTGKLHYYYVCQKKRSEKTCDKKNVRRDEVEYQIAKAIFDNALQDQVIEWIADSTIAYNDRKEAEGHIGILEDQLADVQRSLKNIMSAIEQGIVTETTKSRLLELESERSEIEGKIAAAKADIVPVNREQLIEWLLSLREGDIHDKKYQARLFDTFLIAAYLYDDGTAKLVFSFAGDKNTVTVPLAEAVDSVEENTAEGSFKLCLAPPKIPNIRLDGRDFLILGGDKFAGRLQHAGGMLQSP

SEQ ID NO: 1950 - protein, 554 aa, Unknown
  Description of Unknown: Integrase B1951 sequence
  PTHR30461:SF3,cd00338,SM00857,G3DSA:1.10.10.2600,IPR036162, PF13408,PS51737,G3DSA:3.40.50.1390,IPR025827,IPR006119, IPR038109,PF07508,IPR011109,SSF53041,PTHR30461, PS51736,Coil,PF00239
MVTIRWLREQIRQGKTIYDLPLRVTFYARVSTEKVEQQGSLENQIQYYTEFIQKNPNWTYVPGYIDEGISGTSTYKRDSFLRMIENAKRGMFDFIITKEISRFSRNTLDSIQYTQELLDNNVGVLFQNDNINTLDSDSEFRLIVMAGVAQDEVRKLSERLKFGFRQSIKNGHVLGNNRLWGYDKKDCKLTIIPEQAEAVKLIFQLYATGNYGLRKLSQELTRRGYTSLLGNKFNSVTIGHILQNPKYKGWYCGNKTQSLDYRKKKTAFLDESEWVTYPDPNIPAIVSEELWNQANEIFKKRSARTKAYGVGYQSRYPYSGKIICGKHGTAFHRQSFKTMEGHTEFWQCRMYREHGKAGCDLPTLRTKELDAILADQFQKLVKNQKQIVRLVMDSVSSVQQKRDYSGQIAQLNTQISQLEGKKDKLLELSIANAITIQEFKKRNNRFNEQIADMQEQMISLQKLEENGSAASVDLSAIEKALWQELSFQDTISTEVVAAILDHVVVCEGSTKQRIDLELYLRLGQTASVTFSRERFAFWNTSSSRCAPQDAGCAR

SEQ ID NO: 1951 - protein, 554 aa, Unknown
  Description of Unknown: Integrase B1952 sequence
  PTHR30461:SF3,IPR036162,PS51737,IPR011109,PTHR30461, PF00239,G3DSA:1.10.10.2600,IPR006119,PF14287,SSF53041, IPR025378,SM00857,IPR025827,cd03770,IPR038109, PS51736,PF13408,G3DSA:3.40.50.1390,PF07508,Coil
MAKSNQGKITALYERLSRDDELQGESNSILNQKKYLEDYARKSGFNNIKHFTDDGYSGTNFNRPGFQSMIAEIEAGHIATVIVKDMSRFGRNYLEVGFYTEIQFPSKGVRFIAINNNVDSANPTDNDFTPFLNIMNEWYAKDTSNKIRAVFKSRMQDGKRCSGSIPYGYKRIPGDKQTLYVDEEAAAVVYKIFEMAANGSSMAKIAQTLSDEKVLIPSAYEEQHGSKAAQFHSYHDPYRWNTTTITYILDRQEYLGHTVLRKSIRENFKLKKRRAATPEEQMIFRDTHEAIIDQETWDKAQRLRKRCPKRLPDGTYTHRLSGMVFCADCGSRMSFSSPEAKHRDSGVVYDSDSSWQCSKYRNMYTSCTSHFIKTSTIEAAILEAIKAMAQKVLEDEAEFAEQLRALWESQNNQSSNEFKKELLAVQKRMDELDTLIRSLYESSVMGKIPERQFQRLMAQYDEEQTGCETRMAELKKELDNTETTKVDLKRFIKLIRKYKDCEVLTDDMLYELVEKWLSIPHPADGRSAVNRKSTFISTSLAILFPAKSRSTTMM

SEQ ID NO: 1952 - protein, 554 aa, Unknown
  Description of Unknown: Integrase B1953 sequence
  PTHR30461:SF3,SM00857,G3DSA:1.10.10.2600,IPR036162,PF13408, IPR025827,PS51737,G3DSA:3.40.50.1390,IPR006119,IPR038109, PF07508,IPR011109,SSF53041,PTHR30461,Coil, PS51736,cd00338,PF00239
MRKKFNIDLSMLTPEEQQQFRDDPTTLTKGEVDVALYLRFSSERQKEQSIEGQLRDCIAYCKRKSFRIVAIYVDRATTARKDVEKRVHFQEMISDSAHHLWNFVVVWKLDRFARNREDSAVFKMRLRKNGVRVKSATETISDNPEGIILESVLEGIAEYYSADLSQKITRGLRESAMKGHSVGGHVPLGYKIEDHRLVINPATAHIVQEAFQLYANGESMAEICRIFNSKGYRTAKNSEFNRSSFKSMFKNVRYIGTYIYKDIKKENAIPAIIDKDLFETVQRRLSLAADAPARGKAKVDYLLSGKLFCGHCGATMNGESGTSKTGAIHNYYTCYSRKRRKGCDKKPLKKDFIERIVAQDAMALLTNDVIEELADMAMSQADRDLKENTRIPELSTRLTEVEQGINNITKAIEKGIASDTLLNRLTELEKEKKDLTSQLHEEEKYICRIDRDQVVFWLTKFQGGDIEDEDCRRRIIDLLVNSVTVWDEPDGYKITTAYNLTSCKTKTFRVSNNADSPSGEGFGFGELSSTIGRISEPYIVWGTVFVQTRRHSLS

SEQ ID NO: 1953 - protein, 554 aa, Unknown
  Description of Unknown: Integrase B1954 sequence
  cd00338,SM00857,G3DSA:1.10.10.2600,IPR036162,PF13408, PS51737,IPR025827,G3DSA:3.40.50.1390,IPR006119,IPR038109, PF07508,SSF53041,IPR011109,PTHR30461,PS51736, Coil,PF00239
MNKTAPAQRRSGIRITFCPCGENLLMKFTSTWKIADPLAQYIIYLRKSRKDMEAEALGQTDTLKRHRAALLSLSESRWLNVVEICEEVVTGDSIAVRPEVQKVLQLVETGNYAGVIVMEVERLARGDTIDQGIIAQTFKYSNTKIITPNKIYDPNNEMDEEYFEFGLFMSRREYNTIKRRLSRGKEASLREGKWISGKTPFGWSREKLPNDKGYKLVPHPEQAPVLQQIYNWYTGEGCARIGAKAISTRLNSLGVPTNSGSLWRADSVLDILRNPANAGWIKSGGRPETKRIVDGAVVVSRPRTRQEDLKLYKGLHDGLISQEQYDKAVALSYSSASPRGKGAWGTVTSLAGLVHCDQCGRVMVRRPSSGNRRDTLLCPSYGCTTVSAWYDDVEDAVLDALRGWLRELELGEAAAPDDTPMRTALESSIAADRKQLAKLEAQEARAYELVETGVYTPEVFLQRSQALAADKQVIVDRIEASQTTIHELARARQARARLAPAVRRVLETYPLAASPQEKNALLKTVLQKVLYHKQTKSYTKSGSDMHVTLYPLAD

SEQ ID NO: 1954 - protein, 554 aa, Unknown
  Description of Unknown: Integrase B1955 sequence
  PTHR30461:SF3,cd00338,SM00857,G3DSA:1.10.10.2600,IPR036162, PF13408,PS51737,IPR025827,G3DSA:3.40.50.1390,IPR006119, IPR038109,PF07508,IPR011109,SSF53041,PTHR30461, mobidb-lite,Coil,PF00239
MPRKPAKHPAKPKRGKKLEVEEPGVLYGRYSSHNQKDISVEQQFEKGYELAAEYGIRIIDTYADRAVSGRTDKRRDFQRMMTDAAKGKFRYVIAWKSNRMGRNMLEALINEARLQDLGVRVLYVEEDFDDTAAGRFAARSMMNVNQFYSENMAEDIKRGLYDNAANCMVANGHLPYGYKADETLHYAIDEPKAAVIREIFTRVSCGETFVDIMASLNARGIKTSYGRPWGRSSFQKILSNERYRGIYIYGDVRKEGGIPRIISDELYFKVQEVITTKKNPQGRHRVNGDYLLTGKLFCGHCKSPMTGISGTSRSGNLHYYYVCQKRRTEKTCEKKNLRRDDIELQVAKAIKRRTLDDDTINWIADSVVEYSQHQESASGIGLLEDQLKDTQRSIKNLMAAIEQGIITPTTKARLMELEKEQSDIDRKITMAKADVIPVNRDQLVGWLKKLQAGDVHDKKYQAELFDTFLIAVYVYDNPDGQDYMKVVFNYAGSKNTVEIPLDPSVIDNVENIETGAVRLSSAQVHQTSEILPVTVGSWGGFLVIQRKEARSRIR

SEQ ID NO: 1955 - protein, 554 aa, Unknown
  Description of Unknown: Integrase B1956 sequence
  PTHR30461:SF3,SM00857,G3DSA:1.10.10.2600,IPR036162,PF13408, IPR025827,G3DSA:3.40.50.1390,PS51737,IPR006119,IPR038109, PF07508,SSF53041,IPR011109,PTHR30461,Coil, PS51736,cd00338,PF00239
MPQKFKIDLSMLTPEEQQQFRDDPTTLTKGEVDVALYLRFSSERQKEQSIEGQLRDCIAYCKHKSFRIVAIYVDRATTARKDVEKRVHFQEMISDSSHHLWNFVVVWKLDRFARNREDSAVFKMRLRKNGVRVKSATETISDNPEGIILESVLEGIAEYYSADLSQKITRGLRESAMKGHCVGGHVPLGYKIEDHRLVINPETAHIVQEAFQLYANGESVAEICRIFNGKGYRTAKNSEFNRSSFKSIFKNVRYIGTYIYKDIEKENAIPAIIDKDLFETVQRRLSLAADAPARGKAKVDYLLSGKLFCGHCGAAMHGESGTSKTGAIHNYYTCYSRKRRKGCNKKPLKKDFIERVVAQDAMALLTDDVIEELADMAMSQADRDLKENTRIPELSARLTEIEQGINNITKAVEKGIASDALLNRLTELEKEKKDLTSQLREEEKYIYRIDRDQVVFWLTKFQGGDIEDEDCRRRIIDLLVNSVTVWDEPDGYKITTAYNLTSCKTKTFRVSNNADSPSGEGFGFGELSSTIGRISEPYIVWGTVFVQTKRHSLP

SEQ ID NO: 1956 - protein, 553 aa, Unknown
  Description of Unknown: Integrase B1957 sequence
  PTHR30461:SF3,SM00857,G3DSA:1.10.10.2600,IPR036162,PF13408, PS51737,G3DSA:3.40.50.1390,IPR025827,IPR006119,IPR038109, PF07508,IPR011109,SSF53041,PTHR30461,Coil, PS51736,cd00338,PF00239
MKKFPIDLSCLTEEEISQFQEDPYTLYNGDQNVAIYLRYSSTGQSDQSIEGQLRDCRAFCKANHYRIVAIYVDRATTARKDVEKRVHLMEMISDSAKQNWEYVIVWKLDRFARNRNDSAIMKMRLRKNGVKVLSATEHLTDSPESIILESVLEGMAEFFSAELSQKVTRGMRESALKCHSVGGHIPLGYKVENHKLVVDPDTAHIVQEAFSLYANGESVADICRKFNSAGYKTAKNTEFNRSSFKAMFRNTRYIGTYTYKDIVIENGIPAIIDKELFETVQRRLSKTATAPARGKAKVDYLLSGKLFCGHCGASMNGESGAGRHGKVYHYYSCYTKKRKLGCDKRPLKKDYIEGIVARDALNLLTDQLIDEIADMAIRQSEQDLINDTHIPQLTAQLSEVEKSITNITAAIEKGIASETLMNRLVQLEHEKKTLNKEIKAEEKFVYRIDRDQIVFWLSQFKYGNIEDENFRRRLIDLLVNSVTVWDEPDGYKITTAYNLTSCKTKTFRVEKNPAAEEATGFDFGKSECTIERISEPYIVWGTVFVQTKRHSLP

SEQ ID NO: 1957 - protein, 553 aa, Unknown
  Description of Unknown: Integrase B1958 sequence
  PTHR30461:SF3,cd00338,SM00857,G3DSA:1.10.10.2600,IPR036162, PF13408,PS51737,G3DSA:3.40.50.1390,IPR025827,IPR006119, IPR038109,PF07508,IPR011109,SSF53041,PTHR30461, PS51736,Coil,PF00239
MKKFPIDLSCLTEEEISQFQEDPYTLYNGDQNVAIYLRYSSTGQSDQSIEGQLRDCRTFCKANHYRIVAIYVDRATTARKDVEKRLHLMEMISDSAKQNWEYVIVWKLDRFARNRNDSAIMKMRLRKNGVKVLSATEHLTDSPESIILESVLEGMAEFFSAELSQKVTRGMRESALKCHSVGGHIPLGYKVENHKLVIDPDTAHIVQEAFSLYANGESVAAICRKFNSAGYKTAKNTEFNRSSFKAMFRNTRYIGTYTYKDIVIENGIPAIIDKELFETVQRRLSKTATAPARGKAKVDYLLSGKLFCGHCGASMNGESGAGRHGKVYHYYSCYTKKRKLGCDKRPLKKDYIEGIVARDALNLLTDQLIDEIADMAIRQSEQDLINDTHIPQLTAQLTEVEKSITNITAAIEKGIASETLMNRLVQLEHEKKTLNKEIKAEEKFVYRIDRDQIVFWLSQFKYGNIEDKDFRRRLIDLLVNSVTVWDEPDGYKITTAYNLTSCKTKTFRVEKNPAAEEATGFDFGESECTMERISEPYIVWGTVFVQTKRHSLP

SEQ ID NO: 1958 - protein, 553 aa, Unknown
  Description of Unknown: Integrase B1959 sequence
  PTHR30461:SF3,SM00857,G3DSA:1.10.10.2600,IPR036162,PF13408, PS51737,IPR025827,G3DSA:3.40.50.1390,IPR006119,IPR038109, PF07508,IPR011109,SSF53041,PTHR30461,Coil, PS51736,cd00338,PF00239
MKKFPIDLSCLTEEEISQFQEDPYTLYNGDQNVAIYLRYSSTGQSDQSIEGQLRDCRAFCKANHYRIVAIYVDRATTARKDVEKRVHLMEMISDSAKQNWEYVIVWKLDRFARNRNDSAIMKMRLRKNGVKVLSATEHLTDSPESIILESVLEGMAEFFSAELSQKVTRGMRESALKCHSVGGHIPLGYKVENHKLVVDPDTAHIVQEAFSLYANGESVADICRKFNSAGYKTAKNTEFNRSSFKAMFRNTRYIGTYTYKDIVIENGIPAIIDKELFETVQRRLSKTATAPARGKAKVDYLLSGKLFCGHCGASMNGESGAGRHGKVYHYYSCYTKKRKLGCDKRPLKKDYIEGIVARDALNLLTDQLIDEIADMAIRQSEQDLINDTHIPQLTAQLSEVEKSITNITAAIEKGIASETLMNRLVQLEHEKKTLNKEIKAEEKFVYRIDRDQIVFWLSQFKYGNIEDENFRRRLIDLLVNSVTVWDEPDGYKITTAYNLTSCKTKTFRVEKNPAAEEATGFDFGESECTIERISEPYIVWGTVFVQTKRHSLP

SEQ ID NO: 1959 - protein, 553 aa, Unknown
  Description of Unknown: Integrase B1960 sequence
  PTHR30461:SF3,SM00857,G3DSA:1.10.10.2600,IPR036162,PF13408, PS51737,G3DSA:3.40.50.1390,IPR025827,IPR006119,IPR038109, PF07508,IPR011109,SSF53041,PTHR30461,Coil, PS51736,cd00338,PF00239
MKKFPIDLSCLTEEEISQFQEDPYTLYNGDQNVAIYLRYSSTGQSDQSIEGQLRDCRTFCKENHYRIVAIYVDRATTARKDVEKRVHLMEMISDSAKQNWEYVIVWKLDRFARNRNDSAIMKMRLRKNGVKVLSATEHLTDSPESIILESVLEGMAEFFSAELSQKVTRGMRESALKCHSVGGHIPLGYKVENHKLVVDPDTAHIVQEAFSLYANGESVADICRKFNSAGYKTAKNTEFNRSSFKAMFRNTRYIGTYTYKDIVIENGIPAIIDKELFETVQRRLSKTATAPARGKAKVDYLLSGKLFCGHCGASMNGESGAGRHGKVYHYYSCYTKKRKLGCDKRPLKKDYIEGIVARDALNLLTDQLIDEIADMAIRQSEQDLINDTHIPQLTAQLSEVEKSITNITAAIEKGIASETLMNRLVQLEHEKKTLNKEIKAEEKFVYRIDRDQIVFWLSQFKYGNIEDENFRRRLIDLLVNSVTVWDEPDGYKITTAYNLTSCKTKTFRVEKNPAAEEATGFDFGESECTIERISEPYIVWGTICVQTKIHPLP

SEQ ID NO: 1960 - protein, 553 aa, Unknown
  Description of Unknown: Integrase B1961 sequence
  PTHR30461:SF3,cd00338,SM00857,G3DSA:1.10.10.2600,IPR036162, PF13408,IPR025827,G3DSA:3.40.50.1390,PS51737,IPR006119, IPR038109,PF07508,IPR011109,SSF53041,PTHR30461, PS51736,Coil,PF00239
MQTIPIDLSSLTAQEQRQFAENPAVLDANCDTVCCLYMRYSSEKQTEQSIEGQLRELLSFCKQHKYRVAAVYVDRAISAHASMDKRPAFQKMLSDSRGASWKTVLVYKLDRFARNREDAAVARMRLRKAGCNVESAKEGISKNPEGVILEALLEGMAEYYSLELSQKITRGMRESALKGQAVGGSIPLGYRIEKKQWVLDPLTAPLVSEAFNRYADGETVAGICSDFNARGYRTAKGAQFNKSSFKNIFRNEKYIGVYKYKDIRVEDAIPRIVPDDLWERVQARLKVSEQAPARGKAKVPYLLSGKIFCGHCGSPMIGESGRGKGGKTYNYYSCATRKRTGNCDKKPVPKDWIEDVVAQDALSVLTDDVIDYVATIAAQQSEEDIQKNTNIPAIREQIADIERKVRNLTKAIEASGAAPDVLVSRIVDLEEQRKGLSAQLSEEERGVIPLTKEMVMVFLTAVREQVVPLENMKPVIISLLVNSVTVYDDEPGFMKFTTAYNLTKTPQKTYKVQTFGDYKCSDIGANGVPLGTNSNTITVVGMVFVQTRKHALP

SEQ ID NO: 1961 - protein, 553 aa, Unknown
  Description of Unknown: Integrase B1962 sequence
  PTHR30461:SF3,SM00857,G3DSA:1.10.10.2600,IPR036162,PF13408, IPR025827,G3DSA:3.40.50.1390,PS51737,IPR006119,IPR038109, PF07508,IPR011109,SSF53041,PTHR30461,Coil, PS51736,cd00338,PF00239
MQTMPIDLSALTPAERQQFSENSSVLSTDCVAVCCLYMRFSSDRQSEQSIEGQLRELISYCIRQEYRIAAVYVDRAVSAHTSMAKRVAFQQMLADSKRAAWNTVLVWKLDRFARNRQDSAAARAVLMKNGCMVESATENISNSPEGRLLESVLEGINEYYSEDLKQKIRRGNRESALKGQALGGSVPLGYKIERKKWTLDPLTAPLVEEAFTRYAGGETVAAICDDFNLRGYRTSKGAKFNKSSFKNIFRNEKYIGVYKYTDIRQENAVPRIVSDDVWRKVQSRLKVNEEAPARGKAKVPYLLAGKIFCGHCGAPMVGECGRSKGGKTYNYYSCSNRKRKNSCDKKPAPKDWIEDVVAQDAQAVLTDDIIEYVSTVAAKQSEEEIQQNTNIPAIKQQIRDIDSKVRNLTKAIESASIAPDSLVSRIAELENQKKGLSAQLTEEQHNVVPLTKEMVRYYLESVRSNAIPFETQKHMLIDMFVNSVTVYDDEPGFMKFTTAYNLTQIPSKTYKVPIPGGFKCSDMGLISPPLEYNTNTISVIGMVFIQTKRHALP

SEQ ID NO: 1962 - protein, 553 aa, Unknown
  Description of Unknown: Integrase B1963 sequence
  PTHR30461:SF3,SM00857,G3DSA:1.10.10.2600,IPR036162,PF13408, PS51737,G3DSA:3.40.50.1390,IPR025827,IPR006119,IPR038109, PF07508,IPR011109,SSF53041,PTHR30461,Coil, PS51736,cd00338,PF00239
MQTIPIDLSALTPAERQQFSENPSVLSTDCVAVCCLYMRFSSDRQSEQSIEGQLRELISYCVRQEYRIAAVYVDRAVSAHTSMAKRVAFQQMLADSKRAAWNTVLVWKLDRFARNRQDSAAARAVLMKNGCMVESATENISNSPEGRLLESVLEGINEYYSEDLKQKIRRGNRESALKGQALGGSVPLGYKIEHKNWTLDPLTAPLVEEAFARYAGGETVASICDDFNLRGYRTSKGAKFNKSSFKNIFRNEKYIGVYKYTDIRQENAVPRIVSDDVWRKVQSRLKVNEEAPARGKAKVPYLLAGKIFCGHCGAPMVGECGRSKGGKTYNYYSCSNRKRKNSCDKKPAPKDWIEDVVAQDAQAVLTDDIIEYVSTVAAKQSEEEIQQNTNIPAIKQQIMDIDSKVRNLTKAIESASIAPDSLVSRIAELESQKKGLSAQLTEEQHSVVPLTKEMVRYYLESVRSNAIPFETQKHMLIDMFVNSVTVYDDEPGFMKFTTAYNLTQIPSKTYKVPIPGGFKCSDMGLISPPLEYNTNTISVIGMVFIQTKRHALP

SEQ ID NO: 1963 - protein, 553 aa, Unknown
  Description of Unknown: Integrase B1964 sequence
  cd03768,SM00857,IPR006118,G3DSA:1.10.10.2600,IPR036162, PS51737,G3DSA:3.40.50.1390,IPR006119,IPR038109,PF07508, SSF53041,IPR011109,PTHR30461,PS00397,PS51736, Coil,PF00239
MEKSKRVVGYARVSTEAQDITRQIELITAYCSDRNYHLIKIIQEKISGARKDRKSLNELLDVDDAVADMIIVSELSRLSREDDILSVLSTINELLKQGVDILFLDKQDRIYKAGTILSLYDIITLSVEAKASADERYKIAGRMQTGLRSKLAEFSNMFAGGTVPFGYKVIHNPDYKLNQTPKNLLVVDAKEAEAVKYLFQQLIDGNTIRQTVRVYNKLYPYKLSYSGICRIIRNPKYKGEIYRRGKLYGQIPELQIITPEDFDKANKQMRENSLFQSNAPKYYNPLKGLLFCPCGCGLYMKPNHNSYLIYRCSSAYNDKQKCENYGVKCAYILSSVWTCVKETLHTEEYKRFNTQRANELQGINKQIRETITRKVNSVDELKTQSASLIAKIKKLNNDDLINELETDYNVLCKQIKQTEQEISELNGQIAENDAEIKRNVEQKDFSKMEQSALYKEKLQKAVYHSLSAMRGILEIIFKNGMTRYVLIKKHRNGGTYLLPDTFKGDMERKQIIVPSLRTDKDNPYSAQPMNLRYTFDEFFKAMPVEEYEIPITE

SEQ ID NO: 1964 - protein, 553 aa, Unknown
  Description of Unknown: Integrase B1965 sequence
  PTHR30461:SF3,SM00857,G3DSA:1.10.10.2600,IPR036162,PF13408, PS51737,IPR025827,G3DSA:3.40.50.1390,IPR006119,IPR038109, PF07508,SSF53041,IPR011109,PF00239,PTHR30461, PS51736,Coil,cd00338
MKRFPIDLSCLTEEEISQFQEDPYTLYNGDQEVALYLRYSSTGQSDQSIEGQLRDCRAFCKANHYRIVAIYVDRATTARKDVEKRVHLMEMVADSAKQNWEYVIVWKLDRFARNRNDSAIMKMRLRKNGVKVLSATEHLTDSPESIILESVLEGMAEFFSAELSQKVTRGMRESALKCHSVGGHIPLGYKVENHKLVVDPDTAHIVQEAFSLYANGESVADICRKFNSAGYKTAKNTEFNRSSFKAMFRNTRYIGTYTYKDIVIENGIPAIIDKELFETVQRRLSKTATAPARGKAKVDYLLSGKLFCGHCGASMNGESGAGRHGKVYHYYSCYTKKRKLGCDKRPLKKDYIEGIVARDALNLLTDQLIDEIADMAIRQSEQDLINDTHIPQLTAQLSEVEKSITNITAAIEKGIASETLMNRLVQLEHEKKTLNKEIKAEEKFVCRIDRDQIVFWLSQFKHGNIEDEDFRRRLIDLLVNSVTVWDEPDGYKITTAYNLTSCKTKTFRVDKNPAAEEATGFDFGESECTIERIFEPYIVWGTVFVQTKRHSLP

SEQ ID NO: 1965 - protein, 553 aa, Unknown
  Description of Unknown: Integrase B1966 sequence
  PTHR30461:SF3,SM00857,G3DSA:1.10.10.2600,IPR036162,PF13408, IPR025827,G3DSA:3.40.50.1390,PS51737,IPR006119,IPR038109, PF07508,IPR011109,SSF53041,PF00239,PTHR30461, PS51736,Coil,cd00338
MKKFPIDLSCLTEEEISQFQEDPYTLYNGDQNVAIYLRYSSTGQSDQSIEGQLRDCRTFCKANHYRIVAIYVDRATTARKDMEKRVHLMEMISDSAKQNWEYVIVWKLDRFARNRNDSAIMKMRLRKNGVKVLSATEHLTDSPESIILESVLEGMAEFFSAELSQKVTRGMRESALKCHSVGGHIPLGYKVENHKLVVDPDTAHIVQEAFSLYANGESVAAICRKFNSAGYKTAKNTEFNRSSFKAMFRNTRYIGTYTYKDIVIENGIPAIIDKELFETVQRRLSKTATAPARGKAKVDYLLSGKLFCGHCGASMNGESGAGRHGKVYHYYSCYTKKRKLGCDKRPLKKDYIEGIVARDALNLLTDQLIDEIADMAIRQSEQDLINDTHIPQLTAQLSEVEKSITNITAAIEKGIASETLMNRLVQLEHEKKTLNKEIKAEEKFVYRIDRDQIVFWLSQFKYGNIEDEDFRRRLIDLLVNSVTVWDEPDGYKITTAYNLTSCKTKTFRVEKNPAAEKATGFDFGESECTIERISEPYIVWGTVFVQTKRHSLP

SEQ ID NO: 1966 - protein, 553 aa, Unknown
  Description of Unknown: Integrase B1967 sequence
  PTHR30461:SF3,cd00338,SM00857,G3DSA:1.10.10.2600,IPR036162, PF13408,PS51737,G3DSA:3.40.50.1390,IPR025827,IPR006119, IPR038109,PF07508,IPR011109,SSF53041,PTHR30461, PS51736,Coil,PF00239
MKLPIDISCLTKEEISQFQEDPYTLYNGDQDVALYLRYSSTGQSDQSIEGQLRDCRTFCKANHYRIVAIYVDRATTAHKDVEKRVHLMEMVADSAKQNWEYVIVWKLDRFARNRNDSAIMKMRLRKNGVKVLSATEHLTDSPESIILESVLEGMAEFFSAELSQKVTRGMRESALKCHSVGGHIPLGYKVENHKLVVNPDTAHIVQEAFSLYANGESVADICRKFNSAGYKTAKNTEFNRSSFKAMFRNTRYIGTYTYKDIVIENGIPAIIDKELFETVQRRLSKTATAPARGKAKVDYLLSGKLFCGHCGASMNGESGAGRHGKVYHYYSCYTKKRRLGCDKRPLKKDYIEEIVARDALNLLTDQLIDEIADMAIQQSEQDLINDTHIPQLTAQLSEVEKSITNITAAIEKGIASETLMNRLVQLEHEKKTLNKEIKAEEKFVYRIDRDQIVFWLSQFKYGNIEDEDFRRRLIDLLVNSVTVWDEPDGYKITTAYNLTSCKTKTFRVEKNPATEEATGFDFGESECAKKTRNRNGFGSFCLHKLLFSPAAFF

SEQ ID NO: 1967 - protein, 553 aa, Unknown
  Description of Unknown: Integrase B1968 sequence
  PTHR30461:SF3,SM00857,G3DSA:1.10.10.2600,IPR036162,PF13408, PS51737,G3DSA:3.40.50.1390,IPR025827,IPR006119,IPR038109, PF07508,SSF53041,IPR011109,PF00239,PTHR30461, PS51736,Coil,cd00338
MKEFPIDLSCLTEEEISQFQEDPYTLYNGDQNVAIYLRYSSTGQSDQSIEGQLRDCRTFCKANHYRIVAIYVDRATTARKDVEKRVHLMEMISDSAKQNWEYVIVWKLDRFARNRNDSAIMKMRLRKNGVKVLSATEYLTDSPESIILESVLEGMAEFFSAELSQKVTRGMRESALKCHSVGGHIPLGYKVENHKLVVDPDTAHIVQEAFSLYANGESVADICRKFNSAGYKTAKNTEFNRSSFKAMFRNTRYIGTYTYKDIVIENGIPAIIDKELFETVQRRLSKTATAPARGKAKVDYLLSGKLFCGHCGASMNGESGAGRHGKVYHYYSCYTKKRKLGCDKRPLKKDYIEGIVARDALNLLTDQLIDEIADMAIRQSEQDLINDTHIPQLAAQLSEVEKSIANITAAIEKGIASETLMNRLVQLEHEKKTLNKEIKAEEKFVYRIDRDQIVFWLSQFKYGNIEDEDFRRRLIDLLVNSVTVWDEPDGYKITTAYNLTSCKTKTFRVEKNPAAEEATGFDFGESECTIERISEPYIVWGTVFVQTKRHSLP

SEQ ID NO: 1968 - protein, 553 aa, Unknown
  Description of Unknown: Integrase B1969 sequence
  PTHR30461:SF3,SM00857,G3DSA:1.10.10.2600,IPR036162,PF13408, IPR025827,G3DSA:3.40.50.1390,PS51737,IPR006119,IPR038109, PF07508,SSF53041,IPR011109,PF00239,PTHR30461, PS51736,Coil,cd00338
MKKFPIDLSCLTEEEISQFQEDPYTLYNGDQNVAIYLRYSSTGQSDQSIEGQLRDCRTFCKANHYRIVAIYVDRATTARKDVEKRVHLMEMISDSAKQNWEYVIVWKLDRFARNRNDSAIMKMRLRKNGVKVLSATEHLTDSPESIILESVLEGMAEFFSAELSQKVTRGMRESALKCHSVGGHIPLGYKVENHKLVVDPDTAHIVQEAFSLYANGESVAAICRKFNSAGYKTAKNTEFNRSSFKAMFRNTRYIGTYTYKDIVIENGIPAIIDKELFETVQRRLSKTATAPARGKAKVDYLLSGKLFCGHCGASMNGESGAGRHGKVYHYYSCYTKKRKLRCDKRPLKKDYIEGIVARDALNLLTDQLIDEIADMAIRQSEQDLINDTHIPQLTAQLSEVEKSITNITAAIEKGIASETLMNRLVQLEHEKKTLNKEIKAEEKFVYRIDRDQIVFWLSQFKYGNIEDENFRRRLIDLLVNSVTVWDEPDGYKITTAYNLTSCKTKTFRVEKNPAAEEATGFDFGESECTIERISEPYIVWGTVFVQTKRHSLP

SEQ ID NO: 1969 - protein, 553 aa, Unknown
  Description of Unknown: Integrase B1970 sequence
  cd03768,SM00857,IPR006118,G3DSA:1.10.10.2600,IPR036162, PS51737,G3DSA:3.40.50.1390,IPR006119,IPR038109,PF07508, IPR011109,SSF53041,PTHR30461,PS00397,PS51736, Coil,PF00239
MEKSKRVVGYARVSTEAQDITRQIELITAYCNDRNYHLIKIIQEKISGARKDRKSLNELLDVDDAVADMIIVSELSRLSREDDILSVLSTINELLKQGVDILFLDKQDRIYKAGTILSLYDIITLSVEAKASADERYKIAGRMQTGLRSKLAEFSNMFAGGTVPFGYKVIHNPDYKLNQTPKNLLVVDAKEAEAVKYLFQQLIDGNTIRQTVRVYNKLYPYKLSYSGICRIIRNPKYKGEIYRRGKLYGQIPELQIITPEDFDKANKQMRENSLFQSNAPKYYNPLKGLLFCPCGCGLYMKPNHNSYLIYRCSSAYNDKQKCENYGVKCAYILSSVWTCVKETLHTEEYKRFNTQRANELQGINKQIRETITRKVNSVDELKTQSASLIAKIKKLNNDDLINELETDYNVLCKQIKQTEQEISELNGQIAENDAEIKRNVEQKDFSKMEQSALYKEKLQKAVYHSQSAMRGILEIVFKNGMTRYVLIKKHRNGGTYLLPDTFKGDMERKQIIVPSLRTDKDNPYSAQPMNLRYTFDEFFKAMPVEEYEIPITE

SEQ ID NO: 1970 - protein, 553 aa, Unknown
  Description of Unknown: Integrase B1971 sequence
  PTHR30461:SF3,SM00857,G3DSA:1.10.10.2600,IPR036162,PF13408, PS51737,IPR025827,G3DSA:3.40.50.1390,IPR006119,IPR038109, PF07508,IPR011109,SSF53041,PF00239,PTHR30461, PS51736,Coil,cd00338
MKKFPIDLSCLTEEEISQFQEDPYTLYNGDQDVALYLRYSSTGQSDQSIEGQLRDCRAFCKANHYRIVAIYVDRATTARKDVEKRVHLMEMVADSAKQNWEYVIVWKLDRFARNRNDSAIMKMRLRKNGVKVLSATEHLTDSPESIILESVLEGMAEFFSAELSQKVTRGMRESALKCHSVGGHIPLGYKVENHKLVVDPDTAHIVQEAFSLYANGESVADICRKFNSAGYKTAKNTEFNRSSFKAMFRNTRYIGTYTYKDIVIENGIPAIIDKELFETVQRRLSKTATAPARGKAKVDYLLSGKLFCGHCGASMNGESGAGRHGKVYHYYSCYTKKRKLGCDKRPLKKDYIEGIVARDALNLLTDQLIDEIADMAIRQSEQDLINDTHIPQLTAQLSEVEKSIMNITAAIEKGIASETLMNRLVQLEHEKKTLNKEIKAEEKFVYRIDRDQIVFWLSQFKYGNIEDEDFRRRLIDLLVNSVTVWDEPDGYKITTAYNLTSCKTKTFRVEKNPAAEEATGFDFGESECTIERISEPYIVWGTVFVQTKRHSLP

SEQ ID NO: 1971 - protein, 553 aa, Unknown
  Description of Unknown: Integrase B1972 sequence
  PTHR30461:SF3,SM00857,G3DSA:1.10.10.2600,IPR036162,PF13408, PS51737,G3DSA:3.40.50.1390,IPR025827,IPR006119,IPR038109, PF07508,SSF53041,IPR011109,PF00239,PTHR30461, PS51736,Coil,cd00338
MKKFPIDLSCLTEEEISQFQEDPYTLYNGDQEVALYLRYSSTGQSDQSIEGQLRDCRAFCKANHYRIVAIYVDRATTARKDVEKRVHLMEMVADSAKQNWEYVIVWKLDRFARNRNDSAIMKMRLRKNGVKVLSATEHLTDSPESIILESVLEGMAEFFSAELSQKVTRGMRESALKCHSVGGHIPLGYKVKNHKLVVDPDTAHIVQEAFSLYANGESVADICRKFNSAGYKTAKNTEFNRSSFKAMFRNTRYIGTYTYKDIVIENGIPAIIDKELFETVQRRLSKTATAPARGKAKVDYLLSGKLFCGHCGASMNGESGAGRHGKVYHYYSCYTNKRKLGCDKRPLKKDYIEGIVARDALNLLTDQLINEIADMAIRQSEQDLINDTHIPQLTAQLSEVEKSITNITAAIEKGIASETLMNRLVQLEHEKKTLNKEIKAEEKFVYRIDRDQIVFWLSQFKYGNIEDEDFRRRLIDLLVNSVTVWDEPDGYKITTAYNLTSCKTKTFRVEKNPAAEEATGFDFGESECTIERISEPYIVWGTVFVQTKRHSLP

SEQ ID NO: 1972 - protein, 553 aa, Unknown
  Description of Unknown: Integrase B1973 sequence
  PTHR30461:SF3,SM00857,G3DSA:1.10.10.2600,IPR036162,PF13408, PS51737,IPR025827,G3DSA:3.40.50.1390,IPR006119,IPR038109, PF07508,IPR011109,SSF53041,PF00239,PTHR30461, PS51736,Coil,cd00338
MKKFPIDLSCLTEEEISQFQEDPYTLYNGDQDVALYLRYSSTGQSDQSIEGQLRDCRTFCKANHYRIVAIYVDRATTARKDVEKRVHLMEMVADSAKQNWEYVIVWKLDRFARNRNDSAIMKMRLRKNGVKVLSATEHLTDSPESIILESVLEGMAEFFSAELSQKVTRGMRESALKCHSVGGHIPLGYKVENHKLVVDPDTAHIVQEAFSLYANGESVADICRKFNSAGYKTAKNTEFNRSSFKAMFRNTRYIGTYTYKDIVIENGIPAIIDKELFETVQRRLSKTATAPARGKAKVDYLLSGKLFCGHCGASMNGESGAGRHGKVYHYYSCYTKKRKLGCDKRPLKKDYIEGIVARDALNLLTDQLIDEIADMAIRQSEQDLINDTHIPQLTAQLSEVEKSITNITAAIEKGIASETLMNRLVQLEHEKKTLNKEIKAEEKFVYRIDRDQIVFWLSQFKYGNIEDEDFRRRLIDLLVNSVTVWDEPDGYKITTAYNLTSCKTKTFRVEKNPAAEEATGFDFGESECTIERISEPYIVWGTVFVQTKRHSLP

SEQ ID NO: 1973 - protein, 553 aa, Unknown
  Description of Unknown: Integrase B1974 sequence
  PTHR30461:SF3,SM00857,G3DSA:1.10.10.2600,IPR036162,PF13408, PS51737,G3DSA:3.40.50.1390,IPR025827,IPR006119,IPR038109, PF07508,IPR011109,SSF53041,PF00239,PTHR30461, PS51736,Coil,cd00338
MKKFPIDLSCLTEEEISQFQEDPYTLYNGDQNVAIYLRYSSTGQSDQSIEGQLRDCRAFCKANHYRIVAIYVDRATTARKDVEKRVHLMEMISDSAKQNWEYVIVWKLDRFARNRNDSAIMKMRLRKNGVKVLSATEHLTDSPESIILESVLEGMAEFFSAELSQKVTRGMRESALKCHSVGGHIPLGYKVENHKLVVDPDTAHIVQEAFSLYANGESVAAICRKFNSAGYKTAKNTEFNRSSFKAMFRNTRYIGTYTYKDIVIENGIPAIIDKELFETVQRRLSKTATAPARGKAKVDYLLSGKLFCGHCGASMNGESGAGRHGKVYHYYSCYTKKRKLGCDKRPLKKDYIEGIVARDALNLLTDQLIDEIADMAIRQSEQDLINDTHIPQLTAQLSEVEKSITNITAAIEKGIASETLMNRLVQLEHEKKTLNKEIKAEEKFVYRIDRDQIVFWLSQFKYGNIEDENFRRRLIDLLVNSVTVWDEPDGYKITTAYNLTSCKTKTFRVEKNPAAEEATGFDFGESECTIERISEPYIVWGTVFVQTKRHSLP

SEQ ID NO: 1974 - protein, 553 aa, Unknown
  Description of Unknown: Integrase B1975 sequence
  PTHR30461:SF3,SM00857,G3DSA:1.10.10.2600,IPR036162,PF13408, PS51737,IPR025827,G3DSA:3.40.50.1390,IPR006119,IPR038109, PF07508,IPR011109,SSF53041,PF00239,PTHR30461, PS51736,Coil,cd00338
MKKFPIDLSCLTEEEISQFQEDPYTLYNGDQDVALYLRYSSTGQSDQSIEGQLRDCRAFCKANHYRIVAIYVDRATTAHKDVEKRVHLMEMVADSAKQNWEYVIVWKLDRFARNRNDSAIMKMRLRKNGVKVLSATEHLTDSPESIILESVLEGMAEFFSAELSQKVTRGMRESALKCHSVGGHIPLGYKVENHKLVVNPDTAHIVQEAFSLYANGESVADICRKFNSAGYKTAKNTEFNRSSFKAMFRNTRYIGTYTYKDIVIENGIPAIIDKELFETVQRRLSKTATAPARGKAKVDYLLSGKLFCGHCGASMNGESGAGRHGKVYHYYSCYTKKRKLGCDKRPLKKDYIEGIVARDALNLLTDQLIDEIADMAIRQSEQDLINDTHIPQLTAQLSEVEKSIMNITAAIENGIASETLMNRLVQLEHEKKTLNKEIKAEEKFVYRIDRDQIVFWLSQFKYGNIEDEDFRRRLIGLLVNSVTVWDEPDGYKITTAYNLTSCKTKTFRVEKNPAAEEATGFDFGESECTIERISEPYIVWGKIFVQTKRHPLP

SEQ ID NO: 1975 - protein, 553 aa, Unknown
  Description of Unknown: Integrase B1976 sequence
  SM00857,G3DSA:1.10.10.2600,IPR036162,PF13408,IPR025827, G3DSA:3.40.50.1390,PS51737,IPR006119,IPR038109,PF07508, SSF53041,IPR011109,PTHR30461,Coil,cd00338, PF00239
MAYRKITDIKDTIGMRAVFYARVSTAEEEQLNAIELQIEENRGCIKDHGWKLVGEYIDRSKSGTMVKGRDDYQRLYEDLYEDLFDIVVIKDQERLQRNTLDWYLFINRVVQTGKLLFMYMDGKFYSPDDALITGVRAIIAEEFSRNLSKKLHNYHDHRIEKARQGQEIALQGSGNVYGWDKKDGKYYINPEQAKVRRLMCEGIMARKGSTLIAKELNDAGYRNTVGKPWKPMDIPKFVYDCKNVGTMIINKERHDFESKQTIKLPKEEWVYVENALPPIVTQEEWDLICKIHEERVIATGSDRRGKKTSGYSFSGKLVCGICGAPYWRKQRVSKDEYWVCSTKQTKGRRTRKRDSTMGKAGEINPLGCDNENISYNSLMEIMGVVSERLQANTDTIKHDMINWLTKLRKQLLEANGGHTEADLQRELSRKSKLLDAYLDGILNKQEYQKKAEELDERIIQLKAETEKNKANSGDIAEIDKVLANIDEEVSRYVDGNEKLKVEYLLEHLEQVQIFPDKVIVIVPILSEGIVVEKTQYVSREKWSRKKHNYQCYS

SEQ ID NO: 1976 - protein, 553 aa, Unknown
  Description of Unknown: Integrase B1977 sequence
  PTHR30461:SF3,SM00857,G3DSA:1.10.10.2600,IPR036162,PF13408, IPR025827,G3DSA:3.40.50.1390,PS51737,IPR006119,IPR038109, PF07508,IPR011109,SSF53041,PF00239,PTHR30461, PS51736,Coil,cd00338
MKKFPIDLSCLTEEEISQFQEDPYTLYNGDQDVALYLRYSSTGQSDQSIEGQLRDCRAFCKANHYRIVAIYVDRATTARKDVEKRVHLMEMIADSAKQNWEYVIVWKLDRFARNRNDSAIMKMRLRKNGVKVLSATEHLTDSPESIILESVLEGMAEFFSAELSQKVTRGMRESALKCHSVGGHIPLGYKVENHKLVVDPDTAHIVQEAFSLYANGESVADICRKFNSAGYKTAKNTKFNRSSFKAMFRNTRYIGTYTYKDIVIENGIPAIIDKELFETVQRRLSKTATAPARGKAKVDYLLSGKLFCGHCGASMNGESGAGRHGKVYHYYSCYTKKRKLGCDKRPLKKDYIEGIVARDALNLLTNQLIDEIADMAIRQSEQDLINDTHIPQLTAQLSEVEKSITNITAAIEKGIASETLMNRLVQLEHEKKTLNKEIKAEEKFVYRIDRDQIVFWLSQFKYGNIEDEDFRRRLIDLLVNSVTVWDEPDGYKITTAYNLTSCKTKTFRVEKNPAAEEATGFDFGESECTIERISEPYIVWGTVFVQTKRHSLP

SEQ ID NO: 1977 - protein, 553 aa, Unknown
  Description of Unknown: Integrase B1978 sequence
  PTHR30461:SF3,SM00857,G3DSA:1.10.10.2600,IPR036162,PF13408, PS51737,G3DSA:3.40.50.1390,IPR025827,IPR006119,IPR038109, PF07508,SSF53041,IPR011109,PTHR30461,Coil, PS51736,cd00338,PF00239
MKKFPIDLSCLTEEEISQFQEDPYTLYNGDQNVAIYLRYSSTGQSDQSIEGQLRDCRAFCKANHYRIVAIYVDRATTARKDVEKRVHLMEMVADSAKQNWEYVIVWKLDRFARNRNDSAIMKMRLRKNGVKVLSATEHLTDSPESIILESVLEGMAEFFSAELSQKVTRGMRESALKCHSVGGHIPLGYKVENHKLVVDPDTAHIVQEAFSLYANGESVAAICRKFNSAGYKTAKNTEFNRSSFKAMFRNTRYIGTYTYKDIVIENGIPAIIDKELFETVQRRLSKTATAPARGKAKVDYLLSGKLFCGHCGASMNGESGAGRHGKVYHYYSCYTKKRKLGCDKRPLKKDYIEGIVARDTLNLLTDQLIDEIADMAIRQSEQDLINDTHIPQLTAQLSEVEKSIANITAAIEKGIASETLMNRLVQLEHEKKTLNKEIKAEEKFVYRIDRDQIVFWLSQFKYGNIEDENFRRRLIDLLVNSVTVWDEPDGYKITTAYNLTSCKTKTFRVEKNPAAEEATGFDFGESECTIERISEPYIVWGTVFVQTKRHSLP

SEQ ID NO: 1978 - protein, 553 aa, Unknown
  Description of Unknown: Integrase B1979 sequence
  PTHR30461:SF3,SM00857,G3DSA:1.10.10.2600,IPR036162,PF13408, IPR025827,G3DSA:3.40.50.1390,PS51737,IPR006119,IPR038109, PF07508,SSF53041,IPR011109,PTHR30461,PS51736, cd00338,PF00239
MARAAKQDNNSEIIDGVIYARYSEGPNQTEASIEGQVRECKEYAKRNGIRIINVYSDSKHTGTNDNRAEFQKMLRDSRRCGFSVVVVWKIDRFGRNRAEMAQNKALLKLQGVKVVSAKEYIPDSPEGIILESVLEGMAEYYSANLSQNIKRGMKENALHCKSNGSGKSLGYIVDKDGYFEIEPNEATIVKTIYQKYDEGMKIADIWREIVASGAKTKRGKDFTQYGISRVLSNRAYIGEYRYGDIVTPGGMPRIIDDDLFNRVQERRALSKKAPASRRSNSDVDFLLTGKVFCGHCKGTMRGMSGTSKTGRKFYYYACHDKIFKHNKCTKKNVKKEWLETEVTRITRDDILNKETIEFIADRVVEIQRQEQEDKSMLHYYEQQLRDTQSAINNIMKAIEAGIITSSTKSRLFELEEQKSIIEGEIEREKIITPVIEKEQVIFSLERFFGGDINNKEYQRNIIDMFVNKVILYDDKIIITYNISSQNEISVDVVEQAAFAALDECSSKLSLAPPAGACPCTRSALLYVRRFFYCRSWIIIYKPNFVISPWQTLI

SEQ ID NO: 1979 - protein, 553 aa, Unknown
  Description of Unknown: Integrase B1980 sequence
  PTHR30461:SF3,SM00857,G3DSA:1.10.10.2600,IPR036162,PF13408, IPR025827,G3DSA:3.40.50.1390,PS51737,IPR006119,IPR038109, PF07508,IPR011109,SSF53041,PF00239,PTHR30461, PS51736,Coil,cd00338
MKKFPIDLSCLTEEEISQFQEDPYTLYNGDQDVALYLRYSSTGQSDQSIEGQLRDCRAFCKANHYRIVAIYVDRATTARKDVEKRVHLMEMIADSAKQNWEYVIVWKLDRFARNRNDSAIMKMRLRKNGVKVLSATEHLTDSPESIILESVLEGMAEFFSAELSQKVTRGMRESALKCHSVGGHIPLGYKVENHKLVVDPDTAHIVQEAFSLYANGESVADICRKFNSAGYKTAKNTKFNRSSFKAMFRNTRYIGTYTYKDIVIENGIPAIIDKELFETVQRRLSKTATAPARGKAKVDYLLSGKLFCGHCGASMNGESGAGRHGKVYHYYSCYTKKRKLGCDKRPLKKDYIEGIVARDALNLLTNQLIDEIADMAIRQSEQDLINDTHIPQLTAQLSEVEKSITNITAAIEKGIASETLMNRLVQLEHEKKTLNKEIKAEEKFVYRIDRDQIVFWLSQFKYGNIEDEDFRRRLIDLLVNSVTVWDKPDGYKITTAYNLTSCKTKTFRVEKNPAAEEATGFDFGESECTIERISEPYIVWGTVFVQTKRHSLP

SEQ ID NO: 1980 - protein, 553 aa, Unknown
  Description of Unknown: Integrase B1981 sequence
  PTHR30461:SF3,SM00857,G3DSA:1.10.10.2600,IPR036162,PF13408, IPR025827,G3DSA:3.40.50.1390,PS51737,IPR006119,IPR038109, PF07508,SSF53041,IPR011109,PF00239,PTHR30461, PS51736,Coil,cd00338
MKKFPIDLSCLTEEEISQFQEDPYTLYNGDQEVALYLRYSSTGQSDQSIEGQLRDCRAFCKANHYRIVAIYVDRATTARKDVEKRVHLMEMVADSAKRNWEYVIVWKLDRFARNRNDSAIMKMRLRKNGVKVLSATEHLTDSPESIILESVLEGMAEFFSAELSQKVTRGMRESALKCHSVGGHIPLGYKVENHKLVVDPDTAHIVQEAFSLYANGESVADICRKFNSAGYKTAKNTEFNRSSFKAMFRNTRYIGTYTYKDIVIENGIPAIIDKELFETVQRRLSKTATAPARGKAKVDYLLSGKLFCGHCGASMNGESGAGRHGKVYHYYSCYTKKRKLGCDKRPLKKDYIEGIVARDALNLLTDQLIDEIADMAIRQSEQDLINDTHIPQLTAQLSEVEKSITNITAAIEKGIASETLMNRLVQLEHEKKTLNKEIKAEEKFVYRIDRDQIVFWLSQFKYGNIEDEDFRRRLIDLLVNSVTVWDEPDGYKITTAYNLTSCKAKTFRVEKNPAAEEATGFDFGESECTIERISEPYIVWGTVFVQTKRHSLP

SEQ ID NO: 1981 - protein, 553 aa, Unknown
  Description of Unknown: Integrase B1982 sequence
  PTHR30461:SF3,cd00338,SM00857,G3DSA:1.10.10.2600,IPR036162, PF13408,PS51737,G3DSA:3.40.50.1390,IPR025827,IPR006119, IPR038109,PF07508,IPR011109,SSF53041,PTHR30461, PS51736,Coil,PF00239
MKKFPIDLSCLTEEEISQFQEDPYTLYNGDQDVALYLRYSSTGQSDQSIEGQLRDCRAFCKANHYRIVAIYVDRATTARKDVEKRVHLMEMVADSAKQNWEYVIVWKLDRFARNRNDSAIMKMRLRKNGVKVLSATEYLTDSPESIILESVLEGMAEFFSAELSQKVTRGMRESALKCHSVGGHIPLGYKVENHKLVVNPDTAHIVQEAFSLYANGESVADICRKFNSAGYKTAKNTEFNRSSFKAMFRNTRYIGTYTYKDIVIENGIPAIIDKELFETVQRRLSKTATAPARGKAKVDYLLSGKLFCGHCGASMNGESGAGRHGKVYHYYSCYTKKRKLGCDKRPLKKDYIEGIVARDALNLLTDQLIDEIADMAIRQSEQDLINDTHIPQLTAQLSEVEKSIMNITAAIEKGIASETLMNRLVQLEHEKKTLNKEIKAEEKFVYRIDRDQIVFWLSQFKYGNIEDENFRRRLIDLLVNSVTVWDEPDGYKITTAYNLTSCKTKTFRVDKNPAAEEATGFDFGESECTIERISEPYIVWGTVFVQTKRHSLP

SEQ ID NO: 1982 - protein, 553 aa, Unknown
  Description of Unknown: Integrase B1983 sequence
  PTHR30461:SF3,cd00338,SM00857,G3DSA:1.10.10.2600,IPR036162, PF13408,IPR025827,G3DSA:3.40.50.1390,PS51737,IPR006119, IPR038109,PF07508,IPR011109,SSF53041,PTHR30461, PS51736,Coil,PF00239
MQTIPIDLSALTPEERQQFADNPSVLSSDCEAVCCLYMRYSSDRQTEQSIEGQLRELIAYCKHHSYRVAAIYVDRAISAHASMDKRPAFQQMLSDSARSSWKTVLVYKLDRFARNREDSAIARMRLRKNGCNVESAKEGISKNPEGVILEALLEGMAEYYSLELSQKITRGMRESAIKGNCLGGQIPLGYKIENKKYVIDPLTAPLVKEAFSRYGDGETAASICADFNARGYRTASGAEFNKSSFKNIFRNEKYIGVYKYKEMRREGIIPRIIADDAWIAVQSRLKDNEAAPARGKAKVAYLLAGKIFCGHCGAPMTGECGRGKSGKMYNYYSCATRKHHNSCEKKPVPKDWLEDVVAQDALDVLTDEIIEFVAEVAAQQSEEDIQKNTQIPVIRKKISEIENKIHNLTKALECASVAPDAIVERLAELEAQKKGLATQLSDEERGVVPLTKESVVVYLKAVRENAVPLETQKAMLIDMLVNSVTVYDDEPGFLKLIYAYRLTQIPARTYRVPISEKVPCSDFRTQPAPLDANPNTITVVGMVFIQTKRHALP

SEQ ID NO: 1983 - protein, 553 aa, Unknown
  Description of Unknown: Integrase B1984 sequence
  PTHR30461:SF3,SM00857,G3DSA:1.10.10.2600,IPR036162,PF13408, IPR025827,PS51737,G3DSA:3.40.50.1390,IPR006119,IPR038109, PF07508,IPR011109,SSF53041,PF00239,PTHR30461, PS51736,Coil,cd00338
MKKFPIDLSCLTEEEISQFQEDPYTLYNGDQDVALYLRYSSTGQSDQSIEGQLRDCRAFCKANHYRIVAIYVDRATTARKDVEKRVHLMEMVADSAKQNWEYVIVWKLDRFARNRNDSAIMKMRLRKNGVKVLSATEHLTDSPESIILESVLEGMAEFFSAELSQKVTRGMRESALKCHSVGGHIPLGYKVENHKLVVDPDTAHIVQEAFSLYANGESVADICRKFNSAGYKTAKNTEFNRSSFKAMFRNTRYIGTYTYKDIVIENGIPAIIDKELFETVQRRLSKTATAPARGKAKVDYLLSGKLFCGHCGASMNGESGAGRHGKVYHYYSCYTKKRKLGCDKRPLKKDYIEGIVARDALNLLTDQLIDEIADMAIRQSEQDLINDTHIPQLTAQLSEVEKSITNITAAIEKGIASETLMNRLVQLEHEKKTLNKEIKAEEKFVYRIDRDQIVFWLSQFKYGNIEDEDFRRRLIDLLVNSVTVWDEPDGYKITTAYNLTSCKAKTFRVEKNPAAEEATGFDFGESECTIERISEPYIVWGTVFVQTKRHSLP

SEQ ID NO: 1984 - protein, 553 aa, Unknown
  Description of Unknown: Integrase B1985 sequence
  PTHR30461:SF3,SM00857,G3DSA:1.10.10.2600,IPR036162,PF13408, PS51737,IPR025827,G3DSA:3.40.50.1390,IPR006119,IPR038109, PF07508,IPR011109,SSF53041,PF00239,PTHR30461, PS51736,Coil,cd00338
MKKFPIDLSCLTEEEISQFQEDPYTLYNGDQDVALYLRYSSTGQSDQSIEGQLRDCRTFCKANHYRIVAIYVDRATTARKDVEKRVHLMEMVADSAKQNWEYVIVWKLDRFARNRNDSAIMKMRLRKNGVKVLSATEHLTDSPESIILESVLEGMAEFFSAELSQKVTRGMRESALKCHSVGGHIPLGYKVENHKLVVDPDTAHIVQEAFSLYANGESVADICRKFNSAGYKTAKNTEFNRSSFKAMFRNTRYIGTYTYKDIVIENGIPAIIDKELFETVQRRLSKTATAPARGKAKVDYLLSGKLFCGHCGASMNGESGAGRHGKVYHYYSCYTKKRKLGCDKRPLKKDYIEGIVARDALNLLTDQLIDEIADMAIRQSEQDLINDTHIPQLTAQLSEVEKSITNITAAIEKGIASETLMNRLVQLEHEKKTLNKEIKAEEKFVYRIDRDQIIFWLSQFKYGNIEDEDFRRRLIDLLVNSVTVWDEPDGYKITAAYNLTSCKTKTFRVEKNPAAEEATGFDFGESECTIERISEPYIVWGTVFVQTKRHSLP

SEQ ID NO: 1985 - protein, 553 aa, Unknown
  Description of Unknown: Integrase B1986 sequence
  PTHR30461:SF3,SM00857,G3DSA:1.10.10.2600,IPR036162,PF13408, PS51737,IPR025827,G3DSA:3.40.50.1390,IPR006119,IPR038109, PF07508,SSF53041,IPR011109,PTHR30461,Coil, PS51736,cd00338,PF00239
MQTIPIDLSALTPEERQQFADNPSVLSSDCEAVCCLYMRYSSDRQTEQSIEGQLRELIAYCKHHSYRVAAIYVDRAISAHASMDKRPSFQQMLSDSARSSWKTVLVYKLDRFARNREDSAIARMRLRKNGCNVESAKEGISKNPEGVILEALLEGMAEYYSLELSQKITRGMRESAIKGNCLGGQIPLGYKIENKKYVIDPLTAPLVKEAFSRYGDGETAASICADFNARGYRTASGAEFNKSSFKNIFRNEKYIGVYKYKEMRREGIIPRIIADDVWIAVQSRLKVNEAAPARGKAKVPYLLAGKLFCGHCGAPMTGECGRGKSGKMYNYYSCATRKHHNSCNKKPVPKDWLEDVVAQDALDVLTDEIIEFVAEVAAQQSEEDIQKNTQIPVIRKKISEIENKIRNLTKALECASVAPDAIVERLSELEAQKKGLSTQLSDEERGVIPLTKESVVVYLKAVREKAVPLETQKAMLIEMLVNSVTVYDDEPGFLKFVTAYRLTQIPTRTYRVQISAKEPCSDFRTQPAPLDANPNTITVVGMVFIQTKRHALP

SEQ ID NO: 1986 - protein, 553 aa, Unknown
  Description of Unknown: Integrase B1987 sequence
  PTHR30461:SF3,SM00857,G3DSA:1.10.10.2600,IPR036162,PF13408, PS51737,G3DSA:3.40.50.1390,IPR025827,IPR006119,IPR038109, PF07508,IPR011109,SSF53041,PTHR30461,PS51736, cd00338,PF00239
MAKKRYDLRPVRTVCIYARYSPGSRQTDQSIEGQLRVCQEYAEQHDYRIIQTYADKHKTGTNDDREAFRQMIKDSEKGLFDAVLVWKSDRFGRNMEDMVLNEMRIKRNGVSLISCTEPVADGPLGGMQKAMLMGMAEFYSATNAENVRRGLLESARKCQITSGAIPFGYKAGEDKRFYTDPINAAAVLEIFQRYDGGELLTHIMDDLNKKGIRSHKGKPLTRSSMYSILRNERYTGVYIYADIRVEGGMPQIVPKDLYERVQIKLGKNKHAPARAKAAEPFILTTKCFCGQCGGPMAGESGTSKTGAKHYYYGCVHHKNSRDKSKACQKKPVRKDFLERLVIDTTLDVALHKENIQSIAADLCAWQQRQKDTAILDGLKSRRRECEKAIGNLVAALEAGAASPTIAARVRDREEELENIKFAIAEQELVQEKFDEKKIMYFLSKVPEGDRTDINYMQRIVDTFINSVFVYDDRVVICYNFDGDGSKITVNDVDKAMQEAEDRENRQITQEAPGQGAPVLNLTIPSVRLMAVWCGVMNQKRTPYFFSSALLESL

SEQ ID NO: 1987 - protein, 553 aa, Unknown
  Description of Unknown: Integrase B1988 sequence
  PTHR30461:SF3,cd00338,SM00857,G3DSA:1.10.10.2600,IPR036162, PF13408,PS51737,IPR025827,G3DSA:3.40.50.1390,IPR006119, IPR038109,PF07508,SSF53041,IPR011109,PTHR30461, PS51736,Coil,PF00239
MKKFPIDLSCLTEEEISQFQEDPYTLYNGDQDVALYLRYSSTGQSDQSIEGQLRDCRAFCKANHYRIVAIYVDRATTAHKDVEKRVHLMEMVADSAKQNWEYVIVWKLDRFARNRNDSAIMKMRLRKNGVKVLSATEHLTDSPESIILESVLEGMAEFFSAELSQKVTRGMRESALKCHSVGGHIPLGYKVENHKLVVDPDTAHIVQEAFSLYANGESVADICRKFNSAGYKTAKNTEFNRSSFKAMFRNTRYIGTYTYKDIVIENGIPAIIDKELFETVQRRLSKTATAPARGKAKVDYLLSGKLFCGHCGASMNGESGAGRHGKVYHYYSCYTKKRKLGCDKRPLKKDYIEGIVARDALNLLTDQLIDEIADMAIRQSEQDLINDTHIPQLTAQLSEVEKSIVNITAAIEKGIASETLMNRLVQLEHEKKTLNKEIKAEEKFVYRIDRDQIVFWLSQFKYGNIEDENFRRRLIDLLVNSVTVWDEPDGYKITTAYNLTSCKTKTFRVDKNPAAEEATGFDFGESECTIERISEPYIVWGTVFVQTKRHSLP

SEQ ID NO: 1988 - protein, 553 aa, Unknown
  Description of Unknown: Integrase B1989 sequence
  PTHR30461:SF3,SM00857,G3DSA:1.10.10.2600,IPR036162,PF13408, IPR025827,G3DSA:3.40.50.1390,PS51737,IPR006119,IPR038109, PF07508,SSF53041,IPR011109,PF00239,PTHR30461, PS51736,Coil,cd00338
MKKFPIDLSCLTEEEISQFQEDPYTLYNGDQEVALYLRYSSTGQSDQSIEGQLRDCCAFCKANHYRIVAIYVDRATTARKDVEKRVHLMEMVADSAKQNWEYVIVWKLDRFARNRNDSAIMKMRLRKNGVKVLSATEHLTDSPESIILESVLEGMAEFFSAELSQKVTRGMRESALKCHSVGGHIPLGYKVENHKLVVDPDTAHIVQEAFSLYANGESVADICRKFNSAGYKTAKNTEFNRSSFKAMFRNTRYIGTYTYKDIVIENGIPAIIDKELFETVQRRLSKTATAPARGKAKVDYLLSGKLFCGHCGASMNGESGAGRHGKVYHYYSCYTKKRKLGCDKRPLKKDYIEGIVARDALNLLTDQLIDEIADMAIRQSEQDLINDTHIPQLTAQLSEVEKSITNITAAIEKGIASETLMNRLVQLEHEKKTLNKEIKAEEKFVYRIDRDQIVFWLSQFKYGNIEDEDFRRRLIDLLVNSVTVWDEPDGYKITTAYNLTSCKTKTFRVEKNPAAEEATGFDFGESECTIERISEPYIVWGTVFVQTKRHSLP

SEQ ID NO: 1989 - protein, 553 aa, Unknown
  Description of Unknown: Integrase B1990 sequence
  PTHR30461:SF3,SM00857,G3DSA:1.10.10.2600,IPR036162,PF13408, IPR025827,G3DSA:3.40.50.1390,PS51737,IPR006119,IPR038109, PF07508,SSF53041,IPR011109,PF00239,PTHR30461, PS51736,Coil,cd00338
MQTIPIDLSALTPEERQQFADNPSVLSSDCEAVCCLYMRYSSDRQTEQSIEGQLRELIAYCKHHSYRVAAIYVDRAISAHASMDKRPAFQQMLADSARSSWKTVLVYKLDRFARNREDSAIARMRLRKNGCNVESAKEGISKNPEGVILEALLEGMAEYYSLELSQKITRGMRESAIKGNCLGGQIPLGYKIENKKYVIDPLTAPLVKEAFSRYGDGETAASICADFNARGYRTASGAEFNKSSFKNIFRNEKYIGVYKYKEMRREGIIPRIIADDAWIAVQSRLKVNEAAPARGKAKVAYLLAGKIFCGHCGAPMTGECGRGKSGKMYNYYSCATRKHHNSCEKKPVPKDWLEDVVAQDALDVLTDEIIEFVAEVAAQQSEEDIQKNTQIPVIRKKISEIENKIRNLTKALECASVAPDAIVERLAELEAQKKGLSTQLSDEERGVIPLTKESVVVYLKAVREKAVPLETQKAMLIEMLVNSVTVYDDEPGFLKLVYAYRLTQIPTRTYRVPIPAKVPCSDFRTQPAPLDANPNTITVVGMVFIQTRRHALP

SEQ ID NO: 1990 - protein, 553 aa, Unknown
  Description of Unknown: Integrase B1991 sequence
  PTHR30461:SF3,SM00857,G3DSA:1.10.10.2600,IPR036162,PF13408, IPR025827,G3DSA:3.40.50.1390,PS51737,IPR006119,IPR038109, PF07508,SSF53041,IPR011109,PF00239,PTHR30461, PS51736,Coil,cd00338
MKEFPIDLSCLTEEEISQFQEDPYTLYNGDQNVAIYLRYSSTGQSDQSIEGQLRDCRTFCKANHYRIVAIYVDRATTARKDVEKRVHLMEMISDSAKQNWEYVIVWKLDRFARNRNDSAIMKMRLRKNGVKVLSATEHLTDSPESIILESVLEGMAEFFSAELSQKVTRGMRESALKCHSVGGHIPLGYKVENHKLVVDPDTAHIVQEAFSLYANGESVAAICRKFNSAGYKTAKNTEFNRSSFKAMFRNTRYIGTYTYKDIVIENGIPAIIDKELFETVQRRLSKTATAPARGKAKVDYLLSGKLFCGHCGASMNGESGAGRHGKVYHYYSCYTKKRKLGCDKRPLKKDYIEGIVARDALNLLTDQLIDEIADMAIRQSEQDLINDTHIPQLTAQLSEVEKSITNITAAIEKGIASETLMNRLVQLEHEKKTLNKEIKAEEKFVYRIDRDQIVFWLSQFKYGNIEDEDFRRRLIDLLVNSVTVWDEPDGYKITTAYNLTSCKTKTFRVEKNPAAEEATGFDFGESECTIERISEPYIVWGTVFVQTKRHSLP

SEQ ID NO: 1991 - protein, 553 aa, Unknown
  Description of Unknown: Integrase B1992 sequence
  PTHR30461:SF3,SM00857,G3DSA:1.10.10.2600,IPR036162,PF13408, PS51737,G3DSA:3.40.50.1390,IPR025827,IPR006119,IPR038109, PF07508,SSF53041,IPR011109,PF00239,PTHR30461, PS51736,Coil,cd00338
MKKFPIDLSCLTEEEISQFQEDPYTLYNGDQEVALYLRYSSTGQSDQSIEGQLRDCRAFCKANHYRIVAIYVDRATTARKDVEKRVHLMEMVADSAKQNWEYVIVWKLDRFARNRNDSAIMKMRLRKNGVKVLSATEHLTDSPESIILESVLEGMAEFFSAELSQKVTRGMRESALKCHSVGGHIPLGYKVENHKLVVDPDTAHIVQEAFSLYANGESVADICRKFNSAGYKTAKNTEFNRSSFKAMFRNTRYIGTYTYKDIVIENGIPAIIDKELFETVQRRLSKTATAPARGKAKVDYLLSGKLFCGHCGASMNGESGAGRHGKVYHYYSCYTKKRKLGCDKRPLKKDYIEGIVARDALNLLTDQLIDEIADMAIRQSEQDLINDTHIPQLTAQLSEVEKSIINITAAIEKGIASETLMNRLVQLEHEKKTLNKEIKAEEKFVYRIDRDQIVFWLSQFKYGNIEDEDFRRRLIDLLVNSVTVWDEPDGYKITTAYNLTSCKTKTFRVEKNPAAEEATGFDFGESECTIERISEPYIVWGTVFVQTKRHSLP

SEQ ID NO: 1992 - protein, 553 aa, Unknown
  Description of Unknown: Integrase B1993 sequence
  PTHR30461:SF3,SM00857,G3DSA:1.10.10.2600,IPR036162,PF13408, IPR025827,G3DSA:3.40.50.1390,PS51737,IPR006119,IPR038109, PF07508,SSF53041,IPR011109,PTHR30461,Coil, PS51736,cd00338,PF00239
MKKFPIDLSCLTEEEISQFQEDPYTLYNGDQNVAIYLRYSSTGQSDQSIEGQLRDCRTFCKANHYRIVAIYVDRATTARKDVEKRVHLMEMISDSAKQNWEYVIVWKLDRFARNRNDSAIMKMRLRKNGVKVLSATEHLTDSPESIILESVLEGMAEFFSAELSQKVTRGMRESALKCHSVGGHIPLGYKVENHKLVVDPDTAHIVQEAFSLYANGESVAAICRKFNSAGYKTAKNTEFNRSSFKAMFRNTRYIGTYTYKDIVIENGIPAIIDKELFETVQRRLSKTATAPARGKAKVDYLLSGKLFCGHCGASMNGESGAGRHGKVYHYYSCYTKKRKLGCDKRPLKKDYIEGIVARDALNLLTDQLIDEIADMAIRQSEQDLINDTHIPQLTAQLSEVEKSITNITAAIEKGIASETLMNRLVQLEHEKKTISKEIKAEEKFVYRIDRDQIVFWLSQFKYGNIEDENFRRRLIDLLVNSVTVWDEPDGYKITTAYNLTSCKTKTFRVEKNPAAEEATGFDFGESECTIERISEPYIVWGTVFVQTKRHSLP

SEQ ID NO: 1993 - protein, 553 aa, Unknown
  Description of Unknown: Integrase B1994 sequence
  PTHR30461:SF3,SM00857,G3DSA:1.10.10.2600,IPR036162,PF13408, PS51737,G3DSA:3.40.50.1390,IPR025827,IPR006119,IPR038109, PF07508,SSF53041,IPR011109,PF00239,PTHR30461, PS51736,Coil,cd00338
MKKFPIDLSCLTEEEISQFQEDPYTLYNGDQNVAIYLRYSSTGQSDQSIEGQLRDCRTFCKANHYRIVAIYVDRATTARKDVEKRVHLMEMISDSAKQNWEYVIVWKLDRFARNRNDSAIMKMRLRKNGVKVLSATEHLTDSPESIILESVLEGMAEFFSAELSQKVTRGMRESALKCHSVGGHIPLGYKVENHKLVVDPDTAHIVQEAFSLYANGESVADICRKFNSAGYKTAKNTEFNRSSFKAMFRNTRYIGTYTYKDIVIENGIPAIIDKELFETVQRRLSKTATAPARGKAKVDYLLSGKLFCGHCGASMNGESGAGRHGKVYHYYSCYTKKRKLGCDKRPLKKDYIEGIVARDALNLLTDQLIDEIADMAIRQSEQDLINDTHIPQLTAQLSEVEKSITNITAAIEMGIASETLMNRLVQLEHEKKTLNKEIKAEEKFVYRIDRDQIVFWLSQFKYGNIEDEDFRRRLIDLLVNSVTVWDEPDGYKITTAYNLTSCKTKTFRVEKNPAAEEATGFDFGESECTIERISEPYIVWGTVFVQTKRHSLP

SEQ ID NO: 1994 - protein, 553 aa, Unknown
  Description of Unknown: Integrase B1995 sequence
  PTHR30461:SF3,cd00338,SM00857,G3DSA:1.10.10.2600,IPR036162, PF13408,IPR025827,G3DSA:3.40.50.1390,PS51737,IPR006119, IPR038109,PF07508,SSF53041,IPR011109,PTHR30461, PS51736,Coil,PF00239
MKKFPIDLSCLTEEEISQFQEDPYTLYNGDQDVALYLRYSSTGQSDQSIEGQLRDCRTFCKANHYRIVAIYVDRATTARKDVEKRVHLMEMVADSVKRNWEYVIVWKLDRFARNRNDSAIMKMRLRKNGVKVLSATEHLTDSPESIILESVLEGMAEFFSAELSQKVTRGMRESALKCHSVGGHIPLGYKVENHKLVVDPDTAHIVQEAFSLYANGESVADICRKFNSAGYKTAKNTEFNRSSFKAMFRNTRYIGTYTYKDIVIENGIPAIIDKELFETVQRRLSKTATAPARGKAKVDYLLSGKLFCGHCGASMNGESGAGRHGKVYHYYSCYTKKRKLGCDKRPLKKDYIEGIVARDALNLLTDQLIDEIADMAIRQSEQDLINDTHIPQLTAQLTEVEKSITNITAAIEKGIASETLMNRLVQLEHEKKTLNKEIKAEEKFVYRIDRDQIVFWLSQFKYGNIEDEDFRRRLIDLLVNSVTVWDEPDGYKITTAYNLTSCKTKTFRVKKNPAAEEATGFDFGESECTIERISEPYIVWGTVFVQTKRHSLP

SEQ ID NO: 1995 - protein, 553 aa, Unknown
  Description of Unknown: Integrase B1996 sequence
  PTHR30461:SF3,SM00857,G3DSA:1.10.10.2600,IPR036162,PF13408, IPR025827,G3DSA:3.40.50.1390,PS51737,IPR006119,IPR038109, PF07508,SSF53041,IPR011109,PTHR30461,Coil, PS51736,cd00338,PF00239
MRKKFNIDLSMLTPEEQQQFRDDPTTLTKGEVNVALYLRFSSERQKEQSIEGQLRDCIAYCKRKSFRIVAIYVDRATTARKDVEKRIHFQEMISDSAHHLWNFVVVWKLDRFARNREDSAVFKMRLRKNGVRVKSATETISDNPEGIILESVLEGIAEYYSADLSQKITRGLRESAMKGHSVGGHVPLGYKIEDHRLVINPETAHIVQEAFQLYANGESVAEICRIFNGKGYRTAKNSEFNRSSFKSIFKNVRYIGTYIYKDIEKENAIPAIIDKDLFETVQRRLSLAADAPARGKAKVDYLLSGKLFCGHCGATMNGESGTSKTGAIHNYYTCYSRKRRKGCNKKPLKKDFIERVVAQDAMALLTDDVIEELADMAMSQADKDLKENTRIPELSARLTEVEQGINNITKVVEKGIASDALLNRLTELEKEKKDLTSQLREEEKYICRIDRDQIIFWLTKFQGGDIEDEDCRRRIIDLLVNSVTVWDEPDGYKITTAYNLTSCKTKTFRVSNNADSPSGEGFGFGELSSTRRGSVELFFYKNEFALVYRLGDA

SEQ ID NO: 1996 - protein, 553 aa, Unknown
  Description of Unknown: Integrase B1997 sequence
  PTHR30461:SF3,SM00857,G3DSA:1.10.10.2600,IPR036162,PF13408, IPR025827,PS51737,G3DSA:3.40.50.1390,IPR006119,IPR038109, PF07508,IPR011109,SSF53041,PF00239,PTHR30461, PS51736,Coil,cd00338
MKKFPIDLSCLTEEEISQFQEDPYTLYNGDQDVALYLRYSSTGQSDQSIEGQLRDCRAFCKANHYRIVAIYVDRATTARKDVEKRVHLMEMVADSAKQNWEYVIVWKLDRFARNRNDSAIMKMRLRKNGVKVLSATEHLTDSPESIILESVLEGMAEFFSAELSQKVTRGMRESALKCHSVGGHIPLGYKVENHKLVVDPDTAHIVQEAFSLYANGESVADICRKFNSAGYKTAKNTEFNRSSFKAMFRNTRYIGTYTYKDIVIENGIPAIIDKELFETVQRRLSKTATAPARGKAKVDYLLSGKLFCGHCGASMNGESGAGRHGKVYHYYSCYTKKRKLGCDKRPLKKDYIEGIVARDALNLLTDQLIDEIADMAIRQSEQDLINDTHIPQLTAQLSEVEKSITNITAAIEKGIASETLMNRLVQLEHEKKTLNKEIKAEEKFVYRIDRDQIVFWLSQFKYGNIEDEDFRRRLIDLLVNSVTVWDEPDGYKITTAYNLTSCKTKTFRVEKNPAAEEATGFDFGEYECTIERISEPYIVWGTVFVQTKRHSLP

SEQ ID NO: 1997 - protein, 553 aa, Unknown
  Description of Unknown: Integrase B1998 sequence
  PTHR30461:SF3,SM00857,G3DSA:1.10.10.2600,IPR036162,PF13408, PS51737,IPR025827,G3DSA:3.40.50.1390,IPR006119,IPR038109, PF07508,SSF53041,IPR011109,PTHR30461,Coil, PS51736,cd00338,PF00239
MQTIPIDLSALTPEERQQFADNPSVLSSDCEAVCCLYMRYSSDRQTEQSIEGQLRELIAYCKHHSYRVAAIYVDRAISAHASMDKRPAFQQMLSDSARSSWKTVLVYKLDRFARNREDSAIARMRLRKNGCSVESAKEGISKNPEGVILEALLEGMAEYYSLELSQKITRGMRESAIKGNCLGGQIPLGYKIENKKYAIDPLTAPLVKEAFSRYGDGETAASICADFNARGYRTASGAEFNKSSFKNIFRNEKYIGVYKYKEMRREGIIPRIVTDDVWIAVQSRLKDNEAAPARGKAKVAYLLAGKLFCGHCGAPMTGECGRGKSGKMYNYYSCATRKHHNSCEKKPVPKDWLEDVVAQDALDVLTDEIIEFVAEVAAQQSEEDIQKNTQIPVIRKKISEIENKIRNLTKALECASVAPDAIVERLAELEAQKKGLATQLSDEERGVVPLTKESVVVYLKAVREKAVPLETQKAMLIDMLVNSVTVYDDEPGFLKLVYAYRLTQIPTRTYRVPISEKVPCSDFRTQPAPLDANPNTITVVGMVFIQAKRHALP

SEQ ID NO: 1998 - protein, 553 aa, Unknown
  Description of Unknown: Integrase B1999 sequence
  PTHR30461:SF3,SM00857,G3DSA:1.10.10.2600,IPR036162,PF13408, IPR025827,G3DSA:3.40.50.1390,PS51737,IPR006119,IPR038109, PF07508,IPR011109,SSF53041,PF00239,PTHR30461, PS51736,Coil,cd00338
MKKFPIDLSCLTEEEISQFQEDPYTLYNGDQDVALYLRYSSTGQSDQSIEGQLRDCRAFCKANHYRIVAIYVDRATTARKDVEKRVHLMEMVADSAKQNWEYVIVWKLDRFARNRNDSAIMKMRLRKNGVKVLSATEHLTDSPESIILESVLEGMAEFFSAELSQKVTRGMRESALKCHSVGGHIPLGYKVENHKLVVDPDTAHIVQEAFSLYANGESVADICRKFNSAGYKTAKNTEFNRSSFKAMFRNTRYIGTYTYKDIVIENGIPAIIDKELFETVQRRLSKTATAPARGKAKVDYLLSGKLFCGHCGASMNGESGAGRHGKVYHYYSCYTKKRKLGCDKRPLKKDYIEGIVARDALNLLTDQLIDEIADMAIRQSEQDLINDTHIPQLTAQLSEVEKSITNITAAIEKGIASETLINRLVQLEHEKKTLNKEIKAEEKFVYRIDRDQIVFWLSQFKYGNIEDEDFRRRLIDLLVNSVTVWDEPDGYKITTAYNLTSCKAKTFRVEKNPAAEEATGFDFGESECTIERISEPYIVWGTVFVQTKRHSLP

SEQ ID NO: 1999 - protein, 553 aa, Unknown
  Description of Unknown: Integrase B2000 sequence
  PTHR30461:SF3,SM00857,G3DSA:1.10.10.2600,IPR036162,PF13408, PS51737,G3DSA:3.40.50.1390,IPR025827,IPR006119,IPR038109, PF07508,SSF53041,IPR011109,PF00239,PTHR30461, PS51736,Coil,cd00338
MKKFPIDLSCLTEEEISQFQEDPYTLYNGDQNVALYLRYSSTGQSDQSIEGQLRDCRTFCKSNHYRIVAIYVDRATTARKDVEKRVHLMEMVADSAKQNWEYVIVWKLDRFARNRNDSAIMKMRLRKNGVKVLSATEHLTDSPESIILESVLEGMAEFFSAELSQKVTRGMRESALKCHSVGGHIPLGYKVENHKLVVDPDTAHIVQEAFSLYANGESVADICRKFNSAGYKTAKNTEFNRSSFKAMFRNTRYIGTYTYKDIVIENGIPAIIDKELFETVQRRLSKTATAPARGKAKVDYLLSGKLFCGHCGASMNGESGAGRHGKVYHYYSCYTKKRKLGCDKRPLKKDYIEGIVARDALNLLTDQLIDEIADMAIRQSEQDLINDTHIPQLTAQLSEVEKSITNITAAIEKGIASETLMNRLVQLEHEKKTLNKEIKAEEKFVYRIDRDQIVFWLSQFKYGNIEDEDFRRRLIDLLVNSVTVWDEPDGYKITTAYNLTSCKAKTFRVEKNPAAEEATGFDFGESECTIERISEPYIVWGTVFVQTKRHSLP

SEQ ID NO: 2000 - protein, 553 aa, Unknown
  Description of Unknown: Integrase B2001 sequence
  PTHR30461:SF3,IPR036162,PS51737,IPR011109,PTHR30461, PF00239,G3DSA:1.10.10.2600,IPR006119,SSF53041,cd00338, SM00857,IPR025827,IPR038109,PS51736,cd18688, PF13408,G3DSA:3.40.50.1390,PF07508,Coil
MQTIPIDLSALTPEERQQFADNPSVLSSDCEAVCCLYMRYSSDRQTEQSIEGQLRELIAYCKHHSYRVAAIYVDRAISAHASMDKRPAFQQMLADSARSSWKTVLVYKLDRFARNREDSAIARMRLRKNGCNVESAKEGISKNPEGVILEALLEGMAEYYSLELSQKVRRGMSETARKGNSTGGTTPLGYTVVDKRLQIDPMTAHLVEEAFRRYADGDTVAAICDDFNARGYRTTRGTKFNKSSFKNVFRNEKYIGVYKFDDVRTDNAVPRIISDELWRAVQSRLKASEQAPARGKAKVPYLLSGKIFCGHCGAPMVGECGRGKGGKTYNYYSCANRKKARLCDKKPVPKDWLEDVVAQDALDVLTDEIIEFVAEVAAQQSEEDIQKNTQIPVIRKKISEIENKIRNLTKALECASVAPDAIVERLAELEAQKRGLSTQLSDEERGVIPLTKESVVVYLKAVREKAVPLETQKAMLIEMLVNSVTVYDDEPGFLKFVTAYRLTQIPSKTYRVPTPAVSPCSDIGRVGSPLDANPNTITVVGMVFIQTRRHALP

SEQ ID NO: 2001 - protein, 553 aa, Unknown
  Description of Unknown: Integrase B2002 sequence
  PTHR30461:SF3,SM00857,G3DSA:1.10.10.2600,IPR036162,PF13408, IPR025827,G3DSA:3.40.50.1390,PS51737,IPR006119,IPR038109, PF07508,IPR011109,SSF53041,PTHR30461,Coil, PS51736,cd00338,PF00239
MARKKAEKAEGNICVVYARYSSAVQNDASIEQQVGECREYAAAHDLKISEIYADRAISGRSDRRPEFQKMIRHAEAGRFQIVLTYKSNRIARNMLDALRYEERLEKAGVKVVYCKENFGDNAAGRMALRMMMSLNEFYSENMAEDITRGMKDRAKQCKVMGTIPFGYKRGEDGCYAIDESKAEIVREIFRRYAENETQASIAEDLNNRRIFTQQNRPWGKNSFHTVLTNERYIGVYKFADIRIENGMPAIIDRSLFEIVQEKVGRRREVAGRRRESTEYLLTGKAFCAKCGAPMVGVSGTGKGGSLYYYYVCKNRQEHHNCKKENVRKAAAERQIAFRLKTIVLKPEVMEWMIQNVLRFQEEAKKQSDLASYQNRLVEVRRSLDNLIKAIEAGVFSQSTKARLDELEAEQRELQGIISVERSKLNTVTREQIEYYLESFRDGDVNDPAYQKRLFKAFLVKVFLDDDKCRIVYNYADGLDTLEFPLTLDDIESADVSAECSYNACSGVPHTESQSRFGIFVSGKRHARQIFFPKGAENPCRTGRKYGIIHWLCL

SEQ ID NO: 2002 - protein, 553 aa, Unknown
  Description of Unknown: Integrase B2003 sequence
  cd00338,SM00857,G3DSA:1.10.10.2600,IPR036162,PS51737, G3DSA:3.40.50.1390,IPR006119,IPR038109,PF07508,SSF53041, IPR011109,PTHR30461,PS51736,Coil,PF00239
MQYDKADQQNCPRRVVFYGRVSTELEAQISALKNQMNWYLELAEHHPNWTVVGQYADEGISGTGMKTRPSFMKMLRDARKKKFDLIVTREVSRFARNTVDTLVTTRELKQYGVEVYFVNDDIWTMRGDGEVRLTIMASLAQDESRKMSERTKAGIQTSQKKGTYVAGPTPFGYKRDKKAHTLVVQESQAETVRKIFAWYADGINGTEIAQTLTQEGAPNKSGMPQWSARQVLSITKNTIYKGYLTYNKSHIDDFLSHKSIKNSEQDYILVKGSFEPIISEELWDKCQRRRHAWQSYIDGNITQAYLYGKSEHADKWACRLFCGCGARMRAFRAEKGIVRYICYQRSLRNVAPKCSAPNVQAWKLELMAREIYKNVWQDHRQDILEEYQQEQENGAADSEKVEEALSWQESFPNDEISRKFLDRFVPRIFSIDGQKFIWELNLFQESCTVQCNVRGTYNYHSISAEKIMPGKTKAKKGDGAVNRILEVANSTRFWVHTYDDDPISRLLSSRLAADLPASITIKLNYEQARAYRNSRGYVLWPGNWKDLTVKVLL

SEQ ID NO: 2003 - protein, 553 aa, Unknown
  Description of Unknown: Integrase B2004 sequence
  PTHR30461:SF3,SM00857,G3DSA:1.10.10.2600,IPR036162,PF13408, PS51737,G3DSA:3.40.50.1390,IPR025827,IPR006119,IPR038109, PF07508,IPR011109,SSF53041,PF00239, PTHR30461,PS51736,Coil,cd00338
MQTIPIDLSALTAQERQQFAENPSVLSSDCDAVCCLYLRYSSERQTEQSIEGQLRELIAHCKQHRYRIAAIYVDRAISAHASMEKRPSFQQMLSDAVRAPWKTVLVYKLDRFARNREDAAIARMRLRKAGCNVESAKEGISKNPEGVILEALLEGMAEYYSLELSQKITRGMRESAIKGNSLGGQIPLGYKIENKKFVIDPLTAPLVVEAFSRYGDGETAASICADFNARGYRTASGAKFNRSSFKNIFRNEKYIGVYKYKEMRQEGIIPRLVSDDAWISVQSRLKANEAAPARGKAKAAYLLAGKIFCGHCGAPMVGECGRGKGGKIYNYYSCATRKKSRSCEKKPVPKDWIEDIVAQDALDVLTDDVIEFVASVAAQQSEEEIKKNTQIPVIRQKLSEIDSGIRNLTKAIETAAVAPDAIIMRIAELEAQKKALSEQLVNEERGVIPLEKETVVTYLRAVREKAIPLETQKPMLIDMLVNSVTVYDNDPGFLTFVTAYRLSQIPAKTFRIPVSPAHGCSDMGLNALPLGVNPNTIVVVGMVFVQTKKHALP

SEQ ID NO: 2004 - protein, 553 aa, Unknown
  Description of Unknown: Integrase B2005 sequence
  PTHR30461:SF3,SM00857,G3DSA:1.10.10.2600,IPR036162,PF13408, PS51737,IPR025827,G3DSA:3.40.50.1390,IPR006119,IPR038109, PF07508,IPR011109,SSF53041,PF00239,PTHR30461, PS51736,Coil,cd00338
MKKFPIDLSCLTEEEISQFQEDPYTLYNGDQDVALYLRYSSTGQSDQSIEGQLRDCRTFCKANHYRIVAIYVDRATTARKDVEKRVHLMEMVADSAKQNWEYVIVWKLDRFARNRNDSAIMKMRLRKNGVKVLSATEHLTDSPESIILESVLEGMAEFFSAELSQKVTRGMRESALKCHSVGGHIPLGYKVENHKLVVDPDTAHIVQEAFSLYANGESVADICRKFNSAGYKTAKNTEFNRSSFKAMFRNTRYIGTYTYKDIVIENGIPAIIDKELFETVQRRLSKTATAPARGKAKVDYLLSGKLFCGHCGASMNGESGAGRHGKVYHYYSCYTKKRKLGCDKRPLKKDYIEGIVARDALNLLTDQLIDEIADMAIRQSEQDLINDTHIPQLTAQLSEVEKSITNITAAIEKGIASETLMNRLVQLEHEKKTLNKEIKAEEKFVYRIDRDQIVFWLSQFKYGNIEDEDFRRRLIDLLVNSVTVWDEPDGYKITTAYNLTSCKTKTFRVEKNPAAEEATGFDFGESECTIERISEPYIVWGKVFVQTKRHSLP

SEQ ID NO: 2005 - protein, 553 aa, Unknown
  Description of Unknown: Integrase B2006 sequence
  PTHR30461:SF3,cd00338,SM00857,G3DSA:1.10.10.2600,IPR036162, PF13408,PS51737,G3DSA:3.40.50.1390,IPR025827,IPR006119, IPR038109,PF07508,SSF53041,IPR011109,PTHR30461, PS51736,Coil,PF00239
MKKFPIDLSCLTEEEISQFQEDPYMLYNGDQDVALYLRYSSTGQSDQSIEGQLRDCRAFCKANHYRIVAIYVDRATTAHKDVEKRVHLMEMVADSAKQNWEYVIVWKLDRFARNRNDSAIMKMRLRKNGVKVLSATEHLTDSPESIILESVLEGMAEFFSAELSQKVTRGMRESALKCHSVGGHIPLGYKVENHKLVVDPDTAHIVQEAFSLYANGESVADICRKFNSAGYKTAKNTEFNRSSFKAMFRNTRYIGTYTYKDIVIENGIPAIIDKELFETVQRRLSKTATAPARGKAKVDYLLSGKLFCGHCGASMNGESGAGRHGKVYHYYSCYTKKRKLGCDKRPLKKDYIEGIVARDALNLLTDQLIDEIADMAIRQSEQDLINDTHIPQLTAQLSEVEKSIMNITAAIEKGIASETLMNRLVQLEHEKKTLNKEIKAEEKFVYRIDRDQIVFWLSQFKYGNIEDENFRRRLIDLLVNSVTVWDEPDGYKITTAYNLTSCKTKTFRVDKNPAAEEATGFDFGESECTIERISEPYIVWGTVFVQTKRHSLP

SEQ ID NO: 2006 - protein, 553 aa, Unknown
  Description of Unknown: Integrase B2007 sequence
  PTHR30461:SF3,SM00857,G3DSA:1.10.10.2600,IPR036162,PF13408, IPR025827,PS51737,G3DSA:3.40.50.1390,IPR006119,IPR038109, PF07508,IPR011109,SSF53041,PTHR30461,Coil, PS51736,cd00338,PF00239
MKKFPIDLSCLTEEEISQFQEDPYTLYNGDQNVAIYLRYSSTGQSDQSIEGQLRDCRAFCKANHYRIVAIYVDRATTARKDVEKRVHLMEMISDSAKQNWEYVIVWKLDRFARNRNDSAIMKMRLRKNGVKVLSATEHLTDSPESIILESVLEGMAEFFSAELSQKVTRGMRESALKCHSVGGHIPLGYKVENHKLVVDPDTAHIVQEAFSLYANGESVADICRKFNSAGYKTAKNTEFNRSSFKAMFRNTRYIGTYTYKDIVIENGIPAIIDKELFETVQRRLSKTATAPARGKAKVDYLLSGKLFCGHCGASMNGESGAGRHGKVYHYYSCYTKKRKLGCDKRPLKKDYIEGIVARDALNLLTDQLIDEIADMAIRQSEQDLINDTHIPQLTAQLSEVEKSITNITAAIEKGIASETLMNRLVQLEHEKKTISKEIKAEEKFVYRIDRDQIVFWLSQFKYGNIEDEDFRRRLIDLLVNSVTVWDEPDGYKITTAYNLTSCKAKTFRVEKNPAAEEATGFDFGESECTIERISEPYIVWGTVFVQTKRHSLP

SEQ ID NO: 2007 - protein, 553 aa, Unknown
  Description of Unknown: Integrase B2008 sequence
  PTHR30461:SF3,SM00857,G3DSA:1.10.10.2600,IPR036162,PF13408, IPR025827,G3DSA:3.40.50.1390,PS51737,IPR006119,IPR038109, PF07508,SSF53041,IPR011109,PTHR30461,cd00338, PF00239
MPKKPIKHPAKPKRGVKLDIEEPGVLYGRYSSHNQKDISVEQQFEKGYELAAEYGIRIVSTYADRAVSGRTDKRADFQRMMRDATQGKFRYVIAWKSNRMGRNMLEALINETRLQELGVRVLYVEEDFDDTAAGRFAARSMMNVNQFYSENMAEDIKRGLYDNASNCMVANGHLPYGYKADETLHYTIDEQKAAVIREIFTRVSCGEAFTDIMGSLNSRGITTSYGRPWGRTSFQKILSNERYRGIYIYGDVRIEGGIPRIVSDELYFKVQEVLTTKKNPQGRHRTNGDYLLTGKLFCGHCKSPMTGISGTGRAGKLHYYYVCQKKRTEKSCHKKNVRRDVIELMVAKAIRENALKPDIIEMIAEQTVAYNNRKEAEGHVGILENQLAEVNRSIKNVMSAIEQGIITETTKSRLMELEAERAAVEGKICAARADIITISKEDIISGLEMFCDGDVHDKRYQARLFDTFLVAVYLYDDNRMKIVFSFSGAKNTIEIPLDDAIDDVADEGEDVRLSSTLVHQSRARRTIAGLPGSTAVLYMIGGLFVLECSLEER

SEQ ID NO: 2008 - protein, 553 aa, Unknown
  Description of Unknown: Integrase B2009 sequence
  PTHR30461:SF3,SM00857,G3DSA:1.10.10.2600,IPR036162,PF13408, PS51737,G3DSA:3.40.50.1390,IPR025827,IPR006119,IPR038109, PF07508,IPR011109,SSF53041,PF00239,PTHR30461, PS51736,Coil,cd00338
MKKFPIDLSCLTEEEISQFQEDPSTLYNGDQNVAIYLRYSSTGQSDQSIEGQLRDCRTFCKANHYRIVAIYVDRATTARKDVEKRVHLMEMISDSAKQNWEYVIVWKLDRFARNRNDSAIMKMRLRKNGVKVLSATEHLTDSPESIILESVLEGMAEFFSAELSQKVTRGMRESALKCHSVGGHIPLGYKVENHKLAVDPDTAHIVQEAFSLYANGESVAAICRKFNSAGYKTAKNTEFNRSSFKAMFRNTRYIGTYTYKDIVIENGIPAIIDKELFETVQRRLSKTATAPARGKAKVDYLLSGKLFCGHCGASMNGESGAGRHGKVYHYYSCYTKKRKLGCDKRPLKKDYIEGIVARDALNLLTDQLIDEIADMAIRQSEQDLINDTHIPQLTAQLSEVEKSITNITAAIEKGIASETLMNRLIQLEHEKKTLNKEIKAEEKFVYRIDRDQIVFWLSQFKYGNIEDEDFRRRLIDLLVNSVTVWDEPDGYKITTAYNLTSCKTKTFRVEKNPAAEEATGFDFGESECTIERISEPYIVWGTVFVQTKRHSLP

SEQ ID NO: 2009 - protein, 553 aa, Unknown
  Description of Unknown: Integrase B2010 sequence
  PTHR30461:SF3,SM00857,G3DSA:1.10.10.2600,IPR036162,PF13408, PS51737,G3DSA:3.40.50.1390,IPR025827,IPR006119,IPR038109, PF07508,IPR011109,SSF53041,PTHR30461,Coil, PS51736,cd00338,PF00239
MKKFPIDLSCLTEEEISQFQEDPYTLYNGDQDVALYLRYSSTGQSDQSIEGQLRDCRAFCKANHYRIVAIYVDRATTARKDVEKRVHLMEMVADSAKQNWEYVIVWKLDRFARNRNDSAIMKMRLRKNGVKVLSATEHLTDSPESIILESVLEGMAEFFSAELSQKVTRGMRESALKCHSVGGHIPLGYKVENHKLVVDPDTAHIVQEAFSLYANGESVADICRKFNSAGYKTAKNTEFNRSSFKAMFRNTRYIGIYTYKDIVIENGIPAIIDKELFETVQRRLSKTATAPARGKAKVDYLLSGKLFCGHCGASMNGESGAGRHGKVYHYYSCYTKKRKLGCDKRPLKKDYIEGIVARDALNLLTDQLIDEIADMAIRQSEQDLINDTHIPQLTAQLSEVEKSITNITTAIEKGIASETLMNRLVQLEHEKKTLNKEIKAEEKFVYRIDRDQIVFWLSQFKYGNIEDEDFRRRLIDLLVNSVTVWDEPDGYKITTAYNLTSCKTKTFRVEKNPAAEEATGFDFGESECTIERISEPYIVWGKVFVQTKRHSLP

SEQ ID NO: 2010 - protein, 553 aa, Unknown
  Description of Unknown: Integrase B2011 sequence
  PTHR30461:SF3,SM00857,G3DSA:1.10.10.2600,IPR036162,PF13408, PS51737,G3DSA:3.40.50.1390,IPR025827,IPR006119,IPR038109, PF07508,IPR011109,SSF53041,PTHR30461,Coil, PS51736,cd00338,PF00239
MKKFPIDLSCLTEEEISQFQEDPYTLYNGDQNVAIYLRYSSTGQSDQSIEGQLRDCRTFCKANHYRIVAIYVDRATTARKDVEKRVHLMEMISDSAKQNWEYVIVWKLDRFARNRNDSAIMKMRLRKNGVKVLSATEHLTDSPESIILESVLEGMAEFFSAELSQKVTRGMRESALKCHSVGGHIPLGYKVENHKLVVDPDTAHIVQEAFSLYANGESVADICRKFNSAGYKTAKNTEFNRSSFKAMFRNTRYIGTYTYKDIVIENGIPAIIDKELFETVQRRLSKTATAPARGKAKVDYLLSGKLFCGHCGASMNGESGAGRHGKVYHYYSCYTKKRKLGCDKRPLKKDYIEGIVARDALNLLTDQLIDEIADMAIRQSEQDLINDTHIPQLTAQLSEVEKSITNITAAIEKGIASETLMNRLVQLEHEKKTLNKEIKAEEKFVYRIDRDQIVFWLSQFKYGNIEDEDFRRRLIDLLVNSVTVWDEPDGYKITTAYNLTSCKTKTFRVEKNPAAEEATGFDFGESECTIERISEPYIVWGTVFVQTKRHSLP

SEQ ID NO: 2011 - protein, 553 aa, Unknown
  Description of Unknown: Integrase B2012 sequence
  PTHR30461:SF3,cd00338,SM00857,G3DSA:1.10.10.2600,IPR036162, PF13408,IPR025827,G3DSA:3.40.50.1390,PS51737,IPR006119, IPR038109,PF07508,IPR011109,SSF53041,PTHR30461, PS51736,Coil,PF00239
MQTIPIDLSALTAQERQQFDENPSVLSSDCDAVCCLYMRYSSERQTEQSIEGQLRELIAHCKQHRYRIAAIYVDRAISAHASMEKRPSFQQMLSDSSRAAWKTVLVYKLDRFARNREDSAIARMRLRKAGCSVESAKEGISKNPEGVILEALLEGMAEYYSLELSQKITRGMRESAIKGNSLGGQIPLGYKIENKKFVIDPLTAPLVVEAFSRYGDGETAASICADFNARGYRTASGSKFNRSSFKNIFRNEKYIGVYKYKEMRQEGIIPRLVSDDAWIAVQSRLKANEAAPARGKAKAAYLLAGKIFCGHCGAPMVGECGRGKGGKIYNYYSCATRKKSRSCEKKPVSKDWLEDVVAQDALNVLTDDIIDFVASVAAQQSEDEIKKNTQIPVIRQKIAEIDSGIRNLTKAIETAAVAPDAIIMRIAELEAQKKALSEQLANEERGVIPLEKETVVTYLRAVREKAIPLETQKPMLIDMLVNSVTVYDNDPGFLTFVTAYRLSQIPAKTFRIPVSPAHGCSDIELNPLPLGANPNTITVFGMVFVQTKSHALP

SEQ ID NO: 2012 - protein, 553 aa, Unknown
  Description of Unknown: Integrase B2013 sequence
  PTHR30461:SF3,SM00857,G3DSA:1.10.10.2600,IPR036162,PF13408, PS51737,G3DSA:3.40.50.1390,IPR025827,IPR006119,IPR038109, PF07508,IPR011109,SSF53041,PF00239,PTHR30461, PS51736,Coil,cd00338
MKKFPIDLSCLTEEEISQFQEDPYTLYNGDQNVAIYLRYSSTGQSDQSIEGQLRDCRAFCKANHYRIVAIYVDRATTARKDVEKRVHLMEMVADSAKQNWEYVIVWKLDRFARNRNDSAIMKMRLRKNGVKVLSATEHLTDSPESIILESVLEGMAEFFSAELSQKVTRGMRESALKCHSVGGHIPLGYKVENHKLVVDPDTAHIVQEAFSLYANGESVADICRKFNSAGYKTAKNTEFNRSSFKAMFRNTRYIGTYTYKDIVIENGIPAIIDKELFETVQRRLSKTATAPARGKAKVDYLLSGKLFCGHCGASMNGESGAGRHGKVYHYYSCYTKKRKLGCDKRPLKKDYIEGIVARDALNLLTDQLIDEIADMAIRQSEQDLINDTHIPQLTAQLSEVEKSITNITAAIEKGIASETLMNRLVQLEHEKKTLNKEIKAEEKFVYRIDRDQIVFWLSQFKYGNIEDEDFRRRLIDLLVNSVTVWDEPDGYKITTAYNLTSCKTKTFRVEKNLAAEEATGFDFGESECTIERISEPYIVWGTVFVQTKKHSLP

SEQ ID NO: 2013 - protein, 553 aa, Unknown
  Description of Unknown: Integrase B2014 sequence
  PTHR30461:SF3,SM00857,G3DSA:1.10.10.2600,IPR036162,PF13408, PS51737,G3DSA:3.40.50.1390,IPR025827,IPR006119,IPR038109, PF07508,IPR011109,SSF53041,PF00239,PTHR30461, PS51736,Coil,cd00338
MKKFPIDLSCLTEEEISQFQEDPYTLYNGDQDVALYLRYSSTGQSDQSIEGQLRDCRAFCKANHYRIVAIYVDRATTARKDVEKRVHLMEMVADSAKQNWEYVIVWKLDRFARNRNDSAIMKMRLRKNGVKVLSATEHLTDSPESIILESVLEGMAEFFSAELSQKVTRGMRESALKCHSVGGHIPLGYKVENHKLVVNPDTAHIVQEAFSLYANGESVADICRKFNSAGYKTAKNTEFNRSSFKAMFRNTRYIGTYTYKDIVIENGIPAIIDKELFETVQRRLSKTATAPARGKAKVDYLLSGKLFCGHCGASMNGESGAGRHGKVYHYYSCYTKKRKLGCDKRPLKKDYIEGIVARDALNLLTDQLIDEIADMAIRQSEQDLINDTHIPQLTAQLSEIEKSIMNITAAIEKGIASETLMNRLVQLEHEKKTLNKEIKAEEKFVYRIDRDQIVFWLSQFKYGNIEDENFRRRLIDLLVNSVTVWDEPDGYKITTAYNLTSCKTKTFRVDKNPAAEEATGFDFGESECTIERISEPYIVWGTVFVQTKRHSLP

SEQ ID NO: 2014 - protein, 553 aa, Unknown
  Description of Unknown: Integrase B2015 sequence
  cd03768,SM00857,IPR006118,G3DSA:1.10.10.2600,IPR036162, PS51737,G3DSA:3.40.50.1390,IPR006119,IPR038109,PF07508, IPR011109,SSF53041,PTHR30461,PS00397,PS51736, Coil,PF00239
MEKSKRVVGYARVSTEAQDITRQIELITAYCNDRNYHLIKIIQEKISGARRDRKSLNELLEVDDAVADLIIVSELSRLSREDDILSVLSTINELLKQGVDILFLDKQDRIYKAGTILSLYDIITLSVEAKASADERYKIAGRMQTGLRSKLAEFSNMFAGGTVPFGYKVIHNPDYKLNQTPKNLLVVDAKEAEAVKYLFQQLIDGNTIRQTVRVYNKLYPYKLSYSGICRIIRNPKYKGEIYRRGKLYGQIPELQIITPEDFDKANKQMRENSLFQSNAPKYYNPLKGLLFCPCGCGLYMKPNHNSYLIYRCSSAYNDKQKCENYGVKCAYILSSVWTCVKETLHTEEYKRFNTQRANELQGINKQIRETITRKVNSVDELKTQSASLIAKIKKLNNDDLINELETDYNVLCKQIKQTEQEISELNGQIAENDAEIKRNVEQKDFSKMEQSALYKEKLQKAVYHSQSAMRGILEIVFKNGMTRYVLIKKHRNGGTYLLPDTFKGDMERKQIIVPSLRTDKDNPYSAQPMNLRYTFDEFFKAMPVEEYEIPITE

SEQ ID NO: 2015 - protein, 553 aa, Unknown
  Description of Unknown: Integrase B2016 sequence
  PTHR30461:SF3,cd00338,SM00857,G3DSA:1.10.10.2600,IPR036162, PF13408,IPR025827,PS51737,G3DSA:3.40.50.1390,IPR006119, IPR038109,PF07508,IPR011109,SSF53041,PTHR30461, PS51736,Coil,PF00239
MQTIPIDLSALTAQERQQFAENPSVLSSDCDAVCCLYMRYSSERQTEQSIEGQLRELIAHCKQHRYRIAAIYVDRAISAHASMEKRPSFQRMLSDAVRAPWKTVLVYKLDRFARNREDAAIARMRLRKAGCNVESAKEGISKNPEGVILEALLEGMAEYYSLELSQKITRGMRESAIKGNSLGGQIPLGYKIENKKFVIDPLTAPLVVEAFSRYGDGETAASICADFNARGYRTASGAKFNRSSFKNIFRNEKYIGVYKYKEMRQEGIIPRLVTDDAWIAVQSRLKANEAAPARGKAKAAYLLAGKIFCGHCGAPMVGECGRGKGGKIYNYYSCAVRKKDHTCDKKPVPKDWIEDVVAQDALDVLTDDIIDFVASIAAQQSEDEIKKNTQIPVIRQKIAEIDSGIRNLTKAIETAAVAPDAIIMRIAELEAQKKALSEQLVDEERGVIPLEKETVVTYLRAVREKAIPLETQKPMLIDMLVNSVTVYDNDPGFLTFVTAYRLSQIPAKTFRIPVSPAHGCSDMGLNALPLGANPNTIVVVGMVFVQTKKHALP

SEQ ID NO: 2016 - protein, 553 aa, Unknown
  Description of Unknown: Integrase B2017 sequence
  PTHR30461:SF3,SM00857,G3DSA:1.10.10.2600,IPR036162,PF13408, IPR025827,G3DSA:3.40.50.1390,PS51737,IPR006119,IPR038109, PF07508,IPR011109,SSF53041,PF00239,PTHR30461, PS51736,Coil,cd00338
MKKFPIDLSCLTEEEISQFQEDPYTLYNGDQEVALYLRYSSTGQSDQSIEGQLRDCRAFCKANHYRIVAIYVDRATTARKDVEKRVHLMEMVADSAKQNWEYVIVWKLDRFARNRNDSAIMKMRLRKNGVKVLSATEHLTDNPESIILESVLEGMAEFFSAELSQKVTRGMRESALKCHSVGGHIPLGYKVENHKLVVDPDTAHIVQEAFSLYANGESVADICRKFNSAGYKTAKNTEFNRSSFKAMFRNTRYIGTYTYKDIVIENGIPAIIDKELFETVQRRLSKTATAPARGKAKVDYLLSGKLFCGHCGASMNGESGAGRHGKVYHYYSCYTKKRKLGCDKRPLKKDYIEGIVAHDALNLLTDQLIDEIADMAIQQSGQDLINDTHIPQLTAQLSEVEKSITNITAAIEKGIASETLMNRLVQLEHEKKTLNKEIKAEEKFVYRIDRDQIVFWLSQFKYGNIEDEDFRRRLIDLLVNSVTVWDEPDGYKITTAYNLTSCKTKTFRVEKNPAAEEATGFDFGESECTIERISEPYIVWGTVFVQTKRHSLP

SEQ ID NO: 2017 - protein, 553 aa, Unknown
  Description of Unknown: Integrase B2018 sequence
  SM00857,G3DSA:1.10.10.2600,IPR036162,PF13408,IPR025827, G3DSA:3.40.50.1390,PS51737,IPR006119,IPR038109,PF07508, SSF53041,IPR011109,PTHR30461,Coil,cd00338, PF00239
MAYRKITDIKDTIGMRAVFYARVSTAEEEQLNAIELQIEENRGCIKDHGWKLVGEYIDRSKSGTMVKGRDDYQRLYEDLYEDLFDIVVIKDQERLQRNTLDWYLFINRVVQTGKLLFMYMDGKFYSPDDALITGVRAIIAEEFSRNLSKKLHNYHDHRIEKARQGQEIALQGSGNVYGWDKKDGKYYINPEQAKVRRLMCEGIMARKGSTLIAKELNEAGYRNTVGKLWKPMDIPKFVYDCKNVGTMIINKERHDFESKQTIKLPKEEWVYVENALPPIVTQEEWDLICKIHEERVIATGSDRRGKKTSGYSFSGKLVCGICGAPYWRKQRVSKDEYWVCSTKQTKGRRTRKRDSTMGKAGEINPLGCDNENISYNSLMEIMGVVSERLQANTDTIKHDMINWLTKLRKQLLEANGGHTEADLQRELSRKSKLLDAYLDGILNKQEYQKKAEELDERIIQLKAETEKNKANSGDIAEIDKVLANIDEEVSRYVDGNEKLKVEYLLEHLEQVQIFQDKVIVIVPILSEGIVVEKAQYVSREKWCRQDNFNENTF

SEQ ID NO: 2018 - protein, 553 aa, Unknown
  Description of Unknown: Integrase B2019 sequence
  PTHR30461:SF3,SM00857,G3DSA:1.10.10.2600,IPR036162,PF13408, IPR025827,G3DSA:3.40.50.1390,PS51737,IPR006119,IPR038109, PF07508,SSF53041,IPR011109,PF00239,PTHR30461, PS51736,Coil,cd00338
MQTIPIDLSALTPEERQQFADNPSVLSSDCEAVCCLYMRYSSDRQTEQSIEGQLRELIAYCKHHSYRVSAIYVDRAISAHASMDKRPAFQQMLADSARSSWKTVLVYKLDRFARNREDSAIARMRLRKNGCNVESAKEGISKNPEGVILEALLEGMAEYYSLELSQKITRGMRESAIKGNCLGGQIPLGYKIENKKYVIDPLTAPLVKEAFSRYGDGETAASICADFNARGYRTASGAEFNKSSFKNIFRNEKYIGVYKYKEMRREGIIPRIIADDAWIAVQSRLKVNEAAPARGKAKMPYLLAGKLFCGHCGAPMTGECGRGKSGKMYNYYSCATRKHHNSCEKKPVPKDWLEDVVAQDALDVLTDEIIEFVAEVAAQQSEEDIQKNTQIPVIRKKISEIENKIRNLTKALECASVAPDAIVERLSELEAQKKGLSTQLSDEERGVIPLTKESVVVYLKAVREKAVPLETQKAMLIEMLVNSVTVYDDEPGFLKLVYAYRLTQIPTRTYRVPIPAKVPCSDFRTQPAPLDANPNTITVVGMVFIQTRRHALP

SEQ ID NO: 2019 - protein, 553 aa, Unknown
  Description of Unknown: Integrase B2020 sequence
  cd03768,SM00857,IPR006118,G3DSA:1.10.10.2600,IPR036162, PS51737,G3DSA:3.40.50.1390,IPR006119,IPR038109,PF07508, IPR011109,SSF53041,PTHR30461,PS00397,PS51736, Coil,PF00239
MEKSKRVVGYARVSTEAQDITRQIELITAYCNDRNYHLIKIIQEKISGARKDRKSLNELLEVDDTVADMIIVSELSRLSREDDILSVLSTINELLKQGVDILFLDKQDRIYKAGTVLSLYDIITLSVEAKASADERYKIAGRMQTGLRSKLAEFTNMFAGGTVPFGYKIIHNPEYKLNQTPKNLLVVDTPKAEAVKYLFQQLIDGNTIRQTVRVYNKLFPYKLSYSGICRIIRNPKYKGEIYRRGKLYGIMNELQIITPEDFDKANKQMRENSLFQSNAPKYYNPLKGLLFCPCGCSLYMKPNHNSYLIYRCSSAYNEKQKCENYGVKCAYILSSVWICVKETLHTEEYKRFNTQRANELQGVNKQIRETIIRKVNSVDELKAQSASLIAKIKKLNNEDLISELETDYNVLCKQIKQTEQEISELNGQIVENDAEIKRNMEQKDFSKMEQSALYKEKLQKAVYHSLSAMRGILEIIFKNGMTRYVLIKKHRNGGTYLLPDTFKGDMERKQIIVPSLRTDKDNPYSTQPINLRYTFDEFFKAMPVEEYQIPITE

SEQ ID NO: 2020 - protein, 553 aa, Unknown
  Description of Unknown: Integrase B2021 sequence
  PTHR30461:SF3,SM00857,G3DSA:1.10.10.2600,IPR036162,PF13408, PS51737,IPR025827,G3DSA:3.40.50.1390,IPR006119,IPR038109, PF07508,IPR011109,SSF53041,PF00239,PTHR30461, PS51736,Coil,cd00338
MQTIPIDLSALTAQERQQFAENPSVLSSDCDAVCCLYMRYSSERQTEQSIEGQLRELIAHCKQHRYRIAAIYVDRAISAHASMEKRPSFQRMLSDAVRAPWKTVLVYKLDRFARNREDAAIARMRLRKAGCNVESAKEGISKNPEGVILEALLEGMAEYYSLELSQKITRGMRESAIKGNSLGGQIPLGYKIENKKFVIDPLTAPLVVEAFSRYGDGETAASICADFNARGYRTASGAKFNRSSFKNIFRNEKYIGVYKYKEMRQEGIIPRLVTDDAWVAVQSRLKANEAAPARGKAKAAYLLAGKIFCGHCGAPMVGECGRGKGGKIYNYYSCAVRKKDHTCDKKPVPKDWIEDVVAQDALDVLTDDIIDFVASIAAQQSEDEIKKNTQIPVIRQKIAEIDSGIRNLTKAIETAAVAPDAIIMRIAELEAQKKALSEQLVDEERGVIPLEKETVVTYLRAVREKAIPLETQKPMLIDMLVNSVTVYDNDPGFLTFVTAYRLSQIPAKTFRVPVSPAHGCSDMGLNALPLGANPNTIVVVGMVFVQTKKHALP

SEQ ID NO: 2021 - protein, 553 aa, Unknown
  Description of Unknown: Integrase B2022 sequence
  PTHR30461:SF3,SM00857,G3DSA:1.10.10.2600,IPR036162,PF13408, IPR025827,G3DSA:3.40.50.1390,PS51737,IPR006119,IPR038109, PF07508,IPR011109,SSF53041,PTHR30461,Coil, PS51736,cd00338,PF00239
MQMIPIDLSALTASEQRQFTENPSVLSTDCDVVCCLYMRYSSDRQTEQSIEGQLRELLTFCQQHRYRVSAIYVDRAISAHASMEKRPAFQQMLSDSSRAAWKTVLVYKLDRFARNREDAAVARMRLRKNGCNVESAKESISKNPEGVILESILEGMAEYYSLELSQKITRGMRESALKGQAVGGSVPLGYKIEKKKWVLDPLTAPLVSEAFTRYADGETVADICSDFNARGYRTAKGAQFNKSSFKNIFRNEKYIGVYKYRDIRMEDALPRIVEDDVWRKVQSRLKVNEQAPARGKAKVPYLLAGKIFCGHCGSPMVGECGRGKGGKTYNYYSCANRKRNGGCDKKPAPKDWIEDVVANDAINVLTDEVIEYVATTAAQQSENEIQQNTNIPALQAQIAETDRKIKNLLKALEAASTAPDVLVARIADLESQKKGLTAQLFEEKKSVIPLTKEMVVYFLESVRSQVLDLETQKPMLFSLLINSVTVYDDEPGYMKFETAYNLTQIPAKTYRVPTSGICKCSDMGLISPPLDANPNTITVFGMIFVQTRKHALP

SEQ ID NO: 2022 - protein, 553 aa, Unknown
  Description of Unknown: Integrase B2023 sequence
  PTHR30461:SF3,IPR036162,PS51737,IPR011109,PTHR30461, PF00239,G3DSA:1.10.10.2600,IPR006119,SSF53041,cd00338, SM00857,IPR025827,IPR038109,PS51736,cd18688, PF13408,G3DSA:3.40.50.1390,PF07508,Coil
MQTIPIDLSALTPDERQQFADNPSVLSSDCEAVCCLYMRYSSDRQTEQSIEGQLRELIAYCKHHSYRVAAIYVDRAISAHASMDKRPAFQQMLADSARSSWKTVLVYKLDRFARNREDSAIARMRLRKNGCNVESAKEGISKNPEGVILEALLEGMAEYYSLELSQKVRRGMSETARKGNSTGGTTPLGYTVVDKRLKIDPMTAHLVEEAFRRYADGDTVAAICDDFNARGYRTTRGTKFNKSSFKNVFRNEKYIGVYKFDDVRTDNAVPRIISDELWRAVQSRLKTSEQAPARGKAKVPYLLSGKIFCGHCGAPMVGECGRGKGGKTYNYYSCAKRKKTRLCDKKPVPKDWLEDVVAQDALDVLTDEIIEFVAEVAAQQSKEDIQKNTQIPVIRKKISEIENKIRNLTKALECASVAPDAIVERLAELEAQKRGLSTQLSDEERGVIPLTKESVVVYLKAVRENAVPLETQKAMLIEMLVNSVTVYDDEPGFLKFVTAYRLTQIPSKTYRVPTPAVSPCSDIGRVGSPLDANPNSIVVVGMVFVQTKRHALP

SEQ ID NO: 2023 - protein, 553 aa, Unknown
  Description of Unknown: Integrase B2024 sequence
  PTHR30461:SF3,SM00857,G3DSA:1.10.10.2600,IPR036162,PF13408, PS51737,G3DSA:3.40.50.1390,IPR025827,IPR006119,IPR038109, PF07508,IPR011109,SSF53041,PF00239,PTHR30461, PS51736,Coil,cd00338
MKKFPIDLSCLTEEEISQFQEDPYTLYNGDQDVALYLRYSSTGQSDQSIEGQLRDCRAFCKANHYRIVAIYVDRATTARKDVEKRVHLMEMVADSAKQNWEYVIVWKLDRFARNRNDSAIMKMRLRKNGVKVLSATEHLTDSPESIILESVLEGMAEFFSAELSQKVTRGMRESALKCHSVGGHIPLGYKVENHKLVVDPDTAHIVQEAFSLYANGESVADICRKFNSAGYKTAKNTEFNRSSFKAMFRNTRYIGTYTYKDIVIENGIPAIIDKELFETVQRRLSKTATAPARGKAKVDYLLSGKLFCGHCGASMNGESGAGRHGKVYHYYSCYTKKRKLGCDKRPLKKDYIEGIVARDALNLLTDQLIDEIADMAIRQSEQDLINDTHIPQLTAQLSEVEKSITNITAAIEKGIASETLMNRLVQLEHEKKTLNKEIKAEEKFVYRIDRDQIIFWLSQFKYGNIEDEDFRRRLIDLLVNSVTVWDEPDGYKITTAYNLTSCKTKTFRVEKNPAAEEATGFDFGESECTIERISEPYIVWGTVFVQTKRHSLP

SEQ ID NO: 2024 - protein, 553 aa, Unknown
  Description of Unknown: Integrase B2025 sequence
  cd03768,SM00857,IPR006118,G3DSA:1.10.10.2600,IPR036162, PS51737,G3DSA:3.40.50.1390,IPR006119,IPR038109,PF07508, SSF53041,IPR011109,PTHR30461,PS00397,PS51736, Coil,PF00239
MEKSKRVVGYARVSTEAQDITRQIELITAYCNDRNYHLIKIIQEKISGARKDRKSLNELLDVDDAVADMIIVSELSRLSREDDILSVLSTINELLKQGVDILFLDKQDRIYKAGTILSLYDIITLSVEAKASADERYKIAGRMQTGLRSKLAEFSNMFAGGTVPFGYKVIHNPDYKLNQTPKNLLVVDAKEAEAVKYLFQQLIDGNTIRQTVRVYNKLYPYKLSYSGICRIIRNPKYKGEIYRRGKLYGQIPELQIITPEDFDKANKQMRENSLFQSNAPKYYNPLKGLLFCPCGCGLYMKPNHNSYLIYRCSSAYNDKQKCENYGVKCAYILSSVWTCVKETLHTEEYKRFNTQRANELQGINKQIRETITRKVNSVDELKTQSASLIAKIKKLNNDDLINELETDYNVLCKQIKQTEQEISELNGQIAENDAEIKRNVEQKDFSKMEQSALYKEKLQKAVYHSLSAMRGILEIVFKNGMTRYVLIKKHRNGGTYLLPDTFKGDMERKQIIVPSLRTDKDNPYSAQPMNLRYTFDEFFKAMPVEEYEIPITE

SEQ ID NO: 2025 - protein, 553 aa, Unknown
  Description of Unknown: Integrase B2026 sequence
  SM00857,G3DSA:1.10.10.2600,IPR036162,PF13408,IPR025827, G3DSA:3.40.50.1390,PS51737,IPR006119,IPR038109,PF07508, SSF53041,IPR011109,PF00239,PTHR30461,PS51736, Coil,cd00338
MKKFPIDLSCLTEEEISQFQEDPYTLYNGDQDVALYLRYSSTGQSDQSIEGQLRDCRAFCKANHYRIVAIYVDRATTARKDVEKRVHLMEMVADSAKQNWEYVIVWKLDRFARNRNDSAIMKMRLRKNGVKILSATEHLTDSPESIILESVLEGMAEFFSAELSQKVTRGMRESALKCHSVGGHIPLGYKVENHKLVVDPDTAHIVQEAFSLYANGESVADICRKFNSAGYKTAKNTEFNRSSFKAMFRNTRYIGTYTYKDIVIENGIPAIIDKELFETVQRRLSKTATAPARGKAKVDYLLSGKLFCGHCGASMNGESGAGRHGKVYHYYSCYTKKRKLGCDKRPLKKDYIEGIVARDALNLLTDQLIDEIADMAIRQSEQDLINDTHIPQLTAQLSEVEKSITNITAAIEKGIASETLMNRLVQLEHEKKTLNKEIKAEEKFVYRIDRDQIVFWLSQFKYGNIEDEDFRRRLIDLLINSVTVWDEPDGYKITTAYNLTSCKAKTFRVEKNPAAEEATGFDFGESECTIERISEPYIVWGTVFVQTKRHSLP

SEQ ID NO: 2026 - protein, 553 aa, Unknown
  Description of Unknown: Integrase B2027 sequence
  cd09606,PTHR30461:SF3,SM00857,G3DSA:1.10.10.2600,IPR036162, PF13408,IPR025827,G3DSA:3.40.50.1390,PS51737,IPR006119, IPR038109,PF07508,SSF53041,IPR011109,PTHR30461, PS51736,cd00338,PF00239
MKKIETNQPTVERGVIYARYSSSGQREESIEGQLRECRIYAEKHGITIVGEYCDAAMTGTNDKRPQFQRLIRDSAKGQFTVAILWKIDRFARNKYDSAIYKHKLKQNGVRIVYAKESIPDGPEGIIFESLMEGFAEYYSANLSQNVKRGLYDSALKLQTLGQTAYGLRKGTDGKWEHNPAQAPIVKRIFEEYVAGRSIISIYKQLNAEGYRTLNGGMFNKNSLRTILKNEKYCGVYQYADIRVEDGIPAIISKELFAMAQQMIKKNHEKPAAKKEDGGFLLSGKLFCGHCGELMTGDCGTSKLGRIYRYYTCINRRQKKCDKERARKEWIEDVIVHKLAEIANCDDVIDEFADRYMEWQDKQKPMSSELEDRLKKVEAALQNNMSLVDSGFISESVKNHIMQLETERTQLEQGILKERLNSPKLTRQQVVYFLKSFRKGDINDISWRIYLVDTFLQAAYLYDNGNLILSLNFSGDNNKITLNIAEAAVVGGEQMCSDFAHSCPPKESLDVIYAFEAFFFCIRYKDELFCGSRKHDNRFIDLGKCRGSYVVFKR

SEQ ID NO: 2027 - protein, 553 aa, Unknown
  Description of Unknown: Integrase B2028 sequence
  PTHR30461:SF3,SM00857,G3DSA:1.10.10.2600,IPR036162,PF13408, IPR025827,PS51737,G3DSA:3.40.50.1390,IPR006119,IPR038109, PF07508,IPR011109,SSF53041,PTHR30461,Coil, PS51736,cd00338,PF00239
MSITKFPIDLSWLTEEELAQFEEDPFTLYNGEHNVALYLRYSSTGQSDQSIEGQLRDCRAFCKANNYRIVAVYIDRATTARSIEKRVHLLKLISDSAKRRWEYVVVWKLDRFARNRNDSAIMKMRLRKNGVKVLSATEHLTDSPESIILESVLEGMAEFFSAELSQKVSRGMRESAMKCQSIGGHIPLGYKVENHKLVVNPDTAHIVQEAFTLYANGMRIADICRKFNSAGYRTAKNGEFNCNSFRSIFRNIRYIGTYKYKDIHIENGIPAIIDKELFDRVQLRMDRAAVAPARGTGKVDYILSGKLFCGHCGAYMNGECGTGRRGTVYHYYSCSNRKNGNGCDKRPLRKEYIEDIVVQDALNLLTDQLIDEIADMAIRQSELDMFEKTRIPQLTAHMTEVEKSIENITTAIEKGIASDSLMNRLVKLEQQKKELAEEIELEEGRIYKIDRDMIIFWLSQFKQGDIEDETFRRRLVDLLINSVTVWDEPDGYKITTAYNITSKATRTFTIEKNPTDKTKGFENRQCSCTIEFRVEPYIAYGSILVQTKRHSLP

SEQ ID NO: 2028 - protein, 553 aa, Unknown
  Description of Unknown: Integrase B2029 sequence
  PTHR30461:SF3,SM00857,G3DSA:1.10.10.2600,IPR036162,PF13408, PS51737,G3DSA:3.40.50.1390,IPR025827,IPR006119,IPR038109, PF07508,IPR011109,SSF53041,PF00239,PTHR30461, PS51736,Coil,cd00338
MPRKKKLQEVGGLRLVAYYRYSNGGQQTEQSIEGQRRDCEAYAKAHGYKIVHEYIDRHISGKSDSRPAFQQMISDSDSHLFDAVICWKTDRLARSRYDSIIYKTRLRRNGVKILYAAETVVDGPEGIIIEGLMESLAEYYSAELAQKLRRGQRESALKCIALGGNRSFGYDIGPDKHYCINEKQAPAVRYIFEQYAAGATAADIVRELTARGYRTSRGNPFNKNSICRIITNEMYLGVYKYADIRIEGGVPAMIDRELFNRCQTQLAFNRAHGGGKGAPRADYVLVGKLDCGLCGHAMKGASATGHTGSKHYYYTCTQHVEKKCPKTSIEKNYLEQIIVDGVAKYVLTPEKISQIVDCMMELQAKEQEPKGNPEKDALEAELAECRRKQNNILEAIEEGGSARLAARLRTLEEQEAQLTFALGEINNAPTPPQFSREALTFMFEQFRREEDEVDEEYRRRILDTFVSSILLYEDRAEVKFNITDQKTGDFERVILPISANKKPPEDDDITSNSEGSTALRLVDEVQRRTNPRVEISPYSVVFIIPLPGKLVRR

SEQ ID NO: 2029 - protein, 553 aa, Unknown
  Description of Unknown: Integrase B2030 sequence
  PTHR30461:SF3,SM00857,G3DSA:1.10.10.2600,IPR036162,PF13408, PS51737,G3DSA:3.40.50.1390,IPR025827,IPR006119,IPR038109, PF07508,IPR011109,SSF53041,PTHR30461,PS51736, cd00338,PF00239
MARSAKKIEYAPAEQIGVIYARYSSHNQKEESIEQQIAECTEFAEKNGIRIIGIYADKAVSGRSDRRPNFQRMMRDAEKRHFQIVVAYKSNRIARNMLNALQYEAKLDLFGIKTLYAKEEFGNTAAGRFALRTMMNVNQFYSENMGEDIKRGMVDNANECKVNGMLPLGYVKSKEGKYAIAPDEAAVVREIFDSVLKDVPVAEIARSLNQRGIHTKLGREWNKNSFHIMLKNDNYIGVYRHSGVVVEDGIPPILEKEVFAAVQEKLANKKKTAGRRSANGEYLLTGKLFCGYCGSYMIGVSGTGENGTVHNYYQCQKRHAEGRCEKKNVRRDFIEKLIARLTQDYILQDDTIEWIADSTMSFQAMARRESGVAQLERDLADNRKVAKNIMAAIEQGIITETTKARLLEVEGTIHDLERSLSIAKAASQPIERERVVFSLEQMREGNVGSKDHQKKLIDTFVKSVTLWDDRIQIDYYHTPGKHKFSYSLEELTSKAENESNASDVRTDSLELHHCRRELHRFTTAFLLTAAPLRLYGTIKKTQEFKFLRLFCMY

SEQ ID NO: 2030 - protein, 553 aa, Unknown
  Description of Unknown: Integrase B2031 sequence
  PTHR30461:SF3,SM00857,G3DSA:1.10.10.2600,IPR036162,PF13408, PS51737,IPR025827,G3DSA:3.40.50.1390,IPR006119,IPR038109, PF07508,IPR011109,SSF53041,PF00239,PTHR30461, PS51736,Coil,cd00338
MKKFPIDLSCLTEEEISQFQEDPYTLYNGDQDVALYLRYSSTGQSDQSIEGQLRDCRAFCKANHYRIVAIYVDRATTARKDVEKRVHLMEMVADSAKQNWEYVIVWKLDRFARNRNDSAIMKMRLRKNGVKVLSATEHLTDSPESIILESVLEGMAEFFSAELSQKVTRGMRESALKCHSVGGHIPLGYKVENHKLVVDPDTAHIVQEAFSLYANGESVADICRKFNSAGYKTAKNTEFNRSSFKAMFRNTRYIGTYTYKDIVIENGIPAIIDKELFETVQRRLSKTATAPARGKAKVDYLLSGKLFCGHCGASMNGESGAGRHGKVYHYYSCYTKKRKLGCDKRPLKKDYIEGIVARDALNLLTDQLIDEIADMAIRQSEQDLINDTHIPQLTAQLSEVEKSITNITAAIEKGIASETLMNRLVQLEHEKKTLNKEIKAEEKFVYRIDRDQIVFWLSQFKYGNIEDEDFRRRLIDLLVNSVTVWDEPDGYKITTAYNLTSCKTKTFRVEKNPAAKEATGFDFGESECTIERISEPYIVWGTVFVQTKRHSLP

SEQ ID NO: 2031 - protein, 553 aa, Unknown
  Description of Unknown: Integrase B2032 sequence
  PTHR30461:SF3,cd00338,SM00857,G3DSA:1.10.10.2600,IPR036162, PF13408,IPR025827,G3DSA:3.40.50.1390,PS51737,IPR006119, IPR038109,PF07508,IPR011109,SSF53041,PTHR30461, PS51736,Coil,PF00239
MQTIPIDLSALTPEERQQFADNPSVLSSDCEAVCCLYMRYSSDRQTEQSIEGQLRELIAYCKHHSYRVAAIYVDRAISAHASMDKRPAFQQMLSDSARSSWKTVLVYKLDRFARNREDSAIARMRLRKNGCNVESAKEGISKNPEGVILEALLEGMAEYYSLELSQKITRGMRESAIKGNCLGGQIPLGYKIENKKYVIDPLTAPLVKEAFSRYGDGETAASICADFNARGYRTASGAEFNKSSFKNIFRNEKYIGVYKYKEMRREGIIPRIIADDAWIAVQSRLKDNEAAPARGKAKVAYLLAGKIFCGHCGAPMTGECGRGKSGKMYNYYSCATRKHHNSCEKKPVPKDWLEDVVAQDALDVLTDEIIEFVAEVAAQQSEEDIQKNTQIPVIRKKISEIENKIRNLTKALECASVAPDAIVERLAELESQKKGLSTQLSDEERGVIPLTKESVVVYLKAVRENAVPLETQKAMLIDMLVNSVTVYDDEPGFLKLIYAYRLTQIPARTYRVPISEKVPCSDFRTQPAPLDANPNTITVVGMVFIQTKRHALP

SEQ ID NO: 2032 - protein, 553 aa, Unknown
  Description of Unknown: Integrase B2033 sequence
  PTHR30461:SF3,SM00857,G3DSA:1.10.10.2600,IPR036162,PF13408, IPR025827,G3DSA:3.40.50.1390,PS51737,IPR006119,IPR038109, PF07508,IPR011109,SSF53041,PF00239,PTHR30461, PS51736,Coil,cd00338
MQTIPIDLSALTAQERQQFAENPSVLSSDCDAVCCLYLRYSSERQTEQSIEGQLRELIAHCKQHRYRIAAIYVDRAISAHASMEKRPSFQQMLSDSVRAPWKTVLVYKLDRFARNREDAAIARMRLRKAGCNVESAKEGISKNPEGVILEALLEGMAEYYSLELSQKITRGMRESAIKGNSLGGQIPLGYRIENKKFVIDPLTAPLVVEAFSRYGDGETAASICADFNARGYRTASGAKFNRSSFKNIFRNEKYIGVYKYKEMRQEGIIPRLITDDAWIAVQSRLKANEAAPARGKAKTAYLLAGKIFCGHCGAPMVGECGRGKGGKIYNYYSCATRKKSRSCEKKPVPKDWIEDVVAQDALDVLTDDVIEFVASVAAQQSEEEIKKNTQIPVIRQKIAEIDSGIRNLTKAIETAAVAPDAIIMRIAELEAQKKALSEQLVNEERGVIPLEKETVVTYLRAVREKAIPLETQKPMLIDMLVNSVTVYDNDPGFLTLVTAYRLSQIPAKTFRIPVSPAHGCSDMGLNALPLGVNPNTIVVVGMVFVQTKKHALP

SEQ ID NO: 2033 - protein, 553 aa, Unknown
  Description of Unknown: Integrase B2034 sequence
  PTHR30461:SF3,cd00338,SM00857,G3DSA:1.10.10.2600,IPR036162, PF13408,IPR025827,G3DSA:3.40.50.1390,PS51737,IPR006119, IPR038109,PF07508,IPR011109,SSF53041,PTHR30461, PS51736,Coil,PF00239
MQTIPIDLSALTPEERQQFADNPSVLSSDCEAVCCLYMRYSSDRQTEQSIEGQLRELIAYCKHHSYRVAAIYVDRAISAHASMDKRPAFQQMLSDSARSSWKTVLVYKLDRFARNREDSAIARMRLRKNGCNVESAKEGISKNPEGVILEALLEGMAEYYSLELSQKITRGMRESAIKGNCLGGQIPLGYKIENKKYVIDPLTAPLVKEAFSRYGDGETAASICADFNARGYRTASGAEFNKSSFKNIFRNEKYIGVYKYKEMRREGIIPRIIADDAWIAVQSRLKDNEAAPARGKAKVAYLLAGKIFCGHCGAPMTGECGRGKSGKMYNYYSCATRKHHNSCEKKPVPKDWLEDVVAQDALDVLTDEIIEFVAEVAAQQSEEDIQKNTQIPVIRKKISEIENKIRNLTKALECASVAPDAIVERLAELEAQKKGLATQLSDEERGVVPLTKESVVVYLKAVRENAVPLETQKAMLIDMLVNSVTVYDDEPGFLKLIYAYRLTQIPARTYRVPISEKVPCSDFRTQPAPLDANPNTITVVGMVFIQTKRHALP

SEQ ID NO: 2034 - protein, 553 aa, Unknown
  Description of Unknown: Integrase B2035 sequence
  PTHR30461:SF3,SM00857,G3DSA:1.10.10.2600,IPR036162,PF13408, PS51737,G3DSA:3.40.50.1390,IPR025827,IPR006119,IPR038109, PF07508,IPR011109,SSF53041,PF00239,PTHR30461, PS51736,Coil,cd00338
MQTIPIDLSALTAQERQQFAENPSVLSSDCDAVCCLYMRYSSERQTEQSIEGQLRELIAHCKQHRYRIAAIYVDRAISAHASMERRPSFQQMLSDSVRAPWKTVLVYKLDRFARNREDSAIARMRLRKAGCSVESAKEGISKNPEGVILEALLEGMAEYYSLELSQKITRGMRESAIKGNSLGGQIPLGYKIENKKFVIDPLTAPLVVEAFSRYGDGETAASICADFNARGYRTASGAKFNRSSFKNIFRNEKYIGVYKYKEMRQEGIIPRLVTDDAWVAVQSRLKANEAAPARGKAKAAYLLAGKIFCGHCGAPMVGECGRGKGGKIYNYYSCAVRKKDHTCDKKPVPKDWIEDVVAQDALNVLTDDVIDFVASVAAQQSEEEIKKNTQIPVIRQKIAEIDSGIRNLTKAIETAAVAPDAIIMRIAELEAQKKALSEQLVNEERGVIPLEKETVVTYLRAVREKAIPLETQKPMLIDMLVNSVTVYDNDPGFLTFVTAYRLSQIPAKTFRIPASTAHGCSDMGLNALPLGANPNTIVVVGMVFVQAKKHALP

SEQ ID NO: 2035 - protein, 553 aa, Unknown
  Description of Unknown: Integrase B2036 sequence
  PTHR30461:SF3,SM00857,G3DSA:1.10.10.2600,IPR036162,PF13408, PS51737,G3DSA:3.40.50.1390,IPR025827,IPR006119,IPR038109, PF07508,SSF53041,IPR011109,PTHR30461,Coil, PS51736,cd00338,PF00239
MKKFPIDLSCLTEEEISQFQEDPYTLYNGDQDVALYLRYSSTGQSDQSIEGQLRDCRAFCKANHYRIVAIYVDRATTARKDMEKRVHLMEMVADSAKQNWEYVIVWKLDRFARNRNDSAIMKMRLRKNGVKVLSATEHLTDSPESIILESVLEGMAEFFSAELSQKVTRGMRESALKCHSVGGHIPLGYNVENHKLVVDPDTAHIVQEAFSLYANGESVADICRKFNSAGYKTAKNTEFNRSSFKAMFRNTRYIGTYTYKDIVIENGIPAIIDKELFETVQRRLSKTATAPARGKAKVDYLLSGKLFCGHCGASMNGESGAGRHGKVYHYYSCYTKKRKLGCDKRPLKKDYIEGIVASDALNLLTDQLIDEIADMAIRQSEQDLINDTHIPQLTAQLSEVEKSITNITAAIEKGIASETLMNRLVQLEHEKKTISKEIKAEEKFVYRIDRDQIVFWLSQFKYGNIEDENFRRRLIDLLVNSVTVWDEPDGYKITTAYNLTSCKTKTFRVEKNPAAEEATGFDFGESECTIERISEPYIVWGTVFVQTKRHSLP

SEQ ID NO: 2036 - protein, 553 aa, Unknown
  Description of Unknown: Integrase B2037 sequence
  PTHR30461:SF3,cd00338,SM00857,G3DSA:1.10.10.2600,IPR036162, PF13408,PS51737,G3DSA:3.40.50.1390,IPR025827,IPR006119, IPR038109,PF07508,IPR011109,SSF53041,PTHR30461, PS51736,Coil,PF00239
MKNCVIDLSTLTPEERRQFAENPGVLSYSCPETCCLYMRYSSERQSEQSIEGQLRELVAYCLQHGYRVSAVYVDRAVSAHTGMNKRAAFQQMLADSKRADWNTVLVWKLDRFARNRQDSAAARAVLIKNGCMVVSATENITDSPEGRLLESVLEGLNEYYSEDLKQKIKRGNRESALKGQALGGSVPLGYKIEKKKWVLDPLTAPLVEEAFTRYAAGETATAICADFNARGHRTSKGSLFNKSSFKNIFRNEKYIGVYKYTDIRQEDAVPRIVTDDVWQAVQSRLRSNAAAPARGKAKVAYLLSGKVFCGKCGGPMIGDTGTGKTGGKYSYYTCAGRKQRHSCDKRSVPKGWLENMVARDALDALTDEVIDYVATAAARQSENEIRQNTNIPVYQQEIADIERKVRNLTKAIESSDTAPDALVARISELEARKKGLQAQLKEAQHGVVPLTKESIVYFLESVRSQAIPLETQKYMLIDLFVNSVTVYDDDPDHIIIKTAYNLTSIPAKTYKVPTSKLNLCSDLGLNGPPYNTKTNSITVVGMVFVCTRRHALP

SEQ ID NO: 2037 - protein, 553 aa, Unknown
  Description of Unknown: Integrase B2038 sequence
  PTHR30461:SF3,SM00857,G3DSA:1.10.10.2600,IPR036162,PF13408, IPR025827,G3DSA:3.40.50.1390,PS51737,IPR006119,IPR038109, PF07508,SSF53041,IPR011109,PF00239,PTHR30461, PS51736,Coil,cd00338
MKKFPIDLSCLTEEEISQFQEDPYTLYNGDQNVAIYLRYSSTGQSDQSIEGQLRDCRTFCKANHYRIVAIYVDRATTARKDVEKRVHLMEMISDSAKQNWEYVIVWKLDRFARNRNDSAIMKMRLRKNGVKVLSATEHLTDSPESIILESVLEGMAEFFSAELSQKVTRGMRESALKCHSVGGHIPLGYKVENHKLVIDPDTAHIVQEAFSLYANGESVADICRKFNSAGYKTAKNTEFNRSSFKAMFRNTRYIGTYTYKDIVIENGIPAIIDKELFETVQRRLSKTATAPARGKAKVDYLLSGKLFCGHCGASMNGESGAGRHGKVYHYYSCYTKKRKLGCNKRPLKKDYIEGIVARDALNLLTDQLIDEIADMAIRQSEQDLINDTHIPQLTAQLSEVEKSITNITAAIEKGIASETLMNRLVQLEHEKKTLNKEIKSEEKFVYRIDRDQIVFWLSQFKYGNIEDEDFRRRLIDLLVNSVTVWDEPDGYKITTAYNLTSCKTKTFRVEKNPAAEEATGFDFGESECTIERISEPYIVWGTVFVQTKRHSLP

SEQ ID NO: 2038 - protein, 553 aa, Unknown
  Description of Unknown: Integrase B2039 sequence
  PTHR30461:SF3,SM00857,G3DSA:1.10.10.2600,IPR036162,PF13408, IPR025827,G3DSA:3.40.50.1390,PS51737,IPR006119,IPR038109, PF07508,IPR011109,SSF53041,PF00239,PTHR30461, PS51736,Coil,cd00338
MKKFPIDLSCLTEEEISQFQEDPYTLYNGDQNVAIYLRYSSTGQSDQSIEGQLRDCRTFCKANHYRIVAIYVDRATTARKDVEKRVHLMEMISDSAKQNWEYVIVWKLDRFARNRNDSAIMKMRLRKNGVKVLSATEHLTDSPESIILESVLEGMAEFFSAELSQKVTRGMRESALKCHSVGGHIPLGYKVENHKLVVDPDTAHIVQEAFSLYANGESVAAICRKFNSAGYKTAKNTEFNRSSFKAMFRNTRYIGTYTYKDIVIENGIPAIIDKELFETVQRRLSKTATAPARGKAKVDYLLSGKLFCGHCGASMNGESGAGRHGKVYHYYSCYTKKRKLGCDKRPLKKDYIEGIVARDALNLLTDQLIDEIADMAIRQSEQDLINDTHIPQLTAQLSEVEKSITNITAAIEKGIASETLMNRLVQLEHEKKTLNKEIKAEEKFVYRIDRDQIVFWLSQFKYGNIEDENFRRRLIDLLVNSVTVWDEPDGYKITTAYNLTSCKTKTFRVEKNPAAEEATGFDFGESECTIERISEPYIVWGTVFVQTKRHSLP

SEQ ID NO: 2039 - protein, 553 aa, Unknown
  Description of Unknown: Integrase B2040 sequence
  PTHR30461:SF3,SM00857,G3DSA:1.10.10.2600,IPR036162,PF13408, IPR025827,G3DSA:3.40.50.1390,PS51737,IPR006119,IPR038109, PF07508,IPR011109,SSF53041,PTHR30461,Coil, PS51736,cd00338,PF00239
MKKFPIDLSCLTEEEISQFQEDPYTLYNGDQEVALYLRYSSTGQSDQSIEGQLRDCRAFCKANHYRIVAIYVDRATTARKDVEKRVHLMEMVADSAKQNWEYVIVWKLDRFARNRNDSAIMKMRLRKNGVKVLSATEHLTDSPESIILESVLEGMAEFFSAELSQKVTRGMRESALKCHSVGGHIPLGYKVENHKLVVDPDTAHIVQEAFSLYANGVSVADICRKFNSAGYKTAKNTEFNRSSFKAMFRNTRYIGTYTYKDIVIENGIPAIIDKELFETVQRRLSKTATAPARGKAKVDYLLSGKLFCGHCGASMNGESGAGRHGKVYHYYSCYTKKRKLGCDKRPLKKDYIEGIVARDALNLLTDQLIDEIADMAIRQSEQDLINDTHIPQLTAQLSEVEKSITNITAAIEKGIASETLMNRLVRLEHEKKTLNKEIKAEEKFVYRIDRDQIVFWLSQFKYGNIEDEDFRRRLIDLLVNSVTVWDEPDGYKITTAYNLTSCKTKTFRVEKNPAAEEATGFDFGESECTIERISEPYIVWGTVFVQTKRHSLP

SEQ ID NO: 2040 - protein, 553 aa, Unknown
  Description of Unknown: Integrase B2041 sequence
  PTHR30461:SF3,SM00857,G3DSA:1.10.10.2600,IPR036162,PF13408, PS51737,IPR025827,G3DSA:3.40.50.1390,IPR006119,IPR038109, PF07508,IPR011109,SSF53041,PF00239,PTHR30461, PS51736,Coil,cd00338
MKKFPIDLSCLTEEEISQFQEDPYTLYNGDQDVALYLRYSSTGQSDQSIEGQLRDCRTFCKANHYRIVAIYVDRATTARKDVEKRVHLMEMVADSAKQNWEYVIVWKLDRFARNRNDSAIMKMRLRKNGVKVLSATEHLTDSPESIILESVLEGMAEFFSAELSQKVTRGMRESALKCHSVGGHIPLGYKVENHKLVVDPDTAHIVQEAFSLYANGESVADICRKFNSAGYKTAKNTEFNRSSFKAMFRNTRYIGTYTYKDIVIENGIPAIIDKELFETVQRRLSKTATAPARGKAKVDYLLSGKLFCGHCGASMNGESGAGRHGKVYHYYSCYTKKRKLGCDKRPLKKDYIEGIVARDALNLLTDQLIDEIADMAIRQSEQDLINDTHIPQLTAQLTEVEKSITNITAAIEKGIASETLMNRLVQLEHEKKTLNKEIKAEEKFVYRIDRDQIVFWLSQFKYGNIEDEDFRRRLIDLLVNSVTVWDEPDGYKITTAYNLTSCKTKTFRVEKNPAAEEATGFDFGESECTIERISEPYIVWGTVFVQTKRHSLP

SEQ ID NO: 2041 - protein, 553 aa, Unknown
  Description of Unknown: Integrase B2042 sequence
  PTHR30461:SF3,cd00338,SM00857,G3DSA:1.10.10.2600,IPR036162, PF13408,PS51737,G3DSA:3.40.50.1390,IPR025827,IPR006119, IPR038109,PF07508,IPR011109,SSF53041,PTHR30461, PS51736,Coil,PF00239
MKLPIDLSCLTEEEISQFQEDPYTLYNGDQDVALYLRYSSTGQSDQSIEGQLRDCRTFCKANHYRIVAIYVDRATTACKDVEKRVHLMEMISDSAKQNWEYVIVWKLDRFARNRNDSAIMKMRLRKNGVKVLSATEHLTDSPESIILESVLEGMAEFFSAELSQKVTRGMRESALKCHSVGGHIPLGYKVENHKLVVDPDTAHIVQEAFSLYANGESVADICRKFNSAGYKTAKNTEFNRSSFKAMFRNTRYIGTYTYKDIVIENGIPAIIDKELFETVQRRLSKTATAPARGKAKVDYLLSGKLFCGHCGASMNGESGAGRHGKVYHYYSCYTKKRKLGCDKRPLKKDYIEGIVARDALNLLTDQLIDEIADMAIRQSEQDLINDTHIPQLTAQLSEVEKSITNITAAIEKGIASETLMNRLVQLEHEKKTLNKEIKAEEKFVYRIDRAQIVFWLSQFKYGNIEDEDFRRRLIDLLVNSVTVWDEPDGYKITTAYNLTSCKTKTFRVEKNPAAEEATGFDFGESECTKSPRNRLISRTFAFHKFRFGDTAFF

SEQ ID NO: 2042 - protein, 553 aa, Unknown
  Description of Unknown: Integrase B2043 sequence
  PTHR30461:SF3,SM00857,G3DSA:1.10.10.2600,IPR036162,PF13408, IPR025827,G3DSA:3.40.50.1390,PS51737,IPR006119,IPR038109, PF07508,IPR011109,SSF53041,PF00239,PTHR30461, PS51736,Coil,cd00338
MKKFPIDLSCLTEEEISQFQEDPYTLYNGDQDVALYLRYSSTGQSDQSIEGQLRDSRAFCKANHYRIVAIYVDRATTARKDVEKRVHLMEMVADSAKQNWEYVIVWKLDRFARNRNDSAIMKMRLRKNGVKVLSATEHLTDSPESIILESVLEGMAEFFSAELSQKVTRGMRESALKCHSVGGHIPLGYKVENHKLVVDPDTAHIVQEAFSLYANGESVADICRKFNSAGYKTAKNTEFNRSSFKAMFRNTRYIGTYTYKDIVIENGIPAIIDKELFETVQQRLSKTATAPARGKAKVDYLLSGKLFCGHCGASMNGESGAGRHGKVYHYYSCYTKKRKLGCDKRPLKKDYIEGIVARDALNLLTDQLIDEIADMAIRQSEQDLINDTHIPQLTAQLSEVEKSITNITAAIEKGIASETLMNRLVQLEHEKKTISKEIKAEEKFVYRIDRDQIVFWLSQFKYGNIEDENFRRRLIDLLVNSVTVWDEPDGYKITTAYNLTSCKTKTFRVEKNPAAEEATGFDFGESECTIERISEPYIVWGTVFVQTKRHSLP

SEQ ID NO: 2043 - protein, 553 aa, Unknown
  Description of Unknown: Integrase B2044 sequence
  PTHR30461:SF3,cd00338,SM00857,G3DSA:1.10.10.2600,IPR036162, PF13408,PS51737,IPR025827,G3DSA:3.40.50.1390,IPR006119, IPR038109,PF07508,IPR011109,SSF53041,PTHR30461, PS51736,Coil,PF00239
MYEDIKTACLYVRFSSHNQTEQSIEGQTRVCRDFCKRHNIRIVEIYADRATSASKDIEKRVQFLKMIKDSEKGLFDAVIVYKLDRFARSRYDSATYKYRLKRNGVQLISATENISNDPEGIILESVLEGMAEFYSAELSQKINRGMRESAYKHNSIGGAIPLGYKIEDKKLVIDPKTAPIVKEAFEKYADGETVAEICRQFNARGYKTSKGTAFGKSSFTKIFRNERYIGVYTFHDYRAEDAIPAIIDKDLWDRVQLRVGKIKNAPARNKAKVVYLLSGKIFCGHCGSKMNGNCNAGNYCYYQCYGKKNGNVDCKKKNIRKEFIERLVAQDALSLLTDEYIEQIATIACEKNQHEIELDSALPTIRDRIHQVDLSLNHLLKAIESGSAPDMLVKRMGELEKEKKDLQAQAKKESEDIVELDKAQVIYWLEQFRGGSIEDEEFCRMLIDLFVNSVTVWDEDDNTYKVTVAYNLTSLPTKTYRLNKGGTLSDFASNAPAQQGIGNGLDTDTFLPIVQGDTVSVDVVTALMHQPPHSAVLAVIHDGDRFSLVVLHK

SEQ ID NO: 2044 - protein, 553 aa, Unknown
  Description of Unknown: Integrase B2045 sequence
  PTHR30461:SF3,SM00857,G3DSA:1.10.10.2600,IPR036162,PF13408, IPR025827,PS51737,G3DSA:3.40.50.1390,IPR006119,IPR038109, PF07508,SSF53041,IPR011109,PF00239,PTHR30461, PS51736,Coil,cd00338
MKKFPIDLSCLTEEEISQFQEDPYTFYNGDQDVALYLRYSSTGQSDQSIEGQLRDCRAFCKANHYRIVAIYVDRATTARKDVEKRVHLMEMISDSAKQNWEYVIVWKLDRFARNRNDSAIMKMRLRKNGVKVLSATEHLTDSPESIILESVLEGMAEFFSAELSQKVTRGMRESALKCHSVGGHIPLGYKVENHKLVVDPDTAHIVQEAFSLYANGESVADICRKFNSAGYKTAKNTEFNRSSFKAMFRNTRYIGTYTYKDIVIENGIPAIIDKELFETVQRRLSKTATAPARGKAKVDYLLSGKLFCGHCGASMNGESGAGRHGKVYHYYSCYTKKRKLGCDKRPLKKDYIEGIVARDALNLLTDQLIDEIADMAIRQSEQDLINDTHIPQLTAQLSEVEKSITNITAAIEKGIASETLMNRLVQLEHEKKTLNKEIKAEEKFVYRIDRDQIVFWLSQFKYGNIEDENFRRRLIDLLVNSVTVWDEPDGYKITTAYNLTSCKAKTFRVEKNPAAEEATGFDFGESECTIERISEPYIVWGTVFVQTKRHSLP

SEQ ID NO: 2045 - protein, 553 aa, Unknown
  Description of Unknown: Integrase B2046 sequence
  PTHR30461:SF3,SM00857,G3DSA:1.10.10.2600,IPR036162,PF13408, IPR025827,PS51737,G3DSA:3.40.50.1390,IPR006119,IPR038109, PF07508,SSF53041,IPR011109,PF00239,PTHR30461, PS51736,Coil,cd00338
MKKFPIDLSCLTEEEISQFQEDPYTLYNGDQDVALYLRYSSTGQSDQSIEGQLRDCRTFCKANHYRIVAIYVDRATTARKDVEKRVHLMEMISDSAKQNWEYVIVWKLDRFARNRNDSAIMKMRLRKNGVKVLSATEHLTDSPESIILESVLEGMAEFFSAELSQKVTRGMRESALKCHSVGGHIPLGYKVENHKLVVDPDTAHIVQEAFSLYANGESVADICRKFNSAGYKTAKNTEFNRSSFKAMFRNTRYIGTYTYKDIVIENGIPAIIDKELFETVQRRLSKTATAPARGKAKVDYLLSGKLFCGHCGASMNGESGAGRHGKVYHYYSCYTKKRKLGCDKRPLKKDYIEGIVARDALNLLTDQLIDEIADMAIRQSEQDLINDTHIPQLTAQLSEVEKSITNITAAIEKGIASETLMNRLVQLEHEKKTINKEIKAEEKFVYRIDRDQIVFWLSQFKYGNIEDENFRRRLIDLLVNSVTVWDEPDGYKITTAYNLTSCKTKTFRVEKNPTAEEVTGFDFGESECTIERISEPYIVRGTVFVQTKRHSLP

SEQ ID NO: 2046 - protein, 553 aa, Unknown
  Description of Unknown: Integrase B2047 sequence
  PTHR30461:SF3,SM00857,G3DSA:1.10.10.2600,IPR036162,PF13408, PS51737,IPR025827,G3DSA:3.40.50.1390,IPR006119,IPR038109, PF07508,SSF53041,IPR011109,PF00239,PTHR30461, PS51736,Coil,cd00338
MKKFPIDLSCLTEEEISQFQEDPYTLYNGDQDVALYLRYSSTGQSDQSIEGQLRDCRTFCKANHYRIVAIYVDRATTARKDVEKRVHLMEMISDSAKQNWEYVIVWKLDRFARNRNDSAIMKMRLRKNGVKVLSATEHLTDSPESIILESVLEGMAEFFSAELSQKVTRGMRESALKCHSVGGHIPLGYKVENHKLVVDPDTAHIVQEAFSLYANGESVADICRKFNSAGYKTAKNTEFNRSSFKAMFRNTRYIGTYTYKDIVIENGIPAIIDKELFEMVQRRLSKTATAPARGKAKVDYLLSGKLFCGHCGASMNGESGAGRHGKVYHYYSCYTKKRKLGCDKRPLKKDYIEGIVARDALNLLTDQLIDEIADMAIRQSEQDLINDTHIPQLTAQLSEVEKSITNITAAIEKGIASETLMNRLVQLEHEKKTLNKEIKAEEKFVYRIDRDQIVFWLSQFKYGNIEDEDFRRRLIDLLVNSVTVWDEPDGYKITTAYNLTSCKTKTFRVEKNPAAEEATGFDFGESECTIERISEPYIVWGTVFVQTKRHSLP

SEQ ID NO: 2047 - protein, 553 aa, Unknown
  Description of Unknown: Integrase B2048 sequence
  PTHR30461:SF3,cd00338,SM00857,G3DSA:1.10.10.2600,IPR036162, PF13408,IPR025827,PS51737,G3DSA:3.40.50.1390,IPR006119, IPR038109,PF07508,SSF53041,IPR011109,PTHR30461, PS51736,Coil,PF00239
MQTIPIDLSALTAQERQQFAENPSVLSSDCDAVCCLYMRYSSERQTEQSIEGQLRELIAHCKQHRYRIAAIYVDRAISAHASMEKRPSFQQMLSDSVRAPWKTVLVYKLDRFARNREDSAIARMRLRKAGCNVESAKEGISKNPEGVILEALLEGMAEYYSLELSQKITRGMRESAIKGNSLGGQIPLGYKIENKKFVIDPLTAPLVVEAFSRYGDGETAASICADFNARGYRTASGAKFNRSSFKNIFRNEKYIGVYKYKEMRQEGIIPRLVTDDAWVAVQSRLKANEAAPARGKAKVPYLLAGKIFCGHCGAPMVGECGRGKGGKIYNYYSCATRKKSRSCEKKPVPKDWIEDVVAQDALDVLTDDIIDFVASIAAQQSEDEIKKNTQIPVIRQKIAEIDSGIRNLTKAIETAAVAPDAIIMRISELEAQKKALSEQLVNEERGVIPLEKETVVTYLRAVREKAIPLETQKPMLIDMLVNSVTVYDNDPGFLTFVTAYRLSQIPAKTFRIPVSTAHGCSDMGLNALPLGANPNTIVVVGMVFVQAKKHALP

SEQ ID NO: 2048 - protein, 553 aa, Unknown
  Description of Unknown: Integrase B2049 sequence
  PTHR30461:SF3,SM00857,G3DSA:1.10.10.2600,IPR036162,PF13408, PS51737,IPR025827,G3DSA:3.40.50.1390,IPR006119,IPR038109, PF07508,IPR011109,SSF53041,PF00239,PTHR30461, PS51736,Coil,cd00338
MKKFPIDLSCLTEEEISQFQEDPYTLYNGDQDVALYLRYSSTGQSDQSIEGQLRDCRAFCKANHYRIVAIYVDRATTARKDVEKRVHLMEMVADSAKQNWEYVIVWKLDRFARNRNDSAIMKMRLRKNGVKVLSATEHLTDSPESIILESVLEGMAEFFSAELSQKVTRGMRESALKCHSVGGHIPLGYKVENHKLVVDPDTAHIVQEAFSLYANGESVADICRKFNSAGYKTAKNTEFNRSSFKAMFRNTRYIGTYTYKDIVIENGIPAIIDKELFETVQRRLSKTATAPARGKAKVDYLLSGKLFCGHCGASMNGESGAGRHGKVYHYYSCYTKKRKLGCDKRPLKKDYIEGIVARDALNLLTDQLIDEIADMAIRQSEQDLINDTHIPQLTAQLSEVEKSIMNITAAIEKGIASETLMNRLVQLEHEKKTLNKEIKAEEKFVYRIDRDQIVFWLSQFKYGNIEDEDFRRRLIDLLVNSVTVWDEPDGYKITTAYNLTSCKTKTFRVEKNPVAEEATGFDFGESECTIERISEPYIVWGTVFVQTKRHSLP

SEQ ID NO: 2049 - protein, 553 aa, Unknown
  Description of Unknown: Integrase B2050 sequence
  PTHR30461:SF3,SM00857,G3DSA:1.10.10.2600,IPR036162,PF13408, PS51737,G3DSA:3.40.50.1390,IPR025827,IPR006119,IPR038109, PF07508,IPR011109,SSF53041,PTHR30461,Coil, PS51736,cd00338,PF00239
MKKFPIDLSCLTEEEISQFQEDPYTLYNGDQNVAIYLRYSSTGQSDQSIEGQLRDCRTFCKANHYRIVAIYVDRATTARKDVEKRVHLMEMISDSAKQNWEYVIVWKLDRFARNRNDSAIMKMRLRKNGVKVLSATEHLTDSPESIILESVLEGMAEFFSAELSQKVTRGMRESALKCHSVGGHIPLGYKVENHKLVVDPDTAHIVQEAFSLYANGESVADICRKFNSAGYKTAKNTEFNRSSFKAMFRNTRYIGTYTYKDIVIENGIPAIIDKELFETVQRRLSKTATAPARGKAKVDYLLSGKLFCGHCGASMNGESGAGRHGKVYHYYSCYTKKRKLGCDKRPLKKDYIEGIVARDALNLLTDQLIDEIADMAIRQSEQDLINDTHIPQLTDQLSEVEKSITNITAAIEKGIASETLMNRLVQLEHEKKTLNKEIKAEEKFVYRIDRDQIIFWLSQFKYGNIEDEDFRRRLIDLLVNSVTVWDEPDGYKITTAYNLTSCKTKTFRVEKNLAAEEATGFDFGESECTIERISEPYIVWGTVFVQTKRHSLP

SEQ ID NO: 2050 - protein, 553 aa, Unknown
  Description of Unknown: Integrase B2051 sequence
  PTHR30461:SF3,SM00857,G3DSA:1.10.10.2600,IPR036162,PF13408, PS51737,G3DSA:3.40.50.1390,IPR025827,IPR006119,IPR038109, PF07508,SSF53041,IPR011109,PF00239,PTHR30461, PS51736,Coil,cd00338
MKEFPIDLSCLTEEEISQFQEDPYTLYNGDQNVAIYLRYSSTGQSDQSIEGQLRDCRTFCKANHYRIVAIYVDRATTARKDVEKRVHLMEMISDSAKQNWEYVIVWKLDRFARNRNDSAIMKMRLRKNGVKVLSATEHLTDSPESIILESVLEGMAEFFSAELSQKVTRGMRESALKCHSVGGHIPLGYKVENHKLVVDPDTAHIVQEAFSLYANGESVADICRKFNSAGYKTAKNTEFNRSSFKAMFRNTRYIGTYTYKDIVIENGIPAIIDKELFETVQRRLSKTATAPARGKAKVDYLLSGKLFCGHCGASMNGESGAGRHGKVYHYYSCYTKKRKLGCDKRPLKKDYIEGIVARDALNLLTDQLIDEIADMAIRQSEQDLINDTHIPQLAAQLSEVEKSIANITAAIEKGIASETLMNRLVQLEHEKKTLNKEIKAEEKFVYRIDRDQIVFWLSQFKYGNIEDEDFRRRLIDLLVNSVTVWDEPDGYKITTAYNLTSCKTKTFRVEKNPAAEEATGFDFGESECTIERISEPYIVWGTVFVQTKRHSLP

SEQ ID NO: 2051 - protein, 553 aa, Unknown
  Description of Unknown: Integrase B2052 sequence
  PTHR30461:SF3,SM00857,G3DSA:1.10.10.2600,IPR036162,PF13408, IPR025827,G3DSA:3.40.50.1390,PS51737,IPR006119,IPR038109, PF07508,SSF53041,IPR011109,PF00239,PTHR30461, PS51736,Coil,cd00338
MKEFPIDLSCLTEEEISQFQEDPYTLYNGDQNVAIYLRYSSTGQSDQSIEGQLRDCRTFCKANHYRIVAIYVDRATTARKDVEKRVHLMEMISDSAKQNWEYVIVWKLDRFARNRNDSAIMKMRLRKNGVKVLSATEHLTDSPESIILESVLEGMAEFFSAELSQKVTRGMRESALKCHSVGGHIPLGYKVENHKLVVDPDTAHIVQEAFSLYANGESVAAICRKFNSAGYKTAKNTEFNRSSFKAMFRNTRYIGTYTYKDIVIENGIPAIIDKELFETVQRRLSKTATAPARGKAKVDYLLSGKLFCGHCGASMNGESGAGRHGKVYHYYSCYTKKRKLGCDKRPLKKDYIEGIVARDALNLLSDQLIDEIADMAIRQSEQDLINDTHIPQLTAQLSEVEKSITNITAAIEKGIASETLMNRLVQLEHEKKTLNKEIKAEEKFVYRIDRDQIVFWLSQFKYGNIEDEDFRRRLIDLLVNSVTVWDEPDGYKITTAYNLTSCKTKTFRVEKNPAAEEATGFDFGESECTIERISEPYIVWGTVFVQTKRHSLP

SEQ ID NO: 2052 - protein, 553 aa, Unknown
  Description of Unknown: Integrase B2053 sequence
  PTHR30461:SF3,cd00338,SM00857,G3DSA:1.10.10.2600,IPR036162, PF13408,PS51737,G3DSA:3.40.50.1390,IPR025827,IPR006119, IPR038109,PF07508,IPR011109,SSF53041,PTHR30461, PS51736,Coil,PF00239
MKFPIDLSTLTKEEISQFEEDPFTLYNGDHDVALYLRYSSSGQSDQSIEGQLRDCRAFCKANHYRIVAIYIDRATTARKDVEKRIHLMEMIADSAKQRWDYVVVWKLDRFSRNRNDSAIMKMRLRKNGVKVLSATEHLSDNPESILLESVLEGMAEFFSAELSQKVTRGMRESALKCHSVGGHVPLGYKIENHKLVVNPDTAHIVQEAFALYANGVSVAEIARKFNAAGYKTAKNTEFNRSSFKVMFQNVRYIGTYTYKDIRIENGVPAIIDRELFDAVQRRLSKTATAPARGKAKVDYLLSGKLFCGHCGASMNGESGVGRSGKTYHYYSCYTKKRRLGCEKRPLRKDYIEEIVARSAFELLTDQLIDEIADMAIKQSEQDMVNETRIPQLTEQLSEIEKSIANITTAIEKGIASETLMNRLVQLEHEKKTINKEIKSEEKYVYRIDRDQIVFWLSQFKCGNIEDENFRRRLIDLLVNSVTVWDEPDGYKITTAYNLTSCKTKTFRVEKSPATENVTGFGFGESECAIGLKSEPYYIIYGTIFVQTKRHSLS

SEQ ID NO: 2053 - protein, 553 aa, Unknown
  Description of Unknown: Integrase B2054 sequence
  cd03768,SM00857,IPR006118,G3DSA:1.10.10.2600,IPR036162, PS51737,G3DSA:3.40.50.1390,IPR006119,IPR038109,PF07508, SSF53041,IPR011109,PTHR30461,PS00397,PS51736, Coil,PF00239
MEKSKRVVGYARVSTEAQDITRQIELITAYCSDRNYHLIKIIQEKISGARKDRKSLNELLDVDDAVADMIIVSELSRLSREDDILSVLSTINELLKQGVDILFLDKQDRIYKAGTILSLYDIITLSVEAKASADERYKIAGRMQTGLRSKLAEFSNMFAGGTVPFGYKVIHNPDYKLNQTPKNLLVVDAKEAEAVKYLFQQLIDGNTIRQTVRVYNKLYPYKLSYSGICRIIRNPKYKGEIYRRGKLYGQIPELQIITPEDFDKANKQMRENSLFQSNAPKYYNPLKGLLFCPCGCGLYMKPNHNSYLIYRCSSAYNDKQKCENYGVKCAYILSSVWTCVKETLHTEEYKRFNTQRANELQGINKQIRETITRKVNSVDELKTQSASLIAKIKKLNNDDLINELETDYNVLCKQIKQTEQEISELNGQIAENDAEIKRNVEQKDFSKMEQSALYKEKLQKAVYHSLSAMRGILEIVFKNGMTRYVLIKKHRNGGTYLLPDTFKGDMERKQIIVPSLRTDKDNPYSAQPMNLRYTFDEFFKAMPVEEYEIPITE

SEQ ID NO: 2054 - protein, 553 aa, Unknown
  Description of Unknown: Integrase B2055 sequence
  PTHR30461:SF3,IPR036162,PS51737,IPR011109,PTHR30461, PF00239,G3DSA:1.10.10.2600,IPR006119,SSF53041,cd00338, SM00857,IPR025827,IPR038109,PS51736,cd18688, PF13408,G3DSA:3.40.50.1390,PF07508,Coil
MQTIPIDLSALTPEERQQFADNPSVLSSDCEAVCCLYMRYSSDRQTEQSIEGQLRELIAYCKHHSYRVAAIYVDRAISAHASMDKRPAFQQMLSDSARSSWKTVLVYKLDRFARNREDSAIARMRLRKNGCNVESAKEGISKNPEGVILEALLEGMAEYYSLELSQKVRRGMSETARKGNSTGGTTPLGYTVVDKRLQIDPMTAHLVEEAFRRYADGDTVAEICDDFNARGYRTTRGTKFNKSSFKNVFRNEKYIGVYKFDDVRTDNAVPRIISDELWRAVQSRLKTSEQAPARGKAKVPYLLSGKIFCGHCGAPMVGECGRGKGGKTYNYYSCANRKKTHLCDKKPVPKDWLEDVVAQDALDVLTDEIIEFVAEIAAQQSEEDIQKNTQIPVIRKKISEIENKIRNLTKALECASVAPDAIVERLAELEAQKRGLSTQLSDEERGVIPLTKESVVVYLKAVREKAVPLETQKAMLIEMLVNSVTVYDDEPGFLKFVTAYRLTQIPSKTYRVPTPAVSPCSDIGRVGSPLDANPNTITVVGMVFIQTRRHALP

SEQ ID NO: 2055 - protein, 553 aa, Unknown
  Description of Unknown: Integrase B2056 sequence
  PTHR30461:SF3,SM00857,G3DSA:1.10.10.2600,IPR036162,PF13408, IPR025827,G3DSA:3.40.50.1390,PS51737,IPR006119,IPR038109, PF07508,SSF53041,IPR011109,PF00239,PTHR30461, PS51736,Coil,cd00338
MKKFPIDLSCLTEEEISQFQEDPYTLYNGDQNVAIYLRYSSTGQSDQSIEGQLRDCRTFCKANHYRIVAIYVDRATTARKDVEKRVHLMEMISDSAKQNWEYVIVWKLDRFARNRNDSAIMKMRLRKNGVKVLSATEHLTDSPESIILESVLEGMAEFFSAELSQKVTRGMRESALKCHSVGGHIPLGYKVENHKLVVDPDTAHIVQEAFSLYANGESVAAICRKFNSAGYKTAKNTEFNRSSFKAMFRNTRYIGTYTYKDIVIENGIPAIIDKELFETVQRRLSKVAEAPARGKAKVDYLLSGKLFCGHCGASMNGESGAGRHGKVYHYYSCYTKKRKLGCDKRPLKKDYIEGIVARDALNLLTDQLIDEIADMAIRQSEQDLINDTHIPQLTAQLSEVEKSITNITAAIEKGIASETLMNRLVQLEHEKKTINKEIKAEEKFVYRIDRDQIIFWLSQFKYGNIEDENFRRRLIDLLVNSVTVWDEPDGYKITTAYNLTSCKTKTFRVEKNPAAEEATGFDFGESECTIERISEPYIVWGTVFVQTKRHSLP

SEQ ID NO: 2056 - protein, 553 aa, Unknown
  Description of Unknown: Integrase B2057 sequence
  PTHR30461:SF3,SM00857,G3DSA:1.10.10.2600,IPR036162,PF13408, PS51737,IPR025827,G3DSA:3.40.50.1390,IPR006119,IPR038109, PF07508,IPR011109,SSF53041,PF00239,PTHR30461, PS51736,Coil,cd00338
MKKFPIDLSCLTEEEISQFQENPYTLYNGDQDVALYLRYSSTGQSDQSIEGQLRDCRTFCKANHYRIVAIYVDRATTARKDVEKRVHLMEMVADSAKQNWEYVIVWKLDRFARNRNDSAIMKMRLRKNGVKVLSATEHLTDSPESIILESVLEGMAEFFSAELSQKVTRGMRESALKCHSVGGHIPLGYKVENHKLVVDPDTAHIVQEAFSLYANGESVADICRKFNSAGYKTAKNTEFNRSSFKAMFRNTRYIGTYTYKDIVIENGIPAIIDKELFETVQRRLSKTATAPARGKAKVDYLLSGKLFCGHCGASMNGESGAGRHGKVYHYYSCYTKKRKLGCDKRPLKKDYIEGIVARDALNLLTDQLIDEIADMAIRQSEQDLINDTHIPQLTAQLSEVEKSITNITAAIEKGIASETLMNRLVQLEHEKKTLNKEIKAEEKFVYRIDRDQIVFWLSQFKYGNIEDEDFRRRLIDLLVNSVTVWDEPDGYKITTAYNLTSCKTKTFRVEKNPAAEEATGFDFGESECTIERISEPYIVWGKVFVQTKRHSLP

SEQ ID NO: 2057 - protein, 553 aa, Unknown
  Description of Unknown: Integrase B2058 sequence
  PTHR30461:SF3,SM00857,G3DSA:1.10.10.2600,IPR036162,PF13408, IPR025827,G3DSA:3.40.50.1390,PS51737,IPR006119,IPR038109, PF07508,IPR011109,SSF53041,PF00239,PTHR30461, PS51736,Coil,cd00338
MQMIPIDLSALTASEQQQFTENPSVLSTDCDVVCCLYMRYSSDRQTEQSIEGQLRELLTFCQQHRYRVAAIYVDRAISAHASMEKRPAFQQMLSDSSRAAWKTVLVYKLDRFARNREDAAVARMRLRKNGCNVESAKEGISKNPEGVILESILEGMAEYYSLELSQKITRGMRESALKGQAVGGSVPLGYKIEKKKWVLDPLTAPLVSEAFTRYADGETVADICADFNARGYRTAKGAQFNKSSFKNIFRNEKYIGVYKYHDIRMEDALPRVVEDDVWRKVQSRLKVNEQAPARGKAKVPYLLAGKIFCGHCGSPMVGECGRGKGGKTYNYYSCANRKRNGGCDKKPAPKDWIEDVVAHDALKVLTDEVIEYVATVAAQQSENEIQQNTNIPALQAQIAETDRKIKNLLKALEAASTAPDVLVARIADLESQKKGLTAQLSEEKQSVIPLTKEMVIYFLESVRSQVLDLETQKPMLFSLLINSVTVYDDEPGYMKFKTAYNLTQIPTKTYRVPTSGICKCSDMGLISSPLDTYPNTIAVVGMVFVQTKIHALP

SEQ ID NO: 2058 - protein, 553 aa, Unknown
  Description of Unknown: Integrase B2059 sequence
  PTHR30461:SF3,SM00857,G3DSA:1.10.10.2600,IPR036162,PF13408, PS51737,G3DSA:3.40.50.1390,IPR025827,IPR006119,IPR038109, PF07508,IPR011109,SSF53041,PTHR30461,Coil, PS51736,cd00338,PF00239
MKKFPIDLSCLTEEEISQFQEDPYTLYNGDQDVALYLRYSSTGQSDQSIEGQLRDCRTFCKANHYRIVAIYVDRATTARKDVEKRVHLMEMVADSAKQNWEYVIVWKLDRFARNRNDSAIMKMRLRKNGVKVLSATEHLTDSPESIILESVLEGMAEFFSAELSQKVTRGMRESALKCHSVGGHIPLGYKVENHKLVVDPDTAHIVHEAFSLYANGESVADICRKFNSAGYKTAKNTEFNRSSFKAMFRNTRYIGTYTYKDIVIENGIPAIIDKELFETVQRRLSKTATAPARGKAKVDYLLSGKLFCGHCGASMNGESGAGRHGKVYHYYSCYTKKRKLGCDKRPLKKDYIEGIVARDALNLLTNQLIDEIADMAIRQSEQDLINDTHIPQLTAQLSEVEKSITNITAAIEKGIASETLMNRLVQLEHEKKTINKEIKAEEKFVYRIDRDQIVFWLSQFKYGNIEDENFRRRLIDLLVNSVTVWDEPDGYKITTAYNLTSCKTKTFRVEKNPAAEEATGFDFGESECTIERISEPYIVWGTVFVQTKRHSLP

SEQ ID NO: 2059 - protein, 553 aa, Unknown
  Description of Unknown: Integrase B2060 sequence
  cd03768,PTHR30461:SF3,SM00857,G3DSA:1.10.10.2600,IPR036162, PF13408,IPR025827,G3DSA:3.40.50.1390,PS51737,IPR006119, IPR038109,PF07508,IPR011109,SSF53041,PTHR30461, PS51736,Coil,PF00239
MNSNIAIYSRKSKFTGKGESIENQILKCKKFIEFKFNINPELITEDNIFIDEDYTGRNENRPRFQDMRNKILTGDIKHVVIYQLNRFGRNARDIHNSMAMCEEHNCVMYSATEGFDTSTSFGRAVMGILASLAQLETEQLAERVKDNMYTLAKMGRWLGGQAPLGFDGSKDYYIDEQGKERSITKLKENKEELSLVKSIYDKYIEKKSLSQVSKWSLSHNLKGKNGGNLDKSAINAILQNPVYVKSNNDVMQRLANEGFDVCGSANGNGLLRYGKEDVIMAVSNHKGIIEADLWLKVQDILKANKSKAPRLGKTNTALLTGILKCNCGSPMRVAYGGIKKDGTRSFYYTCVMKNNSGGTRCNSKNISGPIIEEKLITYLRLYDVNVLIKELESTLSETSKINSEFSTDKIDLDIEKCNKSINNLLSKLKLIDDIDVSKILLDEIANEKNKLNELNEKRESLLNSQAKISLVQMDISCIINKLNKFNAAFDSLSLEQKQEQLKDLLETIIYRDGKFELTFNKKKLDNANSILSSVITDNKLSQFSVPSFCMSYK

SEQ ID NO: 2060 - protein, 553 aa, Unknown
  Description of Unknown: Integrase B2061 sequence
  PTHR30461:SF3,SM00857,G3DSA:1.10.10.2600,IPR036162,PF13408, PS51737,G3DSA:3.40.50.1390,IPR025827,IPR006119,IPR038109, PF07508,SSF53041,IPR011109,PF00239,PTHR30461, PS51736,Coil,cd00338
MKKFPIDLSCLTEEEISQFQEDPYTLYNGDQEVALYLRYSSTGQSDQSIEGQLRDCRAFCKANHYRIVAIYVDRATTARKDVEKRVHLMEMVADSAKQNWEYVIVWKLDRFARNRNDSAIMKMRLRKNGVKVLSATEHLTDSPESIILESVLEGMAEFFSAELSQKVTRGMRESALKCHSVGGHIPLGYKVENHKLVVDPDTAHIVQEAFSLYANGESVADICRKFNSAGYKTAKNTEFNRSSFKAMFRNTRYIGTYTYKDIVIENGIPAIIDKELFETVQRRLSKTATAPARGKAKVDYLLSGKLFCGHCGASMNGESGAGRHGKVYHYYSCYTKKRKLGCDKRPLKKDYIEGIVARDALNLLTDQLIDEIADMAIRQSEQDLINDTHIPQLTAQLSEVEKSITNITAAIEKGIASETLMNRLVQLEYEKKTLNKEIKAEEKFVYRIDRDQIVFWLSQFKYGNIEDEDFRRRLIDLLVNSVTVWDEPDGYKITTAYNLTSCKTKTFRVEKNPAAEEATGFDFGESECTIERISEPYIVWGTVFVQTKRHSLP

SEQ ID NO: 2061 - protein, 553 aa, Unknown
  Description of Unknown: Integrase B2062 sequence
  PTHR30461:SF3,SM00857,G3DSA:1.10.10.2600,IPR036162,PF13408, PS51737,G3DSA:3.40.50.1390,IPR025827,IPR006119,IPR038109, PF07508,IPR011109,SSF53041,PF00239,PTHR30461, PS51736,Coil,cd00338
MQTIPIDLSALTAQERQQFAENPSVLSSDCDAVCCLYLRYSSERQTEQSIEGQLRELIAHCKQHRYRIAAIYVDRAISAHASMEKRPSFQQMLSDSVRAPWKTVLVYKLDRFARNREDSAIARMRLRKAGCNVESAKEGISKNPEGVILEALLEGMAEYYSLELSQKITRGMRESAIKGNSLGGQIPLGYKIENKKFVIDPLTAPLVVEAFSRYGDGETAASICADFNARGYRTASGAKFNRSSFKNIFRNEKYIGVYKYKEMRQEGIIPRLITDDAWIAVQSRLKANEAAPARGKAKAAYLLAGKIFCGHCGAPMVGECGRGKGGKIYNYYSCATRKKSRSCEKKPVSKDWIEDVVAQDALNVLTDDIIDFVASIAAQQSEDEIKKNTQIPVIRQKIAEIDSGIRNLTKAIETAAVAPDAIIMRISELEAQKKALSEQLVNEERGVIPLEKETVVTYLRAVREKAIPLETQKPMLIDMLVNSVTVYDNDPGFLTFVTAYRLSQIPAKTFRIPVSHAPGCSDMGLNALPLGVNPNTIVVVGMVFVQTKKHALP

SEQ ID NO: 2062 - protein, 553 aa, Unknown
  Description of Unknown: Integrase B2063 sequence
  PTHR30461:SF3,cd00338,SM00857,G3DSA:1.10.10.2600,IPR036162, PF13408,IPR025827,G3DSA:3.40.50.1390,PS51737,IPR006119, IPR038109,PF07508,IPR011109,SSF53041,PTHR30461, PS51736,Coil,PF00239
MQTIPIDLSALTLEERQQFADNPSVLSSDCEAVCCLYMRYSSDRQTEQSIEGQLRELIAYCKHHSYRVAAIYVDRAISAHASMDKRPAFQQMLSDSARSSWKTVLVYKLDRFARNREDSAIARMRLRKNGCNVESAKEGISKNPEGVILEALLEGMAEYYSLELSQKITRGMRESAIKGNCLGGQIPLGYKIENKKYVIDPLTAPLVKEAFSRYGDGETAASICADFNARGYRTASGAEFNKSSFKNIFRNEKYIGVYKYKEMRREGIIPRIIADDAWIAVQSRLKDNEAAPARGKAKVAYLLAGKIFCGHCGAPMTGECGRGKSGKMYNYYSCATRKHHNSCEKKPVPKDWLEDVVAQDALDVLTDEIIEFVAEVAAQQSEEDIQKNTQIPVIRKKISEIENKIHNLTKALECASVAPDAIVERLAELEAQKKGLATQLSDEERGVVPLTKESVVVYLKAVRENAVPLETQKAMLIDMLVNSVTVYDDEPGFLKLIYAYRLTQIPARTYRVPISEKVPCSDFRTQPAPLDANPNTITVVGMVFIQTKRHALP

SEQ ID NO: 2063 - protein, 553 aa, Unknown
  Description of Unknown: Integrase B2064 sequence
  PTHR30461:SF3,SM00857,G3DSA:1.10.10.2600,IPR036162,PF13408, IPR025827,G3DSA:3.40.50.1390,PS51737,IPR006119,IPR038109, PF07508,SSF53041,IPR011109,PF00239,PTHR30461, PS51736,Coil,cd00338
MQTIPIDLSALTPEERQQFADNPSVLSSDCEAVCCLYMRYSSDRQTEQSIEGQLRELIAYCKHHSYRVAAIYVDRAISAHASMDKRPAFQQMLADSARSSWKTVLVYKLDRFARNREDSAIARMRLRKNGCNVESAKEGISKNPEGVILEALLEGMAEYYSLELSQKITRGMRESAIKGNCLGGQIPLGYKIENKKYVIDPLTAPLVKEAFSRYGDGETAASICADFNARGYRTASGAEFNKSSFKNIFRNEKYIGVYKYKEMRREGIIPRIIADDAWIAVQSRLKVNESAPARGKAKVAYLLAGKIFCGHCGAPMTGECGRGKSGKMYNYYSCATRKHHNSCEKKPVPKDWLEDVVAQDALDVLTDEIIEFVAEIAAQQSEEDIQKNTQIPVIRKKISEIENKIRNLTKALECASVAPDAIVERLAELEAQKKGLSTQLSDEERGVIPLTKESVVVYLKAVREKAVPLETQKAMLIEMLVNSVTVYDDEPGFLKLVYAYRLTQIPTRTYRVPIPAKVPCSDFRTQPAPLDANPNTITVVGMVFIQTRRHALP

SEQ ID NO: 2064 - protein, 553 aa, Unknown
  Description of Unknown: Integrase B2065 sequence
  SM00857,G3DSA:1.10.10.2600,IPR036162,PF13408,IPR025827, G3DSA:3.40.50.1390,PS51737,IPR006119,IPR038109,PF07508, IPR011109,SSF53041,PF00239,PTHR30461,PS51736, Coil,cd00338
MKKFPIDLSCLTEEEISQFQEDPYTLYNGDQDVALYLRYSSTGQSDQSIEGQLRDCRAFCKANHYRIVAIYVDRATTARKDVEKRVHLMEMVADSAKQNWEYVIVWKLDRFARNRNDSAIMKMRLRKNGVKVLSATEHLTDSPESIILESVLEGMAEFFSAELSQKVTRGMRESALKCHSVGGHIPLGYKVENHKLVVDPDTAHIVQEAFSLYANGESVADICRKFNSAGYKTAKNTEFNRSSFKAMFRNTRYIGTYTYKDIVIENGIPAIIDKELFETVQRRLSKTATAPARGKAKVDYLLSGKLFCGHCGASMNGESGAGRHGKVYHYYSCYTKKRKLGCDKRPLKKDYIEGIVARDALNLLTDQLIDEIADMAIRQSEQDLINDTHIPQLTAQLTEVEKSIINITAAIEKGIASETLMNRLVQLEHEKKTLNKEIKAEEKFVYRIDRDQIVFWLSQFKYGNIEDEDFRRRLIDLLVNSVTVWDEPDGYKITTAYNLTSCKTKTFRVEKNPAAEEATGFDFGESECTIERISEPYIVWGTVFVQTKRHSLP

SEQ ID NO: 2065 - protein, 553 aa, Unknown
  Description of Unknown: Integrase B2066 sequence
  PTHR30461:SF3,cd00338,SM00857,G3DSA:1.10.10.2600,IPR036162, PF13408,IPR025827,PS51737,G3DSA:3.40.50.1390,IPR006119, IPR038109,PF07508,SSF53041,IPR011109,PTHR30461, PS51736,Coil,PF00239
MQTIPIDLSALTPEERQQFADNPSVLSSDCEAVCCLYMRYSSDRQTEQSIEGQLRELIAYCKHHSYRVAAIYVDRAISAHASMDKRPAFQQMLSDSARSSWKTVLVYKLDRFARNREDSAIARMRLRKNGCNVESAKEGISKNPEGVILEALLEGMAEYYSLELSQKVRRGMSETARKGNSTGGTTPLGYTVVDKRLQIDPITSHLVEEAFRRYADGDTVAAICDDFNARGYRTTRGTKFNKSSFKNVFRNEKYIGVYKFDDVRTDNAVPRIISDELWRAVQSRLKTSEQAPARGKAKVPYLLSGKIFCGHCGAPMVGECGRGKGGKTYNYYSCANRKKTRLCDKKPVPKDWLEDVVAQDALDVLTDEIIEFVAEVAAQQSEEDIQKNTQIPVIRKKISEIEIKIRNLTKALECAPVAPDAIVERLAELEAQKKGLSTQLSDEERGVIPLTKESVVVYLKAVREKAVPLETQKAMLIEMLVNSVTVYDDEPGFLKFVTAYRLTQIPSKTYRVPTPAASSCSDIGRVGSPLDANPNTITVVGMVFIQTKRHALP

SEQ ID NO: 2066 - protein, 553 aa, Unknown
  Description of Unknown: Integrase B2067 sequence
  cd03768,SM00857,IPR006118,G3DSA:1.10.10.2600,IPR036162, PS51737,G3DSA:3.40.50.1390,IPR006119,IPR038109,PF07508, IPR011109,SSF53041,PTHR30461,PS00397,PS51736, Coil,PF00239
MEKSKRVVGYARVSTEAQDITRQIELITAYCNDRNYHLIKIIQEKISGARKDRKSLNELLEVDDTVADMIIVSELSRLSREDDILSVLSTINELLKQGVDILFLDKQDRIYKAGTVLSLYDIITLSVEAKASADERYKIAGRMQTGLRSKLAEFTNMFAGGTVPFGYKIIHNPEYKLNQTPKNLLIVDTPKAEAVKYLFQQLIDGNTIRQTVRVYNKLFPYKLSYSGICRIIRNPKYKGEIYRRGKLYGIMNELQIITPEDFDKANKQMRENSLFQSNAPKYYNPLKGLLFCPCGCSLYMKPNHNSYLIYRCSSAYNEKQKCENYGVKCAYILSSVWICVKETLHTEEYKRFNTQRANELQGVNKQIRETIIRKVNSVDELKAQSASLIAKIKKLNNEDLISELETDYNVLCKQIKQTEQEISELNGQIVENDAEIKRNMEQKDFSKMEQSALYKEKLQKAVYHSLSAMRGFLEIIFKNGMTRYVLIKKHRNGGAYLLPDTFKGDMERKQIIVPSLRIDKNNPYSTQPINLRYTFDEFFKAMPVEEYQIPITE

SEQ ID NO: 2067 - protein, 553 aa, Unknown
  Description of Unknown: Integrase B2068 sequence
  PTHR30461:SF3,SM00857,G3DSA:1.10.10.2600,IPR036162,PF13408, PS51737,G3DSA:3.40.50.1390,IPR025827,IPR006119,IPR038109, PF07508,SSF53041,IPR011109,PF00239,PTHR30461, PS51736,Coil,cd00338
MKKFPIDLSCLTEEEISQFQEDPYTLYNGDQEVALYLRYSSTGQSDQSIEGQLRDCRAFCKANHYRIVAIYIDRATTARKDVEKRVHLMEMVADSAKQNWEYVIVWKLDRFARNRNDSAIMKMRLRKNGVKVLSATEHLTDSPESIILESVLEGMAEFFSAELSQKVTRGMRESALKCHSVGGHIPLGYKVENHKLVVDPDTAHIVQEAFSLYANGESVADICRKFNSAGYKTAKNTEFNRSSFKAMFRNTRYIGTYTYKDIVIENGIPAIIDKELFETVQRRLSKTATAPARGKAKVDYLLSGKLFCGHCGASMNGESGAGRHGKVYHYYSCYTKKRKLGCDKRPLKKDYIEGIVARDALNLLTDQLIDEIADMAIRQSEQDLINDTHIPQLTAQLTEVEKSITNITAAIEKGIASETLMNRLVQLEHEKKTLNKEIKAEEKFVYRIDRDQIVFWLSQFKYGNIEDEDFRRRLIDLLVNSVTVWDEPDGYKITTAYNLTSCKTKTFRVEKNPAAEEATGFDFGESECTIERISEPYIVWGTVFVQTKRHSLP

SEQ ID NO: 2068 - protein, 553 aa, Unknown
  Description of Unknown: Integrase B2069 sequence
  PTHR30461:SF3,SM00857,G3DSA:1.10.10.2600,IPR036162,PF13408, IPR025827,G3DSA:3.40.50.1390,PS51737,IPR006119,IPR038109, PF07508,IPR011109,SSF53041,PF00239,PTHR30461, PS51736,Coil,cd00338
MKKFPIDLSCLTEEEISQFQEDPYTLYNGDQEVALYLRYSSTGQSDQSIEGQLRDCRAFCKANHYRIVAIYVDRATTARKDVEKRLHLMEMISDSAKQNWEYVIVWKLDRFARNRNDSAIMKMRLRKNGVKVLSATEHLTDSPESIILESVLEGMAEFFSAELSQKVTRGMRESALKCHSVGGHIPLGYKVENHKLVVDPDTAHIVQEAFSLYANGESVADICRKFNSAGYKTAKNTEFNRSSFKAMFRNTRYIGTYTYKDIVIENGIPAIIDKELFETVQRRLSKTATAPARGKAKVDYLLSGKLFCGHCGASMNGESGAGRHGKVYHYYSCYTKKRKLGCDKRPLKKDYIEGIVARDALNLLTDQLIDEIADMAIRQSEQDLINDTHIPQLTAQLSEVEKSITNITAAIEKGIASETLMNRLVQLEHEKKTLNKEIKAEEKFVYRIDRDQIIFWLSQFKYGNIEDEDFRRRLIDLLVNSVTVWDEPDGYKITTAYNLTSCKTKTFRVEKNPAAEEATGFDFGESECTIERISEPYIVWGTVFVQTKRHSLP

SEQ ID NO: 2069 - protein, 552 aa, Unknown
  Description of Unknown: Integrase B2070 sequence
  PTHR30461:SF3,SM00857,G3DSA:1.10.10.2600,IPR036162,PF13408, PS51737,G3DSA:3.40.50.1390,IPR025827,IPR006119,IPR038109, PF07508,IPR011109,SSF53041,PF00239,PTHR30461, PS51736,Coil,cd00338
MKSPIDLSCLTEEEISQFQEDPYTLYNGDQNVAIYLRYSSTGQSDQSIEGQLRDCRTFCKANRYRIVAIYVDRATTARKDVEKRVHLMEMVADSAKQNWEYVIVWKLDRFARNRNDSAIMKMRLRKNGVKVLSATEHLTDSPESIILESVLEGMAEFFSAELSQKVTRGMRESALKCHSVGGHIPLGYKVENHKLVVDPDTAHIVQEAFSLYANGESVAGICRKFNSAGYKTAKNTEFNRSSFKAMFRNTRYIGTYTYKDIVIENGIPAIIDNELFETVQRRLSKTATAPARGKAKVDYLLSGKLFCGHCGASMNGESGAGRHGKVYHYYSCYMKKRKLGCDKRPLKKDYIEGIVARDALNLLTDQLIDEIADMAIRQSEQDLINDTHIPQLTAQLSEVEKSITNITAAIEKGIASETLMNRLVQLEHEKKTLNKEIKAEEKFVYRIDRDQIVFWLSQFKYGNIEDEDFRRRLIDLLVNSVTVWDEPDGYKITTAYNLTSCKTKTFRVEKNPAAEEATGFDFGESECTIERISEPYIVWGTVFVQTKRHSLP

SEQ ID NO: 2070 - protein, 552 aa, Unknown
  Description of Unknown: Integrase B2071 sequence
  cd03768,PTHR30461:SF3,SM00857,G3DSA:1.10.10.2600,IPR036162, PS51737,G3DSA:3.40.50.1390,IPR006119,IPR038109,PF07508, IPR011109,SSF53041,PTHR30461,PS51736,Coil, PF00239
MEHRPAFQQMLTDMRAGKINYIVAYKLDRVTRSVRDLEVLISDLEKHNCYLVCDRDDVNTSTANGRFFVRMLTVLSQLEIEIVSERTKFGLTGAIKSGHIPNRCPLGYKREGKKMIIDETTKDLVIRIFNMYLEGKSYQTIANILNEERVPTSTKANWKDSTIEKMINNKIYMGDYERFKRVGKEQGKEPVIYRDVVEPIISRAMFDEVQAQKEKNQRAFCRDRVYIFMQKLICPKCGKLMTCKGAGGKKKKYMYYHCTDCKLYLREDLIEDVTIDLIMNLIEYDMTVKQYFFPVLADKKERDTAKLDKEIANLKKQKDRIKEAYIKGIVEVNDFSEEYRVIKEKLNLLEEKRIQAIDLNKQTFSPQQIMADRDVEKEKLIRSNEFYNMLMLQWSNKTKEEKQEFISKFIENITIDKNEKGSYELVNIKFRSSFIEQICKILEYGMFDFASPCTIGKEESTITTTVQMDKKELQEYMNRLSDYYEVSYYELDRPDAPKKGYQKKYYRMQYKNEKGERLFKLVELIANDKSFPIQKDNHIIGEIRVKEREKVS

SEQ ID NO: 2071 - protein, 552 aa, Unknown
  Description of Unknown: Integrase B2072 sequence
  SM00857,G3DSA:1.10.10.2600,IPR036162,PF13408,IPR025827, G3DSA:3.40.50.1390,PS51737,IPR006119,IPR038109,PF07508, SSF53041,IPR011109,PTHR30461,Coil,cd00338, PF00239
MAYRKITDIKDTIGMRAVFYARVSTAEEEQLNAIELQIEENRGCIKDHGWKLVGEYIDRSKSGTMVKGRDDYQRLYEDLYEDLFDIVVIKDQERLQRNTLDWYLFINRVVQTGKLLFMYMDGKFYSPDDALITGVRAIIAEEFSRNLSKKLHNYHDHRIEKARQGQEIALQGSGNVYGWDKKDGKYYINPEQAKVRRLMCEGIMARKGSTLIAKELNDAGYRNTVGKPWKPMDIPKFVYDCKNVGTMIINKERHDFESKQTIKLPKEEWVYVENALPPIVTQEEWDLICKIHEERVIATGSDRRGKKTSGYSFSGKLVCGICGAPYWRKQRVSKDEYWVCSTKQTKGRRTRKRDSTMGKAGEINPLGCDNENISYNSLMEIMGVVSERLQANTDTIKHDMINWLTKLRKQLLEANGGHTEADLQRELSRKSKLLDAYLDGILNKQEYQKKAEELDERIIQLKAETEKNKANSGDIAEIDKVLANIDEEVSRYVDGNEKLKVEYLLEHLEQVQIFPDKVIVIVPILSEGIVVEKTQYVSREKWLGEKYNNNFF

SEQ ID NO: 2072 - protein, 552 aa, Unknown
  Description of Unknown: Integrase B2073 sequence
  PTHR30461:SF3,IPR036162,PS51737,IPR011109,PTHR30461, PF00239,G3DSA:1.10.10.2600,IPR006119,SSF53041,cd00338, SM00857,IPR025827,IPR038109,PS51736,mobidb-lite, PF13408,G3DSA:3.40.50.1390,PF07508,Coil
MGKKQKTNGGDAVIYARYSSHNQRDVSIEQQVEACRKHAAELGLTVTATYEDRAISGKTDKRPSFQRMMRDAEQHKFAYVLAWKSNRIGRNMMQALVNESRLVDCGVKVFYAEEDFDDNAAGRFALRSMMNVNQFYIENMAEDVKRGLYDNAKKGLVNGSLPLGYKRGADGKPEIDEPKAAIVREIYTRVAAGELFASIAADLNARGIRTARGREWNKGSFHVLCHNDRYRGIYMYGDIRIPGGMPRIISDELFYDAQEAYGMKKDNRYGRARHGAENYLLTGKLYCGHCGSYMVGISGTSKTGEMHYYYACQKHRLEHTCEKKAIRRDVIENAVARVIMMYCLDDETIDFIVDSTIAYFKQKDHELHIEAMENELAAVQQAISNLMKAIEAGIITPTTRTRLLDLEEQQAKLSAKINTAKAERVEIDRDDLIAGLQLFRTGDIKNKKFLAKLFNTFLLAVYLYDDNRLKIVFSFTGNHNNIEIPLELDNDCPDSESGPYETEVRMSHLECRKNSGTPPSSGGAEKGDGCSGGRFVRTAPLPPHKKTPQAYA

SEQ ID NO: 2073 - protein, 552 aa, Unknown
  Description of Unknown: Integrase B2074 sequence
  PTHR30461:SF3,IPR036162,PS51737,IPR011109,PTHR30461, PS00397,PF00239,G3DSA:1.10.10.2600,IPR006119,SSF53041, SM00857,IPR025827,IPR038109,PS51736,cd03768, IPR006118,PF13408,G3DSA:3.40.50.1390,PF07508,Coil
MNKKSAIYVRVSTSHQIDKDSLPLQRKDLINYSKLILGIDNYVVFEDAGYSGKNTDRPAFKDMFNRIKEGEFSHLLVWKIDRISRNLLDFCSMYDELKKYNCTFISKNEQFDTSSAMGEAMLKIILVFAELERKLTGERVAATMLDRATKGLWNGAPIPLGYKWDKIIKFPIIDDEERLTVELIYNKYLETESTSAVMKYLNQENIKTKRNGSWTTKTVGDILRNPFYKGTYRYNFRESARGKKKKENEWIVLDNNHDPIIALDLWTKCNNILDENAKKNSARFRAKSKTHIFAGLLECGECHKSFYSKSDKTSLDGYTPSIYTCSSRYNHLGCNQKTISDTIIGNFTLNFISNMIKLSKTYKKLSPEDIEKNLLSGYSFNDVKGIIEIDDIFNSFYNTSSKTFAPTKQKISKPSDIDLNKLDADLKKQHRALERLENLYLYDEKEMSEKDYILKKNIINTKIKEIDAKIKSSATISTSTYNINFFLNTATLELSKEIIEGNINMKSLIQRVGRDIIKEFVNSLITKITVRDRKVISIQFTNGLISTFIYEV

SEQ ID NO: 2074 - protein, 552 aa, Unknown
  Description of Unknown: Integrase B2075 sequence
  cd03768,PTHR30461:SF3,SM00857,G3DSA:1.10.10.2600,IPR036162, PS51737,G3DSA:3.40.50.1390,IPR006119,IPR038109,PF07508, IPR011109,SSF53041,PTHR30461,PS51736,Coil, PF00239
MEHRPAFQQMLTDMRAGKINYIVAYKLDRVTRSVRDLEVLISDLEKHNCYLVCDRDDVNTSTANGRFFVRMLTVLSQLEIEIVSERTKFGLTGAIKSGHIPNRCPLGYKREGKKMIIDETTKDLVIRIFNMYLEGKSYQTIANILNEERVPTSTKANWKDSTIEKMINNKIYMGDYERFKRVGKEQGKEPVIYRDVVEPIISRAMFDEVQAQKEKKQRAFCRDRVYIFMQKLICPKCGKLMTCKGAGGKKKKYMYYHCTDCKLYLREDLIEDVTIDLIMNLIEYDMTVKQYFFPVLADKKERDTAKLDKEIANLKKQKDRIKEAYIKGIVEVNDFSEEYRVIKEKLNLLEEKRIQAIDLNKQTFSPQQIMDDRDVEKEKLIRSNEFYNMLMLQWSNKTKEEKQEFISKFIENITIDKNEKGSYELVNIKFRSSFIEQICKILEYGMFDFASPCTIGKEESTITTTVQMDKKELQEYMNRLSDYYEVSYYELDRPDAPKKGYQKKYYRMQYKNEKGERLFKLVELIANDKSFPIQKDNHIIGEIRVKEREKVS

SEQ ID NO: 2075 - protein, 552 aa, Unknown
  Description of Unknown: Integrase B2076 sequence
  PTHR30461:SF3,cd00338,SM00857,G3DSA:1.10.10.2600,IPR036162, PF13408,PS51737,IPR025827,G3DSA:3.40.50.1390,IPR006119, IPR038109,PF07508,IPR011109,SSF53041,PTHR30461, PS51736,Coil,PF00239
MKYPIDLSCLTEEEISQFQEDPYTLYNGDQDVALYLRYSSTGQSDQSIEGQLRDCRAFCKANHYRIVAIYVDRATTARKDVEKRVHLMEMVADSAKQNWEYVIVWKLDRFARNRNDSAIMKMRLRKNGVKVLSATEHLTDSPESIILESVLEGMAEFFSAELSQKVTRGMRESALKCHSVGGHIPLGYKVENHKLVVNPDTAHIVQEAFSLYANGESVADICRKFNSAGYKTAKNTEFNRSSFKAMFRNTRYIGTYTYKDIVIENGIPAIIDKELFETVQRRLSKTATAPARGKAKVDYLLSGKLFCGHCGASMNGESGAGRHGKVYHYYSCYTKKRKLGCDKRPLKKDYIEGIVARDALNLLTDQLIDEIADMAIRQSEQDLINDTHIPQLTAQLSEVEKSITNITAAIEKGIASETLMNRLVQLEHEKKTLNKEIKAEEKFVYRIDRDQIVFWLSQFKYGNIEDEDFRRRLIDLLVNSVTVWDEPDGYKITTAYNLTSCKTKTFRVEKNPAAKEATGFDFGESECTIERISEPYIVWGTVFVQTKRHSLP

SEQ ID NO: 2076 - protein, 552 aa, Unknown
  Description of Unknown: Integrase B2077 sequence
  cd00338,SM00857,G3DSA:1.10.10.2600,IPR036162,PF13408, IPR025827,PS51737,G3DSA:3.40.50.1390,IPR006119,IPR038109, PF07508,IPR011109,SSF53041,PTHR30461,PS51736, Coil,PF00239
MTHGAYILARYSTENQSEASIEVQVDRCTEWCNQHSIPVLDVFADRAISGMKETRPEYQRMMQQLYSGGADTVVIYDQSRMFRNMVYWFQFRETLQRIGVHVVSVTQPTVGGDLSDPAVFLNEGVTALFNQMWVLQTQQKVREGVRQRAKSGKHTGGIPALGYRVENERLVVDESEAETVRLIFGLYAAGQSYIDIIAELNRRGLKTKRGNAFGKNSIHDLLKNEKYVGRALFGGKPVSYDGTRNAHAARGEHLEVACPSIVSEELFDAVQARLAANKHQNTGKRVTAVEQPLKGKIFCGTCGGAMTIHYKYPARGGERYEYYKCATKQRGKGCSGMSIRKDELEDTVANAVLAMLGAPKSRDKLLSVLRDQRDNIIKTSAPKLKELQAEYDSLASQIEKALDAVMAGLTSPALIERTNALESKKAQVAEEIALLKSNVEHSSLRDEQLAPLLDKLIKSAKENPTAILAAVLRVEVYPDTIKIWTIFDDGPAPGDGPITKSNVASLVKSPDTGKWSLGTFMGTASGVPSNVPNIFVVAAFSVLREHKNKERV

SEQ ID NO: 2077 - protein, 552 aa, Unknown
  Description of Unknown: Integrase B2078 sequence
  PTHR30461:SF3,IPR036162,PS51737,IPR011109,PTHR30461, PF00239,G3DSA:1.10.10.2600,IPR006119,SSF53041,cd00338, SM00857,IPR025827,IPR038109,PS51736,mobidb-lite, PF13408,G3DSA:3.40.50.1390,PF07508,Coil
MGKKQKTNGGDAVIYARYSSHNQRDVSIEQQVEACRKHAAELGLTVTATYEDRAISGKTDKRPSFQRMMRDAEQHKFAYVLAWKSNRIGRNMMQALVNESRLVDCGVKVFYAEEDFDDNAAGRFALRSMMNVNQFYIENMAEDVKRGLYDNAKKGLVNGSLPLGYKRGADGKPEIDEPKATIVREIYTRVAAGELFASIADDLNARGIKTARGREWNKGSFHVLCHNDRYRGIYMYGDIRIPGGMPRIISDELFYDAQEAYSMKKDNRYGRARHGAENYLLTGKLYCGHCGGYMVGISGTSKTGEMHYYYACQKHRLEHTCEKKAIRRDVIENAVARAIMMYCLDDETIDFIVDSTIAYFKQKDHELHIEAMENELAAVQQAISNLMKAIEAGIITPTTRTRLLDLEEQQAKLSAKINTAKAERVEIDRDDLIAGLQLFRTGDIKNKKFLAKLFNTFLIAVYLYDDNRLKIVFSFTGNHNSVEIPLELDNDCPDSEIVSDETEVRMSHLECRKNLGSPPSSGEAEKGDDCSDGRFVRTAPLPPHKKTPQAYA

SEQ ID NO: 2078 - protein, 552 aa, Unknown
  Description of Unknown: Integrase B2079 sequence
  SM00857,G3DSA:1.10.10.2600,IPR036162,PF13408,IPR025827, PS51737,G3DSA:3.40.50.1390,IPR006119,IPR038109,PF07508, SSF53041,IPR011109,PF00239,PTHR30461,PS51736, Coil,cd00338
MMHGAYILARYSTENQSEASIEVQVERCQEWCEKQNLSVLDVFADRAISGMKETRPEYQRMMQALYAGGADTVVIYDQSRMFRNMVYWFQFRETLQRIGVHVVSVTQPTVGGDLNDPAVFLNEGVTALFNQMWVLQTQQKVREGVRQRAKSGKHTGGIPALGYRVENERLVIDDAEAETVRLIFGLYAAGQSYIDIIAELNRRGLKTKRGNAFGKNSIHDLLKNEKYVGRSLFGGKPVSYDGTRNAHAARGEHLEVACPSIVSEELFDAVQARLAANKHQNTGKRVTAVEQPLKGRIFCGTCGGAMTIHYKYPARGGERYEYYKCATKQRGKGCSGMSIRKDELEETVASAVLSMLGAPKSRDKLLSVLKEQRDNIIKTSAPKLKELQAEYDSLASQIEKALDAVMAGLTSPALIERTNALESKKAQVAEEIALLKSNVEHSSLRDEQLAPLLDKLIKSAKENPTAILAAVLRVEVYPDTIKIWTIFDDGPAPGNGPITKSNVASLVKSPDTGKWSLGTFMGTASGVPSNVPNIFVVAAFSVLREHKNKERV

SEQ ID NO: 2079 - protein, 552 aa, Unknown
  Description of Unknown: Integrase B2080 sequence
  cd00338,SM00857,G3DSA:1.10.10.2600,IPR036162,PF13408, IPR025827,G3DSA:3.40.50.1390,PS51737,IPR006119,IPR038109, PF07508,SSF53041,IPR011109,PTHR30461,PS51736, Coil,PF00239
MMHGAYILARYSTENQSEASIEVQVERCQEWCEKQNLSVLDVFADRAISGMKETRPEYQRMMQALYAGGADTVVIYDQSRMFRNMVYWFQFRETLQRIGVHVVSVTQPTVGGDLNDPAVFLNEGVTALFNQMWVLQTQQKVREGVRQRAKSGKHTGGIPALGYRVENERLVIDDAEAETVRLIFGLYAAGQSYIDIIAELNRRGLKTKRGNAFGKNSIHDLLKNEKYVGRALFGGKPVSYDGTRNAHAARGEHLEVACPSIVSEELFDAVQARLAANKHQNTGKRVTAVEQPLKGRIFCGTCGGAMTIHYKYPARGGERYEYYKCATKQRGKGCSGMSIRKDELEETVASAVLSMLGAPKSRDKLLSVLKEQRDNIIKTSAPKLKELQAEYDSLASQIEKALDAVMAGLTSPALIERTNALESKKAQVAEEIALLKSNVEHSSLRDEQLAPLLDKLIKSAKENPTAILSAVLRVEVYPDTIKIWTIFDDGPAPGDGPITKSNVASLVKSPDTGKWSLGTFMGTASGVPTNVPNIFVVAAFSVLREHKNKERV

SEQ ID NO: 2080 - protein, 552 aa, Unknown
  Description of Unknown: Integrase B2081 sequence
  PTHR30461:SF3,cd00338,SM00857,G3DSA:1.10.10.2600,IPR036162, PF13408,IPR025827,G3DSA:3.40.50.1390,PS51737,IPR006119, IPR038109,PF07508,IPR011109,SSF53041,PTHR30461, PS51736,Coil,PF00239
MKLPIDLSCLTEEEISQFQEDPYTLYNGDQNVALYLRYSSAGQSDQSIEGQLRDCRAFCKANHYRIVAIYVDRATTARKDVEKRVHLMEMIADSAKQNWEYVIVWKLDRFARNRNDSAIMKMRLRKNGVKVLSATEHLSDNPEGILLESVLEGMAEFFSAELSQKVTRGMRESALKCHSVGGHVPLGYKIENHKLVINPDTAHIVQEAFSLYANGESVADIARKFNAAGYRTAKNTEFNRSSFKVMFRNVRYIGTYTYKDIQIENGVPAIIDKELFEAVQRRLSKAAEAPARGKAKVDYLLSGKLFCGHCGASMNGESGMGRGGKVYHYYSCYTKKRKLGCEKRPLKKDYIEEVVARDALNLLTDQLIDEIADMAIRQSEQDLIDDTRIPQLTAQLSEVEKSIMNITAAIEKGIASETLMNRLVQLEHEKKTLNKEIKSEEKFAYRIDRDQIVFWLSQFKYGNIEDEDFRRRLINLLINSVTVWDEPDGYKITTAYNLTSCETKTFRIKKNPAAEATGFDFGELECAIGLKSEPCYIIYGTIFVQTRRHSLS

SEQ ID NO: 2081 - protein, 552 aa, Unknown
  Description of Unknown: Integrase B2082 sequence
  PTHR30461:SF3,SM00857,G3DSA:1.10.10.2600,IPR036162,PF13408, IPR025827,G3DSA:3.40.50.1390,PS51737,IPR006119,IPR038109, PF07508,IPR011109,SSF53041,PTHR30461,Coil, PS51736,cd00338,PF00239
MKMMQNDNRTAITYYRYSSHRQGEQSIEGQRAEAERWAKANGYTIVREYADRAMTGTNDDREQFQLMLRELEKLRPAVLILWKVDRMGRNKEEIAFNKYRCKKNGVKVIYTAESIPDTPEGVILESVLEGMAEYYSLQLSQNVRRGHRVSASKCQSTGGACPLGYRVGPDKHLEIDPEKAAIVRQVFERYANGETQPEIIQSLNEQGLRTLRGKPFSRNSLRTLLKNEKYIGVYTYNHGEVRVEGGVPAIIDVEMFQKAQKMLKFNKRSSSHKWTKANYLLTGKLFCGCCGEQMCGVSGYSSTKVKYHYYACSGHHNYKKARSTCRKKNVKKEWIEGLVLREAKLLLLNEDLLDFIAENTYQYYVEANTDTAYTDALQANLREIERSLENIMRAVEAGIFNDTTKARMEELEAQKQQIRHALDLTKLDRGLQLTKDHILYFLKRFRDLDFENAACQRQIIDTFINSVFVYDDHITLTFNYSGDDRTITLAETDAAAGGESFVFAPSCGTKKFRSRFGFGTFFFSLTKQGQDAILKTERALLLAADPFDLSRN

SEQ ID NO: 2082 - protein, 552 aa, Unknown
  Description of Unknown: Integrase B2083 sequence
  PTHR30461:SF3,cd00338,SM00857,G3DSA:1.10.10.2600,IPR036162, PF13408,IPR025827,G3DSA:3.40.50.1390,PS51737,IPR006119, IPR038109,PF07508,SSF53041,IPR011109,PTHR30461, PS51736,Coil,PF00239
MARSKRNEYSSAEQIGVIYARYSSHNQKEESIEQQIAECSDFAAKNGIRIVGIYADKAVSGRSDRRPNFQRMMRDAEKRQFQIVVAYKSNRIARNMLNALQYEARLDLLGIKTLYAKEEFGNTAAGRFALRTMMNVNQFYSENMGEDIKRGMVDNANECKVNGMLPLGYVKSKEGKYAIAPDEAAVVREIFDSVLKDVPVAEIARSLNQRGIRTKLGREWNKNSFHIMLKNDNYIGVYRHSGVVVEDGIPPILEKEVFAAVQEKLANKKKTAGRRSANGEYLLTGKLFCGYCGSYMIGVSGTGENGTVHNYYQCQKRHAEGRCEKKNVRRDFIEKLIARLTQDYILQDDTIEWIADSTMSFQAMARRESGVAQLERDLADNRKVAKNIMAAIEQGIITETTKARLLEVEETIHDLERSLSIAKAASQPIERERVVFSLEQMREGNVGSKEHQKKLIDTFVKSVTLWDDRIQIDYYHTPGKHKFSYSLEELTSKAENESNASDVRTDSLELHHCRRELHRFTTAFLLATAPLRLYGTIKKTQEFKFLRLFCMY

SEQ ID NO: 2083 - protein, 552 aa, Unknown
  Description of Unknown: Integrase B2084 sequence
  SM00857,G3DSA:1.10.10.2600,IPR036162,PF13408,IPR025827, G3DSA:3.40.50.1390,PS51737,IPR006119,IPR038109,PF07508, SSF53041,IPR011109,PTHR30461,Coil,PS51736, cd00338,PF00239
MAKKKKPAGGNAIIYARYSSHNQRDVSIEQQIEACRKHAAELGLTITDTYEDRAISGRTDNRPAFQRMMHDAENGRFSYVLAWKSNRMGRNMMQAMVNESRLMDCGVKVYYAEEDFDDSAAGRFALRSMMNVNQFYSDNLAEDVRRGLMDNANKCMANGRQPLGYKRGEDGKVVVDEPAAAIVREVYARVASGELFTDIARDLNRRGIKTADKGEWNKNSFHRLCSNEKYRGIYIYGDVRIEGGIPSIIDDTLWYKVQEALRVKKLKRNGRHRPGEDDYLLTGKLRCGKCGGYMIGMSGRSKTGDIHYYYACQNRRVGHTCDKKNIRRDIIEPAVAQAIKEYCLTDDAIEWIADKTIEYWEEADRNLQLDSIEGDLAAVQSSISNVMKAIEMGVVTETTRDRLIELEKQRTDLKSKLALAKEEVIHVDRKKLISSLLLFRNGDIHDRQYQEDLFNTFLISVYVYDDDDNGHLKLIFNAFGENNTVDLPINFGETGDVPVFSDREKVRASSPSVNQKAIRFMPDGFFRSILLYKNSVPSLRRYAHFYAVITEC

SEQ ID NO: 2084 - protein, 552 aa, Unknown
  Description of Unknown: Integrase B2085 sequence
  SM00857,G3DSA:1.10.10.2600,IPR036162,PF13408,IPR025827, G3DSA:3.40.50.1390,PS51737,IPR006119,IPR038109,PF07508, SSF53041,IPR011109,PF00239,PTHR30461,PS51736, Coil,cd00338
MTHGAYILARYSTENQSEASIEVQVDRCTEWCNQHSIPVLDVFADRAISGMKETRPEYQRMMQQLYSGGADTVVIYDQSRMFRNMVYWFQFRETLQRIGVHVVSVTQPTVGGDLSDPAVFLNEGVTALFNQMWVLQTQQKVREGVRQRAKSGKHTGGIPALGYRVENERLVVDEPEAETVRLIFGLYAAGQSYIDIIAELNRRGLKTKRGNAFGKNSIHDLLKNEKYVGRSLFGGKPVSYDGTRNAHAARGEHLEVACPSIVSEELFDAVQARLAANKHQNTGKRVTAVEQPLKGRIFCGTCGGAMTIHYKYPARGGERYEYYKCATKQRGKGCSGMSIRKDELEETVASAVLSMLGAPKSRDKLLSVLKEQRDNIIKTSAPKLKELQAEYDSLASQIEKALDAVMAGLTSPALIERTNALESKKAQVAEEIALLKSNVEHSSLRDEQLAPLLDKLIKSAKENPTAILAAVLRVEVYPDTIKIWTIFDDGPAPGDGPITKSNVASLVKSPDTGKWSLGTFMGTASGVPSNVPNIFVVAAFSVLREHKNKERV

SEQ ID NO: 2085 - protein, 552 aa, Unknown
  Description of Unknown: Integrase B2086 sequence
  PTHR30461:SF3,IPR036162,PS51737,IPR011109,PTHR30461, PF00239,G3DSA:1.10.10.2600,IPR006119,SSF53041,cd00338, SM00857,IPR025827,IPR038109,PS51736,mobidb-lite, PF13408,G3DSA:3.40.50.1390,PF07508,Coil
MPRKKKLQEVGGLRLVAYYRYSNGGQQTEQSIEGQRRDCEAYAKAHGYKIVHEYIDRHISGKSDSRPAFQQMISDSDSHLFDAVICWKTDRLARSRYDSIIYKTRLRKNGVKILYAAETVVDGPEGIIIEGLMESLAEYYSAELAQKLRRGQRESALKCIALGGNRSFGYDIGPDKHYCINEKQAPAVRYIFEQYAAGATAADIVRELTARGYRTSRGNPFNKNSICRIITNEMYLGVYKYADIRIEGGVPAMIDRELFNRCQTQLAFNRAHGGGKGAPRADYVLVGKLDCGLCGHAMKGASATGHTGSKHYYYTCTQHVEKKCPKTSIEKNYLEQVIVDGVAKYVLTPEKISQIVDCMMELQAKEQEPKGNPERDALEAELAECRRKQNNILEAIEEGGSARLAARLRALEEQEAQLTFALGEINNAPAPPQFSREALTFMFEQFRREEDEVDEEYRRRILDTFVSSILLYEDRAEVRFNITDQKTGDFERVILPISANKKPPEDDDTTSNSEGSTALRLVDEPQRRTNPCVEISPYSVIFIIPLPGKLVR

SEQ ID NO: 2086 - protein, 552 aa, Unknown
  Description of Unknown: Integrase B2087 sequence
  PTHR30461:SF3,IPR036162,PS51737,IPR011109,PTHR30461, PF00239,G3DSA:1.10.10.2600,IPR006119,SSF53041,cd00338, SM00857,IPR025827,IPR038109,PS51736,mobidb-lite, PF13408,G3DSA:3.40.50.1390,PF07508,Coil
MGKKQKTNGGDAVIYARYSSHNQRDVSIEQQVEACRKHAAELGLTVTATYEDRAISGKTDKRPSFQRMMRDAEQHKFAYVLAWKSNRIGRNMMQALVNESRLVDCGVKVFYAEEDFDDNAAGRFALRSMMNVNQFYIENMAEDVKRGLYDNAKKGLVNGSLPLGYKRGADGKPEIDEPKAAIVREIYTRVAAGELFASIADDLNARGIKTARGREWNKGSFHVLCHNDRYRGIYMYGDIRIPGGMPRIISDELFYDAQEAYSMKKDNRYGRARHGAENYLLTGKLYCGHCGGYMVGISGTSKTGEMHYYYACQKHRLEHTCEKKAIRRDVIENAVARAIMMYCLDDETIDFIVDSTIAYFKQKDHELHIEAMENELAAVQQAISNLMKAIEAGIITPTTRTRLLDLEEQQAKLSAKINTAKAERVEIDRDDLIAGLQLFRTGDIKNKKFLAKLFNTFLIAVYLYDDNRLKIVFSFTGNHNSVEIPLELDNDCPDSEIVSDETEVRMSHLECRKNLGSPPSSGEAEKGDDCSDGRFVRTAPLPPHKKTPQAYA

SEQ ID NO: 2087 - protein, 552 aa, Unknown
  Description of Unknown: Integrase B2088 sequence
  PTHR30461:SF3,IPR036162,PS51737,IPR011109,PTHR30461, PF00239,G3DSA:1.10.10.2600,IPR006119,SSF53041,cd00338, SM00857,IPR025827,IPR038109,mobidb-lite,PS51736, PF13408,G3DSA:3.40.50.1390,PF07508,Coil
MGKKQKATGGNAVIYARYSSHNQRDVSIEQQVEACRKHAAELGLTVTATYEDRAISGKTDKRPSFQRMMRDAEQHKFAYVLAWKSNRIGRNMMQALVNESRLVDCGVKVFYAEEDFDDNAAGRFALRSMMNVNQFYIENMAEDVKRGLYDNAKKGLVNGSLPLGYKRGADGKPEIDEPKAAIVREIYTRVAAGELFASIAADLNARGIRTARGREWNKGSFHVLCHNDRYRGIYMYGDIRIPGGMPRIISDELFYDAQEAYGMKKDNRYGRARHGAENYLLTGKLYCGHCGSYMVGISGTSKTGEMHYYYACQKHRLEHTCEKKAIRRDVIENAVARVIMMYCLDDETIDFIVDSTIAYFKQKDHELHIEAMENELAAVQQAISNLMKAIEAGIITPTTRTRLLDLEEQQAKLSAKINTAKAERVEIDRDDLIAGLQLFRTGDIKNKKFLAKLFNTFLLAVYLYDDNRLKIVFSFTGNHNNIEIPLELDNDCPDSESGPYETEVRMSHLECRKNSGTPPSSGGAEKGDGCSGGRFVRTAPLPPHKKTPQAYA

SEQ ID NO: 2088 - protein, 552 aa, Unknown
  Description of Unknown: Integrase B2089 sequence
  SM00857,G3DSA:1.10.10.2600,IPR036162,PF13408,IPR025827, G3DSA:3.40.50.1390,PS51737,IPR006119,IPR038109,PF07508, SSF53041,IPR011109,PTHR30461,Coil,cd00338, PF00239
MAYRKITDIKDTIGMRAVFYARVSTAEEEQLNAIELQIEENRGCIKDHGWKLVGEYIDRSKSGTMVKGRDDYQRLYEDLYEDLFDIVVIKDQERLQRNTLDWYLFINRVVQTGKLLFMYMDGKFYSPDDALITGVRAIIAEEFSRNLSKKLHNYHDHRIEKARQGQEIALQGSGNVYGWDKKDGKYYINPEQAKVRRLMCEGIMARKGSTLIAKELNDAGYRNTVGKPWKPMDIPKFVYDCKNVGTMIINKERHDFESKQTIKLPKEEWVYVENALPPIVTQEEWDLICKIHEERVIATGSDRRGKKTSGYSFSGKLVCGICGAPYWRKQRVSKDEYWVCSTKQTKGRRTRKRDSTMGKAGEINPLGCDNENISYNSLMEIMEVVSERLQANTDTIKHDMINWLTKLRKQLLEANGGHTEADLQRELSRKSKLLDAYLDGILNKQEYQTKAEELDERIIQLKAETEKNKANSGDIAEIDKVLANIDEEVSRYVDGNEKLKVEYLLEHLEQVQIFPDKVIVIVPILSEGIVVEKTQYVSREKCAKKKDVFKRS

SEQ ID NO: 2089 - protein, 552 aa, Unknown
  Description of Unknown: Integrase B2090 sequence
  PTHR30461:SF3,IPR036162,PS51737,IPR011109,PTHR30461, PF00239,G3DSA:1.10.10.2600,IPR006119,SSF53041,cd00338, SM00857,IPR025827,IPR038109,PS51736,mobidb-lite, PF13408,G3DSA:3.40.50.1390,PF07508,Coil
MPRKKKLQEVGGLRLVAYYRYSNGGQQTEQSIEGQRRDCEAYAKAHGYKIVHEYIDRHISGKSDSRPAFQQMISDSDSHLFDAVICWKTDRLARSRYDSIIYKTRLRRNGVKILYAAETVVDGPEGIIIEGLMESLAEYYSAELAQKLRRGQRESALKCIALGGNRSFGYDIGPDKHYCINEKQAPAVRYIFEQYAAGATAADIVRELTARGYRTSRGNPFNKNSICRIITNEMYLGVYKYADIRIEGGVPAMIDRELFNRCQTQLAFNRAHGGGKGAPRADYVLVGKLDCGLCGHAMKGASATGHTGSKHYYYTCTQHVEKKCPKTSIEKNYLEQVIVDGVAKYVLTPEKISQIVDCMMELQAKEQEPKGNPERDALEAELAECRRKQNNILEAIEEGGSARLAARLRALEEQEAQLTFSLGEINNAPTPPQFSREALTFMFEQFRREEGEVDEEYRRRILDTFVSSILLYEDRAEVKFNITDQKTGDFERVILPISANKKPPEDDDTTSNSEGSTALRLVDEPQRRTNPCVEISPYSVIFIIPLPGKMVR

SEQ ID NO: 2090 - protein, 552 aa, Unknown
  Description of Unknown: Integrase B2091 sequence
  PTHR30461:SF3,SM00857,G3DSA:1.10.10.2600,IPR036162,PF13408, IPR025827,G3DSA:3.40.50.1390,PS51737,IPR006119,IPR038109, PF07508,IPR011109,SSF53041,PTHR30461,cd00338, PF00239
MPTSKNTARKYAAGGSSDNSCGVEPLRAVIYARYSSSGQREESIEGQLRDCYEFAKKHGIIVIGEYIDKAMTGRVDRRPDFQRMMKDSEKGRFNCVLLWKMDRFARNRYDSAMYKYKLKKNGIRIFYAKETIPDGPEGIILESVMEGYAEYYSENLAQNVKRGNYDSALELKTLGKTCLGLKTGPDGRYMIDQAEAAIVRRIFEEYAEGERAKDIYERLNSEGYRTSRGGKFNKNSLRRILSNKKYIGVYEYEDIYVENGIPAIITDRDLFERVQKMLKINHDAPARGKAQNFLLTTKLFCGLCGSPMIGDGGTSHTGKAYAYYSCTKRKRGRSCKKESVPKDWIEDLVVGELVKIVHNDELIEQIADRVMEYQKREKDQSGLHALEIRQKENEKAISNMLAAIEAGIITPSTKTRLMELEADRADIEKGIAHELLAEPEFERDQIIYFLERFRSGDINDEAYRIMLVDTFLNSVYLYDDDHLVLVMNYSGENCKVDLKLVEGAVSGDGCKGSAFAPSSALKKDSVFTGSFFLFMIIECSRSAHSIICSWMR

SEQ ID NO: 2091 - protein, 552 aa, Unknown
  Description of Unknown: Integrase B2092 sequence
  PTHR30461:SF3,IPR036162,PS51737,IPR011109,PTHR30461, PF00239,G3DSA:1.10.10.2600,IPR006119,SSF53041,cd00338, SM00857,IPR025827,IPR038109,mobidb-lite,PS51736, PF13408,G3DSA:3.40.50.1390,PF07508,Coil
MPRKKKLQEVGGLRLVAYYRYSNGGQQSEHSIEGQRRDCEAYAKAHGYKIVHEYIDRHISGKSDSRPAFQQMISDSDSHLFDAVICWKTDRLARSRYDSIIYKTRLRKNGVKILYAAETVVDGPEGIIIEGLMESLAEYYSAELAQKLRRGQRESALKCIALGGNRSFGYDIGPDKHYCINEKQAPAVRYIFEQYAAGATAADIVRELTARGYRTSRGNPFNKNSICRIITNEMYLGVYKYADIRIEGGVPAMIDRELFNRCQTQLAFNRVHGGGKGAPRADYVLVGKLDCGLCGHAMKGASATGHTGSKHYYYTCTQHVEKKCPKTSIEKNYLEQVIVDGVAKYVLTPEKISQIVDCMMELQAKEQEPKGNPEKDALEAELAECRRKQNNILEAIEEGGSARLAARLRTLEEQEAQLTFALGEINNAPTPPQFSREALTFMFEQFRREEDEVDEEYRRRILDTFVSSILLYEDRAEVKFNITDQKTGDFERVILPISANKKPPEDDDITSNSEGSTALRLVDEPQRRTNPCVEISPYSVIFIIPLPGKLVR

SEQ ID NO: 2092 - protein, 552 aa, Unknown
  Description of Unknown: Integrase B2093 sequence
  cd00338,SM00857,G3DSA:1.10.10.2600,IPR036162,PF13408, PS51737,IPR025827,G3DSA:3.40.50.1390,IPR006119,IPR038109, PF07508,IPR011109,SSF53041,PTHR30461,PS51736, Coil,PF00239
MARKKKSVSGDAVIYARYSSHNQRDVSIEQQIEACRKYAASLGLKITVTYEDRAISGRTDNRPAFQRMMRDAEDGKFCYVLAWKSNRMGRNMMQAMVNEARLVDCGVKVYYAEEDFDDSAAGRFALRSMMNVNQFYSDNLAEDVRRGLMDNASKCIANGKQPFGYKRGSDGKVVLDEPAAAVVREVFTRVASGETNTSIARDLNRRGIKTGSNGEWNKCSFHGLCTNERYRGIYIYGETRIEGGVPRIIDDRLWHKVQEAIRMRNRRKNGRHRPGEDDYLLTGKLRCGHCGGYMIGMSGTSKTGTIHHYYACQNRRVGRTCDKKNIRRDIIEPAVAQAIKQYCLTDDVIEWIADKTIEYWEDEDRKLQITSLENELADIKSSISNVMKAIEQGVITSTTRDRLIELETQQSDLSAKLNSAKEDLVHVDRKNLISSLLLFRNGDVYDRQYQEDLFNTFLVAAYVYDDGNRLKLVFNCFGDSNTVDLDLCSDENNDNSSISNEANCGNLFAQALKQSTIRELGEHSSICMVGSVFVLLCPLPTVDRKPTLVNRH

SEQ ID NO: 2093 - protein, 552 aa, Unknown
  Description of Unknown: Integrase B2094 sequence
  PTHR30461:SF3,IPR036162,PS51737,IPR011109,PTHR30461, PF00239,G3DSA:1.10.10.2600,IPR006119,SSF53041,cd00338, SM00857,IPR025827,IPR038109,PS51736,mobidb-lite, PF13408,G3DSA:3.40.50.1390,PF07508,Coil
MGKKQKTNGGDAVIYARYSSHNQRDVSIEQQVEACRKHAAELGLTVTATYEDRAISGKTDKRPSFQRMMRDAEQHKFAYVLAWKSNRIGRNMMQALVNESRLVDCGVKVFYAEEDFDDNAAGRFALRSMMNVNQFYIENMAEDVKRGLYDNAKKGLVNGSLPLGYKRGADGKPEIDEPKAAIVREIYTRVAAGELFASIAADLNARGIRTARGREWNKGSFHVLCHNDRYRGIYMYGDIRIPGGMPRIISDELFYDAQEAYGMKKDNRYGRARHGAENYLLTGKLYCGHCGSYMVGISGTSKTGEMHYYYACQKHRLEHTCEKKAIRRDVIENAVARVIMMYCLDDETIDFIVDSTIAYFKQKDHELHIEAMENELAAVQQAISNLMKAIEAGIITPTTRTRLLDLEEQQAKLSGKINTAKAERVEIDRDDLIAGLQLFRTGDIKNKKFLAKLFNTFLLAVYLYDDNRLKIVFSFTGNHNNIEIPLELDNDCPDSESGPYETEVRMSHLECRKNSGTPPSSGGAEKGDGCSGGRFVRTAPLPPHKKTPQAYA

SEQ ID NO: 2094 - protein, 552 aa, Unknown
  Description of Unknown: Integrase B2095 sequence
  PTHR30461:SF3,IPR036162,PS51737,IPR011109,PTHR30461, PF00239,G3DSA:1.10.10.2600,IPR024590,IPR006119,SSF53041, SM00857,PF11898,IPR025827,IPR038109,PS51736, cd03768,PF13408,G3DSA:3.40.50.1390,PF07508,Coil
MKIAIYSRKSKATDKGESIENQINACKDYILKWSNLNTSDAQFIIYQDEGFTGSNTERPQFQKLLNDAKKDKFNMLICYRLDRVSRNIADFSNTYELLQEHGIEFVSVKEQFDTSTPIGRAMLNIAMVFAQLERETIAERIKDNMLGLARTGRWLGGTTPTGFNSEPIEYLDHNMNTKKMYKLSIDENEIEKVKLIFTKFMELKSLRSTESYLLIHDIYSKNNCKYTAATIKDILTNPVYAAADSNMYDYLSSLGCQICNEEKDFDGAYGIMSYNKTDQVGKSISTKDYSEWIISIGKHTPIVEGMDWVSIQGILNSNTQNSFYTKETMQYGLLTNMIKCAHCGANMKIKKGKINAKSELAYSYVCTTKEMSRRTKCNVKNVIGQEVDADVFNYLVDLAENNEFMSSIFKSNKAFVTQSIEEINHKVQDLTAQIEDNDLSMKNLMSQLAKLPAEHPLVDLYMKQLSELDTSTKALKSQIQQLHENGEQQQVINLNLDSLRKAFTHLKDLKDSTDIHMQRSIIRSIVDYITWDGENLQINLFGQDILKKNSVS

SEQ ID NO: 2095 - protein, 552 aa, Unknown
  Description of Unknown: Integrase B2096 sequence
  PTHR30461:SF3,IPR036162,PS51737,IPR011109,PTHR30461, PF00239,G3DSA:1.10.10.2600,IPR006119,SSF53041,cd00338, SM00857,IPR025827,IPR038109,PS51736,mobidb-lite, PF13408,G3DSA:3.40.50.1390,PF07508,Coil
MGKKQKTNGGDAVIYARYSSHNQRDVSIEQQVEACRKHAAELGLTVTATYEDRAISGKTDKRPSFQRMMRDAEQHKFAYVLAWKSNRIGRNMMQALVNESRLVDCGVKVFYAEEDFDDNAAGRFALRSMMNVNQFYIENMAEDVKRGLYDNAKKGLVNGSLPLGYKRGADGKPEIDEPKAAIVREIYTRVAAGELFASIADDLNARGIKTARGREWNKGSFHVLCHNDRYRGIYMYGDIRIPGGMPRIISDELFYDAQEAYSMKKDNRYGRARHGAENYLLTGKLYCGHCGGYMVGISGTSKTGEMHYYYACQKHRLEHTCEKKAIRRDVIENAVARAIMMYCLDDETIDFIVDSTIAYFKQKDHELHIEAMENELAAVQQAISNLMKAIEAGIITPTTRTRLLDLEEQQAKLSAKINTAKAERVEIDRDDLIAGLQLFRTGDIKNKKFLAKLFNTFLIAVYLYDDNRLKIVFSFTGNHNSVEIPLELDNDCPDSEIVSDETEVRMRHLECRKNLGSPPSSGEAEKGDDCSDGRFVRTAPLPPHKKTPQAYA

SEQ ID NO: 2096 - protein, 552 aa, Unknown
  Description of Unknown: Integrase B2097 sequence
  cd00338,SM00857,G3DSA:1.10.10.2600,IPR036162,PF13408, PS51737,G3DSA:3.40.50.1390,IPR025827,IPR006119,IPR038109, PF07508,IPR011109,SSF53041,PTHR30461,PS51736, Coil,PF00239
MTHGAYILARYSTENQSEASIEVQVERCREWCEKQNLPVLDVFADRAISGMKETRPEYQRMMQQLYSGGADTVVIYDQSRMFRNMVFWFQFRETLQRIGVHVVSVTQPTVGGDLSDPAVFLNEGVTALFNQMWVLQTQQKVREGVRQRAKSGKHTGGIPALGYRVENERLVVDESEAETVRLIFGLYAAGQSYIDIIAELNRRGLKTKRGNAFGKNSIHDLLKNEKYVGRALFGGKPVSYDGTRNAHAARGEHLEVACPSIVSEELFDAVQARLAANKHQNTGKRVTAVEQPLKGKIFCGTCGGAMTIHYKYPARGGERYEYYKCATKQRGKGCSGMSIRKDELEDTVANAVLAMLGAPKSRDKLLSVLRDQRDNIIKTSAPKLKELQAEYDSLASQIEKALDAVMAGLTSPALIERTNALESKKAQVAEEIALLKSNVEHSSLRDEQLAPLLDKLIKSAKENPTAILAAVLRVEVYPDTIKIWTIFDDGPAPGDGPITKSNVASLVKSPDTGKWSLGTFIGTASGVPSNVPNIFVVAAFTVLRERKNKERV

SEQ ID NO: 2097 - protein, 551 aa, Unknown
  Description of Unknown: Integrase B2098 sequence
  PTHR30461:SF3,IPR036162,PS51737,IPR011109,PTHR30461, PF00239,G3DSA:1.10.10.2600,IPR006119,SSF53041,cd00338, SM00857,IPR025827,IPR038109,PS51736,mobidb-lite, PF13408,G3DSA:3.40.50.1390,PF07508,Coil
MKKRINTNSAARAVIYARYSSANQRDCSIEQQVEKCRELAAREGVTVIEIYADRAISGKTDRRPNFQRMMKDASLRQFDVVLAWKSNRMGRNMLQAMMNEEQLRSNGIRTIYAEEDFDDTAAGRFALRNMMNVNQFYSENMAEDISRGLMDNASKCMSNGSLPLGYKTGKDQKVVLDEAEAAIVQEIFTRVSCYEPFIDIARDLNRRGIKTKKGAEWGRSSFHTICRNERYRGIYIYRDIRVEGGMPRIVSDELFYKVQEVLKVKKNPQGRRKRSGYEEYLLTGKLYCGHCGSPMTGIAGTSKTGAMHYYYTCQKRRTDHSCDKKAVRRDQIEKAVAIAIQQQLLTDENIQMMADETMAYNARTEIKYRLQSLQQQLYSNETSTANIMKAIEMGIITDTTKARLLALEQEHGQLLAKIDTAKAEMVPINREDFVSLLDIYRTGDVNNKKYLAALFDTFLVRVDLYDDHFKITFDPTGGKMPVDIPIGAEDSPESPGDSPESSDFEASPQDAEKFVLALHNRTKREQNEHKTTVKMVGNVFVLFCSIPSLTH

SEQ ID NO: 2098 - protein, 551 aa, Unknown
  Description of Unknown: Integrase B2099 sequence
  PTHR30461:SF3,cd00338,SM00857,G3DSA:1.10.10.2600,IPR036162, PF13408,IPR025827,G3DSA:3.40.50.1390,PS51737,IPR006119, IPR038109,PF07508,SSF53041,IPR011109,PTHR30461, PS51736,Coil,PF00239
MKITKFPIDLSMLTEEEIDQFRQDPSTLFEGDTDVCLYLRFSSERQREQSIEGQLRDCRTFCKLNSYRITAIYVDRATTARKDVEKRVHFQEMIRDSEKKPWEYVVVWKLDRFARNRTDSALFKFRLRKNGVKVISATENISEKPEGIILEAVLEGMAEFYSADLSQKITRGMRESALKCHSIGGHVPLGYKIEDHKLVINPATAHIVQEAFELYANGETVADICRMFNAKGYRTAKGVEFNRNSFKSMFRNKRYIGVYTYKDIEVEDGVPAIIDKELFETVGRRLSKNAEAPARGKAKVDYLLAGKLFCGHCGGSMNGESGTSKTGAIYNYYTCYTRKRKHACDKKPLKKDWIEYIVAQDAMELLTDDTIQEMADMAISQTEQDLRENTRIPELTERMKETESGIANITKAIEKGVASDALMNRLMELEKEKKNLLRLLAEEEKYVCKIERSQIVYWLTEFKGGRIEDERYRRIIIDLMVNSVTVWDEPDGFRITTAYNLTSCKSKTFRIDPSGTKGFGFEGLESTIERISEPYIVWGKIFVQTKRHPLP

SEQ ID NO: 2099 - protein, 551 aa, Unknown
  Description of Unknown: Integrase B2100 sequence
  PTHR30461:SF3,SM00857,G3DSA:1.10.10.2600,IPR036162,PF13408, PS51737,G3DSA:3.40.50.1390,IPR025827,IPR006119,IPR038109, PF07508,IPR011109,SSF53041,PF00239,PTHR30461, PS51736,Coil,cd00338
MYEEIKTACLYLRYSSSNQTEQSIEGQMHVCQDFCQRHNIRIVEMYIDRATSASKDIEKRVEFLKMIKDSEKGNFDAVIVYKLDRFARSRYDSATYKYRLKRNGVQLVSATENITQDPEGIILESVLEGMAEFYSAELSQKINRGMKESAMKHNSIGGAIPLGYKTVDKKLVIDETTAPIVREAFQMYADGESVAEICRTFNNRGYKTSKGTRFGKSSFTKIFRNEKYIGVYKYHDYRAEDVIPPIIDKDLWDRVQVRVGKIKKAPARNKAKHTYLLTGKLFCGHCGSSMNADGNSNGYLYYRCYGKKNMNESCKKRNMEKNLIERLVAQDAMSFLTDEYIEKIATIACDRNRQEIESDSPIPVIRDRIRQVDVSLNNLLKAIETGSAPDMLVKRMGELETEKKDMEVQLKKEMAHQVYIEKEQVIFWLEKFREGDINDEEFCHTVIDLFVNSVTVWDEPDDKFRITIAYNLTSIPQKTYRLSKDGRLSDYASNTPDRKTDINRIILLHVLHFSCDSRTECFICHFTGSSAAFICPVKVCCRIWLLRLNFI

SEQ ID NO: 2100 - protein, 551 aa, Unknown
  Description of Unknown: Integrase B2101 sequence
  PTHR30461:SF3,cd00338,SM00857,G3DSA:1.10.10.2600,IPR036162, PF13408,PS51737,G3DSA:3.40.50.1390,IPR025827,IPR006119, IPR038109,PF07508,SSF53041,IPR011109,PTHR30461, PS51736,Coil,PF00239
MTLPVDLRCLTEEELTQFLEDPTTLFEGDYDVVLYLRYSSSGQSDQSIEGQLRDCRAFCKANHYRIVGIYVDRATTARKDVEKRVHLMEMIADSAKQNWRYVVVWKLDRFARNRNDSAVMKVRLRKNGVKVLSATEHLTDSPESIILESVLEGMAEFFSAELSQKVTRGMRETALKCNSVGGHIPLGYKVVDHKLAIDPNTAPIVCEAFALYANGVSVAEICRQFNAKGYRTAKNSQFNRSSFKAMFRNQRYIGIYKYKDIVVENGIPAIVDKDVFAKVQERLHKATGAPARGKAKVDYLLSGKLFCGHCGSPMDGESGTGRRGRVYNYYVCYSKKRKRGCDKRPLRKDYIEKIVAQDALNLLTDDLIEEIADKAIQQSEMDILTETRLPVLTAKKQEVETSIKNITTAVEKGIASETLMTRLVELEHEKKNLEKEIKAEEKYIYKIDRHQIVFWLSQFRHGDIENEDCRRQLIDLLINSVTVWDEPDGYKITTAYNLTSCKTKTFRISDHSKSSIKGFVFEESWRAIGRESEPCIVWGSILVQTKRHPLF

SEQ ID NO: 2101 - protein, 551 aa, Unknown
  Description of Unknown: Integrase B2102 sequence
  PTHR30461:SF3,IPR036162,PS51737,IPR011109,PTHR30461, PF00239,G3DSA:1.10.10.2600,IPR006119,SSF53041,cd00338, SM00857,IPR025827,IPR038109,mobidb-lite,PS51736, PF13408,G3DSA:3.40.50.1390,PF07508,Coil
MKKRINTNSAARAVIYARYSSANQRDCSIEQQVEKCRELAAREGVTVIEIYADRAISGKTDRRPNFQRMMKDASLRQFDVVLAWKSNRIGRNMLQAMMNEEQLRSNGIRTVYAEEDFDDTAAGRFALRNMMNVNQFYSENMAEDISRGLMDNASKCMSNGSLPLGYKTGKDQKVVLDEAEAAIVQEIFTRVSCYEPFIDIARDLNRRGIKTKKGAEWGRSSFHTICRNERYRGIYIYRDIRVEGGMPRIVSDELFYKVQEVLKVKKNPQGRRKRSGYEEYLLTGKLYCGHCGSPMTGIAGTSKTGAMHYYYTCQKRRTDHSCDKKAVRRDQIEKAVAIAIQQQLLTDENIQMMADETMAYNARTEIKYRLQSLQQQLYSNETSTANIMKAIEMGIITDTTKARLLALEQEHGQLLAKIDTAKAEMVPINREDFVSLLDIYRTGDVNNKKYLAALFDTFLVRVDLYDDHFKITFDPTGGKMPVDIPIGAEDSPESPGDSPESSDFEASPQDAEKFVLALHNRTKREQNEHKTTIKMVGNVFVLFCSIPSLTH

SEQ ID NO: 2102 - protein, 551 aa, Unknown
  Description of Unknown: Integrase B2103 sequence
  PTHR30461:SF3,SM00857,G3DSA:1.10.10.2600,IPR036162,PF13408, IPR025827,PS51737,G3DSA:3.40.50.1390,IPR006119,IPR038109, PF07508,IPR011109,SSF53041,PF00239,PTHR30461, PS51736,Coil,cd00338
MKITKFPIDLSMLTEEEIDQFRQDPSTLFEGDTDVCLYLRFSSERQREQSIEGQLRDCRTFCKLNSYRITAIYVDRATTARKDVEKRVHFQEMIRDSEKKPWEYVVVWKLDRFARNRTDSALFKFRLRKNGVKVISATENISEKPEGIILEAVLEGMAEFYSADLSQKITRGMRESALKCHSIGGHVPLGYKIEDHKLVINPATAHIVQEAFELYANGETVADICRIFNTKGYRTAKGVEFNRNSFKSMFRNKRYIGVYTYKDIEVEGGVPAIIDKELFETVGHRLSKNAEAPARGKAKVDYLLAGKLFCGHCGGSMNGESGTSKTGAIHNYYTCYTRKRKHACDKKPLKKDWIEYIVAQDAMELLTDDTIQELADMAISQTEQDLRENTRIPELTDRMKETESGITNITKAIEKGIASDALMNRLVELEKEKKNLLRLLAEEEKYVCKIERSQIVYWLTEFKGGRIEDERYRRIIIDLMINSVTVWDEPDGFRITTAYNLTSCKSKTFRIAPSGEKGFGFEGSECTIERISEPYIVWGKIFVQTKRHPLP

SEQ ID NO: 2103 - protein, 551 aa, Unknown
  Description of Unknown: Integrase B2104 sequence
  PTHR30461:SF3,cd00338,SM00857,G3DSA:1.10.10.2600,IPR036162, PF13408,IPR025827,PS51737,G3DSA:3.40.50.1390,IPR006119, IPR038109,PF07508,SSF53041,IPR011109,PTHR30461, PS51736,Coil,PF00239
MKNMKFPIDLSMLTEEEINQFREDPSTLFQGETDVTLYLRFSSERQKEQSIEGQLRDCIAYCKRKNYRIVAIYVDRATTARKDVEKRVHFQQMISDSVHQLWSLVIVWKLDRFARNREDSAVFKMRLRRNGVKVESATEGISKNPEGIILEAVLEGIAEYYSADLSQKITRGMRESALKCHSIGGHVPLGYKIEDHRLVVNPATAHIVQEAFELYANGETVADICRMFNAKGYRTAKGAEFNRNSFKSIFRNKRYIGVYSYKDFQKEGGVPAIIDKDLFEAVQKRLSATAEAPARGKAKVDYLLAGKLFCGHCGASMNGDSGTSKTGAIHNYYTCYTRKRQHACDKKPLRKEWIEDIVAQDAMELLTTETIHELADMAISQTEQDLRDNTRIPELSERMKEVESGISNITKAVEKGIASDALMNRLVELEKEKKSLLRQITEEEKYVCKIDRDQIIHWLEKFKDGSIEDESFKRIIIDLMINSVTVWDEPDGFRITTAYNLTSCKNKTFRISPSSSGEFGFEGSESTIGRKSEPCIVWGTICVQTKIHPLP

SEQ ID NO: 2104 - protein, 551 aa, Unknown
  Description of Unknown: Integrase B2105 sequence
  SM00857,IPR006118,G3DSA:1.10.10.2600,IPR036162,PF13408, PS51737,G3DSA:3.40.50.1390,IPR025827,IPR006119,IPR038109, PF07508,SSF53041,IPR011109,PTHR30461,PS00397, PS51736,cd00338,PF00239
MDTSKYMPACYCRVSTVHQIDKESIPAQVHMLTNYCVGMLQCKKSDIEFYIDAGYSGKNTKRPQFEKMMDDVESGKRNIVLAFKIDRISRNLLDFARFLEVLKSHNADFVSLSESFDTSSVMGQGMLKLVCLFGEMERGITRERVMAVSKDIISRGGHLGAPTPLGYNYDKGTKKYSINESEAKTIKLMFKMVQDGYSTNYIANHLNDHNITSKRGGLWTSTTVNHILHNPAFKGLYIWNRKTSGRQKVKDKKEWMYQKDVYPVIIPEKDWQAVQDLLKNRKTGRAFMQSTAPHFFSNLIICGECGRLLRYRSDRPRRSGFTPTIYTCPGHTFHWGCPNSAYLSDIVLAPFVLRYISNMYKLSWMTDSVQSSQQLKSILLEGMPSNCRIANLPTIYGLFTRANTEPVPGDVAIIKAAANNAKVEREKELAKYYKALDRLKDLYLYGDSDLSKENYVAERKKIELKIASIMGKTQKEEKQVSPKLSIDASKYETILSMLPDTTDYMKILEKCGHKLLADFFHDCIKSIVTSNRQVVRITFRNGVSHNFIYEN

SEQ ID NO: 2105 - protein, 551 aa, Unknown
  Description of Unknown: Integrase B2106 sequence
  PTHR30461:SF3,cd00338,SM00857,G3DSA:1.10.10.2600,IPR036162, PF13408,PS51737,IPR025827,G3DSA:3.40.50.1390,IPR006119, IPR038109,PF07508,IPR011109,SSF53041,PTHR30461, Coil,PF00239
MKKFKFPIDLSMLTEEEINQFREDPSTLFQGDTDVCLYLRFSSERQKEQSIEGQLRDCIAYCKRKNYRIVAIYVDRATTARKDVEKRVHFQEMITASVHQTWKLVVVWKLDRFARNREDSAVFKMRLRKNGVKVESATEGISKNPEGIILEAVLEGIAEYYSADLSQKITRGMRESALKCHSIGGHVPLGYKIEDHKLVINPDTAHIVQEAFELYANGETVADICRMFNAKGYRTAKGAEFNRNSFKSMFRNRRYIGVYRYKDFEKEGGVPPIIDKDLFETVQKRLSANAEAPARGKAKVDYLLAGKLFCGHCGGSMNGESGTSKTGAVHNYYACYTRKRQHSCDKKPLRKEWIEQIVAQDAMELLTDDAIQEMADMAISQTEKDLRENTRIPELSERMKETESGIANITKAVEKGIASDALMSRLVELEKEKKNLLRLIAEEEKYVCKIDRDQIVYWLTKFKDGNIEDENFKRIIIDLIVNSVTVWDEPDGFRITTAYNLTSCKNKTFRIPSSPDKGFGFEGLESTIERKSEPCFVWGTIFVQTKRHSLP

SEQ ID NO: 2106 - protein, 551 aa, Unknown
  Description of Unknown: Integrase B2107 sequence
  PTHR30461:SF3,cd00338,SM00857,G3DSA:1.10.10.2600,IPR036162, PF13408,IPR025827,G3DSA:3.40.50.1390,PS51737,IPR006119, IPR038109,PF07508,IPR011109,SSF53041,PTHR30461, PS51736,Coil,PF00239
MYEEIKTACLYLRYSSSNQTEQSIEGQMHVCQDFCKRHNIKIVEMYIDRATSASKDIEKRVEFLKMIKDSEKGNFDAVIVYKLDRFARSRYDSATYKYRLKRNGVQLISATENITQDPEGIILESVLEGMAEFYSAELSQKINRGMRESAMKHNSIGGAIPLGYKTVDKKLIVDETTAPIVREAFQMYADGESVAEICRTFNSRGYKTSKGTRFGKSSFTKIFRNEKYIGVYKYHDYRAEDVIPPIIDKDLWDRVQVRVGKIKKAPARNKAKHTYLLTGKLFCGHCGSAMNADGNSQGYLYYRCYGKKNLDKQCNKRNMEKNLIERLVAQDAMSFLTDEYIEKIATIACDRNKQEIESDSPIPVIRDRIRQVDVSLNNLLKAIETGSAPDMLVKRMGELETEKKDMEVQLKKEMAHQVYIEKEQVIFWLEKFREGDINDEEFCQTVIDLFVNSVTVWDEPDDKFRITIAYNLTSIPQKTYRLSKDGRLSDYASNTPDWESQKDLVIRTHIHLFFHNRRSIFFITHFHTASGFFIHPVKISLCIWNFRLNLK

SEQ ID NO: 2107 - protein, 551 aa, Unknown
  Description of Unknown: Integrase B2108 sequence
  cd03768,PTHR30461:SF3,SM00857,G3DSA:1.10.10.2600,IPR036162, PF13408,IPR025827,G3DSA:3.40.50.1390,PS51737,IPR006119, IPR038109,PF07508,IPR011109,SSF53041,PTHR30461, PS51736,Coil,PF00239
MIAAIYSRKSKFTGKGESIENQVNLCKEYALHNLRDKNITEFLVYEDEGFSGGSVDRPEFKRLINDIKLKKIDIIICYKLDRISRNVSDFSNTIELLNKYNVGFISIKEQFDTSTPMGRAMMYISSVFAQLERETIAERVRDNMLELAKTGRWLGGATPMGYESKKITYIDENMKERSLVKLKQVPEELEIIKLIFNKYLYFKSLSKVETYLLQKNIKTKRGSNFSKSNLRVILNNPVYVKSDNKIIDYLVDMGITVCGEPDGQSGILTYNKQMTIRNDKGKAVRVYRDTDDWVAAVSSQKGIIEADDWLEAQKILSDNKDKFPNQGKTHNALLTGILRCSKCDSPMQIAHGHISKKTGKKIYYYTCPLKKNSKSVRCDNRNAKVEEVDKIIIDHLKELPLNKKAIIKNLLKQNKKAKETTIASNEKSIKNEIATKEKQIDTLLTKLSIDDDVSDLIIDKIKKLKNELNSLKVDLLNVNNTKTKLNEVEVSLNFIELLLDKCSIIDTLSVEEKKQIIDVFVTDAEWNGDDYFFGADFLGSEPIEENELKKK

SEQ ID NO: 2108 - protein, 551 aa, Unknown
  Description of Unknown: Integrase B2109 sequence
  SM00857,IPR006118,G3DSA:1.10.10.2600,IPR036162,PF13408, PS51737,G3DSA:3.40.50.1390,IPR025827,IPR006119,IPR038109, PF07508,SSF53041,IPR011109,PTHR30461,PS00397, PS51736,cd00338,PF00239
MDTSKYMPACYCRVSTVHQIDKESIPAQVHMLTNYCVGMLQCKKSDIEFYIDAGYSGKNTKRPQFEKMMDDVESGKRNIVLAFKIDRISRNLLDFARFLEVLKSHNTDFVSLSESFDTSSVMGQGMLKLVCLFGEMERGITRERVMAVSKDIISRGGHLGAPTPLGYNYDKGTKKYSINESEAKTVKLMFKMVQDGYSTNYIANHLNDNHITSKRGGLWTSTTVNHILHNPAFKGLYIWNRKTSGRQKVKDKKEWMYQKDVYPVIIPEKDWQAVQDLLKNRKTGRAFMQSTAPHFFSNLIICGECGRLLRYRSDRPRRSGFTPTIYTCPGHTFHWGCPNSAYLSDIVLAPFVLRYISNMYKLSWITDSVQSSQQLNSILLDGMPSNCRLANLPTIYGLFTRANTEPVPGDVAIIKAAANNAKVEREKELAKYYKALDRLKDLYLYGDSDLSKENYVAERKKIELKIASIMGKTQKEEKQVSPKLSIDASKYETILSMLHDTADYMQVLQKCGHKLLSDFFHDCIKSIVTNQRQVVRITFNNGVSHNFIYEN

SEQ ID NO: 2109 - protein, 551 aa, Unknown
  Description of Unknown: Integrase B2110 sequence
  PTHR30461:SF3,cd00338,SM00857,G3DSA:1.10.10.2600,IPR036162, PF13408,IPR025827,G3DSA:3.40.50.1390,PS51737,IPR006119, IPR038109,PF07508,IPR011109,SSF53041,PTHR30461, PS51736,Coil,PF00239
MKSVKFPIDLSMLTEEEIDQFRQDPSTLLEGDTDVSLYLRFSSERQREQSIEGQLRDCRSFCKVNRYRIAAIYVDRATTARKDVEKRIHFQEMIRDSEKKPWKYVVVWKLDRFARNRTDSALFKFRLRKNGVRVISATEAISEKPEGIILEAVLEGMAEFYSADLSQKITRGMRESALKCHSIGGHVPLGYKIEDHKLVVDPNTAHIVQEAFQLYANGETVAEICRMFNTKGYRTAKGAEFNRNSFKSMFRNERYIGVYTYRDIRIEGGVPAIIDKELFETVSHRLSVNAEAPARGKAKVDYLLAGKLFCGHCGGSMNGESGTSKTGAIHNYYTCYSRKRHHSCDKRPLKKEWIERIVAQDAMELMTDEVIEELADMAMAQTDQDLKENTRIPELTERKKEIESGIANITKAIEKGIASDSLMERLVELEKDKKKILRLLEEEEKYVCRIDREQIIFWLEKFKDGNLEDEGFRRIIIDLIVNSVTVWDEPDGFRITTAYNLTSCKNKTYRVSPSSGKGFGFEGSESTIERKSEPYIVWGTVFVQTKKHTLP

SEQ ID NO: 2110 - protein, 551 aa, Unknown
  Description of Unknown: Integrase B2111 sequence
  PTHR30461:SF3,IPR036162,PS51737,IPR011109,PTHR30461, PF00239,G3DSA:1.10.10.2600,IPR006119,SSF53041,cd00338, SM00857,IPR025827,IPR038109,mobidb-lite,PS51736, PF13408,G3DSA:3.40.50.1390,PF07508,Coil
MKKRISPNSAARAVIYARYSSANQRDCSIEQQVAKCRELAARLGLTVIDVYEDRAISGKTDRRPNFQRMMKDADLRQFDVVLAWKSNRMGRNMLQAMTNEERLRDNGIRTVYAEEDFDDTAAGRFALRNMMNVNQFYSENMAEDITRGLMDNAAKCLSNGSLPLGYKPGDDRHVVLDEAEAAIVQEIFTRVSCYEPFIDIARDLNRRGIKTKKGSEWGRSSFHTICRNERYRGIYIYRDVRIEGGMPRIVSDELFYKVQEVLKVKKNPQGRRKRSGYEEYLLTGKLFCGHCGSPMTGIAGTSKTGAMHYYYTCQKRRTDHSCDKKAVRRDQIERAVGVAIQQQLLTDENIQMMADKLMEYNARTETKYRLQGLQDQLNANKTATANILKAIEMGIITDATKARLLELEKEQGQLLVKIDEAKAEMVPISRNDFVKLLYIYKEGEPTDKKYLAALFDNFLVRVDLYDDHLKITFDPTGGRQPIDMPIGAEESPESPGDSSESSDFEASSQDAEKFVLALHNCTKREQNEHKTTVKMVGNVFVLFCSIPSLTH

SEQ ID NO: 2111 - protein, 551 aa, Unknown
  Description of Unknown: Integrase B2112 sequence
  PTHR30461:SF3,cd00338,SM00857,G3DSA:1.10.10.2600,IPR036162, PF13408,PS51737,IPR025827,G3DSA:3.40.50.1390,IPR006119, IPR038109,PF07508,SSF53041,IPR011109,PTHR30461, Coil,PF00239
MYEEIKTACLYLRYSSSNQTEQSIEGQMHVCQDFCKRHNIRIVEMYIDRATSASKDIEKRVEFLKMIKDSEKGNFNAVIVYKLDRFARSRYDSATYKYRLKRNGVQLISATENITQDPEGIILESVLEGMAEFYSAELSQKINRGMRESAMKHNSIGGAIPLGYKTVDKKLVIDETTAPIVREAFQMYADGESVAEICRTFNNRGYKTSKGTRFGKSSFTKIFRNEKYIGVYKYHDYRAEDVIPPIIDKDLWDRVQVRVGKIKKAPARNKARHTYLLTGKLFCGHCGSAMNADGNSQGYLYYRCYGKKNLDKQCNKRNMEKNLIERLVAQDAMSFLTDEYIEKIATIACDRNKQEIESDSPIPVIRDRIRQVDVSLNNLLKAIETGSAPDMLVKRMGELETEKKDMEVQLKKEMAHQVYIDKEQVIFWLEKFREGDINDEEFCQTVIDLFVNSVTVWDEPDDKFKITIAYNLTSIPQKTYRLSKDGRLSDYASNTPDWESQKDLIIRTHIHLFLHNLRPVFLITHFHTAAGFFIHPVKISLCIWNFWLNLK

SEQ ID NO: 2112 - protein, 551 aa, Unknown
  Description of Unknown: Integrase B2113 sequence
  PTHR30461:SF3,cd00338,SM00857,G3DSA:1.10.10.2600,IPR036162, PF13408,PS51737,IPR025827,G3DSA:3.40.50.1390,IPR006119, IPR038109,PF07508,IPR011109,SSF53041,PTHR30461, Coil,PF00239
MKKFKFPIDLSMLTEEEINQFREDPSTLFQGDTDVCLYLRFSSERQKEQSIEGQLRDCIAYCKRKNYRIVAIYVDRATTARKDVEKRVHFQEMITASVHQTWKLVVVWKLDRFARNREDSAVFKMRLRKNGVKVESATEGISKNPEGIILEAVLEGIAEYYSADLSQKITRGMRESALKCHSIGGHVPLGYKIEDHKLVINPDTAHIVQEAFELYANGETVADICRMFNAKGYRTAKGVEFNRNSFKSMFRNRRYIGVYRYKDFEKEGGVPPIIDKDLFETVQKRLSVNAEAPARGKAKVDYLLAGKLFCGHCGGSMNGESGTSKTGAVHNYYACYTRKRQHSCDKKPLRKEWIEQIVAQDAMELLTDNAIQEMADMAISQTEKDLRENTRIPELSERMKETESGIANITKAVEKGIASDALMSRLVELEKEKKNLLRLIAEEEKYVCKIDRDQIVYWLTKFKDGNIEDENFKRIIIDLMVNSVTVWDEPDGFRITTAYNLTSCKNKTFRISSSSDKGFGFEGLESTIERKSEPCFVWGTIFVQTKRHSLP

SEQ ID NO: 2113 - protein, 551 aa, Unknown
  Description of Unknown: Integrase B2114 sequence
  PTHR30461:SF3,IPR036162,PS51737,IPR011109,PTHR30461, PS00397,PF00239,G3DSA:1.10.10.2600,IPR006119,SSF53041, SM00857,IPR025827,IPR038109,PS51736,cd03768, IPR006118,PF13408,G3DSA:3.40.50.1390,PF07508,Coil
MNKKSAIYVRVSTSHQIDKDSLPLQRKDLINYSKLILGIDNYVVFEDAGYSGKNTDRPAFKDMFNRIKEGEFSHLLVWKIDRISRNLLDFCSMYDELKKYNCTFISKNEQFDTSSAMGEAMLKIILVFAELERKLTGERVAATMLDRATKGLWNGAPIPLGYKWDKAIKFPVIDNEERLTVELIYNKYIETESTSAVVKYLNQHNIRTKRDGSWTTKTVGDILRNPFYKGTYRYNFRESARGKKKKENEWIVLDNNHDPIIDLDLWTKCNNILDENAKKNSARFRAKSKTHIFAGLLECGECHKSFYSKSDKTSLDGYTPSIYTCSSRYNHLGCNQKTISDTIIGNFTLNFISNMIKLYKTYKKLSPEDIEKKLLLGSSFNDVKGIIEIDDIFNSFYNTSSKIFKPNKQETKPANVDLNKLDADLKKQHRALERLENLYLYAEDEMSEKDYILKKNIINTKIKEIDTKIKSSATISTSTYNINFFLNTATLELSKEIIEGNINMKSLIQRVGRDIIKEFVNSLITKITVRDRKVISIQFTNGLISTFIYEV

SEQ ID NO: 2114 - protein, 551 aa, Unknown
  Description of Unknown: Integrase B2115 sequence
  PTHR30461:SF3,cd00338,SM00857,G3DSA:1.10.10.2600,IPR036162, PF13408,PS51737,IPR025827,G3DSA:3.40.50.1390,IPR006119, IPR038109,PF07508,SSF53041,IPR011109,PTHR30461, Coil,PF00239
MYEEIKTACLYLRYSSSNQTEQSIEGQMHVCQDFCKRHNIRIVEMYIDRATSASKDIEKRVEFLKMIKDSEKGNFNAVIVYKLDRFARSRYDSATYKYRLKRNGVQLISATENITQDPEGIILESVLEGMAEFYSAELSQKINRGMRESAMKHNSIGGAIPLGYKTVDKKLVIDETTAPIVREAFQMYADGESVAEICRTFNNRGYKTSKGTRFGKSSFTKIFRNEKYIGVYKYHDYRAEDVIPPIIDKDLWDRVQVRVGKIKKAPARNKARHTYLLTGKLFCGHCGSAMNADGNSQGYLYYRCYGKKNLDKQCNKRNMEKNLIERLVAQDAMSFLTDEYIEKIATIACDRNKQEIESDSPIPVIRDRIRQVDVSLNNLLKAIETGSAPDMLVKRMGELETEKKDMEVQLKKEMAHQVYIDKEQVIFWLEKFREGDINDEEFCQTVIDLFVNSVTVWDEPDDKFKITIAYNLTSIPQKTYRLSKDGRLSDYASNTPDWESQKDLVIRTHIHLFLHNLRSVFLITHFHTAAGFFIHPVKISLCIWNFWLNLK

SEQ ID NO: 2115 - protein, 551 aa, Unknown
  Description of Unknown: Integrase B2116 sequence
  PTHR30461:SF3,cd00338,SM00857,G3DSA:1.10.10.2600,IPR036162, PF13408,IPR025827,G3DSA:3.40.50.1390,PS51737,IPR006119, IPR038109,PF07508,IPR011109,SSF53041,PTHR30461, PS51736,Coil,PF00239
MKKTKNSVQRAVIYARYSCSNQTEQSIEGQLADCEKFAEKYNYYIVDTYIDRAMSATTDRRPQFQQMIADSATGGFDVIIVWKLDRFARNRYDSAVNKQKLNANGVKVISVMEHIEDTPEGALMESVLEGFAEYFSKDLSQKVSRGMRETALKFKATGLIPYGYKKTSDNICVPDEHTAPVVKKIFEMYSGGMINKDICDWLNSHGYRTSNGNLFRNQYLRKILNRRRYTGSYTYGDLELHDENQRIISDELFDRVQIQLQAKRRTGRIAREQYILVGKLFCGYCRNPIRGESGRNHQNRIYTYYKCSVNKTGGKCPKTTVQRDIIENNTIKFILNNFLNDEIINSVVDTIQASETAENNSAELITLRTQIEDTDRKINNLLTAIENGVFTPSTKQRLNDLENVKEKLKYELIVKQSEKNNFNATAFKRFLKNIDVDDFKTTEQRQKLINLVLYREYLWNDKVLYIFNLTPSKPNDSVDIDSYVDALLTSTGSTSPTDGVPQVAISELLFGYFFVMGFFPFHKHFALSCFALCHHLYLLPYRPQHCSEHSM

SEQ ID NO: 2116 - protein, 551 aa, Unknown
  Description of Unknown: Integrase B2117 sequence
  PTHR30461:SF3,SM00857,G3DSA:1.10.10.2600,IPR036162,PF13408, PS51737,G3DSA:3.40.50.1390,IPR025827,IPR006119,IPR038109, PF07508,SSF53041,IPR011109,PF00239,PTHR30461, PS51736,Coil,cd00338
MKITKFPIDLSMLTEEEIDQFRQDPSTLFEGDTDVSLYLRFSSERQREQSIEGQLRDCRTFCKLNGYRITAIYVDRATTARKDVEKRVHFQEMIRDSEKKPWEYVVVWKLDRFARNRTDSALFKFRLRKNGVKVISATENISEKPEGIILEAVLEGMAEFYSADLSQKITRGMRESALKCHSIGGHVPLGYKIEDHKLVINPATAHIVQEAFELYANGETVADICRMFNAKGYRTAKGVEFNRNSFKSMFRNKRYIGVYTYKDIEMEGGVPAIIDKELFETVGRRLSKNAEAPARGKAKVDYLLAGKLFCGHCGGSMNGESGTSKTGAVHNYYTCYTRKRKHACEKKPLKKEWIEYIVAQDAMELLTDDTIQELADMAISQTEQDLRENTRIPELTERMKETESGIANITNAVEKGIASDALMNRLVELEKEKKNLLRLLAEEEKYVCKIERSQIVYWLTEFKGGRIEDERYRRIIIDLMVNSVTVWDEPDGFRITTAYNLTSCKNKTFRINPSSEKGFGFEGSKSTIERISEPYIVWGKIFVQTKRHPLP

SEQ ID NO: 2117 - protein, 551 aa, Unknown
  Description of Unknown: Integrase B2118 sequence
  SM00857,IPR006118,G3DSA:1.10.10.2600,IPR036162,PF13408, IPR025827,G3DSA:3.40.50.1390,PS51737,IPR006119,IPR038109, PF07508,IPR011109,SSF53041,PTHR30461,PS00397, PS51736,cd00338,PF00239
MDTSKYMPACYCRVSTVHQIDKESIPAQVHMLTNYCVGMLQCKKSDIEFYIDAGYSGKNTKRPQFEKMMDDVESGKRNIVLAFKIDRISRNLLDFARFLEVLKSHNADFVSLSESFDTSSVMGQGMLKLVCLFGEMERGITRERVMAVSKDIISRGGHLGAPTPLGYNYDKGTKKYSINESEAKTIKLMFKMVQDGYSTNYIANHLNDNHITSKRGGLWTSTTVNHILHNPAFKGLYIWNRKTSGRQKVKDKKEWMYQKDVYPVIIPEKDWQAVQDLLKNRKTGRAFMQSTAPHFFSNLMICGECGRLLRYRSDRPRRSGFTPTIYTCPGHTFHWGCPNSAYLSDIVLAPFVLRYISNMYKLSWMTDSVQSSQQLNSILLDGMPSNCRLANLPTIYGLFTRANTEPVPGDVAIIKAAANNAKVEREKELAKYYKALDRLKDLYLYGDSDLSKEMYVAERKKIELKIASIMGKTQKEEKQVSPKLSIDASKYETILSMLHDTADYMQILEKCGHKLLADFFHDCIKSIVTSNRQVMRITFCNGVSHNFIYEN

SEQ ID NO: 2118 - protein, 551 aa, Unknown
  Description of Unknown: Integrase B2119 sequence
  cd00338,SM00857,G3DSA:1.10.10.2600,IPR036162,PF13408, PS51737,IPR025827,G3DSA:3.40.50.1390,IPR006119,IPR038109, PF07508,IPR011109,SSF53041,PTHR30461,PS51736, Coil,PF00239
MTAVIYARYSSDNQREESIEGQIRECTAYAEKNGITVVKHYIDRALSAKTDNRPDFQQMIKDSEKRLFDIVLVWKLDRFARNRYDSAHYEYQLERNHVKLVSATEPISDSPAGIMVKSMLTGMAEYYSAELSEKVVRGMTENVLKGKYNGGTIPIGFKVDEKKFFQIDPLKAPFVVEAFQRYNDGATMKELMNWLNDSGVTTNRNQKFTYNSVQKLLTNKRYIGENHFKDIVMPDSIPAIVDKDLFEEVQQKIKKNSRAPARHKAEDDYLLTTKLFCGMCGAMMFGECGTGRNKVVHHYYKCATAKRFKTCKKKTVRKEWLEDLVIAETMKLIQDDAVIDAIVAEVMELQDQENTTLPLLEKQMREVENGIENMLNAIQAGVLTNSTKLRLEKLEAQQKELEIRIAEEKIARPRLSENQVRFWLTRFRKLDPNVKSHRETLINTFVNAVYLYDEKVLITFNYKDGTKTITFDEIAAKDAPEGNGSDLGCFAPPRTPVSNGYRSFCFICLEKGTQGWIRTATATTAASCDPGSFSARLATSARTCIASVPYL

SEQ ID NO: 2119 - protein, 551 aa, Unknown
  Description of Unknown: Integrase B2120 sequence
  SM00857,IPR006118,G3DSA:1.10.10.2600,IPR036162,PF13408, PS51737,G3DSA:3.40.50.1390,IPR025827,IPR006119,IPR038109, PF07508,SSF53041,IPR011109,PTHR30461,PS00397, PS51736,cd00338,PF00239
MDTSKYMPACYCRVSTVHQIDKESIPAQVHMLTNYCIGMLQCKKSDIEFYIDAGYSGKNTKRPQFEKMMDDVESGKRNIVLAFKIDRISRNLLDFARFLEVLKSHNADFVSLSESFDTSSVMGQGMLKLVCLFGEMERGITRERVMAVSKDIISRGGHLGAPTPLGYNYDKGTKKYSINESEAKTIKLMFKMVQDGYSTNYIANHLNDNHITSKRGGLWTSTTVNHILHNPAFKGLYIWNRKTSGRQKVKDKKEWMYQKDVYPVIIPEKDWQAVQDLLKNRKTGRAFMQSTAPHFFSNLIICGECGRLLRYRSDRPRRSGFTPTIYTCPGHTFHWGCPNSAYLSDIVLAPFVLRYISNMYKLSWITDSVQSSQQLNSILLEGMPSNCRLANLPTIYGLFTRANTEPVPGDVAIIKAAANNAKVEREKELVKYYKALDRLKDLYLYGDSDLSKENYVAERKKIELKIASIMGKTQKEEKQVSPKLSIDASKYETILSMLPDAADYMQVLQKCGHKLLSDFFHDCIKSIVTNQRQVVRITFNNGVSHNFIYEK

SEQ ID NO: 2120 - protein, 551 aa, Unknown
  Description of Unknown: Integrase B2121 sequence
  PTHR30461:SF3,IPR036162,PS51737,IPR011109,PTHR30461, PF00239,G3DSA:1.10.10.2600,IPR006119,SSF53041,cd00338, SM00857,IPR025827,IPR038109,mobidb-lite,PS51736, PF13408,G3DSA:3.40.50.1390,PF07508,Coil
MKKRINTNSAARAVIYARYSSANQRDCSIEQQVEKCRELAAREGVTVIEIYADRAVSGKTDRRPNFQRMMKDASLRQFDVVLAWKSNRMGRNMLQAMMNEEQLRSNGIRTIYAEEDFDDTAAGRFALRNMMNVNQFYSENMAEDISRGLMDNASKCMSNGSLPLGYKTGKDQKVVLDEAEAAIVQEIFTRVSCYEPFIDIARDLNRRGIKTKKGAEWGRSSFHTICRNERYRGIYIYRDIRVEGGMPRIVSDELFYKVQEVLKVKKNPQGRRKRSGYEEYLLTGKLYCGHCGSPMTGIAGTSKTGAMHYYYTCQKRRTDHSCDKKAVRRDQIEKAVAIAIQQQLLTDENIQMMADETMAYNARTEIKYRLQSLQQQLYSNETSTANIMKAIEMGIITDTTKARLLALEQEHGQLLAKIDTAKAEMVPINREDFVSLLDIYRTGDVNNKKYLAALFDTFLVRVDLYDDHFKITFDPTGGKMPVDIPIGAEDSPESPGDSPESSDFEASPQDAEKFVLALHNRTKREQNEHETTIKMVGNVFVLFCSIPSLTH

SEQ ID NO: 2121 - protein, 551 aa, Unknown
  Description of Unknown: Integrase B2122 sequence
  PTHR30461:SF3,SM00857,G3DSA:1.10.10.2600,IPR036162,PF13408, PS51737,G3DSA:3.40.50.1390,IPR025827,IPR006119,IPR038109, PF07508,IPR011109,SSF53041,PF00239,PTHR30461, PS51736,Coil,cd00338
MKITKFPIDLSMLTEEEIDQFRQDPSTLFEGDTDVCLYLRFSSERQREQSIEGQLRDCRTFCKLNSYRITAIYVDRATTARKDVEKRVHFQEMIRDSEKKPWEYVVVWKLDRFARNRTDSALFKFRLRKNGVKVISATENISEKPEGIILEAVLEGMAEFYSADLSQKITRGMRESALKCHSIGGHVPLGYKIEDHKLVINPATAHIVQEAFELYANGETVADICRIFNTKGYRTAKGVEFNRNSFKSMFRNKRYIGVYTYKDIEVEGGVPAIIDKELFETVGHRLSKNAEAPARGKAKVDYLLAGKLFCGHCGGSMNGESGTSKTGAIHNYYTCYTRKRKHACDKKPLKKDWIEYIVAQDAMELLTDDTIQELADMAISQTEQDLRENTRIPELTDRMKETESGITNITKAIEKGIASDALMNRLVELEKEKKNLLRLLAEEEKYVCKIERSQIVYWLTEFKGGRIEDERYRRIIIDLMINSVTVWDEPDGFRITTAYNLTSCKSKTFRIAPSGEKGFGFEGSESTIERKSEPYIVWGTVFVQTKRHTLP

SEQ ID NO: 2122 - protein, 551 aa, Unknown
  Description of Unknown: Integrase B2123 sequence
  PTHR30461:SF3,cd00338,SM00857,G3DSA:1.10.10.2600,IPR036162, PF13408,PS51737,G3DSA:3.40.50.1390,IPR025827,IPR006119, IPR038109,PF07508,IPR011109,SSF53041,PTHR30461, PS51736,Coil,PF00239
MKITKFPIDLSMLTEEEIDQFRQDPSTLFEGDTDVSLYLRFSSERQREQSIEGQLRDCRTFCKLNSYRITAIYVDRATTARKDVEKRVHFQEMIRDSEKKPWEYVVVWKLDRFARNRTDSALFKFRLRKNGVKVISATENISEKPEGIILEAVLEGMAEFYSADLSQKITRGMRESALKCHSIGGHVPLGYKIEDHKLVINPATAHIVQEAFELYANGETVADICRMFNAKGYRTAKGVEFNRNSFKSMFRNKRYIGVYTYKDIEMEGGVPAIIDKELFETVGRRLSKNAEAPARGKAKVDYLLAGKLFCGHCGGSMNGESGTSRTGAVHNYYTCYTRKRKHACEKKPLKKEWIEYIVAQDAMELLTDDTIQELADMAISQTEQDLRENTRIPELTERMKETESGITNITNAIEKGIASDALMNRLVELEKEKKNLLRLLAEEEKYVCKIERSQIVYWLTEFKGGRIEDERYRRIIIDLMVNSVTVWDEPDGFRITTAYNLTSCKSKTFRIDPSGEKGFGFEGSKSTIERISEPYIVWGKIFVQTKRHPLP

SEQ ID NO: 2123 - protein, 551 aa, Unknown
  Description of Unknown: Integrase B2124 sequence
  PTHR30461:SF3,IPR036162,PS51737,IPR011109,PTHR30461, PF00239,G3DSA:1.10.10.2600,IPR006119,SSF53041,cd00338, SM00857,IPR025827,IPR038109,mobidb-lite,PS51736, PF13408,G3DSA:3.40.50.1390,PF07508,Coil
MRKKSNLNAATRAVIYARYSSANQRDCSIEQQVAKCRELAARLGLTVIDVYEDRAISGKTDRRPNFQRMMKDADLRQFDVVLAWKSNRMGRNMLQAMTNEERLRDNGIRTVYAEEDFDDTAAGRFALRNMMNVNQFYSENMAEDITRGLMDNAAKCLSNGSLPLGYKPGDDRHVVLDEAEAAIVQEIFTRVSCYEPFIDIARDLNRRGIKTKKGSEWGRSSFHTICRNERYRGIYIYRDVRIEGGMPRIVSDELFYKVQEVLKVKKNPQGRRKRSGYEEYLLTGKLFCGHCGSPMTGIAGTSKTGAMHYYYTCQKRRTDHSCDKKAVRRDQIERAVGVAIQQQLLTDENIQMMADKLMEYNARTETKYRLQGLQDQLNANKTATANILKAIEMGIITDATKARLLELEKEQGQLLVKIDEAKAEMVPISRNDFVKLLYIYKEGEPTDKKYLAALFDNFLVRVDLYDDHLKITFDPTGGRQPIDMPIGAEESPESPGDSSESSDFEASSQDAEKFVLALHNCTKREQNEHKTTVKMVGNVFVLFCSIPSLTH

SEQ ID NO: 2124 - protein, 551 aa, Unknown
  Description of Unknown: Integrase B2125 sequence
  PTHR30461:SF3,SM00857,G3DSA:1.10.10.2600,IPR036162,PF13408, IPR025827,PS51737,G3DSA:3.40.50.1390,IPR006119,IPR038109, PF07508,SSF53041,IPR011109,PTHR30461,PS51736, cd00338,PF00239
MPRKKAPAAEVPRLVAYYRYSGGSRQTEQSIEGQRRDCEAYARAHGMTILREYVDRHISGKTDDRPAFQQLVADSAAHIFDAVICWKTDRLARNRYDSAVYKKKLRDNGVEILYAAESNISGAEGIIIEGLMEALAEYYSAELAEKARRGMRESALKGKALGSSRPLGLTVDAGKHYIIEPTGAEAVRYIFEQYAAGLSSSSIVERLNAMGLRTSHGGPFNKSSINRIIQNEMYRGVYVSKKFDVRIEGAIPAIIDNDLWKRAQNMFERNRQSRTPHASRADYILSGKLYCGECGCLMKGVCGRSSGNGQMYHYYACPGRSIGRACTRKNIPQDELEAMVVNSVADLLLEPELLEQIADAIVELQQAEAARPDPEKQALEKSLSDVRSKIQNILTAIENGTSSAALSARLADLEQQESTLSYQLSSLTAKKPLTFTRDQILFLLQQFRVSPSERTKAYCRRLVDTFVDHIELTNTELILYFNISDETIDKNKKAPRSNPSKESSTEKRLVRLTFSQSNLSVTIFPSYFFLTCPLSHQPLPSGTSSSISSFR

SEQ ID NO: 2125 - protein, 551 aa, Unknown
  Description of Unknown: Integrase B2126 sequence
  PTHR30461:SF3,SM00857,G3DSA:1.10.10.2600,IPR036162,PF13408, PS51737,IPR025827,G3DSA:3.40.50.1390,IPR006119,IPR038109, PF07508,IPR011109,SSF53041,PF00239,PTHR30461, PS51736,Coil,cd00338
MKKFPIDLSCLTEEEISQFQEDPYTLYNGDQDVALYLRYSSTGQSDQSIEGQLRDCRAFCKANHYRIVAIYVDRATTARKDVEKRVHLMEMVADSAKQNWEYVIVWKLDRFARNRNDSAIMKMRLRKNGVKVLSATEHLTDSPESIILESVLEGMAEFFSAELSQKVTRGMRESALKCHSVGGHIPLGYKVENHKLVVDPDTAHIVQEAFSLYANGESVADICRKFNSAGYKTAKNTEFNRSSFKAMFRNTRYIGIYTYKDIVIENGIPAIIDKELFETVQRRLSKTATAPARGKAKVDYLLSGKLFCGHCGASMNGESGAGRHGKVYHYYSCYTKKRKLGCDKRPLKKDYIEGIVARDALNLLTDQLIDEIADMAIRQSEQDLINDTHIPQLTAQLSEVEKSITNITTAIEKGIASETLMNRLVQLEHEKKTLNKEIKAEEKFVYRIDRDQIVFWLSQFKYGNIEDEDFRRRLIDLLVNSVTVWDEPDGYKITTAYNLTSCKTKTFRVEKNPAAEEATGFDFGESECTSRCELFMVCNDFFNICSFLRRN

SEQ ID NO: 2126 - protein, 551 aa, Unknown
  Description of Unknown: Integrase B2127 sequence
  PTHR30461:SF3,cd00338,SM00857,G3DSA:1.10.10.2600,IPR036162, PF13408,PS51737,IPR025827,G3DSA:3.40.50.1390,IPR006119, IPR038109,PF07508,SSF53041,IPR011109,PTHR30461, Coil,PF00239
MYEEIKTACLYLRYSSSNQTEQSIEGQMHVCQDFCKRHNIRIVEMYIDRATSASKDIEKRVEFLKMIKDSEKGNFNAVIVYKLDRFARSRYDSATYKYRLKRNGVQLISATENITQDPEGIILESVLEGMAEFYSAELSQKINRGMRESAMKHNSIGGAIPLGYKTVDKKLVIDETTAPIVREAFQMYADGESVAEICRTFNNRGYKTSKGTRFGKSSFTKIFRNEKYIGVYKYHDYRAEDVIPPIIDKDLWDRVQVRVGKIKKAPARNKARHTYLLTGKLFCGHCGSAMNADGNSQGYLYYRCYGKKNLDKQCNKRNMEKNLIERLVAQDAMSFLTDEYIEKIATIACDRNKQEIESDSPIPVIRDRIRQVDVSLNNLLKAIETGSAPDMLVKRMGELETEKKDMEVQLKKEMAHQVYIDKEQVIFWLEKFREGDINDEEFCQTVIDLFVNSVTVWDEPDDKFKITIAYNLTSIPQKTYRLSKDGRLSDYASNTPDWESQKDLVIRTHIHLFLHNLRSVFLITHFHTASGFFIHPVKISLCIWNLRLNLK

SEQ ID NO: 2127 - protein, 551 aa, Unknown
  Description of Unknown: Integrase B2128 sequence
  PTHR30461:SF3,IPR036162,PS51737,IPR011109,PTHR30461, PS00397,PF00239,G3DSA:1.10.10.2600,IPR006119,SSF53041, SM00857,IPR025827,IPR038109,PS51736,cd03768, IPR006118,PF13408,G3DSA:3.40.50.1390,PF07508,Coil
MNKKSAIYVRVSTSHQIDKDSLPLQRKDLINYSKLILGINDYVIFEDAGYSGKNTDRPAFKDMFNRIKEGEFSHLLVWKIDRISRNLLDFCSMYDELKKYNCTFISKNEQFDTSSAMGEAMLKIILVFAELERKLTGERVAATMLDRATKGLWNGAPIPLGYKWDKAIKFPVIDDEERLTVELIYDKYIETESTSAVMKYLNQENIKTKRNGSWTTKTVGDILRNPFYKGTYRYNFRESARGKKKKENEWIVLDNNHDPIIDLDLWTKCNNILDENAKKNSARFRAKSKTHIFAGLLECGECHKSFYSKSDKTSLDGYTPSIYTCSSRYNHLGCNQKTISDTIIGNFTLNFISNMIKLSKTYKKLSPEDIEKKLLLGSSFNDVKGIIEIDDIFNSFYNTSSKIFKPNKQETKPANVDLNKLDADLKKQHRALERLENLYLYAEDEMSEKDYILKKNIINTKIKEIDTKIKSSATISTSTYNINFFLNTATLELSKEIIEGNINMKSLIQRVGRDIIKEFVNSLITKITVRDRKVISIQFTNGLISTFIYEV

SEQ ID NO: 2128 - protein, 551 aa, Unknown
  Description of Unknown: Integrase B2129 sequence
  PTHR30461:SF3,IPR036162,PS51737,IPR011109,PTHR30461, PF00239,G3DSA:1.10.10.2600,IPR006119,SSF53041,cd00338, SM00857,IPR025827,IPR038109,mobidb-lite,PS51736, PF13408,G3DSA:3.40.50.1390,PF07508,Coil
MKKRINTNSAARAVIYARYSSANQRDCSIEQQVEKCRELAAREGVTVIEIYADRAVSGKTDRRPNFQRMMKDASLRQFDVVLAWKSNRMGRNMLQAMMNEEQLRSNGIRTIYAEEDFDDTAAGRFALRNMMNVNQFYSENMAEDISRGLMDNASKCMSNGSLPLGYKTGKDQKVVLDEAEAAIVQEIFTRVSCYEPFIDIARDLNRRGIKTKKGAEWGRSSFHTICRNERYRGIYIYRDIRVEGGMPRIVSDELFYKVQEVLKVKKNPQGRRKRSGYEEYLLTGKLYCGHCGSPMTGIAGTSKTGAMHYYYTCQKRRTDHSCDKKAVRRDQIEKAVAIAIQQQLLTDENIQMMADETMAYNARTEIKYRLQSLQQQLYSNETSTANIMKAIEMGIITDTTKARLLALEQEHGQLLAKIDTAKAEMVPINREDFVSLLDIYRTGDVNNKKYLAALFDTFLVRVDLYDDHFKITFDPTGGKMPVDIPIGAEDSPESLGDSPESSDFEASPQDAEKFVLALHNRTKREQNEHKTTVKMVGNVFVLFCSIPSLTH

SEQ ID NO: 2129 - protein, 551 aa, Unknown
  Description of Unknown: Integrase B2130 sequence
  PTHR30461:SF3,SM00857,G3DSA:1.10.10.2600,IPR036162,PF13408, PS51737,IPR025827,G3DSA:3.40.50.1390,IPR006119,IPR038109, PF07508,IPR011109,SSF53041,PTHR30461,Coil, cd00338,PF00239
MKKFKFPIDLSMLTEEEINQFREDPSTLFQGEIDVCLYLRFSSERQKEQSIEGQLRDCIAHCKRKSYRIVAIFVDRATTARKDVEKRVHFQEMITASVHQTWKLVIVWKLDRFARNREDSAVFKMRLRKNGVKVESATEGISKNPEGIILEAVLEGIAEYYSADLSQKITRGMRESALKCHSIGGHVPLGYKIEDHKLVINPNTAHIVQEAFELYANGETVADICRMFNTKGYRTAKGAEFNRNSFKSMFRNKRYIGVYTYKEIEKEGGVPAIIDKELFETVQRRLSANAEAPARGKAKVDYLLAGKLFCGHCGGSMNGESGTSKTGTVHNYYTCYTRKRQHSCDKKPLRKEWIEQVVAQDAMNLLTDDAIQEMADMAISQTERDLRENTRIPELSEKMKETESGIANITKAVEKGIASDALMNRLVELEKEKKNLLRLLAEEEKYVCKIDRDQIIYWLTKFKDGNIEDEKFKRIIIDLMVNSVTVWDEPDGFRITTAYNLTSCKNKTFRIPSSSDKGFGFEGLESTIERKSEPCFVWGTIFVQTKRHSLP

SEQ ID NO: 2130 - protein, 551 aa, Unknown
  Description of Unknown: Integrase B2131 sequence
  PTHR30461:SF3,SM00857,G3DSA:1.10.10.2600,IPR036162,PF13408, PS51737,G3DSA:3.40.50.1390,IPR025827,IPR006119,IPR038109, PF07508,IPR011109,SSF53041,PTHR30461,Coil, cd00338,PF00239
MKKFKFPIDLSMLTEEEINQFREDPSTLFQGDTDVCLYLRFSSERQKEQSIEGQLRDCIAYCKRKNYRIVAIYVDRATTARKDVEKRVHFQEMITASVHQTWKLVIVWKLDRFARNREDSAVFKMRLRKNGVKVESATEGISKNPEGIILEAVLEGIAEYYSADLSQKITRGMRESALKCHSIGGHVPLGYKIEDHKLVINPNTAHIVQEAFELYANGETVADICRMFNAKGYRTAKGAEFNRNSFKSMFRNRRYIGVYRYKDFEKEGGVPPIIDKDLFETVQKRLSANAEAPARGKAKVDYLLAGKLFCGHCGGSMNGESGTSKTGAVHNYYACYTRKRQHSCDKKPLRKEWIEQIVAQDAMELLTDDAIQEMADMAISQTEKDLRENTRIPELSERMKETESGIANITKAVEKGIASDALMSRLVELEKEKKNLLRLIAEEEKYVCKIDRDQIVYWLTKFKDGNIEDENFKRIIIDLMVNSVTVWDEPDGFRITTAYNLTSCKNKTFRIPSSSDKGFGFEGLESTIERKSEPCFVWGTIFVQTKRHSLP

SEQ ID NO: 2131 - protein, 551 aa, Unknown
  Description of Unknown: Integrase B2132 sequence
  PTHR30461:SF3,IPR036162,PS51737,IPR011109,PTHR30461, PF00239,G3DSA:1.10.10.2600,IPR006119,SSF53041,cd00338, SM00857,IPR025827,IPR038109,mobidb-lite,PS51736, PF13408,G3DSA:3.40.50.1390,PF07508,Coil
MKKRINTNSAARAVIYARYSSANQRDCSIEQQVEKCRELAAREGVTVIEIYADRAISGKTDRRPNFQRMMKDASLRQFDVVLAWKSNRMGRNMLQAMMNEEQLRGNGICTIYAEEDFDDTAAGRFALRNMMNVNQFYSENMAEDISRGLMDNASKCMSNGSLPLGYKTGKDQKVVLDEAEAAIVQEIFTRVSCYEPFIDIARDLNRRGIKTKKGAEWGRSSFHTICRNERYRGIYIYRDIRVEGGMPRIVSDELFYKVQEVLKVKKNPQGRRKRSGYEEYLLTGKLYCGHCGSPMTGIAGTSKTGAMHYYYTCQKRRTDHSCDKKAVRRDQIEKAVAIAIQQQLLTDENIQMMADETMAYNARTEIKYRLQSLQQQLYSNETSTANIMKAIEMGIITDTTKARLLALEQEHGQLLAKIDTAKAEMVPINREDFVSLLDIYRTGDVNNKKYLAALFDTFLVRVDLYDDHFKITFDPTGGKMPVDIPIGAEDSPESPGDSPESSDFEASPQDAEKFVLALHNRTKREQNEHKTTVKMVGNVFVLFCSIPSLTH

SEQ ID NO: 2132 - protein, 551 aa, Unknown
  Description of Unknown: Integrase B2133 sequence
  PTHR30461:SF3,SM00857,G3DSA:1.10.10.2600,IPR036162,PF13408, IPR025827,PS51737,G3DSA:3.40.50.1390,IPR006119,IPR038109, PF07508,IPR011109,SSF53041,PF00239,PTHR30461, Coil,cd00338
MKKFKFPIDLSMLTEEEINQFREDPSTLFQGEIDVCLYLRFSSERQKEQSIEGQLRDCIAHCKRKSYRIVAIFVDRATTARKDVEKRVHFQEMITASVHQTWKLVIVWKLDRFARNREDSAVFKMRLRKNGVKVESATEGISKNPEGIILEAVLEGIAEYYSADLSQKITRGMRESALKCHSIGGHVPLGYKIEDHRLVINPNTAHIVQEAFELYANGETVADICRMFNTKGYRTAKGAEFNRNSFKSMFRNKRYIGVYTYKEIEKEGGVPAIIDKELFETVQRRLSANAEAPARGKAKVDYLLAGKLFCGHCGGSMNGESGTSKTGAIHHYYSCYSRKRHHSCDKKPLRKEWIEQIVAQDAMELLTDDAIQEMADMAISQTEKDLRENTRIPELSERMKETESGIANITKAVEKGIASDALMNRLVELEKEKKNLLRLIAEEEKYVCKIDRDQIVYWLTKFKDGNIEDENFKRIIIDLMVNSVTVWDEPDGFRITTAYNLTSCKNKTFRIPSSSDKGFGFEGLESTIERKSEPCFVWGTIFVQTKRHSLP

SEQ ID NO: 2133 - protein, 551 aa, Unknown
  Description of Unknown: Integrase B2134 sequence
  PTHR30461:SF3,cd00338,SM00857,G3DSA:1.10.10.2600,IPR036162, PF13408,PS51737,G3DSA:3.40.50.1390,IPR025827,IPR006119, IPR038109,PF07508,IPR011109,SSF53041,PTHR30461, PS51736,Coil,PF00239
MTFPVDLSCLTEEELAQFREDPTTLFEGDYDVVLYLRYSSSGQSDQSIEGQLRDCRAFCKANHYRIVGIYVDRATTARKDVEKRVHLMEMIADSAKQNWRYVVVWKLDRFARNRNDSAVMKVRLRKNGVKVLSATEHLTDSPESIILESVLEGMAEFFSAELSQKVTRGMRETALKCNSVGGHIPLGYKVVDHKLAIDPNTAPIVCEAFALYANGVSVAEICRQFNAKGYRTAKNSQFNRSSFKSMFRNQRYIGIYKYKDIAVENGIPAIVDKDVFAKVQERLHKATGAPARGKAKVDYLLSGKLFCGHCGSPMDGESGTGRRGRVYNYYVCYSKKRKRGCDKRPLRKDYIENIVAQDALNLLTDDLIEEIADKAIQQSEMDILTETRLPVLTAKKQEVETSIKNITTAVEKGIASETLMTRLVELEHEKKNLEKEIKAEEKYIYKIDRHQIVFWLSQFRHGDVENENCRRQLIDLLINSVTVWDEPDGYKITTAYNLTSCKTKTFRISDHSKSSIKGFVFEESWRAIGRESEPCIVWGSILVQTKRHPLF

SEQ ID NO: 2134 - protein, 551 aa, Unknown
  Description of Unknown: Integrase B2135 sequence
  PTHR30461:SF3,cd00338,SM00857,G3DSA:1.10.10.2600,IPR036162, PF13408,IPR025827,G3DSA:3.40.50.1390,PS51737,IPR006119, IPR038109,PF07508,SSF53041,IPR011109,PTHR30461, PS51736,Coil,PF00239
MKRTAIYARYSSDNQRAESIDEQIRACRYYAQQTGLYDIVAVYKDEALSGYKNAHKRDGFAQLMADAEAGKFEAVMVYELSRFSRNGSDTIVNTEKLARLGIEFVSVREKLDQTPEGRMMMFVITGMNEYYSANLAIETMRGLKENAYQAKHTGGIPPLGYDLDSNGHYIINPEEAVAVRLIFDMYLEGNGYTAICDELNRRGYRTKRGTLFVRNSMYDLLRNEKYTGSFIYNHMAKAKNGKRNRHAYKSDSEVIRVENAFPAIISKEEYRKVLKLMEQNKRKGARNAAVHDYLLSGKVYCGHCGKSMYGETRYRKEYSYSYYSCNGHKSKICGKHSIRCDKLEAEVIRQLNELFFSDEILDRVSEKIYDDSQNHFMDERAAILRKRSADIKKKIDNGTKAILDGVDSDELRSAVKELSAQKKQIDQQIVQIEAAADNNGRTFEEVREMAKNFSDISKLPRDQQKRIVQKFIWRIYVYDSENPDDGDIVKIVLAPTEAARDELNSMAEDYVAITDMLTSTSGTSQGVPMKFDNNINIIVWTNCIIILSAKV

SEQ ID NO: 2135 - protein, 550 aa, Unknown
  Description of Unknown: Integrase B2136 sequence
  PTHR30461:SF3,SM00857,G3DSA:1.10.10.2600,IPR036162,PS51737, G3DSA:3.40.50.1390,IPR006119,IPR038109,PF07508,IPR011109, SSF53041,PTHR30461,Coil,cd00338,PF00239
MYRPPELTLNPDEILVYLRKSRSDDPLMSVEEVLAKHETILDEWSEKNLGGLVPEENKYREVVSGETLKERPEINTVLRRIESPKIKAVAAVEPQRLTRGDLEDIGRLMKLFKHTKTLIITPTRTYDLQDDYDWDAFERELKRGNEFLEYTKKILNRGRLLSVSQGNYIGSIPPYGYKKVFVTDGKRKCPTLEVVEDQAEVVRTIFDLFVNQNYGSCKIRNYLNDMHVPAPRGEKWTENGMRDMLTNVHYIGKVKWNWRKNITTVEESEIVTHRPKAQPGEYLIFEGKHEAIISEALFNAAQEKIGHTGRVKSEHEMVNPFAGILFCKCGKALTMKVQKGADGSMSSRFYCANLRNCGTSSCMCNEIVEKVSDTLKQAIQDFTVMLDSGDKESIKRHTARIKILETKLQDLEKREMALWEAQADPDLSVRMPNHIFLALNDKIVKEREQTTLMLEQTYASMPNPKLYRENIQRFSDAVEALNSPEVPAAIKNKLLKACIERIEYSKPKAERIKSSSKRIWVNGHRIRTNPLPTGGNWTSPEISLDIKLRV

SEQ ID NO: 2136 - protein, 550 aa, Unknown
  Description of Unknown: Integrase B2137 sequence
  PTHR30461:SF3,SM00857,G3DSA:1.10.10.2600,IPR036162,PS51737, G3DSA:3.40.50.1390,IPR006119,IPR038109,PF07508,SSF53041, IPR011109,PTHR30461,Coil,mobidb-lite, cd00338,PF00239
MYYQPKIDFKPEEVIDYLRKSRSDDPLLTVEEVLSKHEAMLDEWAEKHLGAVVPEENKYREVVSGETIAERPEINRVLRLIESPKYKAVAVVEPQRLTRGDLEDIGRLMKLLKHTNTLVITPQRIYDLRDEYDWDAFERELKRGNDYLEYTKKILNRGRLLSVSQGNYVGNTPPYGYDKTFVTEGKRKCPILVPNKAEADVVRMMFDLYVNKDMGCTNICKKFDEMGIKPPKGDYWSPAAMTKMLQNIHYIGKVKWNHRKTLTIVEEGEFKKTRPVAQVGEFLIYDGKHEAIIPEELFNAAQAKKGKNTRQKPNTKVRNPFAGLIWCRCGRAMSLRTYKNRDAAPRLLCDGQTHCKTGSCLYSEMEERVISILTDCIKDFEIRLKNDEGDSAKLHARLIKNLEAKQKELDEKELAQWEAQADPDPAKRMPPHIFQQLNEKLLKEKEEVRQALCKAYESMPEPVNYEEKITQFSEALNALKDPNIDAATKNRLLKACIERIEYHRDTPQRIKSQQVRYYDPEQKRTRYRSPLSTGGNWTSPEIVLDVKLKA

SEQ ID NO: 2137 - protein, 550 aa, Unknown
  Description of Unknown: Integrase B2138 sequence
  PTHR30461:SF3,SM00857,G3DSA:1.10.10.2600,IPR036162,PS51737, G3DSA:3.40.50.1390,IPR006119,IPR038109,PF07508,IPR011109, SSF53041,PF00239,PTHR30461,mobidb-lite,Coil, cd00338
MYYQPKIDFKPEEVIDYLRKSRSDDPLLTVEEVLSKHEAMLDEWAEKHLGAVVPEENKYREVVSGETIAERPEINRVLRLIESPRYKAVAVVEPQRLTRGDLEDIGRLMKLLKHTNTLVITPQRIYDLRDEYDWDAFERELKRGNDYLEYTKKILNRGRLLSVSQGNFVGNTAPYGYDKTFVTEGKRKCPILVPNKEEADVVRMMFDLYVNKDMGCTNICKKFDAMGIKPPKGEHWSAAAMTKMLENIHYIGKVKWNHRKTLTIVEEGEFKKTRPVAKVGEYLIYDGKHEAIVPEELFNAAQAKKGKNTRQKPNTKVRNPFAGLIWCKCGRAMSLRIYKNRDAAPRLLCDGQTYCKTGSCLYTEMEERVSAILADCIRDFQVRLKNNEGDSVKLHMRLINNLEAKQKELEAKELAQWEAQADPDPAKRMPPHIFQKLNEKLLKEKEEVRQALCKAYESMPEPVDYEEKIAQFTEALNALHNPDVDAATKNRLLKACIERIEYHRDAPQRIRSKQVRYYDKEQKRTRNKSPLNTGGNWTSPEIVLDVKLRV

SEQ ID NO: 2138 - protein, 550 aa, Unknown
  Description of Unknown: Integrase B2139 sequence
  PTHR30461:SF3,cd00338,SM00857,G3DSA:1.10.10.2600,IPR036162, PS51737,G3DSA:3.40.50.1390,IPR006119,IPR038109,PF07508, IPR011109,SSF53041,PTHR30461,Coil,PF00239
MYYQPKIDFKPEEVIDYLRKSRSDDPLLTVEEVLSKHEAMLDEWAEKHLGAVVPEENKYREVVSGETIAERPEINRVLRLIESPKYKAVAVVEPQRLTRGDLEDIGRLMKLLKHTNTLVITPQRIYDLRDEYDWDAFERELKRGNDYLEYTKKILNRGRLLSVSQGNYVGNTPPYGYDKTFVTEGKRKCPILVPNKAEADVVRMMFDLYVNKDMGCTNICKKFDEMGIKPPKGDYWSPAAMTKMLQNIHYIGKVKWNHRKTLTIVEEGEFKKTRPVAQVGEFLIYDGKHEAIIPEELFNAAQAKKGKNTRQKPNTKVRNPFAGLIWCKCGRAMSLRTYKNRDAAPRLLCDGQTHCKTGSCLYSEMEERVISILTDCIKDFEIRLKNDEGDSAKLHARLIKNLEAKQKELDEKELAQWEAQADPDPAKRMPPHIFQQLNEKLLKEKEEVRQALCKAYESMPEPVNYEEKITQFSEALNALKDPNIDAATKNRLLKACIERIEYHRDTPQRIKSQQVRYYDPNQKRTRYKSPLSTGGNWTSPEIVLDVKLKA

SEQ ID NO: 2139 - protein, 550 aa, Unknown
  Description of Unknown: Integrase B2140 sequence
  PTHR30461:SF3,cd00338,SM00857,G3DSA:1.10.10.2600,IPR036162, PS51737,G3DSA:3.40.50.1390,IPR006119,IPR038109,PF07508, IPR011109,SSF53041,PTHR30461,Coil, PF00239
MYYQPKIDFKPEEVIDYLRKSRSDDPLLTVEEVLSKHEAMLDEWAEKHLGAVVPEENKYREVVSGETIAERPEINRVLRLIESPKYKAVAVVEPQRLTRGDLEDIGRLMKLLKHTNTLVITPQRIYDLRDEYDWDAFERELKRGNDYLEYTKKILNRGRLLSVSQGNYVGNTPPYGYDKTFVTEGKRKCPILVPNKAEADVVRMMFDLYVNKDMGCTNICKKFDEMGIKPPKGDYWSPAAMTKMLQNIHYIGKVKWNHRKTLTIVEEGEFKKTRPVAQVGEFLIYDGKHEAIIPEELFNAAQAKKGKNTRQKPNTKVRNPFAGLIWCRCGRAMSLRTYKNRDAAPRLLCDGQTHCKTGSCLYSEMEERVISILTDCINDFEIRLKNDEGDSAKLHARLIKNLEAKQKELDEKELAQWEAQADPDPAKRMPPHIFQQLNEKLLKEKEEVRQALCKAYESMPEPVNYEEKITQFSEALNALKDPNIDAATKNRLLKACIERIEYHRDTPQRIKSQQVRYYDPKQKRTRYKSPLSTGGNWTSPEIVLDVKLKA

SEQ ID NO: 2140 - protein, 550 aa, Unknown
  Description of Unknown: Integrase B2141 sequence
  PTHR30461:SF3,cd00338,SM00857,G3DSA:1.10.10.2600,IPR036162, PS51737,G3DSA:3.40.50.1390,IPR006119,IPR038109,PF07508, IPR011109,SSF53041,PTHR30461,mobidb-lite,Coil, PF00239
MYYQPKIDFKPEEVIDYLRKSRSDDPLLTVEEVLSKHEAMLDEWAEKHLGAVVPEENKYREVVSGETIAERPEINRVLRLIESPKYKAVAVVEPQRLTRGDLEDIGRLMKLLKHTNTLVITPQRIYDLRDEYDWDAFERELKRGNDYLEYTKKILNRGRLLSVSQGNYVGNTPPYGYDKTFVTEGKRKCPILVPNKAEADVVRMMFDLYVNKDMGCTNICKKFDEMGIKPPKGDYWSPAAMTKMLQNIHYIGKVKWNHRKTLTIVEEGEFKKTRPVAQVGEFLIYDGKHEAIIPEELFNAAQAKKGKNTRQKPNTKVRNPFAGLIWCRCGRAMSLRTYKNRDAAPRLLCDGQTHCKTGSCLFSEMEERVISILTDCIKDFEIRLKNDEGDSAKLHARLIKNLEAKQKELDEKELAQWEAQADPDPAKRMPPHIFQQLNEKLLKEKEEVRQALCKAYESMPEPVNYEEKITQFSEALNALKDPNIDAATKNRLLKACIERIEYHRDTPQRIKSQQVRYYDPEQKRTRYKSPLSTGGNWTSPEIVLDVKLKA

SEQ ID NO: 2141 - protein, 550 aa, Unknown
  Description of Unknown: Integrase B2142 sequence
  PTHR30461:SF3,cd00338,SM00857,G3DSA:1.10.10.2600,IPR036162, PS51737,G3DSA:3.40.50.1390,IPR006119,IPR038109,PF07508, IPR011109,SSF53041,PTHR30461,mobidb-lite,Coil, PF00239
MYYQPKIDFKPEEVIDYLRKSRSDDPLLTVEEVLSKHEAMLDEWAEKHLGAVVPEENKYREVVSGETIAERPEINRVLRLIESPKYKAVAVVEPQRLTRGDLEDIGRLMKLLKHTNTLVITPQRIYDLRDEYDWDAFERELKRGNDYLEYTKKILNRGRLLSVSQGNYVGNTPPYGYDKTFVTEGKRKCPILVPNKAEADVVRMMFDLYVNKDMGCTNICKKFDEMGIKPPKGDYWSPAAMTKMLQNIHYIGKVKWNHRKTLTIVEEGEFKKTRPVAQVGEFLIYDGKHEAIIPEELFNAAQAKKGKNTRQKPNTKVRNPFAGLIWCRCGRAMSLRTYKNRAAAPRLLCDGQTHCKTGSCLYSEIEERVISILTDCIKDFEIRLKNDEGDSAKLHARLIKNLEAKQKELDEKELAQWEAQADPDPAKRMPPHIFQQLNEKLLKEKEEVRQALCKAYESMPEPVNYEEKITQFSEALNALKDPNIDAATKNRLLKACIERIEYHRDTPQRIKSQQVRYYDQKQKRTRYKSPLSTGGNWTSPEIVLDVKLKA

SEQ ID NO: 2142 - protein, 550 aa, Unknown
  Description of Unknown: Integrase B2143 sequence
  PTHR30461:SF3,SM00857,G3DSA:1.10.10.2600,IPR036162,PS51737, G3DSA:3.40.50.1390,IPR006119,IPR038109,PF07508,SSF53041, IPR011109,PF00239,PTHR30461,mobidb-lite,Coil, cd00338
MYYQPKIDFKPEEVIDYLRKSRSDDPLLTVEEVLSKHEAMLDEWAEKHLGAVVPEENKYREVVSGETIAERPEINRVLRLIESPRYKAVAVVEPQRLTRGDLEDIGRLMKLLKHTNTLVITPQRIYDLRDEYDWDAFERELKRGNDYLEYTKKILNRGRLLSVSQGNYVGNIAPYGYDKTFVTEGKRKCPILVPNKEEADVVRMMFDLYVNKNMGCTTICKKFDEMGIKPPKGEHWSMAAMTKMLENIHYIGKVKWNHRKTLTIVEEGEFKKTRPVAKVGEYLIYDGKHEAIVPEELFNAAQAKKGRNTRQKPTTKVRNPFAGLIWCKCGRAMSLRIYKNRDSAPRLLCDGQTYCKTGSCLYSEMEERVSAILADCIRDFQVRLKNNEGDSVKLHMRLINNLEAKQKELEAKELAQWEAQADPDPAKRMPPHIFQKLNEKLLKEKEEVRQALCKAYESMPEPVDYEEKIAQFTEALNALHNPDVDAATKNRLLKACIERIEYHRDAPQRIRSKQVRYYDKEQKRTRHKSPLNTGGNWTSPEIVLDVKLRV

SEQ ID NO: 2143 - protein, 550 aa, Unknown
  Description of Unknown: Integrase B2144 sequence
  PTHR30461:SF3,SM00857,G3DSA:1.10.10.2600,IPR036162,PS51737, G3DSA:3.40.50.1390,IPR006119,IPR038109,PF07508,IPR011109, SSF53041,PF00239,PTHR30461,mobidb-lite,Coil, cd00338
MYYQPKIDFKPEEVIDYLRKSRSDDPLLTVEEVLSKHESMLDEWAEKHLGAVVPEENKYREVVSGETIAERPEINRVLRLIESPRYKAVAVVEPQRLTRGDLEDIGRLMKLLKHTNTIVITPQRIYDLRDEYDWDAFERELKRGNDYLEYTKKILNRGRLLSVSQGNYVGNTAPYGYDKTFVTEGKRKCPILVPNKEEADVVRMMFDLYVNKDMGCTTICKKFDEMGIKPPKGEHWSTAAMTKMLENIHYIGKVKWNHRKTLTIVEEGEFKKTRPVAKVGEYLIYDGKHEAIVSEELFNAAQAKKGRNTRQKRNTKIRNPFAGLIWCKCGRAMSLRTYKNRDAEPRLLCDGQTYCKTGSCTYADIEQRVSTILADCIRDFQVRLKNNEGDSVKLHMRLINNLEAKQKELEAKELAQWEAQADPDPAKRMPQHIFQQLNERLLREKEEVRQALCKAYESMPEPVDYAEKIKLFTEALNALHNPDMDAQTKNRLLKACIERIEYHRDAPQRIRSQQVRYYDKEQKRTRNKSPLNTGGNWTSPEIVLDVKLRV

SEQ ID NO: 2144 - protein, 550 aa, Unknown
  Description of Unknown: Integrase B2145 sequence
  PTHR30461:SF3,cd00338,SM00857,G3DSA:1.10.10.2600,IPR036162, PS51737,G3DSA:3.40.50.1390,IPR006119,IPR038109,PF07508, IPR011109,SSF53041,PTHR30461,Coil,PF00239
MYYQPKIDFTPDEVIDYLRKSRSDDPTLTVEEVLAKHEAILDEWSEKNLGGIVPEENKYREVVSGETLKERPEINKVIKRIESPKIKAIQIVEPQRLTRGDLEDIGRIMKLLKHTNTLVITPNRIYNLHDDYDWDALERELKRGNEFLEYTKKILNRGRLLSVSQGNYIGNTPPYGYRKEFVMEGKKKCPILVPNKDEAEVVRMMFDLYVNEDMGCWNICKKFDEMGIKPPKGDHWSANAMTKMLENIHYIGKVKWNHRKTITIVEDGEFVQTRPVAKIGEYLIYDGKHKAIVSEELFNAAQAKKGKNARLKPNTKIRNPLAGLLWCKCGRAMSLRTYKAHNAQPRLLCDGQTYCKTGSCTYDEMIVRVEEILKNCISDFEVRLKSDEGDSAKLHARLIKNLEKKKKELEAKELAQWETQSHPDPAQRMPQHIFQQLNEKLLKEKEEVQQALCKAYESMPEPVDYEEKIKMFQDALDALQNPDASAAEKNKLLKACIERIEYHRDKPERIKSQQVRFYDPVLKKTRNKSPLKTGGNWTTPNIELDVKLKV

SEQ ID NO: 2145 - protein, 550 aa, Unknown
  Description of Unknown: Integrase B2146 sequence
  PTHR30461:SF3,cd00338,SM00857,G3DSA:1.10.10.2600,IPR036162, PF13408,IPR025827,G3DSA:3.40.50.1390,PS51737,IPR006119, IPR038109,PF07508,SSF53041,IPR011109, PTHR30461,PS51736,Coil,PF00239
MTVKKFPIDLSCLTEEEISQFQEDPYTLYNGDQDVALYLRYSSTGQSDQSIEGQLRDCRAFCKANHYRIVAIYVDRATTARKDVEKRVHLMEMVADSAKQNWEYVIVWKLDRFARNRNDSAIMKMRLRKNGVKVLSATEHLTDSPESIILESVLEGMAEFFSAELSQKVTRGMRESALKCHSVGGHIPLGYKVENHKLVVDPDTAHIVQEAFSFYANGESVADICRKFNSAGYKTAKNTEFNRSSFKAMFRNTRYIGTYTYKDIVIENGIPAIIDKELFETVQRRLSKTATAPARGKAKVDYLLSGKLFCGHCGASMNGESGAGRHGKVYHYYSCYTKKRKLGCDKRPLKKDYIEGIVARDALNLLTDQLIDEIADMAIRQSEQDLINDTHIPQLTAQLSEVEKSIMNITAAIEKGIASETLMNRLVQLEHEKKTLNKEIKAEEKFVYRIDRDQIVFWLSQFKYGNIEDENFRRRLIDLLVNSVTVWDEPDGYKITTAYNLTSCKTKTFRVDKNPAAEEATGFDFGESECTKSPRNRLISRTFVFHKFRI

SEQ ID NO: 2146 - protein, 550 aa, Unknown
  Description of Unknown: Integrase B2147 sequence
  PTHR30461:SF3,cd00338,SM00857,G3DSA:1.10.10.2600,IPR036162, PS51737,G3DSA:3.40.50.1390,IPR006119,IPR038109,PF07508, IPR011109,SSF53041,PTHR30461,PS51736,Coil, PF00239
MYYQPKINFSPNEVIAYLRKSRSDDPLLTVEEVLSKHETMLDEWAEKNLGAAVPEENKFREVVSGETIAERPEINRVLRLIESPKYKAVAVVEPQRLTRGDLEDIGRIMKLLKHTSTLVITPQRIYDLRDEYDWDTFERELKRGNDYLEYTKKILNRGRLLSVSQGNYIGNVPPYGYSKTFVTEGKRRYPILVPNKEEADVVRMMFDLYVNKDMGCQNICNRFDEMGIKPPKGEHWSPSAMAKMLENIHYIGKVKWNYRKTLTIVEEGEFKKTRPIAKAGEYLIYDGKHEAIVSEELFNAAQAKKGKHTRQKPNTKIRNPFAGLLWCKCGRAMSLRAYKSNISAPRLLCDGQTHCKTGSCLYSEMNERVCSILTNCIHDFEIRLQNNEGDSVKQHMRLIKNLEVRQKELEEKELAQWEAQADPDPAKRMPQHVFQQLNERLLKEKEEVRQALCKAYESMPEPVNYEEKIAQFTEALNALKNPKVDAATKNRLLKACIDRIEYYRDAPQRIRSQKVIYYDPEQKRTRCKSPLNVGGNWTAPKIILDVKLKV

SEQ ID NO: 2147 - protein, 550 aa, Unknown
  Description of Unknown: Integrase B2148 sequence
  PTHR30461:SF3,SM00857,G3DSA:1.10.10.2600,IPR036162,PS51737, G3DSA:3.40.50.1390,IPR006119,IPR038109,PF07508,IPR011109, SSF53041,PF00239,PTHR30461,mobidb-lite,Coil, cd00338
MYYQPKIDFKPEEVIDYLRKSRSDDPLLTVEEVLSKHEAMLDEWAEKHLGVVVPEENKYREVVSGETIAERPEINRVLRLIESPKYKAVAVVEPQRLTRGDLEDIGRLMKLLKHTNTLVITPQRIYDLRDEYDWDAFERELKRGNDYLEYTKKILNRGRLLSVSQGNYVGNTPPYGYDKTFVTEGKRKCPILVPNKAEADVVRMMFDLYVNKDMGCTNICKKFDKMGIKPPKGDYWSPAAMTKMLQNIHYIGKVKWNHRKTLTIVEEGEFKKTRPVAQVGEFLIYDGKHEAIIPEELFNAAQAKKGKNTRQKPNTKVRNPFAGLIWCRCGRAMSLRTYKNRDAAPRLLCDGQTHCKTGSCLYSEMEERVISILTDCIKDFEIRLKNDEGDSAKLHARLIKNLEAKQKELDEKELAQWEAQADPDPAKRMPPHIFQQLNEKLLKEKEEVRQALCKAYESMPEPVNYEEKITQFSEALNALKDPNIDAATKNRLLKACIERIEYHRDTPQRIKSQQVRYYDQKQKRTRYKSPLSTGGNWTSPEIVLDVKLKA

SEQ ID NO: 2148 - protein, 550 aa, Unknown
  Description of Unknown: Integrase B2149 sequence
  PTHR30461:SF3,cd00338,SM00857,G3DSA:1.10.10.2600,IPR036162, PF13408,PS51737,G3DSA:3.40.50.1390,IPR025827,IPR006119, IPR038109,PF07508,SSF53041,IPR011109,PTHR30461, PS51736,Coil,PF00239
MKKTKTKCYLYTRVSTSMQVDGYSLDAQRDKLRKYAEYEDMVVAGEYSDEGFSGKNIQGRHEFQRMLQDIQDCKDGVEYVLVFKLSRFGRNAADVLNSLQLMQDFGVNLICVEDGIDSSKDSGKLMISVLSAVAEIERENIRTQTMAGREQKAREGKWNGGFAPYGYRLEKGELLIAEDEVDVIRTIFDRYIHTNDGVSGVAKYLNRQGFVKKLRQNGTIPGFSASFVKSIIDNPVYMGKIAYGRRRTEKKIGTRNEMHVVEQSEFPVYEGKHEAIISEEDWNLAQEKRKINAYRREKVNDPTHAHILSGILKCPCCGKSLYGNIAKAHSKDKKTRYYYYCKNTVTPTGHECTFRLNIEQTEMNRMVASIISAMVSDPRFANAIKAKIGSAVDTNDLEKQLEALQAQLRQTLGTKARLERQMDGLDVNDPYYDRKISDLQRRYDEQYGRIDEIEVQIDDVQSQIRNIRQEKISGDNIYRLLLAFDQVYEAASEVERKEFMRAFIERIELFPEKQLDGNWIRKIIFNFPVPVNGTEVKELPLENETMVETV

SEQ ID NO: 2149 - protein, 550 aa, Unknown
  Description of Unknown: Integrase B2150 sequence
  PTHR30461:SF3,SM00857,G3DSA:1.10.10.2600,IPR036162,PF13408, PS51737,G3DSA:3.40.50.1390,IPR025827,IPR006119,IPR038109, PF07508,SSF53041,IPR011109,PF00239,PTHR30461, PS51736,Coil,cd00338
MKRDKFPIDLSMLTQEEIDQFREDPSTLYEGDIDVCLYLRFSSERQREQSIEGQLRDCRAYCKFNRYRIVAIYVDRALTARKDVEKRLHFQQMISDSDKKPWEYVVVWKLDRFARNRTDSALFKFRLRKNGVRVMSATESISEKPEGIILEAVLEGMAEFYSADLSQKITRGMRESALKCHSIGGHVPLGYKIEDHRLVIDPATAHIVQEAFQLYANGETVAEICRIFNAKGYRTAKGVEFNRNSFKSMFRNERYIGIYTYKDIRIEDGVPAIIDKELFDTVRRRLSVNAEAPARGKAKVDYLLAGKLFCGHCGGSMNGESGTSKTGAIHNYYTCYTRKRQRSCDKKPLRKEWIEQVVAQDAIALMTDEVIEELADMAMAQTDQDLKENTRIPELTERKKEIEQGIANITKAIEKGIASETLMERLVELEKDKKDLLRQLAEEEKYVVRIDRDQIVFWLGKFKNGNIEDESFKRIIIDLIVNSVTVWDEPDGFRITTAYNLTSCKNKTFRVNKDSGSGSVSGFGFEGSESTIRTGVRFPSGPPFGPYSNT

SEQ ID NO: 2150 - protein, 550 aa, Unknown
  Description of Unknown: Integrase B2151 sequence
  PTHR30461:SF3,IPR036162,PS51737,IPR011109,PTHR30461, PS00397,PF00239,G3DSA:1.10.10.2600,IPR006119,SSF53041, SM00857,IPR025827,IPR038109,PS51736,cd03768, IPR006118,PF13408,G3DSA:3.40.50.1390,PF07508,Coil
MKINMRVAIYVRVSTDEQADRGTIESQIEFGNKYCDLHAISEFEFYRDDGITGTLPLEERPEGARLFNDAKEKKFDTLLIYKLDRLGRSARVILNAVYELEQYGIKVKSMTEPFDTGDPAGRFLLTMLAGVADLERSTILERLWHGANRAARDGKWIGGIVPYGYFVNDQRFLEISTEKMPGLDLSEADVVKLIFDLYTKNRLTHVKICDYLNALKIPPSYALAGRKVTKGKRKENTAGIWIPHQIGRMIKNSTYKGIHIYGKRSSKQRELIPREVPAIVSVEQWDLAQVLLKENKLEFFKEKTRNYLLRGLILCEECGHHYTGAPYTQYKTKEKKTFYRCIGKQVYKNKEKERCKVKNIPGTWLENMVWEDCLNFINNPGDVLQSINQKIEETKVETRNYEEELKLITSSIQQVDAERQSILDLYRKKLISSADIETQFSKINMESELLLKKKNEIESLLAANDSSVARANSAEDYLAYLRNKIKDGNPSFQQKREIVKAIVEKIKVRNIDINGKTEIDIKILYRFSPHQTTLSPNTCNTRLQLRLFPQ

SEQ ID NO: 2151 - protein, 550 aa, Unknown
  Description of Unknown: Integrase B2152 sequence
  PTHR30461:SF3,cd00338,SM00857,G3DSA:1.10.10.2600,IPR036162, PF13408,PS51737,IPR025827,G3DSA:3.40.50.1390,IPR006119, IPR038109,PF07508,IPR011109,SSF53041,PTHR30461, PS51736,Coil,PF00239
MARKKNIAAGLDAVIYARYSSHNQREVSIEQQIAECTKHAAALGLRIVGTYEDRAISGKTDNRPRFQQMMRDAEKGKFQAVVAWKSNRIGRNMLQAMVNEAKLDDYGVKVFYAEEDFDDTAAGRFALRNMMNVNQFYSENMAEDITRGLYDNASKCMANGRQPLGYKRGEDGRVVLDEANAAVVREIFTRVAAGDLFVDIARDLNAQGIKTSKGANWNKGSFQSICQNERYRGIYIYGDVRVADGIPRIVSDDLWYRVQEAMRMKKNPVGTRHRVGAEDYLLTGKLRCGHCGSYMTGVSGTSRNGELHYYYTCQKRRTEHACDKKNIRRDVIEPAVAQAIKMYCLTDDVIAWIADRTVEYWEKHDNDLQIEALEQQLEENKKATSNMLKAIEMGIITEATRTRMVELETEQSRLSVQLNVAKEDVVKIDREQIISYLELLQQGDIHDRDFQMELFKNFLVAVYVYDDNRMKLVFSCMGDQNSVEIPLETGEDPPDGGLSPDAKMFVLTPDSSTRRKSTARKRVVLFCCCQTSEGLAHPGERRAWTARGSP

SEQ ID NO: 2152 - protein, 550 aa, Unknown
  Description of Unknown: Integrase B2153 sequence
  PTHR30461:SF3,cd00338,SM00857,G3DSA:1.10.10.2600,IPR036162, PS51737,G3DSA:3.40.50.1390,IPR006119,IPR038109,PF07508, SSF53041,IPR011109,PTHR30461,mobidb-lite,Coil, PF00239
MYYQPKIDFKPEEVIDYLRKSRSDDPLLTVEEVLSKHEAMLDEWAEKHLGAVVPEENKYREVVSGETIAERPEINRVLRLIESPKYKAVAVVEPQRLTRGDLEDIGRLMKLLKHTNTLVITPQRIYDLRDEYDWDAFERELKRGNDYLEYTKKILNRGRLLSVSQGNYVGNTPPYGYDKTFVTEGKRKCPILVPNKAEADVVRMMFDLYVNKDMGCTNICKKFDEMGIKPPKGDYWSPAAMTKMLQNIHYIGKVKWNHRKTLTIVEEGEFKKTRPVAQVGEFLIYDGKHEAIIPEELFNAAQAKKGKNTRQKPNTKVRNPFAGLIWCRCGRAMSLRTYKNRDAAPRLLCDGQTHCKTGSCLYSEMEERVISLLTDCINDFVIRLKNDEGDSAKLHARLIKNLEAKQKELDDKELAQWEAQADPDPAKRMPPHIFQQLNEKLLKEKEEVRQALCKAYESMPEPVNYEEKITQFSEALNALKDPNIDAATKNRLLKACIERIEYHRDTPQRIKSQQVRYYDPEQKRTRYKSPLSTGGNWTSPEIVLDVKLKA

SEQ ID NO: 2153 - protein, 550 aa, Unknown
  Description of Unknown: Integrase B2154 sequence
  PTHR30461:SF3,cd00338,SM00857,G3DSA:1.10.10.2600,IPR036162, PS51737,G3DSA:3.40.50.1390,IPR006119,IPR038109,PF07508, IPR011109,SSF53041,PTHR30461,mobidb-lite,Coil, PF00239
MYYQPKIDFKPEEVIDYLRKSRSDDPLLTVEEVLSKHEAMLDEWAEKHLGAVVPEENKYREVVSGETIAERPEINRVLRLIESPKYKAVAVVEPQRLTRGDLEDIGRLMKLLKHTNTLVITPQRIYDLRDEYDWDAFERELKRGNDYLEYTKKILNRGRLLSVSQGNYVGNTPPYGFDKTFVTEGKRKCPILVPNKAEADVVRMMFDLYVNKDMGCTNICKKFDEMGIKPPKGDYWSPAAMTKMLQNIHYIGKVKWNHRKTLTIVEEGEFKKTRPVAQVGEFLIYDGKHEAIIPEELFNAAQAKKGKNTRQKPNTKVRNPFAGLIWCKCGRAMSLRTYKNRDAAPRLLCDGQTHCKTGSCLYSEMEERVISILTDCIKDFEIRLKNDEGDSAKLHARLIKNLEAKQKELDEKELAQWEAQADPDPAKRMPPHIFQQLNEKLLKEKEEVRQALCKAYESMPEPVNYEEKIAQFSEALNALKDPNIDAATKNRLLKACIERIEYHRDTPQRIKSQQVRYYDPEQKRTRYKSPLSTGGNWTSPEIVLDVKLKA

SEQ ID NO: 2154 - protein, 550 aa, Unknown
  Description of Unknown: Integrase B2155 sequence
  PTHR30461:SF3,SM00857,G3DSA:1.10.10.2600,IPR036162,PS51737, G3DSA:3.40.50.1390,IPR006119,IPR038109,PF07508,SSF53041, IPR011109,PF00239,PTHR30461,mobidb-lite,Coil, cd00338
MYYQPKIDFKPEEVIDYLRKSRSDDPLLTVEEVLSKHEAMLDEWAEKHLGAVVPEENKYREVVSGETIAERPEINRVLRLIESPRYKAVAVVEPQRLTRGDLEDIGRLMKLLKHTNTLVITPQRIYDLRDEYDWDAFERELKRGNDYLEYTKKILNRGRLLSVSQGNYVGNTAPYGYDKTFITEGKRKCPILVPNKEEADVVRMMFDLYVNKDMGCTTICKKFDEMGIKPPKGEHWSAAAMTKMLENIHYIGKVKWNHRKTLTIVEEGEFRKTRPVAKVGEYLIYDGKHEAIVPEELFNAAQAKKGRNTRQKPNTKIRNPFAGLIWCKCGRAMSLRTYSAHNSAPRLLCDGQTYCKTGSCLYTEMEERVSAILADCIRDFQVRLKNNEGDSVKLHMRLINNLEAKQKELEAKELAQWEAQADPDPAKRMPPHIFQKLNEKLLKEKEEVRQALCKAYESMPEPVDYEEKIAQFTEALNALHNPDVDAATKNRLLKACIERIEYHRDAPQRIRSKQVRYYDKEQKRTRNKSPLNTGGNWTSPEIVLDVKLRV

SEQ ID NO: 2155 - protein, 550 aa, Unknown
  Description of Unknown: Integrase B2156 sequence
  PTHR30461:SF3,SM00857,G3DSA:1.10.10.2600,IPR036162,PS51737, G3DSA:3.40.50.1390,IPR006119,IPR038109,PF07508,IPR011109, SSF53041,PF00239,PTHR30461,mobidb-lite,Coil, cd00338
MYYQPKIDFKPEEVIDYLRKSRSDDPLLTVEEVLSKHEAMLDEWAEKHLGAVVPEENKYREVVSGETIAERPEINRVLRLIESPKYKAVAVVEPQRLTRGDLEDIGRLMKLLKHTNTLVITPQRIYDLRDEYDWDAFERELKRGNDYLEYTKKILNRGRLLSVSQGNYVGNTPPYGYDKTFVTEGKRKCPILVPNKAEADVVRMMFDLYVNKDMGCTNICKKFDEMGIKPPKGDYWSPAAMTKMLQNIHYIGKVKWNHRKTLTIVEEGEFKKTRPVAQVGEFLIYDGKHEAIIPEELFNAAQAKKGKNTRQKPNTKVRNPLAGLIWCRCGRAMSLRTYKNRDAAPRLLCDGQTHCKTGSCLYSEMEERVISILTDCIKDFEIRLKNDEGDSAKLHARLIKNLEAKQKELDEKELAQWEAQADPDPAKRMPPHIFQQLNEKLLKEKEEVRQALCKAYESMPEPVNYEEKITQFSEALNALKDPNIDAATKNRLLKACIERIEYHRDTPQRIKSQQVRYYDQKQKRTRYKSPLSTGGNWTSPEIVLDVKLKA

SEQ ID NO: 2156 - protein, 550 aa, Unknown
  Description of Unknown: Integrase B2157 sequence
  PTHR30461:SF3,SM00857,G3DSA:1.10.10.2600,IPR036162,PS51737, G3DSA:3.40.50.1390,IPR006119,IPR038109,PF07508,SSF53041, IPR011109,PF00239,PTHR30461,Coil,cd00338
MYRPPELTLNPDEVLIYLRKSRSDDPLMSVEEVLAKHETILDEWSEKNLGGLVPEENKYREVVSGETLKERPEINTVLRRIESPKIKAVAAVEPQRLTRGDLEDIGRLMKLFKHTKTLIITPTRTYDLQDDYDWDAFERELKRGNEFLEYTKKILNRGRLLSVSQGNYIGSIPPYGYKKVFVTDGKRKCPTLEVVEDQAEVVRTIFDLFVNQNYGSCKIRNYLNDMHVPAPRGEKWTENGMRDMLTNVHYIGKVKWNWRKNITTVEESEIVTHRPKAQPGEYLTFEGKHEAIISEALFNAAQEKIGHTGRVKSEHEMVNPFAGILFCKCGKALTMKVQKGADGNMSSRFYCANLRNCGTSSCMCNEIVEKVSNTLKQAIQDFTVMLDSGDKESIKRHTARIKILETKLQDLEKREMALWEAQADPDLSVRMPNHIFLALNDKIVKEREQTTFMLEQAYASMPNPKLYRENIQRFSDAVEALNSPEVPAAIKNKLLKACIERIEYSKPKAERIKSSSKRIWVNGHRIRTNPLPTGGNWTSPEISLDIKLRV

(The sequence listing continues in the following parts.)
